United States Patent Application Publication US 2011/0183924 A1 - sequence listing, part 54

SEQ ID NO: 163094 - DNA, 657 bp, Homo sapiens
tgagttaaaaattacatcagattcattgtaactgaaccctcaataacccagtttagattacattggtcagggctgggcgtcgtggctcgcatgtataatcccaatactttcagagatggaggtgggcaaattgcttgaggccaggagttggagacaagcctggcaaacacggcaaaacctcatctctactgcaaatacaaaaattagcccaggcgtggtggcgcacacctgtaattccagctatttggtaggctgaggtaagagaatcgcttgaacctggaagggggacattgcagtgagctgagatcacgctgctgcactccagactgggtgacagaacaagacttgttctgaaaaaaaatacactggttaaatttgttatgcatgtgtctaattgaagagacaacctgaacaggctaagtgtgagcaacaaggctgttgattcactcgggtgcgagtgggctgagtctgaaaagggagtcagtggagggtggcgggattggagctagttttacaggttagggctaagcagtggaaagttacagttaggggacgtttattgcgggcggggaagaatgtcacaaggtacattatcacaaggtgggaggggtcacagggcacagtgtcacgaggttgatcagttagggtagagcatgt

SEQ ID NO: 163095 - DNA, 127 bp, Homo sapiens
gggtcagatggggtttaggaggctgggggcagggttctggaccacctggcagagagtagatcacttttcactgatgcctgcccccttcactccttcccactgctcaggataaaacccacattctaaa

SEQ ID NO: 163096 - DNA, 644 bp, Homo sapiens
agcagttgactatgtgaatctaaagcagggatcagaaagcttttccttaaaggaccgtataataaatacttaagcctttgcaggccatggatttctgtcacaactacttagctttgccattgtagtgagaaaacagccatagacaatatggaaacagatggttgtagatgtgttctagtaaaattctatttacaaaatgggaaacaggcctgtgggctgtaatttgctgacccctgttctagagcccagatgtgataaattgataaatcaattgattcatccaacaaatatgtgtcgagtacccactttatgccaggtactgtttcaggaactctagatatcatcttcatagagtttatatttagaaaaagtaaacaaatagtattcaaagtaagtaaagtatataatattttagattgtaatgaacattaaggagaaaagcagagaagggaaataggaagggttggaaagtggttttgcaattttaaatacagataggaaaggagaaaataaggaaatgaggagggcctcacagagaagatgacctttcagcagagatcgatagggagtagaggaatgattcattcacctatccagagagaaaggattctaggctgaggaaatggtaagtgcaacacgaataa

SEQ ID NO: 163097 - DNA, 545 bp, Homo sapiens
ggtatggagtgtttgcccatgcggtagactctggcaggacagagagggttttcccgggcctttagttgtccaggtcctgtattctcacatctcctctgggctgctgactgcgcacaaacacaaaattcattcctccaatagaacagtgtttggcctggctcccaaaaactgctctcctcacttgcacggctttgattgagtgttaggtgtctctttggctgcctccagtgtctcttatttttagggccttcgttaatgtcttctgtgtgtgaaacatgaaaatggagccatggctgctggaattggaaacttagggtttttaggccaccattcccttatcacatggcgttatcaggttatttagttacagaggttaaaaaaaaagtccaccctaggagccggcgtgtgtggggaaaggagagagggggcagctgagcacctaatgggcagtgaaaaaagatattgtaactaaagctcgggctagtgtcctcagagcgatggcctttcaggtgctggcaggggtctgcttacagctcagcctggtt

SEQ ID NO: 163098 - DNA, 358 bp, Homo sapiens
ttagccttgtatcttgctagtattttctcaatcttattttgaatgttttgtgtcaagtgttaaatcctcttataccacagaatccagaaaatttaaatgcaacagaagtaaaacgaatataaaaattctatggttgttgtggaggggcgttcttggctaacccatagggtgtttgaatgtaaaggcagcttacagaactgctgctagttgaattgtggagggtttcacttttaagagtacatttgagacaaaattgcaattttggaatcacttattcctgcttgttcagtgaaataggagaggggggaattcctgagggaagctgggagatttccaggtgatgatagagtagccatgt

SEQ ID NO: 163099 - DNA, 246 bp, Homo sapiens
tgtaccaattaggaccaatttgcatttcgaaagcaagcattatagcagaattgactttgcaagaaaattctgaccctgaagaaaaagaatcatagtcatgttttattcaaataaagtagacagaaattacgggttaccaaagcagtgacagtgaggatttctggtatatttatgctacacttcgtttaaaaggcagaaatcactcagttgatactagccattatttagagaactcaaaaggtgaag

SEQ ID NO: 163100 - DNA, 596 bp, Homo sapiens
tgtgctgtcagaggttccgagataacgcattatagcataaagaacatgatgaccaggaaagaggctggtgtgataaatattttaatgctatttcagaacaagacaagactgatgacagttagtttgagataaatgggatgttactttagcaataaagacaaatttagaaattacatgcctactaaaaaataagattgtgctggctgggcacggtggctcactttgggaggctgagacaggcagatcacaaggtcagaagatcgagaccatcctggctaagacagtgaaaccccgtctctactaaaaatacaaaaaattagccaggcgtggtggcacacacctgtagtcccagttactcgggaggctgagccaggagaatcacttgaacatggaaggcagaggctgcagtgagccgagatcataccactgcactccagctctaagtgacagagctaggccctgtctctttacaaaaaaagaaaaaggaaaaagaaaagaaaaaaagaaaatgtttcaaatggccaaaggaaacttgcaatttaagagaaggttgactgttctaaagattcttcagccaaagaaaaagagagagagaa

SEQ ID NO: 163101 - DNA, 403 bp, Homo sapiens
ctatcttcctttttgccacttggttcccttcattctccaaaaatttggggacttaactccccaatagtttttatctttatcctacctcctagtaccatcctaggagttgctgttaacaactgttccactaacttagctttttaatttttgtaccttcttaacccttctgaccttctccttcaatctactttagtcatccaccacttaggaccacattttgtatcttgtcatcactcagacattacaccttagcaatcttagattctgatatcccactttctgactacttgcttctaaccttccagcttaaaaattgcattactgttttggggattagctgcttagaggtggggcatacatagtctagaagggactggctataagaaaatagctggccaggctc

SEQ ID NO: 163102 - DNA, 359 bp, Homo sapiens
tgctctcatggttgcactggaagatggatttccccattgcttttatttcttttatagtgtattaaattttttgctctttctgttatgcatacatttcagtatttgttcatgattgtgccttatcttagataagcttgtccaaataagtcatatactctatattcattcagttttctcaaaatgaattccgttcccaactctataatacttttatttccctttaaactttaaaaaaagttatttgtaatgggttttgctgtcatatggtgctcaacatttaactcatgtttttttctgtgtggtgtcccaataaggttatttttttcactcctcttttctttaattcccatccaaccagg

SEQ ID NO: 163103 - DNA, 367 bp, Homo sapiens
tgtaatgcagtccacaaatattcattcaatcatctgttcaacaagcatgtacttagtacctactatgtgccaagcactgttttagatgctgtgcaagtggaagtaaacaaaacagatttaagaccccgcttacaatctgatgtttgtttggctcagtgttctttaaaaatttgaacatgttgccaccatttaaacatcaaaatatctcacataaaaatactgatttccattagttcttcaaaaaaaaaaaatctgatagcactggcctgaatttcagtctaggcacaattatctaggacttaactgactaccctcattgacagggcaagcattctcttcttggccacagtcccaccactctctgtgt

SEQ ID NO: 163104 - DNA, 459 bp, Homo sapiens
agcatggggggactgcccccatgattcaattacctccctctaggtccctcccacaacatatggggattatgggaactacaattcaagatgatatttgggtggggacacagccaaattatcagtaaaatattattaattctgttttgtaaatacagatactaaggctcaaataggttaaaatggctactccaaggtgacagaaatgttaagtggcagagtggggaagtgtagacagggtttctaactccaaattttgtgctgtgtcctccagaacacagacctcctaccacattggttgctcctcaggttcaggaatgtttcttcaaggtaagaaacgtatcctcagggtcagaaacatgttatcaaggtcagtttatgtgtttttttttttattctctacactctgagcatgtgacatagagccttatcctgagtgaggaatggtgaagaataaaatgc

SEQ ID NO: 163105 - DNA, 558 bp, Homo sapiens
attgtatgcactccatacattcacagaaaccgctgctgactcgttggagtacccagtgtagatgttaactctccccctcccctcttctaaagcgctcagtttaacaccatgtccataaagacatccactgtatattagttttttttttttaactttttgagatttctagtattgaatttttaagtctcatttcccagactctgtaaatctagatgaagttatcaaattcccttagttcccagaactctttgggaaatgtgagtgcttgccagctggtcagataattggtggtttattttcatcacagataggaaatgttaagagttatgagaaagaaggttctgaaactggaatgtgttcttcctttaaaagaaaatcttacagtatgggaattcttccacaagttcttatcctttggtccatttttataatgttctatttttccaggctggagtgcagtggtgtgatctcggctcactgcaacctccgcctcccaggttcaagcaattttcctgcctcagcctcctgagtagctgggattacaggagcgggccacca

SEQ ID NO: 163106 - DNA, 293 bp, Homo sapiens
aatatatgatatattagaaatgagtgctttggaaaaaaataaaggagaaaagggggttgggaaagtagttgaatttcagataatatactaaggaaatcctcactaagaaaacatttgagtgaagacctgaaagaaatgttgtgtgtgagtcatgcacttatctaaaagaagaatgatacaggcagatggaacaataaatatgaaggccttgaggtatgtttgtgcttgtcatgttcagcaaacagaagggagtgcagggttgttggagcagaatgagtgaaggcagacataat

SEQ ID NO: 163107 - DNA, 488 bp, Homo sapiens
acttcttctttcttttatcatcctttaccatgtatgacagctttggccttctgtccaagccactgacagcaagtgaatttggcatgtgtgattgggaggaaatcagttcccttactctatttatgaaagaattattagcaaatcattgtcctgacccaagttcattattagagagtttaactagccgtatgagtgaatagctttttatgctgaaggtagagggtatagaccagattcaggccagaaagcttaattacttgattttcttatttgataatgatttatgggctttggggagatgccaaaaccaagcttatgaatgacaaccaagcacacatttgatactacagtactaagaaagatttggggctctctaagcctacagtgaatatcacaatttacacctaggtggagaggaataatgctgaaatgcatttgtacttatcaggaaacaataaaccagaaacttaaaaggcatacttcattga

SEQ ID NO: 163108 - DNA, 640 bp, Homo sapiens
tgtgactgtaggaggaattagaagagttaaagatgcaaattatatattttgacctcttcagggatttggacttaaaatttaaaaataggactccaggctcaatcccctgccttgtgtttaaaaacaaaaacaaaacaaaacaaaacaaaaaacaaacaaaccttagtctcagatgttctgattttctctttgtgtttctgtgtattaaagaacttatccgtgtattcagtccatgtattaaagcatttatcccatgtgttaaagcatttgtttacatatctatctcctgctgtagactgttggttcttcaagtgcagagactatgtttaatttatctatgtattcccaccttccagcttctctttctagcacagtacctatacgtgctagatatgtagtcagtagttgtggcatgaacagattgttgaaagaaaagaaaagattgttgaaagatactgactttagaacatacctaaataagtacttggggataacttgggcatcacccaagttatatactagtatttattataattcatacccataaaacacttgatacatttttcatcagtacaggcttcccacataggtgcacacatctctcttaaacattttgccaaaacctcacacacagaattga

SEQ ID NO: 163109 - DNA, 665 bp, Homo sapiens
tgaattctagtaggagtttattttccttataattttgaaagcattgctcttttgttttctagtttccagtgttgccacagtgccattctcattcttaatttaatcttgaaactttttccactctgactcgggagtgttttaatattttttcttttctttggtgtttatgaaattacacgatggtattccttggtgtgagtttatttttattcattggtctgggctcttcattcattgggcttttctaatctggaaacttacgtccttcaattcttgaaaattttattacttttcttattctattttcttagtttctaggactattaaatgttacatttatgaccttttagtcttcttttctctcctattttccttctgagccttctattttctatttctgctgtatttctaattttcaggaactctttttggttttctgaatattccttttaaaaaatagcatactgttcttgtttcatggatgcactcttttctttcacttcttcaaagatattgaagacaggtttctttgttgtttttttaaagttttcttcttgcatagtgtctgctttctccacatttatttatttattttactctttgtttgggtctctgtttttctttttctcttttttttttgagtcagggtcttaccttgtccccca

SEQ ID NO: 163110 - DNA, 435 bp, Homo sapiens
gtggtttggctggtcacgaagttttccttttccctaggcaatcaaaacagattttctaatctattcatctacaacaatgttttaaaaatggcaggcatgcttgctggcttactgaaaaagagctaaaggtgttttcaggtgaagttagaggtcgtaggaacaggggcagatgttgcagggccttatagatcattgtacagactttggtttatactcagagtgaatttggaagccatttccagattttgagaagagaagtggcatgatctgacttatgtttttaaagaatcacttaaagtgttaagaatcagaattaaaggaacaaagaaaagaaactgaattggaacttcttcagtaaatcaggtgaaaggtattatggcaagttactctgtaaccaggtagttacggtggtgacagtgaaatgttaaggtagaa

SEQ ID NO: 163111 - DNA, 333 bp, Homo sapiens
tgcgtcagctcagctcctctcagctgcttcgggcccttgtgtcttttctgtcggttccagctctgacggtcttcttagctttgacaagtcagcttttatcatactatcccttttattttaaattctttttttttccaaacgggaaaataggtcccttccatagctaatggtgattgtcattcacaaaagcattgaacttctggttgagattggaaaggaaggggaactaatagatctgtgagtgagcccatgatttctagtctacatctaggacgctcacggatacattatttggccagaacatgacaaagtaatcactggatatagaagtgc

SEQ ID NO: 163112 - DNA, 593 bp, Homo sapiens
ccaacacaagcaccacactcctatcagctccaccccttcacacacactgttccctctgaacaaatgcacaaatgaattagaggaggtggaggagaaatcaacttctcatagccaaatagtttcaaaagcaaaataataagaatccttccaattacttttataacataaagaagtgtttaaactgcatgtgagcataacatacctaatataatccagggtagggtctccagaagtatgggtaccccaaacctgccacagtctaagggggaagtaaggacaaagctaataaagccaaaggatttgtccctgggggcaggagtggaagcactcactgactgccactgcatccaggaaggaggcacacattggcctctgagcctggcgagagcagcaatgtaccacgggctcacccactacttgggaggctgaggcacaagaatcacttgaacccaggtgatggaggttgcagtgagatcgcaccactgcactccagcctgggggaaagagcaaaactctgtctcaaaaaacaaaaagaacaagtgctcactgatttgccaccatgtccccacagcaagaagccccagttacacaac

SEQ ID NO: 163113 - DNA, 510 bp, Homo sapiens
acacaacacatccgttacagagaactagcaggtgagctattttccatccgaaattgggtataagcaaaaaaggcagagtggcacagcgcatccactacacatcaacttataaggtgaggactgtagctgggcgcggtggctcacgcctataatctcagcactttgggaggccaagatgggtggatcacctgaggtcaggagttcaagaccagccgggccaacacagtgaaaccctatgtctactaaaaatacaaaaattagccaggtgtggtggtacgcccctgtagtttcagctactcaggaggctgaggcaggagaatcacttgaacctgggaggcagaggttgcggtgagccaagaatgcgcccctgcactccagctctgggtgacagacgtgatctagatcgcagactctgtctctaaacccaacttcactttacctcaacccccaactcagccctagagaacacacattcacatgccagtcggtgatcctcaggaacagctacac

SEQ ID NO: 163114 - DNA, 674 bp, Homo sapiens
acacaacacatccgttacagagaactagcaggtgagctattttccatccgaaattgggtataagcaaaaaaggcagagtggcacagcgcatccactacacatcaacttataaggtgaggactgtagctgggcgcggtggctcacgcctataatctcagcactttgggaggccaagatgggtggatcacctgaggtcaggatttcaaaagcaaaataataagaatccttccaattacttttataacataaagaagtgtttaaactgcatgtgagcataacatacctaatataatccagggtagggtctccagaagtatgggtaccccaaacctgccacagtctaagggggaagtaaggacaaagctaataaagccaaaggatttgtccctgggggcaggagtggaagcactcactgactgccactgcatccaggaaggaggcacacattggcctctgagcctggcgagagcagcaatgtaccacgggctcacccactacttgggaggctgaggcacaagaatcacttgaacccaggtgatggaggttgcagtgagatcgcaccactgcactccagcctgggggaaagagcaaaactctgtctcaaaaaacaaaaagaacaagtgctcactgatttgccaccatgtccccacagcaagaagccccagttacacaac

SEQ ID NO: 163115 - DNA, 301 bp, Homo sapiens
tccttttaaaacaacattagatgttaacataaaaataaatcaaccagagagcctcttattaaatttcactgatccttttgctaccatcatcttacatacttcctgatttagaaggagcattttaaaaactcatagattgaaagagtttaatacatttgttaaatggtttcttaaaaaactcaaaatggctgggtatggtggcttatgcctgtaatcccagcactttgggaggcagaggtgggcggatcacctgaggccaggagattgagaccagcctggccaacatggtgaaaccccatct

SEQ ID NO: 163116 - DNA, 408 bp, Homo sapiens
caaatgagtaaatctggcacatagtaacactatcactaactaacctgttggttactatgtgccaggcacgaagtgttttctgttcactatcccacttatttctcctttaactcctattatcctatttacagatgggaaaaattagaaacaagtaagttttgtaacttgttcaagagccacagtattaggcaggatttgaacccaggtctatctgaaggcaaagcccatattcattacctctactctaaaaacctccaattagaaaaagtagttttaaaattattttcaaagtatttaccatgcacatgtgaaactggatttatcagtgtaataagtgtgagcaggggatcagcctgcattctggttaaacagaataattaatgtgaaggcccagattagtttgccaag

SEQ ID NO: 163117 - DNA, 458 bp, Homo sapiens
caacccccagtctctctactcacctgcttccactagccccagggcccttgcacaggtgcttgccctgtcctgaaatgttctcctctgcccctctgtgctgctgttagaaccaactggcaggttccttatctcacccacagcagatccggctgcatgtcccagagtgtgtgtgactgcctccagaatcacctagaatcacaccttcagccaatcctccccaatcacccagaacttccaaccatgaccagggaagtgtatccatccacagatacccacctgctctccggggctgccaaggagaaaagagagaggctgacataggggaggaagaacaccagcctttatctgtgcccaccgtatgcagagagttctacatacacggcctcatcgagtcctcactgtgcagatgaaaccactctggttcagggaggttacaggaaccagtcttgaaccaagag

SEQ ID NO: 163118 - DNA, 413 bp, Homo sapiens
aacatattgattcataacactaaatgtggtgatgtgtcatttcaatttgaataggccactttacctcttgcattgtcaaactgaagcagcattacctaaaagtgtgtccttattctaggttaaggaggttaaaagttaaaggttaaggttagcttagaagcatcatctgcctggctgcttgacttgaaactgatcaatgtaatgaaaatctgttttacagatgttgtttttaatatatttggcaggatttaggcagctttaacattagatgtatgctagtaaaaaatatttatttatttaaccagaacaacacctttccttttatatttaaggtagaaggcttgtgggttatggtattttggcaaagaacccagaggcagaatgtgttgatgatctttccatatggactcaaa

SEQ ID NO: 163119 - DNA, 160 bp, Homo sapiens
agaagtgtggaatgtttgttcttcttgtggtgtgttagggaggagtgtgtccatctgtcagtgtagtacagccctccatatgtggattgacagccagctcattctaatatgtttttataatacttgggagaagtgactgtggttgttatggttgaaggat

SEQ ID NO: 163120 - DNA, 365 bp, Homo sapiens
atacacgtgatgcggctgctaccataggagtcgtcgactgtgggtaaaaaagcaaccagaattacaatgcttttccttcttgtggtctgtactttctcctcttctctcgtgaaactggaatgaatggggcccagagaaaacgaagcacagaacaagagaaggatagcaagaagggcccaaacaaaacaagagcctcaaatgggcaaagcttttgttttggggaaagggatctcggttaatgctcctgtttggtagaaatcagacataacaggaatgaggttagggagtggtaaagtggtaaggggcttggctccacttccaactcagtgtttttggttaacatgaataggtaaaccctaaaggat

SEQ ID NO: 163121 - DNA, 395 bp, Homo sapiens
aatccaagttcaatgtttaagtgacttctggatacttaaatcagtagactgaatgtcagttctacaaggtcagagacacagtctcttggggtcttttcttcttcctttttctattcagtgctgcagccccagctcctagcaacatgcgtggcacacggtaactgatgaacaactgctgactacaggagtggcgtggctcactcacagggccacagagcagcagcggatttgacaacttctggtgctaagtgtcatgtttgtgataaagcagtagagaaaaaaacgaattaaccctaagtaaagtgcagggctgaggagaagacagtggttaaagcaccaaagtctcctcctagagagagaaaagctatttttttattttctttatttatatatct

SEQ ID NO: 163122 - DNA, 545 bp, Homo sapiens
cagcttcagtgtctttatctctgttttctgttgttacaaggaatggtggtaatatttgccaagtgactagcaaggtttataaaggggtcattgatattgtcattattattattaattacttactcactgctttggcagtttatgtcagcaaggctgtctgtaattgagtcaaccataatagtaaggagatccatgctttttgactttggagatgctgctcagtgttccagactgagtatgctgatgtgggaggggactgtctgagttcatcctggccatgggctccagttctttaatcgaaaataaaaaaaaaagagggggaagagagagagagagagggagggagagagagagacaaaaaaccgccaggaaaactgtctacagaggtcatttagaaatacaatgccacgaacaatatcacaaaactggtattatttaaattctgacttggccagtgttagactcgcagtgttattttagcaatttgaacaggcccaggagtgcaaatatttgtaattaaaggcttccaggagcagccctgtcaa

SEQ ID NO: 163123 - DNA, 400 bp, Homo sapiens
tgagaagataaaatttgagcaaaggattggaggaggtagggaattagttacatggctatctaaaggaaggacatttcaggcgtggggaactgcctgggcaaagatcctgaagtgggcgtatgtctggcatattcaagggatagtaaggaggccaatatggcaggagtagagtgaaccaggaggaaggcagtaggagatgaggttcacaggtaatggatgacagatcaagacttctgggctactgcaagggttctttctctaagttagggtttctcagtcttggcactgttgacatttttgatcagatgactcttggttgtgggggaatgctgtgtgcattgtagggtgtttaggagcatcggtactggctagcatccaatagatgccagttccaccctat

SEQ ID NO: 163124 - DNA, 534 bp, Homo sapiens
ccacctcggactcccgagtagctgggaccacagggaggtgccaccgtgcccagctaatttttgtacttttctgtaggacaaggtatcatcatgttgcccaggctggtctcgaactcctggactcaagtgatccacccaccttggcctccgaaagtgttgggattacaggtgtgagccactgtgcccagcctaagcatccgtttttaaatttaaaataagatggtctctttttataaaaggaatcataattataaacaaaaagttcattggttagtatgggattgcagtttgcctagaagacgttttatatacccctgactaaacagtagaattgtatgctgaccaagatcgtcctcatctattcagtgcattatgatatgacatttatggttcctggcaagataggtatgttcagctgcactggagacatggctttaaacttattcggaaagggaggtgtccagaatgcaaacagctcttaaaaagtatttggaaataatttattcaatataaggtcatctgatcatttgatta

SEQ ID NO: 163125 - DNA, 278 bp, Homo sapiens
ccacctcggactcccgagtagctgggaccacagggaggtgccaccgtgcccagctaatttttgtacttttctgtaggacaagggtttcaccatgttggccaggctggtctcaaactcctgacctcaagtgatccaccgaccttggcctcccaaagtgctgggattacaagtatgagccaccgcacctggctgaagcttttctttatagatgtcagcatctataaattggtaacagagagatagcacctactttataggagtgtgggtttctctgggtt

SEQ ID NO: 163126 - DNA, 237 bp, Homo sapiens
gtggaggctacacttgtcagagtggctctggctgggatgagttcaccaaacatgtcaccagtgaatgtttggggtggatgaggcagcaaagggcggagatggacctggtggcctggggtgtgggggcaatgaatgaagcgaacagattttcgttcattttggttctcagggtttgttataattttttatttttatgggctttggtgagggaggtaggtgtagtttgtgttatatttc

SEQ ID NO: 163127 - DNA, 404 bp, Homo sapiens
gtggaggctacacttgtcagagtggctctggctgggatgagttcaccaaacatgtcaccagtgaatgtttggggtggatgaggcagcaaagggcggagatggacatggtggcctggggtgtggacctggcctcagtggagcagcacattaacagccaccggggcatccacaactccatcggcgactatcgctggcagctggacaaaatcaaagccgacctgcgcgagaaatctgcgatctaccagttagcctcctcttcctctatccacttaaaggcacaagtgtattccctattttccctaccaaaagttgggaccccttcttaactaattccactttctcatcctcctaatctacttgttggaagataattctggcatttcttcagaaatgggtaaaagaga

SEQ ID NO: 163128 - DNA, 474 bp, Homo sapiens
agctgagcatgtgagggatctaggttgtgcccttcttatgagactctaatgcctgatgatctgagggtgaaacaggaacaggttcatgctgcaactatcattcccctcttccaggtccatggaaaaattgtcttccacaaaactggttcctgataccaaaaaggttggggaccactggtgtggcacatacagtggacacaaatgtactgtgtgctaatcatgggagaccacaaagaactgctaagtgtttaaagggcatggcaaaaagagaactctactatcccaaatctgccttgaaaccaaatgccagtcacagtaaacattattcgtcacagattttgcttgggatccataacctaggagtgctttgtaggatgatctagatagcctaggactttttaacgctgttcagaggcacttttgtcttcccctccacgagtactctgtagcgagcaatagagcgctcatccccag

SEQ ID NO: 163129 - DNA, 578 bp, Homo sapiens
tacaaaaaataaaaaaattagccaggtgtggtggcacatgtctgtagctccacctactcaggaggttgaggcaggaggatcatttgagcctgggaggttgaggctgtagtgagcccagaccatgccactgcactctagcctgagcaacagagcaagacctgtacctaacaaaataaaaataaaaaaaacaacacagatgtattattgtatagatctggagatcagaagtttcaaatgggttggcaaggctcctttccttctggaggctctaggaggagaatccatttccctgtctgtctcagcttctagaggctgcccacattccttggatctagcccccacatcactctgacctctacttcatcacatcaccttctctccctttgtctcacatttcctttttttataaagatccttgtgattacattggggacatcagataacccaggataatctcccaatttcaagatccttaatcacatttgcaaattcccttttgccatataacgtaacagtggtaggttctgaggatttgcatatggaaataatggaggccattatttagtttaacacagtca

SEQ ID NO: 163130 - DNA, 425 bp, Homo sapiens
aagtgagagcgagggaggggtgcttcctggctgcctgtgcccacctgctgccatccgaattcctttgatgtttggcctgctgagtcatctgcaagtcattaccccgcaacagttgctgtttttcctttttaacaatgcatttgtttcgtaccattgagccattatgttccgggccaatggattttgtggtgtttccccagctacacagtcctggggaatattttaaatgccatttaataaaaagttctacacaatgccgttcccgtgacatgttctgctcaaagccgtcacgagctggtattcaaggggatggggttcggctgaggacccttttaggtgtgactgtgctgggcagaacgccctggcatggctccccagggcctgatgggactgtgcctgtgctgggcagtgccccctcccttggg

SEQ ID NO: 163131 - DNA, 412 bp, Homo sapiens
tgatgttgataaaaacaaatttaatataaaaatgagatacaatgtatagagacctaaccctgtcaacagcaactaaactttactttcatgttagaaagttttgtgccatgtagatttatggaaaatgtgcttaattgcctctagaaaataatgaagaggcttcgtcacctccatagaagatcctgtgacactagcctaattctgacacatggctcctgttttccattttgtttgtttttttatgctgatcctctctccagagatgtgatgtggattgattaacttgtaatataaagttctatggtttctgaaaatgcagagcaaatagagatgaagagtggtttgtgatttgttattaaatgatcttcccttctacatttaggactgatttttactgtagattttttttttt

SEQ ID NO: 163132 - DNA, 134 bp, Homo sapiens
tttttcagcccagggctgtctgatgatgcttctgccaggtgccagtgttctctgccagtgctgccagacacaggtgcttctgaacacttgactggtgattattgcaactgggagctgagtctttcaccttttaa

SEQ ID NO: 163133 - DNA, 246 bp, Homo sapiens
tgtgtttagagatgatggacatgtttgaatgctggaggagtgggagagactgaagatgcagaaacaagaaagccgtttcctcacggggtgcgaagcaagggatcctcagctcagaggtcctcgttcacccagcaagtgacttctgagtcagggcctgtgctggggcagggagctgtagcccagaactcttcctgaaggtccagatccactggcctgagtcaccactctccttgtccaactcataga

SEQ ID NO: 163134 - DNA, 348 bp, Homo sapiens
gaaactagataattccaggtatgtgaaagatagctcactgtgtcctcgtaattctctcatcttgctaattgcattgtatttgtttcatcatcctatccctcagattagttccttaccctggctttactatttattaaagatagtagaggcatttcctatattaaaactttttgaagtcaaaatggaactaatataccattcttccctatgaagcagtcccttgccaagacttcttacttttacgtctcttcacagcctctcatgtcatccctttctttccatttccattgcttccactctagtacttacccttatgcttgtaaacctgaaataggatagtaaccttga

SEQ ID NO: 163135 - DNA, 304 bp, Homo sapiens
ggtttactctgaagggtggtcagggcttaagcagattgggaggaaggacaagggcgtttcagggctattaggctagtgaagaaggctggagagggcagaacttgctctcagcatcagcaagtaaaccatctgactggttcataacaagagcacagggtaagcctgggaagctaggtttgttcattagcagtaaggtcaacttaaggtttgaaaacaactatttttctttttaaaaaatgagcctctattgtcttccagccttatgccccagaaagaaggtggggaggaagaacctaatgaaaaa

SEQ ID NO: 163136 - DNA, 167 bp, Homo sapiens
ccgcctctatcttcctgggattataggtacgccaccaggccctgcttactgtttgactttgagcaagtgtttgactttgccaagccttagtttccttcaatgtaagcctactgtctagatgataggcagttgggtgctgtgaaaactaaatgagggtaatttgtatg

SEQ ID NO: 163137 - DNA, 640 bp, Homo sapiens
tgcaggtgtgcagggtctggtctatatgaccacgggacaggtcccaggtatatgactgacaggcctgagggaccagaagcccttctccttacccaagcccagatggagaaaacttcaactgtgagagccctcctttattcccaaacggccatcattgtttcccttccctgtggctctttataaagaaatctgggggagtaagaataaatcgtttctagatcaaagagaaacagcgaaaaccaggagaaaaggcggtagccaatgtacccactccattcagatgaatgcagtccaaacagaaagacagccagtcatacatcactcagtgacagtgcaatgcaatacttccaaagatctgattaggcacttctgtttttcttattttaagcttatgctttacaaagtaagttgttgtttttcgttttgttttgttttaaacgaatcgcctttaaagtagtgggggcaaaacaccagagcttaggcaacccctggtggaggcttttataattcctctactttttggctttgacagcatgagggttgcctgctctaagccctgcctatccatccacccagaactgaagtggctgaatcattgcctggcatgacaggaaagtcttgggcttgaggggaggaaaaa

SEQ ID NO: 163138 - DNA, 499 bp, Homo sapiens
ggggttctctggcgctgggctcttcggtctaggtagggatgtgataccgacccaggaaaggtgtgttcatcagtttggttttgcaggggacacacttcagatcatagcagaaggtgtagccaagttaccattttgtgatttagtttaatataaagtgtgtctaattatggtttcttaaatagtcagttgacagatgatgtacataatgggaaaatacttaaaattgatttatgattcacagtacatccagaatttgctgttagaatagctctttgaggactttataattctcactgtctttgtaatatgtgaaaggtcaaaatggtggttcttaattggtattattgtcttagctatctgaaaccagcttctgggtttcctgaggcacggcaggaatgtttccctctgcaaaccctgcttctaggtgatggagctttgccacattttctctttcagttgtgggatagccacatctctttgttagttggttttatctgta

SEQ ID NO: 163139 - DNA, 297 bp, Homo sapiens
atgtccatttctctccaaccatcggctcaagtgacaatgataagagtaagtagacgtggtacttacaacccgtcacttaaaatgaccctcaggagaattctgagcataccttctgaaaacagccatttgcattctgcatatttggagagcagacacctactgtcctcagccaagagatcggaatgcacatcattctcatcctcctcctctgaacagttaccgggcagtgtcagggggaccaaggacagcatttactttccagtgagttatccaaataccatcagccaggcctcagga

SEQ ID NO: 163140 - DNA, 904 bp, Homo sapiens
cagagctcatcaggtaagttcaaagacacacctgtcttcccagcattgggaactggattggggtctactcagaggcatgatgttgaccagattttatgaaacacccaagaatgtagagaacattctgtctttaaaaccttgaattcaaaacatatcagagagagatttacttcccttatatggatgtctgtgttctcattaggagagaaacaatgaaaaatgacttttcacaatgcctgccttagccgtgaggctcagccaacccccacttctatgtctcagcatttaaagggcaattgaagtcccactccatgctatatactctcaagaggttttctcatttacccttcagaacagctctgtaaagatggtatggtcagtcccatttcacagatgactaagctcaggctcacagagcctaagtcacccctccaggtaagtggcagggttggaatgaggttctattcctcaccctccctagagaaccctgagcagcttccgttttagaagatgggtttccagggcttgagaaatggtcagattcccccctgatattgtggccccacaggtcctcactccacaacccctctgggtgatgaggaagacagaagaggtgaaatcctgcgctttgtgccatgagatctgggtgtagggccacaggagttagctaatccttgaagtggtgagtgggctcaggcagaagctcaagtgttggccttgggacaggtgagctggagagaaggaaagtaacatgcactgaaccactgtaagcaaatgcaatttacagctcatctcctttaatcctaacaaccatttaagatactcatcattctgaccattattcagatcagtgtgctgtctttaggggagtttatgtaagtcagggaaacaacctagttgtcct

SEQ ID NO: 163141 - DNA, 533 bp, Homo sapiens
tcgtttccgaagggctttgtatttccacagggcttgctgtccttttatttttgtcatctcaggtctcatcattgtcatcgtggttgtcttttctgaggtgaacgctcccttgtttattttttcttcctgtcatttgcaatgtgaatcatgctgtctttgttggggttattgttctattgctttatagatttgttcattccagttttattctcagacacacaacttctgcttagatagttcagagttcccataatcctgtcttagaaaaaggctgtggtcttagggaagtggaatgcaatttcaatttagaaaatggttggaagcaaatgctcccaagaagctcaaatttcagggtgcttttaaacaaagttcaagagaattctcaggcctctctgctgattgaattgtctttcttggctaatctatttactcaatcaatgtcagatagtgcaagggtaattttgagtttgggataaggattaaacgatcaatccatgtcctgttttccctgtggaaaagtaggtaccgggagg

SEQ ID NO: 163142 - DNA, 501 bp, Homo sapiens
gctaaagtagagcctggggtgatggtcagggtagccacttgagcggccaaccatctcagtttgttgggaaaccggcagggctgggacaaggagttttcagtgcttaaactgggaaagttccaggccaactgggatgagctggtcaccttagtgaccacagatgtgtacttgtggatgtcccctgaaaagaatcccattctacatcccccaatcaaaggggtcaggatctagaaccgtttttagacctagataaggattccaaaaggtgggggcagagaagtattggggaacgggctaggaatagctagcagcatcttagaaggagcccagacttggcaaagagaaaaagaatatgtggcacttctctgaaaaattattcctgtcctctaaatattcctgccattcctcataccccaatggccaacctccaaacttccctgactgagtgcttgctcctggctccttttcacgtcaggtggcctttgcagggaggatcagatg

SEQ ID NO: 163143 - DNA, 1852 bp, Homo sapiens
aagcgtcattcagtcattcgatgctgcaatacttcaagagggcggctgtgggccatgcaccaaccccacccacgttcacccgggcccttccagctccaatccagggggtctggaggatgcctgcaatgtccccttttacactaaagaaaacaagcgccagtcaggtggaagtggcctctaactagtcactccgctgggcacatggtctctgtagtcagagactcccctttgaccttgcccttcactttagaaatgcatatcacaggctacttcatccagaccagaaaggactccagtgttttcagttgggagaaaaagccctcatcagaaatgggatcattttcctggccccatcagcccttcgaaatttggcccagctccctaaaggtgtgtttcaggaaagggtgcaggcacgcctgtaacctggcccacacctacaagcttggggctccaggctctgaatatctggggacgtgcagtgtcgggtgacttcttcgtcaccacgctgtgttccttctccgagtgcccacctactctgtccagcttaaaggatgaattgcacagatgcaaacatttcccacagaggagagtgaggggcatgccaggatcactgcaagggtccctgcagccaggtttctagggatcaaggtctctacaggactctcccagcaaaagcaggtcccctcgtggaatgggtctctgagtgccctgttgaatatattctccatgcctgctttgaaaaaatcccctttgtctctctttggttcatcgtgatgaaacctcttttaattataccttcactggtgttctgcacggcgcatgctgcctgataaatggagattgctttgctcttttgtttatagagaaaaattaaaacatttcttctgagctttgcatatttttctctaatgccttttcaaggagacaagatagaaggttttacatattatgtgcttttctccctctgacttattctggacggaggctggtgaaagaattaagctgcttgtctctgctcagaaagttgcacatgtacttccggctgccttctgccaccccggccacctctctagacacatggcgctggagtgatgcctgtgtctctgagagccacttgggacatagcatctcctccatgggctagtccagacaagccttccagaaagagcttctctgcagtgttgatttccttcttttttaaaaatatgaaacaccaacggtcattatttctcctaaatgtgagccagaaacttatttctcagcaaagggctaaggtcatattctgtcctcaacagccagggtggccgagggccctggggaggccttttttgtttcgtgttaactttgacattagcaaaacttaaccaaggctccgatctcccttcaggctcttgagctcttctccccgggtccactgagcagggcatgcccttgacacccatccaccgttccttacttctgaccccataagtgcaatgaacattagaaacgatcattctagcccacagctgagctgggcttaaagaggcgagccctcctagagtttgcaaagaagctgagtctgggctgggcacagtggctcacgcctgcaatcccaacactttgggaggccgagatgggcggatcacctgaggtcgggagtttgagaccagcccggccaacatggtgaaaccccgtctctactaaaaatacaaaaattagccaggcatggtggcaggcacctgtaatcccagctactcaggaggctgaggcaggagaatcgcttgaatccgggaggtggaggctgccgtgagccgagatcgtgccattgcactccagcctgggcaacaggagtgaaactctgtctcaaaca

SEQ ID NO: 163144 - DNA, 452 bp, Homo sapiens
ttggtttttaccagaaagagaaggaggtaagaacatccttatcggaaaacccatactgaacaaagtaagatggtatggatgaaaagaaattctctgtttaggtaaagctgacaagacagctgttgtggtgtgagctttgggtttgttggagccttttatgactatttctgtgtctttgcaaacattcttgttagtacagtgctgtgggtataagtacaggctctggtgtctgatggtctaagttgacataatcaagctgtgtgactttggggaagagacttaacccctcttgtcctgaagtaggtttgcctttcacatgaggattagcatagtagcacttggggcagccgtactaactgcagagctccatgtgaacacttaacgtcaagcctgctaggaagctgatgcttatgcttctgtccccctagatgtggccctgggtctccctgtgt

SEQ ID NO: 163145 - DNA, 715 bp, Homo sapiens
  misc_feature (1)..(1): n is a, c, g, or t
nctaggagcctcctaatgcagtcttctgcacagtcctggggactgactgactgaatcacacctctggggctgggggctgctgacatgtgtgcctttccttggctgcttcttctcctgctgctccaggagggcagccaaaggagactctggagatggtgtggatccgaggaagtggttgcggtccttcaggagtccatcagcctccccctggaaataccaccagatgaagaggttgagaacatcatctggtcctctcacaaaagtcttgccactgtggtgccagggaaagagggacatccagctaccatcatggtgaccaatccacactaccagggccaaatcctaactatgcttctgagaagccttcaacagccttctgcctcctggccaagggattgctcatcttcttgctcttggtaattctggccatgggactctgggtcatccgagtccagaaaagacacaaaatgccaaggatgaagaaactcatgagaaacagaatgaaattgaggaaggaggcaaagcctggctccagccctgcctgactgctccttgggaaccccagtcctgagcttggtttcttcccagcacccagagaatccttcctcagctctcttctttccaggggaaggaggtgctcaggggtgggtatccagagagccatacttctgagggaagactggctggcaataaagtcaaattaagtgaccacaac

SEQ ID NO: 163146 - DNA, 988 bp, Homo sapiens
  misc_feature (1)..(1): n is a, c, g, or t
nctaggagcctcctaatgcagtcttctgcacagtcctggggactgactgactgaatcacacctctggggctgggggctgctgacatgtgtgcctttccttggctgcttcttctcctgctgctccaggagggcagccaaaggagactctggagatggtgtggatccgaggaagtggttgcggtccttcaggagtccatcagcctccccctggaaataccaccagatgaagaggttgagaacatcatctggtcctctcacaaaagtcttgccactgtggtgccagggaaagagggacatccagctaccatcatggtgaccaatccacactaccagggccaagatggctgtcagagccccagatcactgtgaactttgagagttctggggaaggtgcctgcagtatgtccctggtgtgctctgtggagaaggcaggcatggatatgacctacagctggctctcccggggggatagcacttatacattccatgaaggccctgtcctcagcacatcctggaggccgggggacagtgccctctcctacacctgcagagccaacaaccccatcagcaacgtcagttcttgccccatccctgatgggcccttctatgcagatcctaactatgcttctgagaagccttcaacagccttctgcctcctggccaagggattgctcatcttcttgctcttggtaattctggccatgggactctgggtcatccgagtccagaaaagacacaaaatgccaaggatgaagaaactcatgagaaacagaatgaaattgaggaaggaggcaaagcctggctccagccctgcctgactgctccttgggaaccccagtcctgagcttggtttcttcccagcacccagagaatccttcctcagctctcttctttccaggggaaggaggtgctcaggggtgggtatccagagagccatacttctgagggaagactggctggcaataaagtcaaattaagtgaccacaac

SEQ ID NO: 163147 - DNA, 1124 bp, Homo sapiens
  misc_feature (1)..(1): n is a, c, g, or t
  misc_feature (463)..(463): n is a, c, g, or t
nctaggagcctcctaatgcagtcttctgcacagtcctggggactgactgactgaatcacacctctggggctgggggctgctgacatgtgtgcctttccttggctgcttcttctcctgctgctccaggagggcagccaaaggagactctggagatggtgtggatccgaggaagtggttgcggtccttcaggagtccatcagcctccccctggaaataccaccagatgaagaggttgagaacatcatctggtcctctcacaaaagtcttgccactgtggtgccagggaaagagggacatccagctaccatcatggtgaccaatccacactaccagggccaagtgagcttcctggaccccagctattccctgcatatcagcaatctgagctgggaggattcagggctttaccaagctcaagtcaacctgagaacatcccagatctctaccatgcagcagtacaatntatgtgtctaccgatggctgtcagagccccagatcactgtgaactttgagagttctggggaaggtgcctgcagtatgtccctggtgtgctctgtggagaaggcaggcatggatatgacctacagctggctctcccggggggatagcacttatacattccatgaaggccctgtcctcagcacatcctggaggccgggggacagtgccctctcctacacctgcagagccaacaaccccatcagcaacgtcagttcttgccccatccctgatgggcccttctatgcagatcctaactatgcttctgagaagccttcaacagccttctgcctcctggccaagggattgctcatcttcttgctcttggtaattctggccatgggactctgggtcatccgagtccagaaaagacacaaaatgccaaggatgaagaaactcatgagaaacagaatgaaattgaggaaggaggcaaagcctggctccagccctgcctgactgctccttgggaaccccagtcctgagcttggtttcttcccagcacccagagaatccttcctcagctctcttctttccaggggaaggaggtgctcaggggtgggtatccagagagccatacttctgagggaagactggctggcaataaagtcaaattaagtgaccacaac

SEQ ID NO: 163148 - DNA, 839 bp, Homo sapiens
ccaagcctggccaaaccctgtgtttgaaggagatgccctgactctgtgatgtcagggatggaagaatacaccactgtctcaggtgaagttctacagagatggaaaattccttcatttctctaaggaaaaccagactctgtccatgagaggagcaacaatgcagagccgtggccagtacagctgcactgggcaggtgatgtatattccacagacattcacacaaacttcagagactgccatggttcaagtccaaggcagccaaaggagactctggagatggtgtggatccgaggaagtggttgcggtccttcaggagtccatcagcctccccctggaaataccaccagatgaagaggttgagaacatcatctggtcctctcacaaaagtcttgccactgtggtgccagggaaagagggacatccagctaccatcatggtgaccaatccacactaccagggccaaatcctaactatgcttctgagaagccttcaacagccttctgcctcctggccaagggattgctcatcttcttgctcttggtaattctggccatgggactctgggtcatccgagtccagaaaagacacaaaatgccaaggatgaagaaactcatgagaaacagaatgaaattgaggaaggaggcaaagcctggctccagccctgcctgactgctccttgggaaccccagtcctgagcttggtttcttcccagcacccagagaatccttcctcagctctcttctttccaggggaaggaggtgctcaggggtgggtatccagagagccatacttctgagggaagactggctggcaataaagtcaaattaagtgaccacaac

SEQ ID NO: 163149 - DNA, 492 bp, Homo sapiens
gaatgaggtcccatgcacagttgaaggatggtgaaggtggagaattttactgaacaattaaaatggctctcagtggagagggttgctggagaggagactggaagggcaggtagtcttccccatagttaagttgtctcttccctgaagtagggttgtttccccatctactgactgagtctggggtctttataggcacagtctggggagtgcatgctgattggtttgtgagtatgcaaaataggttaaagcaaacacaccactcaaaggtgggcataacagtgtagaaaaccaattaggaaagagtaggtatatgtaaaataggtaaagggtgggaatcaatcagagaaaagcacgccaaatgggagaacaagttctaaatctggtctgaggattaaacttgtagcttggctttcaggctttggcttggaggtgggctgttgctgtgtactcgcccctatctgcctaggcacttggctgcctcctgtcactgtc

SEQ ID NO: 163150 - DNA, 417 bp, Homo sapiens
gtttaatacatttttattaaaacacacatatcttccacactagcacctgagtaactggaaatcttgaacaacatggagtactctcggaatagctgatattcgatagttaaaaaggcacataaccactatggtgacatatgatgaaataaatactgctcctgcaagaacacttataaaatgaaggttttatactcattaggacatttcctggcctgccttcaaaataacaaagccactgggcttctaaattcagtctaagtgccattactgcacaaaagtgaagaaaggaagggtgtcattcccattgagttcccatcaagcacgacaggaccaaatgtgcccacatcaagcgtagatgaacatgttacttgagcctcttcccctagagccctcttcccctagagccaggagtcaccc

SEQ ID NO: 163151 - DNA, 502 bp, Homo sapiens
agaactttggcatttatccacttacactgagtaagcttaaggtgaaagaagaaagatcttttttcttaggggtaattactaaatttctactgtcataatacaagtcatttttttcctccaagataaagctaaacagttataggaaactgatccaaaaaaagattcttgctcttcacattaaaacatatatctttactgtactctgtggcacacagtatcaagacatgaggactctgaatcatagtgcttatttaggaaacatcaatgatgatactcaacatgatgataaagtctacagaatgcttggggctatcacactagcatctgtaaaacatggtacaacatttagaaacatttaattaatgccacataatagcacatatttgccttattctcttgattccaaagatttccacggagcaccacatctactctacacaacaacacctctttttggattttctgtggcaatgtgtgtttatagtaaagttcaggaagggat

SEQ ID NO: 163152 - DNA, 203 bp, Homo sapiens
cggaagcaggaagagatacgataaggtgcctaagcctaattctagcatcaaacctcttcgtagcagatttgtctctgcttctggaattaacagaaatttaatattagctgattttcttttatatatgacctttgttcttcttcctatttggaactttctcttttgagggtgacctatttttaatttgaagcatttgttttgtc

SEQ ID NO: 163153 - DNA, 967 bp, Homo sapiens
cattcatttaaaaaagtcttttaattttatttatgtcattttcaccaggaaaatgccaacccactttgatatgatagtgtccataagttccatatccaacagctttaactggtttcctaacctctgtcagagaatattaggactgcccctatcatgttttcctgtgttctttcggccaatggaaaaatgtaatttcaaaacatgtatctattattatttttgctagacagatgtcttcttttctctcttcaaatggccaaatttcatcaggttttgacttcaagaaatacagctacactaagttccctctcattaaacctgcattaatgttgtgcctagtgcagattaagaagagaaaatccaaaaataaataacaccatccttaccctctgggagctcagtctcaaaactaaatttcctcttaaaacaacaacaaaaggatgatgcattgtctggatttctattttttctttacatttctgtatttcccatattttctacagtgaacatgcattaaaacagaaaaaaactatatacacataatggtggaggtgaaaaaaaactcaccagaaagtaattaagtctcagattactcaatggaaatgcttgtgaaggtagcacgatttctaaaacactgtcacatacattgtctcaacgccaagtaactctgtggaaggtaggaggaaacatcctcaatttaaagacgaagaaacaaattaaggcacagagaaattacatgactttgatttcctcagggtcatgatgttaggaaatgacagtagcagcatacaacctaaatcttaggaggtccaatagacttaactcatccctctagtctcaatgatcagactgacaccctgctaaaagaaacaatgggagcctgggagggtaaacgggaagctagaggattgcagaaaacgaaacagcagtaaaaataaacctttagggacttggatagggggaaaac

SEQ ID NO: 163154 - DNA, 602 bp, Homo sapiens
gagatccaatcagggagaacttatttcaataactgagaaagaagaactaagacaataacacaataggtaatatacaatttctgaagtattcttgacatggataattttgtagacccttgagtttttttaaaataaatataaggaaacgggaaaaaattcatcttccaatacccactggaaaagaaaataccgaatatatatttatgccaaaataaaactttatcaacattttctggcagagctcataaaaattaattatttaatgccagtgtacactcccacaaataaagataaactcttcagtgccaacactacatcaatgagaaatcaattaatcaagaaaggcttttaaacaaagatcagataaggttatgtcacaggacatatactaagcacagagaaattgctgaagaaagtgcctctgttttgatagcaggcttttattctcaatctttggcaatgacgtactaacgtaaaaatgggcttgtccttgtttattggcatttgctatatttgaccttaggcttaaaaaaaaacactcacccatatacctgaaatctaatggcatataaagttggatggctggcaaaggttataatccc

SEQ ID NO: 163155 - DNA, 569 bp, Homo sapiens
gccagaagatcatgcctcaggtactctagcctggcatagacatattcgtagactctggctcataaagtaagaacaccggggattctctatagatctaactgtaaggatgcgaggcatatgagatccgtccgccgttacccaccgtcgtgaatggtaccgaatatatatttatgccaaaataaaactttatcaacattttctggcagagctcataaaaattaattatttaatgccagtgtacactcccacaaataaagataaactcttcagtgccaacactacatcaatgagaaatcaattaatcaagaaaggcttttaaacaaagatcagataaggttatgtcacaggacatatactaagcacagagaaattgctgaagaaagtgcctctgttttgatagcaggcttttattctcaatctttggcaatgacgtactaacgtaaaaatgggcttgtccttgtttattggcatttgctatatttgaccttaggcttaaaaaaaaacactcacccatatacctgaaatctaatggcatataaagttggatggctggcaaaggttataatccc

SEQ ID NO: 163156 - DNA, 215 bp, Homo sapiens
caaaaactcttaaaatccttggaatctccaaactggtgtctttttgttcactattagcttgactggtgcctggggactcctggatagcctcaggagccggggctggtttccaggggaaccaacctcctgattagagggttggactgaagtcccaactctcaacctccagggagggaagaggggctgtaggatgagctgaacactgtattagtcca

SEQ ID NO: 163157 - DNA, 455 bp, Homo sapiens
ctggcttagctgaagtggggggactagcatgccaggcagagagcagaaaatgcacaggcctggaggtaggttcaaggacctgtgggaaggccagaggaggtgaatcagagagtgagtcgggaggccagaagagggttggaaggaaaggataagtcactcctacctgcacgccccccttagagatgtggaatcacccaaaggcactggggaaaccactggagatgctgaagaggctcagggatgtggacagagatttaaaaccacagattgggcaacggagtgggatggggcagacatgggtgtagagatgcccgctgggagataagtgccaaagttgaggggtagcactggggacagacaggtggaaaaggggaagatagggtgtggggactgactgggagcagagactgtgggagagagagggggcgtcaataacagacaccatgcttctggcc

SEQ ID NO: 163158 - DNA, 479 bp, Homo sapiens
taaaagcaaatccagttggtaatataataccagagcagaactagtccaagagactttacaacacagtaatctgacagtacatccctattgtgaaatacccttaaaaactgaccccaaaatgtggccaaaagaaaaatcttaactattttcgtaatcatattcttattggacaaatgggtactgttatgctaaggctgctgggtcatagtacgtgagaaagcaatcagttaagtatgtcagtgtttgttgggacccaggactttgtgcataggaaaaaggatgaaataaacttttaaatcttatagtccagaatacaaactggaagaataaaagcaaactcactgaattttttatctttaaaagaatacggccaggcgcagtggctcacgcctgtaatgactttaacagtggtttaattatatgcacatatagttgtcattaattttataattataggttcagtggtaaatgtacaggtt

SEQ ID NO: 163159 - DNA, 233 bp, Homo sapiens
gcccctccactgagcgagggagctgctctgattcagcaggactccctttccaccctactctttgttttttgtgtttttttgagacaagttcttgctctgtcacccaggctggagtgcagtggcaggatctcggctcactgcaacctctgcctcctgggttcaagtgaatctcatgcctcagctaccagagtagctgggattacaggcgtgcaccaacataccgggttaatttt

SEQ ID NO: 163160 - DNA, 155 bp, Homo sapiens
attagatttaagaaaacaccatttccagattttttttctcaataagacaatatttgaatatttctcgtgtgtgtgtgtgtgtgtgtgtctaagggacttaccccaagtatagcatggttgcatcatgaagctaccatgctatacttggggtaagt

SEQ ID NO: 163161 - DNA, 311 bp, Homo sapiens
cggagtgtgctgggtgtctagaggatcctataggcgctaggtagtggaaatgccatactgaccttgtggcacagaaatgaagacctcacggtggggtggaagggcaccctctctggagtgagagtgaagagttctgagctacccttaaagggagaagggaattgagtgccccccagggcagccgttctgcaccaggctcctctcctatcccctatcctgttccagaaaggacccccccgcccagggtgatctcacacaggagacttccattcacatggaatcagatacacagcgtggcacaccaacaccag

SEQ ID NO: 163162 - DNA, 513 bp, Homo sapiens
gttcaaaatgatttgattatcatctggattcagaaatcttttcattgtacagagatttcattgtcattgtcgttgttgttaactgatttttaatgatattgatttagaggcatttgtcggtagtttttaaattactatatagggttgaatgtctaatttctataatgtgtggatgcccatcagatatttagtgcattctatatttagcccaagtgtgatcacaatttattttataactttttatgtgttacttacatgactcaatatgcatcttacttaagaaattatgttgtgatctggagtgacacaaatggattgagataccacatccattaaaaatataagtgaatattttatatttaagttgtttaaatatttgcacattattgaaaacatagtactaggaaatgaaggcaccatttaacaaacgtgttctgaatcataattttcatgagtttgtacgtgaaatgttaatgtttaaaacacccattttgaaattattaaatacaggta

SEQ ID NO: 163163 - DNA, 687 bp, Homo sapiens
attttcaaattgcctctaaatgcctccgttggaaaatggcactttaagttgttttacgtgtcggagacagaatacttaggcttacactcggggcaccaaacgcaaaacgctcagggcttgcagtgaacctggtgagtgtgccctcgggtgtcatttacagaattggtgccctcctcccaattggagtttgacctctatcagagataatctcttcactcctttaccccaatgaggagctggtcgtttgagatcttttcatccaccccaaaggcacgtgggcgcgtggggaactgggatagggtgagggctggggtggctgcatcactatgaggagacgctgatgtgcttccctccttcccctccagcgccttgtactgagctggtgctcggcgacaaggagcagatcggtacctgggctatttcagaggacacgatgtctcctatgtaccatctataacatagatgttccgtttgtattatatgctgtttaacatataaatatgtattatgtggtttcatatcataaattaatatttaacatccagttccgatataatgttgttatattacttatctaacaatgttttatcatatattattatacaatgtatgttgtatacaattctagatgtgtgtgtgtgtgaatgtatttgggagagcctttaatctccaagtatgcatttgatc

SEQ ID NO: 163164 - DNA, 607 bp, Homo sapiens
tccctcctgccacagtccagggtaggagatacttctccgggctctcacttatgggggctttcctgctggctacatcactgaaatggaatctcctagtggcccttctccctctacagctctggtgttacactgaaaaactagaagtttcaaaacagacaagggaaaaagagaaacatcagaaagtctgattaaagtagaagcatcatatttctatcaacgtatccactgtgcttggacacaattgcaggcccttgacatcttttgcctggattattgcaacagcctccaaaaggactcgtctgtctccatgatacccctccatcctcctctgcatcatcaccaagggaatctttgtaaagcaaaggcatgatcatgcttatcacctggtggaaacccttcagagactctccactccccagagcaggcaccacatcgttagagtctacagaaggcaggaggaaacagaaatgagtgccgggtccataggtaggcaatggggagcagtggggattgcggtgaaatggagattggctgtctaaaggcatccaaactcagaattctgtaaaaccttctatgggccaaataaagtttgtcctgagattccatg

SEQ ID NO: 163165 - DNA, 414 bp, Homo sapiens
tccctcctgccacagtccagggtaggagatacttctccgggctctcacttatgggggctttcctgctggctacatcactgaaatggaatctcctagtggcccttctccctctacagctctggtgttacactgaaaaactagaagtttcaaaacagacaagggaaaaagagaaacatcagaaagtctgattaaagtagaagcatcatatttctatcaacgtatccactgtgcttggactctgtaatattcaccggcaggaaaacccaagggaatgactactatgacatctgatgagtctcacggtgttgcccaggctgaatacaatcgtgcaatcatgactctctgcagacttgacatcctgggctcatcaagcaatcctcctgcctcagcctcccgaatagctgagactacagg

SEQ ID NO: 163166 - DNA, 271 bp, Homo sapiens
tccctcctgccacagtccagggtaggagatacttctccgggctctcacttatgggggctttcctgctggctacatcactgaaatggaatctcctagtggcccttctccctctacagctctggtgttacactgaaaaactagaagtttcaaaacagacaagggaaaaagagaaacatcagaaagtctgattaaagtagaagcatcatatttctatcaacgtatccactgtgcttggcaggggatgggcccttctgctgcagcataagagggg

SEQ ID NO: 163167 - DNA, 578 bp, Homo sapiens
tgagtcaccaacatctcagggccctctccacaacacatgaagccagctctgcaaacccagagcagctctgcacacttcacacaacttggcaacacaagcactgggaacccaagagcagcctcaagggcaactgagccatcagaaacaaaatccagctctgaatggcactccggggccatgcaaatatttaacaggcacatctagagaattctcagtctcaattaggagaggaccaccacagtcagaatgaagggggctgcctaactgcctctcaagtctcgggcaatcctcactcagtaatattgcagaggactacagttttgtgtgtgtgtgtgttttttttcttattttagaaacacgatcttgctctgaaacccaggttggagttaaagtggcataatcacagctcatgcagcctcaaactcctggactcaagtaatccccccacttcagtctcccaagtagctagaacaacaggcacacaccaccacacccagccaatttttgtattttttgtagagactgggtctgcctacattgaccaggctggtctcgaactcttggcctcaaatgattct

SEQ ID NO: 163168 - DNA, 469 bp, Homo sapiens
taaggaagaattagaagaattacaaaaggagttactagaagatgatggaaaaaaccagcaaattataaagttgctgaagtgatccaaggagtcaaattcttggataattaaatttcttaacatggtccctttatggaattatgccctgactagtagaaatacatgtagaagttacttcctgcacaaaaccatgtataataaagatttgttctaaacatgatcatctttattattattgaaggagctttaggtttttttttttttttttttttttttttggagacggagttttgctcttgttgcccaagctggagtgcaatggcatgatctcggctcactgcaacctctgcctcccgggtaaaagccgattctcctgcctcagccttccaagtagctgggattacaggcatgcaccaccatacccggctaatttttttgtatttttagtggagacagggtttctccatgt

SEQ ID NO: 163169 - DNA, 452 bp, Homo sapiens
aaatatctcatgtaccccatgaatatatacacctagtatgtactcacaaaaattaaaatgaaaaaaggaaaacatagacaaattggacttcataaaaatttaaaacttgcacatcaatgagcactctcaacagagattagaaaaagtaaacacataggtggggtgcagtggctcatgtctgtaatcccagcactctgggaggctaagatgggagaactgcttgaggacaagagttcaagaccagcctgggcagcacaaagaggcgccattgctacagaaaaattaaaaattagccaggcatggtggcaggtgcctttagtcctaactactcaggaagctgaggcatgaggatgaggatcacttgaggctaagaggttgaggctgcaatgagccatgatcatgccagtgcactctagcctggtcaacagagtgagaccttatctccaaaaaaa

SEQ ID NO: 163170 - DNA, 427 bp, Homo sapiens
ctagtgccccacttcctactatatgaaacttaaaatctagtcatcactgggccccaaactaccttcttttcagaatctctctaatcctttcccttcatcaagtcccctacattattattattattattattattattattattattattattattatttgagacagagtctcaccctgtcacctgggctagagtgcaatggcatgatctcggctcactgcaacctccacctcccaagttcaagtgattctcctgtctcagcctcccaagttgctgggattataggcatccaccattacactcagctaatttttgtgtttttagtagagatggggtttcaccatgttggccaggctggtttctaactcctgacctcaggtgatctgcccgccttggccttccaaagcactaggattacaggtgtgagc

SEQ ID NO: 163171 - DNA, 326 bp, Homo sapiens
tatatgttggaggaggaggaatttgaaagcagcatcagtaggtggtttaccgatatagctgctcaccgtgagcattaaatactgggtggatgagtgttgcaaagcacagcctgccccaggttcctccatatgcttccttcctccctggctgctgacttccagccttattcatcctggccctcagtctttcagtcgacgtccatgtgggcttatagacatcagatgaattagacttgccccctgcctgaaagttcacattctattggacaagactgattaaaaaaatgacagattttaagttcgtggtaattgcaaactagatatgg

SEQ ID NO: 163172 - DNA, 294 bp, Homo sapiens
gtcaggccagggctgcttgagtccttgctctgctatttaaatctatcactcgttggtgacagctttctgcttaagcagtggcagcatgtatgctacaggtttcagctcattacctctgtagggctgttcctggactgctggctgggggaaaggccagccatacagactgaggcaccagccccaaactctgtattggatgttgctgagcctgggtggagagtggggccgtgctacctacagtgcctgctacctgtccttcagaggacctgtctgcagcagggccagagcctaagg

SEQ ID NO: 163173 - DNA, 259 bp, Homo sapiens
gagagcccaggcatctgggacagacctgcttgcggtgtgctctgggtgcttctcaaagccactccagccgcctctctccttattccccaggcttcaacggggccactctcacagcactcatcagattctgctctggattcgatttagctacctgcatatatgcctcatatcctggctacagtgttgttccttcagggtggagcctaccatgggatccctttcggaccccacgcagggcctaatacaatgctttggatat

SEQ ID NO: 163174 - DNA, 396 bp, Homo sapiens
acactttaagaacaaacatagaaaacattctgaagaggactgggccaatgaatagcctgtatcctacagcacagctgtaggaaatgaagacaaataatccagattgtgggcacagtgaatgctcaacgtttgctggatgaagtaatgaaagagaagaaaagggagggataggtgaagaagagatgggacgttacattttaaaatatttgtctggcaagggaaataggtattaccttagtcccagatggctttggggaacaatggatacatgttacagggagactattcagctcagtacactcaatacaaagagaaggtcaaagacccaaatgagttaccttggaaggtgacatgacagtttcagctttggtgagtcactcctttcagttcaagatg

SEQ ID NO: 163175 - DNA, 127 bp, Homo sapiens
ccagactaggttaagggcagtgtccagacatttattagcaccccttattaacatgggtgccatctccagcaccccttgcctctccttgcttctgtgtttctctgccttcccctcaagttttgtggtg

SEQ ID NO: 163176 - DNA, 533 bp, Homo sapiens
gttcaaggctgcagtgagctctgtctcatcactgtgcatgatagagagacctatctctaaacaaacaaaaacaaccaagtaatgtcaggtgtgaaaggattaaacaatcccatgaaatgggcagagattttcatactgaagggaaaaacagccttggcctataggctgtttacaggagacagactttggattcaaagatgcaaataggctgaaagtaaaaggatagatgaagatacaacatgcaaatagcaaccatagtaaagctatcgtgcctatactgatttcagacaaaatatactgaaacagtattgctggagatacatagggacattctataatgacagaagagttggtgcctcaggcatacaaatcataaacatatatgcacctactaagagagcagcaaaatgtatgaagcaactattgacagaattgaaggaagaaatgcacagttcagtaataattggagaattcaatacaacactgtcataatggatagaaaactgaggaaatcagtgatgagacgtagaagg

SEQ ID NO: 163177 - DNA, 454 bp, Homo sapiens
tatttgctgcccaacagatctgaaattatgaaagcaaaattcctctattcatccaaagaacatataaatgagaagtactcagcatagtggaaagggtgctctctttcagaagaccagagtgctaatgccattcaaccttggaatagctgtggaaccctggcaaatgcccttcctgggcttcacatgctcaataacaacgtttgggagtctcaatgtttaaaaccaacacatcatctacccctatatgatgcacatcttaataaggatagtattatatggaatatgatataaatcttacaaagttaaaaaaaatcttgatgtttaggttactaatttggcttcagaatttaatgaaaactatagcaataagcctgggcaacacagaccccctctctacaaaaatttttaaaaatagctgggtgtggccaggggcggtggctcacgcctgtaatcc

SEQ ID NO: 163178 - DNA, 338 bp, Homo sapiens
gggcatctattgctatataacaaatcactccaaaaatcaacagtttaaaacaactctcttactttgctcatgattttgtagttacaatcagatattggctggcctgtgatcatctgacctttcatctgggctggggagcccacaccagcacagctatggctgatgttggctgggggattagctggggctatatattggagcatgtatttgtggcctctgtagcatgacagctgagagggtcttcatctcagacttcttacatggtggctggcttcctccttaagggcatccttagaaaaccaggaagaactgagtggtcttttataatctagtgtcaa

SEQ ID NO: 163179 - DNA, 479 bp, Homo sapiens
ctcattgcatccattgggccctgtgctttcctccatttcctcaagtccttaccacattcctcaatttaaaatgggtgaagagctgcccaaggccccacagccgggaatgcccagggccaggttaaaaccaggtctgccctgatcttctcatgcaggagtgggtgtgaggcaggctcccacttggagggcacagtgggtggtatgagggctgagaactgccattgcaggccctggctaagtggcccccctcacccaggtgagaacctgctggcagcactctcaaggaggcatcccagacagaggggtctcacatccagagcccctccacctctagcccacctatggagcccagagaaattggcccagcaactccatttttagatgtaggaaaccactcgaggcacccatgcacaatcaggtggccaaacttgggggagggcaaagcattcaactggtaaagttcatccaagtggcgagta

SEQ ID NO: 163180 - DNA, 435 bp, Homo sapiens
ctgacagagcaggagcatcgccatcttggacaagcccctcattctaaagttcaccttaataaaaaaaaaactgcctaaatccaaagggcatcagtctaatgactaaggtcggcatgaccataaaccacaaataacatctctaaccagaaacattccaaactcctccccagccagagacaggctagccctaagataaaccccctccagctgggaagatgccagtctcgagatgacatccctctggccggaaagatgcctgccccaaggcaaactcccctccacccagagacattccaaccccaccataaaacttctccctcaaacagtaacattcgaagcttctgataagccccctcaccctaaaactaatacatactcttaatctgtaagagaaagcactcctgatagaaattggccaggagtgtctctcaggtt

SEQ ID NO: 163181 - DNA, 404 bp, Homo sapiens
atttgcctaccatactatgcagtgtccttcttacaaccacctaacctttctccctcccacaatccctgaacctgggtacaattgcatgtagataaagattgacagatggttagcacatatattgatctaggcagataatctcacagatgtgatatgcgggaaataataacatcaaacagctttggaaaagatgtgtaaacactgtgaattttttgcttctatcactttaagagttggactgatttgggaaggactcaaactcttcaagtctagagtcttcatagataaaatagggacattttcaacttcctcctagaatgatgctttcttgtggggactgaatgaatcaatacacatgaaagtgcctctctcccttgatatctacaaatacatgtgcacacaca

SEQ ID NO: 163182 - DNA, 339 bp, Homo sapiens
tctttgtattagttagaatttttttggtagcaaaagacaaaaaactcaaattgcttatacaagtaatgtaaactctttttggtcggttgtaaagtctctaaaagtaaggtggactttcaagtgtagtttagttaggactccagttctctttctctccaattgttctcaacttgtcttcttccttgtatcatgtcatcatggtttcacttagggtagcaaaatcatgtagcaatccccaattttatatctgcatcccacaaaacccagaaaagaaatattctctttgctacttactgaacaatagtgctaggcatctttctagaagcacttgggtgtcac

SEQ ID NO: 163183 - DNA, 265 bp, Homo sapiens
catgagaagaatcggagttgtatttcagaggtcagtgccatcatctattatctaaatctctcactttcagaagactagaaatcaaaaattgggctgtcaggagccaaggagaatgataactaccactggggcaggcaaaaagttagggttccgatccccaagcttcaggcttctctttcaaacaggaaaaaaaaaaaaagaaaagtccctgttgctgctatttttctcccttttcacataaatgcaaaggcagccacataggaga

SEQ ID NO: 163184 - DNA, 536 bp, Homo sapiens
ctaggagcattgtgtatgtgtgtgtgtccacatgtatacaactagttgctcacacagacgctacctgaacaatcacacaggcaagttgtagaaattgagcctggagagtgctaagagagtacctgagagggcactcacagaaggctatcaagggcaaatgaagtggccttgactttgtcagtaatttgtctcctctcaatatttaaaaatagatttgagtcaatatataacatcagaatgttcattaatcacctatctggatggttctggtcataacatgtatttatttcaaactcaagttgttaataagaagtactaaaacaaatgtagatgtggaatggttttcattattctagagtatggaatcttatgtataaatgtagtaccatgtaaattcacactccatttcacaagtcattgtccctcactatatgtaatagtgttttcctagtaatatatgtttaagttaaatagttttaaataatgtcatactttcattgctctaaaaaattaaataaagcttttaaacatgttta

SEQ ID NO: 163185 - DNA, 429 bp, Homo sapiens
atagttcaaaaggaaaacaaacaggtttctttcttggccaaatggcttattactctcaccctgggatctgatttcttactaagaaagttcagggcaccaaatccaaccagaaattcccaggacaccaatggctacttaactatgaggggatggatgctttaatctttctatgaggggagtcattctcctgggattattatgcccatcagtagtcccaggagaggtaggtgggaaggagggtgaatgcaaaagctaaagggtcagagaaaagaatgaggctttcatgaacaacccataacaaggcagaatggtcgttttacaaaccaaccactacaaactccaaacatgcacacccaaaactagaggggaaaataaagagctcctgggggatgagaggagacaaaacatggcacatagaacagcagactc

SEQ ID NO: 163186 - DNA, 511 bp, Homo sapiens
tagaggatctctcataggttcgcaggcgctggaacgtggggaaggggatagaggcggcactcggataaggagagtccagcttaggccaaaggctctggggccgcagttcagacctccctgccctgagcggtgggaggaaagctggtgtggctggacggctcctctgccactcaaggcacaagaaggagagggcgcgagggctgaccggacggggcgcctccagctctatgacacgctgtagctgttgtagtacatggccagatctcagttttggaaggaatgctttggcctttgagatgaaggtagaccagaagagagcaagatgaggaatcctggcagagagttcaaattctgggggttcagaggggagaacttaggggactgggttgtcagaacgctgggtttttcctcctgaagccatgtggagactcagatcttggagacctgggcccctaagcgacctgggtgatgtccaacatccttccccagttaccttaagacaggcacacag

SEQ ID NO: 163187 - DNA, 365 bp, Homo sapiens
ggccctggatgagattaacagtggaatcaacgggctctgagtacagcagatggccctccctaatgtgggtgggccccatccatgcagttgaaggcttgaatagaacaaaaaaacacagctttccctcaaggagtgggagaactcctcctgtctaactgccttccaactgggacatcagtttttttcctgccttgggactcaaactaacacatcggctctttgtgagtctgcagcttgtccgcatttaggctggaccttataccatcagccctcctgggtctccagcttacagatggcagatcttgggacctgtcagcctccataatcacatcagctgattccttacgataagcctctctctctct

SEQ ID NO: 163188 - DNA, 401 bp, Homo sapiens
ggagttcgaagctgcagtaagctatgactgtgcgactgcgctccagcctggacaataaagcaagacccagaaaaaaaaagaaaaaaaagaaagaaagaaaagagaacaaaagaaagaaagaaaaaggacacggaacgtgacacgcacggaaggcacggaaggacagaagacgacgagagagagaaagaaagaacagaacgaacgaccagaacgcaacgacacgaacgacgacccgaacgaaagacagaaggaacgacgcgacaggaagacacgaatgagaaaaacggaagaggcaggtcaaggaaggaaattgtgtattttatgttggttaaattgattactgtgaattctattggagtgatttctatcgttgcctgaatttgggctctgcttactttatg

SEQ ID NO: 163189 - DNA, 278 bp, Homo sapiens
ttgtttggtagtctcaccagcagccattgacattactgtggttaactacacacttagaaggttaagctggttccctaataactgcaagaaataaaacagcagtggcaataagaaatggtgaattaatgttctggaaaacataggtcttactaccccaaatgtcccaggataaagcttagcaaacataccttcttcatcacttgtgtgtgttggccttcaggatcacgacccgccattggtaagattctaattttctgtgtctttgaacttctattagc

SEQ ID NO: 163190 - DNA, 272 bp, Homo sapiens
gtattttttaattagggtatatacactgcttttttagacatgatgctattacatacttaatagactacatagagtataaatataactttaatgtgcattgggaaaccaaaaaatgtgtgtgcctcattttattgcaagattcattttattgcagtggtctggaaccagactcactatctctaagatatgcctgttatgtaagtcattgagaatactgaagaagatgttgatgttcaggtcatttctggatcagaagacatattccctttgtt

SEQ ID NO: 163191 - DNA, 699 bp, Homo sapiens
tcctccactcttatcagaccagccttcctgtggaaccccacacggttctcctgtcccatgcttttctctagacttcactgtctgccaaacaacctccttatattcctccttcctgctacctctcttcctcccatgaatgtaaacaaccctcccctccttagcatcccagttccagtcccctcctgagtggacccacatgttggcactgtctctgcctgagtcttcccaagcagcacgctttgccaacaatgacttgggttgaactaaagaaaatttcttagcatttatgctgactatttaaggagaatttgttgatgtattctttccaagataaacactcaagaatatggttgattagtagaatatgctcaaaattctactagtggtctgcattttaccttgcaacaagttctcaaagggggaaaaaattcttcatttaaagaactttagtacatttgagagcatggatagagtttccaaaaaatgagatcttcctgaatgaggtctccagttcaaacagccagcagcctttatctttgcctgctcatgacaggcttggtgtgcactgaattctagaataccaaggttggaaggaaccttcaatatcattttctccaggagctgacagattcacaaaaagttcttaggacacaaaccaagtgtttggaacattcttaaaatttattttgttggtctgta

SEQ ID NO: 163192 - DNA, 470 bp, Homo sapiens
actgtaggttctcacctacttcgactcctctccctgtcccagggaggggagaaaaggtctgggattcattgccaggaggggcttcccccaggatttcctacttctttctttactgctgtgcttgaagctcacaggagacccctcaagaggtggtcaccggcccacagcccaccccatcccccacccgccacccccaccgtaccaaatgctagctctgccctttcttctgtgtttttcccatcaagagagatggttgtggtcatgaagttcttccgatgggttagacgggcttggcaaaggattatttcctgggttttcttctggaggcaaaaaattaaaccaaccatctcaggacaccctgactccaagaaacactcattgaagaagatggagaagactctccaggtggttgagactttgaggttggtcgagctcccaaaagaggctaagcccaagttgggtgagtcccc

SEQ ID NO: 163193 - DNA, 354 bp, Homo sapiens
ctactactatcaccaccaccaccaccagcaccaccgtccctaataataataatggtaacaaacagctagcgtgggagcacttcccacatcttattcattgtgcacactctccaggatttgcaattgaagaatatgacattctggccccagacccctggtccctggccagctgagatgcccttgcattccagcatgggtggtttcccaagggcattttcaaggaccattttgcttttccaagtgagatttttttttttttttttaatttgagacagagtttggcttttgttgcccacgctggagtgcaaggggatgatctcgactcactgcaacctctgcctcccaggttcaagc

SEQ ID NO: 163194 - DNA, 826 bp, Homo sapiens
catgtgaacctaagtaaacacataccaaaaaaaatggcccaagaaaaatcatgccctgaggggaaggcactcagatgaaaaggaccttcttcccagtggtcccctgaggaggtgatttccaaggtctcagctaagggatgagcaggaatgtgtgggtgcagggggtaggggtgagagctctcggcatagagagagcagcacatttcaaaggccctggagtggggaaggaggtggcaggtgcagctgtgtggtggctacttccacttctggagtgcagtagcatgatctcgactcactgcaacctctgcctcccgggttcaagcaattctcctgccacagtttcccaagtagctgagattataggtgcaagccaccacgcctcgctgattattacatttttagtagagacggggttttaccatgttggccaggctggtctcgaactctgtctcctggaacctcttgatgagcccctgtgaggttccccagcccagggcatccccccaggtattcaggagagacccgtccccaagagactgcctgctacttcctcttcctatgaatgtcactgtgaggggaataaataaggatagaccagaaaagcaaattgtaagaaatttgaaaccagttgtcagttttcaggtgcccaggagcatgacaatatgcccgagggaccgtaacaggacttgacatggagctgggtctaaagcagatgacctggtggctgcagcgtgttccacacaggcgagcactgtgaggccaaaggactggtgttgagcagaatgaaaaagcacagtgttggttaatcctgaaaagtgaagcctgc

SEQ ID NO: 163195 - DNA, 599 bp, Homo sapiens
tctaaaagatatatttatgaaatattttggactttatttcttataatttatcaaaaattgtggacattctgcagttgtgttacactgtgtgttggctccacattccttttgtgaaaactgacttttaacgcaagcaaaaatatatcttctcttcaaacctactctacagtcggggcatttctggttacaaggtctactcaaactatgctattttagaagagtgtttattaaacaaacataggggaatcctaatgatgtggagaaactggaacccttatacacatattgctggtaagattataaatggtacagccacattgaaaaataatttggctaagttcctcaaaaggtaaacattgagttactatatgacacagcagttctactcctgggtggacacccaagacagctgaaaacatgttcacaaaaaaatcttatacacgaaatgttcataagcagcattatttccaatagccacaaaaatggaaaaccccaaatgtccagctaacaagtggataggcaaaatgtggtatatccatataatggaatatcagtcagctgttaagaggaatgaagtaccaatatatgctacaacatgg

SEQ ID NO: 163196 - DNA, 312 bp, Homo sapiens
ccttgtgtttgctcaaagtctggaatgaattacagcagccagggatcactcttattgccataggctgtgtctaagaaagcgaccaagtttcaccatgaaagcaaaccaaatagtcatggagggtatttctcaatctcagactgttagacaaagaatgtctgtgtatacgtcaatacattattttccacgaaaaaaacaacaggacaaaactggcttacaagactagttatctgagcctaaagcttcaacccccaggatgaagctccaccccaagccggaaggtgatgaggttccaaggctcatccccaaaag

SEQ ID NO: 163197 - DNA, 587 bp, Homo sapiens
tgcttcttgaataattgtatcaataatctctttgttccatagttccaattcatgtgcctaaagaaaagttcatttacttaagaatctcggccaggcgcggtggctcacgcctgcaatcccagcacttcgggaggccaaggctggcagatcacctgagtcccggagttcgagaccagcctgactgaccaccatggagaaacccggtctctactaaaaatacaaaattagctgagcgtggtggtgcatgcctgtaatcccagcttctcgggagactgaggcaggagaatcgcttgaacccgggaggcagaggttgcaatgagctgagattgtgccactgcactccagcctgggcaacaagagcaaaactgtctcagaaaaaaaaaattgcaatattaccagaattcctttgggactgtctcctgaaatttgaggtcagtcttaactttcctctagaactcagctcaagaaggctgggtgaggtggctcatgcctataatcccagcactttgggaggctgaggcaggaggactgcttgaagccaggagttcaagaccaacctgggcaacacaatgagaccccatctctac

SEQ ID NO: 163198 - DNA, 232 bp, Homo sapiens
agattacagcccttgcctctcaaggacttcgagattggttaggttgagagagtcatgaaaactacatgcaattaagatgcaaatgctacaatagataaattattctgttggtgcacaaaggagagagttgctttattctggttgagttgggattgggaaatgaggaaagcttcatgagaaagatgttacttatggttaagccctgagaaatgaatgcatgtgaacttacagg

SEQ ID NO: 163199 - DNA, 489 bp, Homo sapiens
aggatgagaggttggctatggagagacaaataaagatatctagcacaccccacaaaagcaacccacaagaaaaagggtcaactttgaatgtctaccaaaacaatgggggcaccaaaacagcaagatcatgacagtcccagccaagtaagctctttcctgcctctcccacttcctctatgctccagccaaccctacagtgttcagaaactgcagttagtaagtcagtagattgaggatggggtgaggaggtaccaagcaggatagtagagagctcattgtgcctccttttcccagtgcaggcttttagcctgacagaccacagctggagagcgtatcagttagagtgtgagaggctgcagtaacaaaaagtcccaaacatgcagtgactcaacacagtacaagtctgtttcttgctcatataacagtacaggaaagtgccaggttagggtagtagggaaagcagtgggctttgcttcatccacgcagtta

SEQ ID NO: 163200 - DNA, 608 bp, Homo sapiens
tgtcatggggtcctgctaacttatagctaacacaagtggagatgcccatcagggatttgagcagaaatctagaaatcggcagagaggtgggaccgagagctgtatctttgggaggtgttggcataaatggctgctggaggcctgggcagtagatgagattacccaaggggatcggtagaaaaagaaggcaaacaggctggagatggggcctcaaaacatttcagatgttttaaggtcaaccgtatatgccctgagaagtccctgtgtttaccactaggaaaacgtttgtaggaggcacagaaatagcacagcattaagccataagggagtgactaacctgaaaccatgatgctttggggtaggatggtcagagggggctcacagatccaaagtctgtaatcgcaggtgtctggactctcaggctacatatacaatttcctaaggaatgtcctgctttgtctgcgtcccgaatctgtgttgaaagatagtaaactggggtgatggagtacatcctggcagaggctatgtggggagagcagagatgactctagggaagaaaacgtcttttaaaaaacaaccctgtctgctcccaccaaaaggaagaaaga

SEQ ID NO: 163201 - DNA, 648 bp, Homo sapiens
ttcactctctgccctcctggcctgtacccgctggcacctgtcccctcactccctcaaggtttgcagcacagactgatgacatacatatgtgactctagccatgtctgggtcacttttggttaggtggtcaccattgtctgctggctgaccttgttactcatctttggaagactcctggctggtgtattccaaccatggactttccatgcacagactccttgcctccttaactcatttctggtttgttttttgggatttgtagccttttgcatgccatgctctctctcaaagcaagttaagttctctttttttctctctctctttgtttgagtcttgacttggttctttgttgagggcttctcatttgacctcagttgctggcttatatggacagcagcatgtatgtaggagatagttgaagagctcttgacttggataaaaccaccccatgtggtctaaccaatataaagcctgctaccaacctcaaaacctatttctttggagtggagcaaaatgccccaatttcctggtcctactgcttttccaggggataatttattatgtcattccaggcaggagcttctacagctctgatcaccacattattactttggaggtgatgttctttgactccccgacctccacaat

SEQ ID NO: 163202 - DNA, 895 bp, Homo sapiens
  misc_feature (773)..(773): n is a, c, g, or t
tgtgctttaaagtgtttctaaagcagttcctaacagtatttagagattccctgggatgtttgtggctcaacttattctggacaaagtgtgtgtgggggtggtcttactgagatttgcattcttaatgcaggacaggctctaaatttcatctgtactctaaatttgtgattgaatccaagaagataacagagacagtgctcctgttgtaatgtttctggcaagtgctccctaaaatgcacatcgaattctgttttctgggccttttctccaatggtgctaggagataccgttgatttctgcagctcttctcagtggtgggaagaagtctttgggattgttgagcaaggggcagctggaccatccactaaatttttttgttcaagacacattagagaccctcctgtatatctagtaagtcataataaaggtgcttgggaaagccttaaatttgaagacacatggaggcggtagaaaattaaacttgtaagaggagaaaaacatgccattaggtaacgcagagttgtaactactggctaagactcaatggaacttccacttgctctaaaaccagggaagggagtgggacgataagtcttttgaagacatcagctcactgtgctgagagagggaccaaactcaaggaaacctctgatctatacattcaactgctgcatttttttataaatacatgtaaatgtcctgttgtaatatttgatcttggaaataaaaacaaaaacttttcagtagaaaaaaaacaaaaaaaaaaaaatttngggggccggcgccaagaagtttcaaccacatgtgtggggccggcccaggtgaaggaaatggcaagtggccaagaaccggccagaaggggggtttcccaaaaaacgcgcgggcgcgcgtttga

SEQ ID NO: 163203 - DNA, 1106 bp, Homo sapiens
  misc_feature (984)..(984): n is a, c, g, or t
tgtgctttaaagtgtttctaaagcagttcctaacagtatttagagattccctgggatgtttgtggctcaacttattctggacaaagtgtgtgtgggggtggtcttactgagatttgcattcttaatgcaggacaggctctaaatttcatctgtactctaaatttgtgattgaatccaagaagataacagagacagtgctcctgttgtaatgtttctggcaagtgctccctaaaatgcacatcgaattctgttttctgggccttttctccaatggtgctaggagataccgttgatttctgcagctcttctcagtggtgggaagaagtctttgggattgttgagcaaggggcagctggaccatccactaaatttttttgttcaagacacattagagaccctcctgtatatctagtaagtcataataaaggtgcttgggaaagccttaaatttgaagacacatggaggcggtagaaaattaaacttgtaagaggagaaaaacatgccattaggtaacgcagagttgtaactactggctaagactcaatggaacttccacttgctctaaaaccagggaaatcttagataactgggtgtgatctacctatagatctacctagtctataggtaataatttccagaaggaggatcttgctgtcagttggggatcctctggtttggtctgtaccaaattgtgaatactcttgctgtgttgtacccagttgctttatattaatactgcaacttgaaacgggggagggtggggggacaatggggtgggggagggaagggagtgggacgataagtcttttgaagacatcagctcactgtgctgagagagggaccaaactcaaggaaacctctgatctatacattcaactgctgcatttttttataaatacatgtaaatgtcctgttgtaatatttgatcttggaaataaaaacaaaaacttttcagtagaaaaaaaacaaaaaaaaaaaaatttngggggccggcgccaagaagtttcaaccacatgtgtggggccggcccaggtgaaggaaatggcaagtggccaagaaccggccagaaggggggtttcccaaaaaacgcgcgggcgcgcgtttga

SEQ ID NO: 163204 - DNA, 354 bp, Homo sapiens
cgtaatgttgcaaactgtcacaggcaagggttattagaccaatgggaattggctagattaacgtaatcagtagagtggccctcagtacttaggaaaagaacagcctgtgtttgcttgccaaagccttacatatcatgataagcatagaaccagccagttacaaattctggagatggcttattttaaatgttgttctcttccaccatctctatcataccagcactatcatcaagcacaaaaacttttcagctgcacaatttactatgctgaaaattcccagacccagaaatcctatcagacatactggcaccccgataaggacagacactaagctaattacattatcttctagtt

SEQ ID NO: 163205 - DNA, 311 bp, Homo sapiens
tccttccggcgggagaaccagcacgaaggttactccaagtccccgacccctgtccctctcaaactgggctcaaggtcaacctggccgtctctatatgctctggaggtcccgtcagagggtttttgaggaagaaaccccgccggaaagcccgccggaaagaaggcctgaactaacaactgaggcgggagaaccagcacgaaggttactccaagtccccgacccctgtccctctcaaactgggctcaaggtcaacctggcctctctatatgctctggaggtcccgtcagagggtttttgaggaagaaaccccg

SEQ ID NO: 163206 - DNA, 542 bp, Homo sapiens
tcaatcatagggaagtatttcaatgatcttaagtgtttcaatgatcttgtaagtgaaaacagccaataccaattaagttttccccattacccttcacaaaaaaatgcttccaaaagttccaaatcaccctacacagccacccagtgtactcctgctccgtcaccaatccgctgactttttcccccacactgggaccgtgctgctcgtcgtcttctaccatgagattggtgagtagctctaacaccaacttcctttctgagctctctgtgagaactcactctcctaactctcctgcatgttaccaagccagtctctgtctcttccttctgtaccctaattgtgcagtctccaagttgtccttgccctggtaagtactgctctctacaccaaacagatcttcatctctactctggagacttgcaatgtcaccagcagccctacttctaacctctatcctaaccacctcaaattgagtcatggtctgcttctactcccactgaagcccccccgcccttttttttggagacagagttaccctctgt

SEQ ID NO: 163207 - DNA, 474 bp, Homo sapiens
atttgtctctggtgtgctccacaacttaaaattttcaaataagctgccaaaagagagagggttttttggtttcactggttcatactagatatggggccaattgtggaagatgaaaggtgacaccatttccctgtgactcagaggtgaaaacagaagaatgatttaacttgcatatagatgactccctttgggaatatgaaggacagttaatgtttaagacaattatttaaattgtctgaatttgataatctttgtttttgttttttttaaagcattagttgtaaacaaggaaactgttgatgtgccacaccatatttattgcaataaggagatgtgaaataatgagaagtgtatctgtgccctgatatggttaggttttgtgtccccacccaaatctcatcttgaattgtaatccctataatccctacgtttggagggagagaccaggtgaaggtaattgaatcatgagagcag

SEQ ID NO: 163208 - DNA, 401 bp, Homo sapiens
tctaagcctcggaaatcaggaggtcactgagaagctgatgaactggagcctatctctagccttttcccctttaggtgctgaggcgtaggtggcatgttgacagatgtggtgaaagaatctgagtgcccagacatgtgtcaggggagcgtggctactgtgctgagtaaattatgtggcagtgcagactagaagttgagactagacagatcagcaccgggacaactggaagttccttcttttcacaatggtatgcacacactgctgccttagcagttctaagagacacgcacaaagatgtcaagacctgctcataatactgactttttttttcaatttgagagcgcatactgtttattaactgactagattagaaaaataatcatgatagacgccttagttca

SEQ ID NO: 163209 - DNA, 463 bp, Homo sapiens
  misc_feature (154)..(154): n is a, c, g, or t
atgctgaggtgatctcagaggatttcagtgctacctccacaaacaggtggacagggagcttgaggagaagggctcagagaagggctatggtgagaatcttggagaaagaacatttgggctaagacttgaaagatgagaaggagtttatcagggngaagaatattcaaggagagggaatagaatatgcaaagaccctgaagggagagaggcaggacccccttccaggttgtgaggaccctttcaggcccaagggtctcattagtcactggggttggcttttgagagcagagggaaccctctaaggcttgccttgccttcgactggatgcaggagagggagaggcaagagagtagagtggctgggtgatgcccaggtttctggccgggcttgggggtggtgcctcacccccgtgttgggagtgagagggggacaaagttcaggactgttgaatatgaggtgtcca

SEQ ID NO: 163210 - DNA, 255 bp, Homo sapiens
caatattaagtttcacagacagcatctctttcagtaaagagatacgctgaagataaaggctaaacacaagtgaaatttcatgaatgatgccattgaaaagttatgaaaaataatagaaaaagaagctaaaagcataatcaacacaaaaggatacaggaaacacaataaacattaagactccaacaaaaaaggaccacaaacatgtcagaataactggaagaaaaatatggaagcagaatgttttaaaagtctaaa

SEQ ID NO: 163211 - DNA, 518 bp, Homo sapiens
ttatgaaacagcttctataaacatcagtgtacaggttgtgtgaacatatgctttcatttatcttgggtaaaatacttagaagtgagactgctaggtcatacagtaactacacacttaactttaaaagaaactgccaaactgtgaaactattctccaaagtgcctttcaccagccctcagtggggaccaggcaccagcgtgccaaagaagtcttccaggcaaggacagggttcaagagaaaggcaggggaggtgcaaacacttgagtactgcagacctgaggcctcggtgggtgccagggatgggaaggccagggcaagggcacgtgcctgaaaagaactgccacacaagagtcagtatgtgtgtgtgtgcgcgcgcatgcgcacgtgcatgcctgtgtgcatgctgtgtgctagtagggagctggagggagggtggaaatccctcttgcttccccatgaggaaaagcatgcactgaaaataccaaaagagactcccctagctagactcagatgagaac

SEQ ID NO: 163212 - DNA, 163 bp, Homo sapiens
tcaagggattccgatacacatagtcctttgataatatacttaaaaaacatggatctagaagaatgaattcaccatgacagcattttcagctcagagaagtggctagcctgaaaggaaatttctggtcctgagaaatgtttcagcatcaactctccaattgcag

SEQ ID NO: 163213 - DNA, 291 bp, Homo sapiens
ggatgtggctgaaaaaccttttctgaagagattaggtatgtgactaatgggtccaaatcaaccttttcagcagaagctagaaacagagatgagattatccaggaaagatctttgaagaattctcttatgatggcagagatcctctagacatacatgggagacccacacattttaaaatattcagtaaaccatgctataaacacatgtgctgtcacccaggctttgttgttctgtctataaagaacaggcagagtagctttagtataattcctaagggccttgggattttca

SEQ ID NO: 163214 - DNA, 421 bp, Homo sapiens
acttgtcatacttccaggactgtcactgtgtatactataaaataacctcttatgaaaaccatgctaaggaaaagataatctcctcttttggaatactgcaatagcctcctaactggtcactccacttccactttacccatcactcccatccattcttctctttgctgacaaagaaatgtctctaaaatatttgtctggctatcctatttctcagctcaaattctaatagtctcaaactccactgccattgctatcaccttagttctgcctttatgggctctaacttggacttctacaactatctatctaatggtcacctgcctctagctttgaactgcccaatctattctctttacagctaccaaatatatctgtttagaactcaaatcttaaaatatttttgctacacttttacttaaaa

SEQ ID NO: 163215 - DNA, 461 bp, Homo sapiens
aacacatttgtgtggtctagactagacaacctggggtggggaagaatacaaaagcaacagtcctcagttcctcaggcccttcactgttgactttgaagtgcagactaatcaatcattgcatgtttatttagttcctgtttcatggtgatgtgccttgatagataaggctgaaaattcagagaactgttagacctggttcctgccctcaagacatttagtctagttgggaggaaagataaaaacataatgtatggtatgtagtgtttcaatagcgtgcacagtagtttcacatatagtatctgttttaatccttgaaacaactgtaatctatcacattattgcagctgacatattattaatgagagactgtagcttagatgaagtcatgtcctgtagccctctttataagtaatgaagataacgactgcaaacaaggtctttggactccttggcaagatgcc

SEQ ID NO: 163216 - DNA, 101 bp, Homo sapiens
atcaaacagccatgtagtctgacgccaataaaaattcagggtcttcctctctcacagccaactttctgccttgtgcttgtctttggtcacatccccctcaa

SEQ ID NO: 163217 - DNA, 220 bp, Homo sapiens
caggaaacattgtaactgatagcacagaaatacaaaaaaccagaagagaccgctatgaacagttatatgccaacatataactgttggataacctaatggaaacaaatatattcatagacatctacaacctaccacgattactgaaacataatgaaatacaaaattaatacagaacagtaatgagtaagaaaaatgaacaagtaataaaaagtctctcatc

SEQ ID NO: 163218 - DNA, 321 bp, Homo sapiens
gcagttggttgaacagtgaatgaaatatatcacataacaacctcatacttagatattactaattgtaattcaatataattaacactttacaaattatccattattatttatttggaccgaaaaaaagcatgctctgaggctctttgctgtctgcctaggcatttttgtgtggatgataaaacgatgccacattctatagtaataaatatatatgtatgtatatatgtatacacacacacacatttaatttcctttgacagattttctccctgtatgaggcaaatgttccaacttatagattaaaacctgttagtgaaactg

SEQ ID NO: 163219 - DNA, 419 bp, Homo sapiens
ccttgttttcctaatataacttaagcttagtgaaagcaaaaaactacagagtattactctgtctttcatggtatatagtatgatgctggccatacaaaaaaaacactccactttccaactgtatacccttttgttttgttttgttttttttgagacagaatctcgctctgttgaccaggctggagtgcagtggtgtgatcttggcacgttgcagtctctgcctcctgggttcaagtgattctcgtgcttcagcctccggagtagctgggactacaatcacgtgccaccaagctcagctaatttttatattttcagtagctacggggttttgccaggatggccaggcgggtctcaaactcctggcctcaagggatccgcccactttggcctcccaaagtgctaggattacagacgtgagc

SEQ ID NO: 163220 - DNA, 249 bp, Homo sapiens
ataaattagtatataattaaatgatgcaaaaattattgtcacttagaaaaattgatcttacagtccaggcatggtgactcatgcctgtaatcccagcactttgggaggcggaagtgggtggatcacttgaggccaggagttcgagaccagcctggacaacatggtgaaaccccatctctactaaaaacacaaaaattaggtgggtatggtggctcatgcttgtaatcctagctacttgggaggctgagg

SEQ ID NO: 163221 - DNA, 181 bp, Homo sapiens
atcttggagtgggaggagcaggatggagtattttggcttgttaaagtctaacttttaaaggttaggaaaccagggcatctcctggaggggctctgctggcagggcccaaaagacagtgcctttgaaggaagctgtgtgttagaaaaacagtctctaaattcccactttcccctggctgaaa

SEQ ID NO: 163222 - DNA, 405 bp, Homo sapiens
ggtgacctagaggatcccgacggcttcaacggaactctgcatagatcagagcagtatcagtgcacctgggagacaaggacactttctagagttgatgggtgccctaggtggtatgatcacaaagggcagaacatgaccagggcacaggggcttaggcccatgttgttttgtttggttttgagtcagtctcactctgtcacccaggctggagtggagtggcgcaatctcagctcactgcaactgcacctcccgagttcaagcaatcctcgagccccaccctcctgagtagctgggattacaggcacgcaccaccatgcccagctaattttttatttttagtagagaaggagtttcaccacgttgcccaggctggtctcaaactcctgacctcaagtgatccatcca

SEQ ID NO: 163223 - DNA, 351 bp, Homo sapiens
  misc_feature (30)..(30): n is a, c, g, or t
  misc_feature (34)..(34): n is a, c, g, or t
cgtgttgtgggtgggaatggaggtgttttntccngccgaattcggcacgaaaaaaaacccaggtaaatttaatgtatactatttaagttccacgagagcagggcctatgtctgttttgttcgttgttgtactcccagggcttagtatagtgcatgccacattaaaaaacaaaacaagacagaacaaaatcttccttaacaccaccatcacaaacccccccattaataattaattgacattaatctgaaattaattattcattgtaccggttcagtagcagactatacacagcagaaggcaagactagagagcttgtggacagatcaatagaaaatatctagataaaagcac

SEQ ID NO: 163224 - DNA, 410 bp, Homo sapiens
cttcttccatgtgaaaaccaatgtgttccttcaaaaagtaatcaacaattcattttcacaaccactaagaaattatcatgtaaataattcctgcatcagctatgcatattacctggcttcagtcttccacagagctttgcctaactagatctgcctctgtggaggtataaatattctctcagtccttaacataaacgaagtcaggatagtaaactggtaaggtcccctccaactgtcctctcactcaactgtaagcaacatccccaattctccttcatggaatagaacagcacacaaattcaatctagactctggcatcaatttaaaaaggtatagcattaagaaccatctgccaaaaattactgatcctcgcatgatgggcagccatagtgcatagctcctaaaatcag

SEQ ID NO: 163225 - DNA, 345 bp, Homo sapiens
gttggtcacgggacacccacagactaatcaacagtggccagatgggaggaatcacctgggaacatggctgcctctggaaaccacataatgggaagatgggaacattctagaagcagataggcgctgcaccaagaaattgtgtgggcagggatctggcacataaaactgaaggtggtcaccatgggtgtacatctactatgtatcttaaaaattaatctaaagcccagtgtggtggctcacacctgtaatcccatcactttggaaggcccagctggacaaactgcttgaccccaggagtttgagaccagcctgggcaacaagacaaaaccctctctctactttaaa

SEQ ID NO: 163226 - DNA, 161 bp, Homo sapiens
caaagtgctgggattacaggcgtgagccaccgtgccctgcccagattgatctttcatggtatttctcaggtcagttctgtcctgagcccccaccccgacactgctttacatgacaggcagtgttcacgtacacttagtctggactctgccttctgagacag

SEQ ID NO: 163227 - DNA, 367 bp, Homo sapiens
aaccccagttaagattcctcacttaggcagtagagcaggcagcaggcagcaagagcacaagcagaaacaggagcaggggactcaccggcctggcgccccccatggcatggaagcacggagacactggatgggggaacgtcattatttttttcaaaatacaagttcacagaagagacacaccatacctgctcatccgtgcaagtaaacatgtactccaaatgcaaatcaaaggagctggcattgcttgcgtgtgtgtctctccctcacattaggtataggaagcgggagcttccagcacaacggatgagctgcagccactcaatgggtgaccgtggatatttctggctgtgtggcctgatctctccca

SEQ ID NO: 163228 - DNA, 456 bp, Homo sapiens
ttatatagttcttttaagtcctgcctgagagaatttttggagaagagcaaattaaataaagaggagaaagaagtacacagttctcattccttgaaggcccctaaagcaaactccttgcataaccaaaagagagagactcaggctttccaacttaaatgtttataaatcatacacagaatgattcaggagaaaattttataagggattaattcaatttacacagtctaatcaaagagcaaaaatgatctttgacaaagaattcaaaggcaaaactgttgaaactcacgactaccaaaatattgtttaaggttaaaaaaacggatctgaaacgtgcctaatctgctctgacactgccaccactgcttgtcacaaatgaagtttccacctgaggcaccactgaaagccaaacttcagttgctatatttgtgagtcggtgggggaaaaaaggaaaataaa

SEQ ID NO: 163229 - DNA, 152 bp, Homo sapiens
tacatcgagctcggccgcatttggctcacacctgtaatcccagcactttgtagggatcggtgagggaataaagtggcccaaggacaaaccacccaggacacactccagagtttacaggcttctcttctgcaaacactctgtaaaagtttctg

SEQ ID NO: 163230 - DNA, 386 bp, Homo sapiens
ttgatatattctccagcaaacattcattaagttttcttgatgcgctgtgctatatgctaggtgcctgggatatgaagattaataagaaatgggacttgctgccaaccaaattactatttagtggtaatacacagggaagatgtgcacaggggtctcagtggccacctgaatatgtatactcagatgcttacactcttaggtaacgctcctcaaactttcccagcttctactctatctttttttggggggagatgatgatgattataggttagttaattatctataaaggaaattgaatattatgtaataattataataacatatctcagggtgtgcttattgggacgggatatgtattactctgattgcagagactagggagaaat

SEQ ID NO: 163231 - DNA, 835 bp, Homo sapiens
gtaagcccacgggtagatttcagaccctgagagccccagggaagtcctgagcagaattctttaggagactcagcattccctgggtcgaatggcttaggagaaccagagctgacccaaggattgaactctagaattctgcacatccaccttctcttttcgtgttctctgcaaccaacagcaggtttcttttgaaataataaaacgttctgtagctcttttcccctcagttcaattgatttcactttttaatcctgcattccctgagcactcttatcagaggcagaacatcttctgaatttggttcaaagtgtttttattactgtgagcaggctttttcctggccacccacatccctgattgattgctgtttctgagcacccatctctactaaaaatacaaaaattagctgggcatggtggcatgcgcctgtaatcccagctattagggaggctgaggcagcagaatcgcttgaacccaggaggcggaggttgcagtgagctgagatggcagcattgcactccagccttggtgacatagcgagactccatctcagcaacaacaaacgattactctaccagaccaggtagtatggtttggctgtgaccccactcaaatctcatcttgaattgtagctcccataattaccatgtattgtgggagggacccagtgggagataattgaatcaagggggcggtttttccccatacactgtcttcgtggcagtgaataagttttacgagatctgatggttttataaggggaaatccctttcactggctttcatttctctcttcccttccccatgtaagacatgcctttcaccttccaccatga

SEQ ID NO: 163232 - DNA, 329 bp, Homo sapiens
tttttgagacggagtctcgctctgtcgaccaggctggagtgcaatggcgcaatctcagctcaccgcaacgtccacctcccgggttcaaacaattctcctgtgtcagcctcccaagtcgctgggactacaggcatgcaccaccatacccagttgatttttgtatttttagtagacatggggtttcaccatgttagccaggatggtctcgatcttttgacctcctgatccacccaccttggcctcccaaagtgctgggattataggtgtgagccaccagcccagccaaggccctcttgatgatacttctgagacaggtgaggcctatactg

SEQ ID NO: 163233 - DNA, 441 bp, Homo sapiens
tctttcctctactccagtgtttctgaaacttgtttcataagaattgcagacagcttgttaaaaatagatattcccgggatccttcctggaggtcaggaaatcatacttttaaaatgtgcctcttcctcaaggaattttcattatcagacaactttagaaaacaactgccacccataaaaggacaaatgttaggatagtgatttctatagtggaatcacatcccagaaaaattcaagatgacccactagaatatgaaagaaaatactgttctatgtatatttaaatctcaggtctcaaaaatattcctgttttaggagtgtattttataatgtacacattaaatcagtgcaatagtgcatgtaaatcattcctccctccctctgtaggatgtgtgaccataaaaaaagtagagaccactgctttaaggctcctgatttatta

SEQ ID NO: 163234 - DNA, 560 bp, Homo sapiens
attcatctcatgtttttagcctggattttagctccaggaggaccaagtgctgttcgtcttgtgaattgctatatccaagtactagcacataataattgctcaactaacatgatagagaggacatggtatatttcctcaattatggtggtcaactgaagacacctatgtttcataacttcagaagtcaaagtcatcttttccatactcataggccagatctctaagccccagagttgtcaatcatttgagcaaatctaaagccctttgttgaggaaaatatcaaccctgcttgtaagtacttcttcactaccttcacattgaggcaaggtcacctgccattaggactagaattcaagtaaagcactttaatttaacaaaatgtcatttcaacaactttgcctaaggtacctacagcctaaggaactcttcacagttgacacaaaattctaaaatgaacaataccttggcaaagcccagtggagctccttgatataagacagtgactaagagacgatttctctagcttttggagcactacctccagacagattacctggagt

SEQ ID NO: 163235 - DNA, 312 bp, Homo sapiens
  misc_feature (105)..(105): n is a, c, g, or t
caaaatggcaaacgtaggccagacatttgctcacacctgtaatcccaacactttgggaggccaaggtggaaggattgcttggggctaggagtttgagaccatccntgcatgacatggcaaggccccatctctataaaaaaaaaattttttttaaataaataaggcaaatgtattcatggtgggtggtagtcaaaaaagtttgagatgttgacccagggaacaagatctaataatctgcccaaacccaactcctacctcctctccacgctctattccatccccgttctggactcacctctgctctgtcctttg

SEQ ID NO: 163236 - DNA, 1641 bp, Homo sapiens
  misc_feature (1499)..(1499): n is a, c, g, or t
tccctctctcctcgcccgctgggtgctgaagttgggcggatggcagcaaaccggctccgctagaggaccgagccgcccagccccgctcccccggacccatcggcgcgctgcccacacctccaggcgaccggccaactgggtcctgaagtagctgaaatgcgaaaaaggcagcagtcccaaaatgaaggaacacctgccgtgtctcaagcgcctggaaaccagaggcccaacaacacctgttgcttttgttggtgctgttgttgcagctgctcctgcctcactgtgaggaatgaagaaagaggggaaaatgcgggaagacccacacacactacaaaaatggagagtatccaggtcctagaggaatgccaaaaccccactgcagaggaagtcttgtcctggtctcaaaattttgacaagatgatgaaggccccagcaggaagaaaccttttcagagagttcctccgaacagaatacagtgaagagaacctacttttctggcttgcttgtgaagacttaaagaaggagcagaacaaaaaagtaattgaagaaaaggctaggatgatatatgaagattacatttctatactatcaccaaaagaggtcagtcttgattctcgagttagagaggtgatcaatagaaatctgttggatcccaatcctcacatgtatgaagatgcccaacttcagatatatactttaatgcacagagattcttttccaaggtttttgaactctcaaatttataagtcatttgttgaaagtactgctggctcttcttctgaatcttaatgttcatttaaaaacaatcattttggagggctgagatgggaaataaaagtagttaaataacatcagaaactgagttcctggagaactacagtttagcattcctcaggctactgtgaaaacacaaccgttatggtctttgtctccatttttatcaaggttttccatggttaagtttggagaaaataccacacaaaacaatgaattgccaaattgtttgttttattcaagactcattctacttgcaagcaaagtgtatttgtagtcctatgaacagtctcctcgtgtatctccagagactgcatgtgcaaagtaaaatgcttcatttgccacatagttgttgtaatatttaatccagtagcataacttatatctgtatttaaggacttttgtgcaatatggtcttaagaaataattgccaaaaaaatcggccatggtttgcattttttaacataatctaagacagaaaaaaagcaatttttactatgtaacaatggtattcaacattctatatactgtgtttagtacactaattttgaagccaatatttctgtacatgaaaaagagctatttatctctgtttgttggaaaatcctaatggggattcctctggttgttcactgccaaaactgtggcattttcattacaggagagtttactatgctaaaagcaaaaaacaaaaaaaaaaaaaaagggaagaaggaaaaaagcanaaaacaatttgaagatatcctatctcaatgacaaatcaaaagagtgatattgcttttaactgtaatagaagaaaatgaatttatgtatatatcagatgtccaatactgtaattaatttattaaagactggctctccagtttt

SEQ ID NO: 163237 - DNA, 438 bp, Homo sapiens
tccctctctcctcgcccgctgggtgctgaagttgggcggatggcagcaaaccggctccgctagaggaccgagccgcccagccccgctcccccggacccatcggcgcgctgcccacacctccaggcgaccggccaactgggtcctgaagtagctgaaatgcgaaaaaggcagcagtcccaaaatgaaggaacacctgccgtgtctcaagcgcctggaaaccagaggcccaacaacacctgttgcttttgttggtgctgttgttgcagctgctcctgcctcactgtgaggaatgaagaaagaggggaaaatgcgggaagacccacacacactacaaaaatggagagtatccaggtcctagaggaatgaggacaggatctttgttatgtttttcccagggttgaccttcaaacttctggggcttcaagggattccttccca

SEQ ID NO: 163238 - DNA, 656 bp, Homo sapiens
tccctctctcctcgcccgctgggtgctgaagttgggcggatggcagcaaaccggctccgctagaggaccgagccgcccagccccgctcccccggacccatcggcgcgctgcccacacctccaggcgaccggccaactgggtcctgaagtagctgaaatgcgaaaaaggcagcagtcccaaaatgaaggaacacctgccgtgtctcaagcgcctggaaaccagaggcccaacaacacctgttgcttttgttggtgctgttgttgcagctgctcctggtatgtcatgttacctgtaggatgccacacccaggcttggcaggcactagtgtgaacatgcatgccaaatctcagaactgtagaaactgctcaacatgtctttttttgttctttctttgcaagtaggacttattgaagactatcattggtttaatgcaaatactttcacaaacaaaatatataatatttccccaaaatctacatttaaattgataataaggtaaaaaaaatgaagaggtgttttatatcatgtttttctccatccatgcttcttaaagatatgggtaaaaataagattttagttacatttgtatttatcaataagcaatattctccaatgttacaggcaagaacattaaaataacatctagtaatattgca

SEQ ID NO: 163239 - DNA, 1368 bp, Homo sapiens
taaagcattattcatactaatatcagtattttcaagtcaacactcccatcaactctgaatctctctctcatatgaatcttttttcaattagagtcacaatgaatttacagattgagtcttcctattcaaaagcatgaaatcttgtgtttaagtctaattttatgtaacttagtagtgttttatgattttgttcactaaggtgctttgaatttatagtttatttctagatgttttatcatttggctatcattttcaatggaatgatttattccactttattttctattttatcccattgtataagaaagtagttggtttttatgtatgaatgttataatcaaccacaaattgtgattcctacttgtttctaaggtatacttttgacttctcctttccaatgtgtctcttatttctttcttgtatctagttgatttgagatcagtgttgagtcacagtgactcaggtggcatgcttatcttgttcgtgacatcagtgggacgttttaatgtctcagcgtttaacttgtatgaagacatgtattttccttgccataataaaaaagtatctgtgtgttctcaaactattaagactctctggggaaaatgtagatgttagatttttgtcaaagccttctcagtgtccagagggattatcagaaggtcttttcctttgctctagtagtatgtttaattatattaatagaatacttaagaccaaatcattagtgtattcctgagatgttctttacttattagtatcatgactttggttatcaatatttataattaagattcatcattctacatcttgcttttatgtgttttttgtccagatttaactttatgctgacttaaaggaagaaatattataaaacaaaaacctctatattctacaatcatctattggttttggattattttctgcttaagtgtagaagaactagctggggctgtctgggcctgccgtggtatatttctggattttgctcatcaggcaagttaggtcctcgagcccttctagagtccattttaatgacatttttaaaaataaaattaattccatccacttttcaacatagttgcgtagttttgtaatatatgcacttcaggtgttttctttcctctgtatttgtggctttttctcctttttccgtttgtaattgtgtgcatttctcctttctcccgtgcctattgatttagcttgccatgagttttaccggtttatatttttaagacatcggacccttagactttgcagtccgaggacctgtctgcagggtcttgggggtccctgcgttgacccagccctcccaggtgacagcagtgggccagcacagcagaagccacagttgttgcaggtgcttctcca

SEQ ID NO: 163240 - DNA, 600 bp, Homo sapiens
tgtttgtcttattgcaaatataggctataatgagttaagtgaacttttatggggtagtcttctgagtagagcatctggccaaaatacctcatacccaccaaaaacaaaaacacaaaatatttggagagcacagtttatctttttatttggaacttctttgctattacctgaatttctagttaacctatattcgtattttgggtcaggtatcttaggagatctcagctcttgtctattaggattacttagcaaattatcttagtgaactttctgtacaggagataaagcataacctttaaatgcattattttatagatttttctccctttaatatttaatcatttgaaagtctctcttctacaagttgtttagtttcaagctgttcaggtatatggaaatataacctttctgtatagatgtgggacagtttacaaatgaatcagcccatactttcatagtttagttcaaatgtgacaaaattatatttggaagacttaggtgtagaatctctttttattgactgaaggcaaaacaattttaacttaagtgaatgaagtaactttgttatttttaaacatttttttgaggcggagtctcgct

SEQ ID NO: 163241 - DNA, 454 bp, Homo sapiens
acaaccccctcctagcctctatcacctgctccatcctgagtcacccccagtcacctgctctaatctgagtcatcctgagtcaacagggtttcaccatgttggccaagttggtctcgaactcctgacctcatgtgatccgcccacctcagcttcccaaagtgctgggattacaggcgtaagccatcgtgcctggccagttttcactttaaaatgatctctaataccaactcttggggtccaaatgggtccccactggtttcaaatgttgagcatgcacagattatgtggatgagaacttgccaggtgggcttaccgaaggagacgtggtaagaatcgcctacatttgccaggccctgaggacaggccctctccacaccgaggcttatttccttgggttgcagaagaggaaacgccagggagcccagtattctttggttcattcacttctttttta

SEQ ID NO: 163242 - DNA, 320 bp, Homo sapiens
tgcttcaactcaagatcaagtgctgggatagtgagtggctcttagtggagagggatgtgctctggaatattaagccacctctgagcatgtgtcctggtgctctggtcaagatgcctgttgtgtatgtggaggtattttgtggcttttcttgttctctctttttaaatttatttcaaggcacaagccctttgtgatggaggatgtctagcttgaacatgctggtaatgtgacactatcctcagctccccttggccctgggttcataggaggcaagtgtttctaaatttctcgcccagtgagttgttgcatgttatttttaa

SEQ ID NO: 163243 - DNA, 673 bp, Homo sapiens
catggttcacatggactgaaagtgaaaaagaaatacagtggccttgatagctaatctttgtctttggatctgtcaccatattattccaacctatagtatcctttctacttacttcttcccctctgttactattatccccatacgctaatttaaatgcactcatcaaaaaatatatacatttatatgtatctcaccaagaacatagatacactttattcatctaaaatcctatgtagggattattcccgctggtaaaaggcaagtctttgtagcttctctaataaaactagagaaaacgatgtaaaaatcaatagagcttgctgaaatatcaccactaactaacccaattttcttctgtcagaataacatgaggtttaatagatccagagagtaaacaatgtaatatatctacaatttaataggacttttacttttgccccatataatacacctatattaaaatgtgattcaggtttattgtgatgaggcacacagtctacagaggattgaagtgttgataaatggttgtttcagtcttgacgagtaaaatattccttataggttagactttgacctcatgtattagaaattatttgtatcttgaataatttgttttgtctgtaataatcacacgtttggaactcttcaaaatgtatgaaggactctatctctt

SEQ ID NO: 163244 - DNA, 381 bp, Homo sapiens
gcctcttggcggattctagaggaaccccccccttcccggggtattgaacaactaatgaaaatacaatacttttgattcatttaagctctctcaaatcacgcctaggctttttaagaaaactaatttttgaatggaagattcaggcttgtgggaagagccaagaagttggcacgatctaatcaggtcagttcttttttgatcaaggacataattttttaaacaatactcaacctaagggtcaagttacaatttttgctttcggagagtttcagtacaactggccaaaatttggctaagaacattttttcttttattacgatcttagaagatctaacacattcactagtatgcccaaaaagtaaaaacatgcagcaaaaagta

SEQ ID NO: 163245 - DNA, 258 bp, Homo sapiens
ctaacaaagacaccagtcagattggattagggcccaccctaatggcctcattttaagttagtcacttatttaaagcccctatctccaagcatagtaacattcttaagtacttgggattagggcttcagcatgtgaatttggggagaaggcatgaatcagcccttaacagcccataaagccctagacacactgtacgagctttgtaaaagttggttggtggttagtggttgatggtggttgcaggactctctgctccca

SEQ ID NO: 163246 - DNA, 712 bp, Homo sapiens
aggcgtgagccaccgcgaccagcgtatttctgttttccttcctgctttatttgcactcatgtccttacgtaccaagaaaaagtttgtaggcaaacctttaggccctcctacagcacaggcggggccagactcctcacacattcccagagctcttttttgcccccatcccatgatggcaccccaaactcccatttctttgctatctccactgtcagtaaccacctgcgtgaccttaggtgagtaacctaaacctccctagactgttgtcgtcacacttttcaagtgagggagttggactacatgaactgtaagatcctctcatcctgagtttctcgctttaggttttgcaagtacccatcattgccacagcacctcagaccctcaacctcccaccactaatcagccactatgggccttagtgtttcctgccttccagtttctcatcttcaaagaagtcaattcatatctacaacttgaggcaaaaatttcagatcatcaatacagtacctgttctatcaacaaaaggtctttcagtggggaaagcagaggtaacaaggcaacaaagccaaatacacaaaaggacagaaaaagaaaacaacttacagttcttggttaactaagttcaacttttcattattattttatagtgacaggcaggcctcactatgttgcccaggctaatctgtaactcctagccacaagcgatccttca

SEQ ID NO: 163247 - DNA, 260 bp, Homo sapiens
ctgggcgtggtgggtcacaactgtaattctagtactctgggaggccaaggcaggcggttcacttgagatcagcagcccggaggccagcctggctggcatgacgaaaccaaaaaattcatgtgacttcctttattgtgatattggttttatcgtagtgatgtggaacctaacctgtagtatttctgaggtatagctgtaatgactgtggtactggggaacgcttttttttttttttttttaggtcactgtattttaccact

SEQ ID NO: 163248 - DNA, 189 bp, Homo sapiens
ggcctgcaacataactttttatatgcactaggaaaccaaaaaattcatgtgacttcctttattgtgatattggttttatcgtagtgatgtggaacctaacctgtagtatttctgaggtatagctgtaatgactgtggtactggggaacgcttttttttttttttttttaggtcactgtattttaccact

SEQ ID NO: 163249 - DNA, 262 bp, Homo sapiens
ttcaaagacatttttgtaaatcattccctaacctctgaagtgttctttctttgttgctcccagagtcccctggtctttacatattaaaaatattaggctgtcctggaaatgttgtcttatttgtctgacttcaccactaaagtatgagtcccttaaggttgtcatttcatttttgtagtccttatgcctaaaatagcaacaagagtagcccctttattttttcaaatgaataaaaactaatgaaattaacattttatttgag

SEQ ID NO: 163250 - DNA, 221 bp, Homo sapiens
cagatatggcctatggctccacagagtataccatttacctagagagacaggcattaatcatatgctactcaaataattatagcatttcaattgttaaaaaaatgttatctaggaaacattaactacaacagtatagaacagagacccaatctttggaaggattagtggggaaggagagggtcaggggaggcttccatagcaggagtctttggagctgagtt

SEQ ID NO: 163251 - DNA, 416 bp, Homo sapiens
ggtgttccatgcacacgcgcggcacgacgtgttgctgggcacttctctcagctttttacaaaaaatgatgcaatgaatacgtacctggttttcacagttgtgcaaatgtatctgtaggcaaaaaccgtgttagggattgctcaacgcagacttaatgcatgagacctatgggcgtgtcggtcctctgatggccacgaagaaccggtgactccaccttcctcgtatacacaaacaccattagctatttgcctcacatttgagatacgtgatttatgtgttctcttccaacaggaagacaataaggcacagatcgccctcagtctgctcactgtcgcagcctgtgcagatttagtatctggcacgggtttcagagacctagctaggtcagcccttccctgcacacgtgtacacgaaac

SEQ ID NO: 163252 - DNA, 914 bp, Homo sapiens
ctctgtcgtttcttcaaggtgtgtctcctctgtctccattggaatgttctcctcgtctttcttctcctcacctttgtttggtgcttgttcttcctcaggaatgatgctgccctgactgcactcggcttgctctgccgcctccttctccctttcctcctgctttttgccggtctgttcctctgcctgtgcaatctcagctgcaactttctccatatccacttctactgtcagaccgcacaaccttttaagttcattgttaagtgaatctgtgctttctaggaatttcctcttctcctcctgtatttgaagaagttcagcttctagttttcactgaggaaccattaaggactggacctgtcgtttaaggacctgcattctagctgttgcgacaactgaccgaacgtctggcaccacactctcactaaggatttcactgaagaggtgatggtttcactaaaaacccatcatcataatcatctggatcttcagcagagctgaatgctcatatatggttctcctttctccatgtgagactgtctctgtcgactttcttcctctaaagcagcttctgcacgattttttgcatttacgtaagcaaggtatgtgggggaattatgatagaccttcataaattcattgtactctttctgcttcgtatccatttaaatattcttgtttttcttcatcagtgagatctcgccacatgccaccaataatcttgccagtctccaacaactttaggtcagggttggaagcctttacttggtcccagacctttcagctgtacctcatgtagggcatcagcagcttatctggtggctttgggggttttggaattgtagtaccagaggatgccatgaactggctgttggcacccgggttccctcccagcccttagttgttgtaggcgagat

SEQ ID NO: 163253 - DNA, 582 bp, Homo sapiens
gaaacttgagtgaggatgtgcggggacgatggatgcagtataatgctggtcgggcccagaagggaggagggctggggactccttaaaacctactgagggcctgggcccggtggctcacccctgtaatcccagcactctgggaggccaaggcaggtggatcacctgaggtcaggagtttgagaccagcctggccaacatggtgaaaccttgtctctactaaaaatacaaaaattagccaggcttggtggtgggtgtctgtagtcccagctacttaggaggctgaggcaggagaatcacttgaacctgggaggcagaggttgcagtgagccaagattgtgccactgtactccagcctgggtgacagagcaagagtccatcttgaacaaaacaaaacaaaaacaaaaacaaaaaagaattaattacctgaaatcattaggtctatcagttttagatttagatttgaattgaaatgtcacttaaattagatacaatttaaaaatccatatcatgaacttagtttggaaaaatctcatgacaattaaactttcaaaatcttcaaaagaacttccagtgttaataatg

SEQ ID NO: 163254 - DNA, 531 bp, Homo sapiens
cacaggggaagtgtttaaaggaacaaggaggtcgtggttcatgaaggattggccgtgtagatctaaaaccatttctcactccttctgaggggagcaaggctgaagaggaaggaggggacaccatggcagttggtagaggtcatgtgcttcgatggctgaacctagcagccttttaccatgcagagaatttagcttattctctagagacacacacacacacacacacacacacacacacacacacacacacaattttgtttggctttgatccacacaatgtgtttttaaagatgaataaaaattgataatatcaggtattttttagcctcgtaggccaggaaaaagtaaaatattttgaaagagtaaacaggagcgtctcagcagcatacatgttacttttcatcttaatcatgtgagcctctcatgaaagcctccaaggaggaggttaatggatgccccaattctgtacctttatcaggtttaagcttacttcagtttccctttagtttgttgcctgcagtatcataatta

SEQ ID NO: 163255 - DNA, 591 bp, Homo sapiens
tacttccccaaactctgcagactattatactttctcatcaggaaaacaaaaagacatcagatggaattacctcaacttcctcctgccacctcggctatacgcatccttgtttatagcacgagagtaggtaagagtacaggctctaaggcagatgcctaggttagaatcctggctctgccacttactaaagatttgatctgggcaagttgctcaatctctcagtgcctctgttccttactgtaccccctaaaaagccccttcccaatggcattcaaaatcatttacaccatctacctcttctgtgaagtatttccggtatctcctagcttcaaaggattgttgtgagttaaatgagataacacacatagactgcttataacagtgcctggcacacagtaagctcccaattaatgttagtcgtttttactactatcagcatccacacctattcttacctccaactgcaatgcaagaggcattctcttcttctaaggcaaatccttcaccgaccttctagacgccaccccttcaagagacttgaacatcaattattcatgtataaacatgctcaattctcaccatcttaaaaat

SEQ ID NO: 163256 - DNA, 128 bp, Homo sapiens
attgggagaaaggtgctctaggtcaaaatgatatagtcctagtctgtttcagagaaattcaagaaaatttgacataatcacaaataatatatttaatcaactacaatctatagttaagctaaaaagta

SEQ ID NO: 163257 - DNA, 195 bp, Homo sapiens
gtggacatttccacgagtcactcttcagacgtgatcctttgccacgtaaggaaatgtgatgccctgctcccaacctccaccccagcacgtcccccttacctgcctagaaaaaagaagaaaagtttagtagccaagaatcccaacaggataacacatactcatgccaactactcccgcgactcgtggaaatgtcca

SEQ ID NO: 163258 - DNA, 245 bp, Homo sapiens
taaatcaatctcttaatctcaactaattactaattcttaatctcaactaattatttttatccttttatctctagcccaggcccagcacttgtagggttgcaataaatatttgagagagggaaggaagggagggaaaaagaaaggatgggcattccttgaagtatagcaccataacttcataatttgtggtttgttgtttttgttgctgtttggttggtttctggtttgttttgtggctctgtaag

SEQ ID NO: 163259 - DNA, 213 bp, Homo sapiens
tccctaagccaaatggggtggggattggtgtcaacttttttcatacaagttgtttagttgcaaatatcgccaacgttttatctctactctgtgaatttgtaagggggggagggaaatgtcaaactcattgaagtaggattgaagatctgggatgaaaatactttaaatttttattttctacttatatatcagccaggatgttaggagaccttg

SEQ ID NO: 163260 - DNA, 717 bp, Homo sapiens
gacacattcagatcatagtagcacgcatgtcagatgctggggttacttaatttttctggcacatgaggacatttcagccaagcgtcccctgccaggatcttctagccactcagagagggccagcagacacgggggtgggggaagttgcagtttagccagctgtgccttcctaccccaaacatgcaccttctcttccccactgcccacatgagaacttgaagttattgtattaatggccacgtgtgttgttcttaacagaagttactctatttgtcaaaagactaagaagaaagacgtacctttccaacatggctaaggtaggcttcagccaagcagataggagggaacaaagcagtttcctgaaaagaggtgaaagctctaagtccctgttaagagtgagtggttgctctgtccatctggagggcagagggcaggcagggtggccttgcctggccactggcagaggagtccaggtgggcccccgtgactcaaagctagaagcctgccccctttccacccatcctcaggaaggctccaatctcctggctctctcagggcaggagggaaggcaggtcaacacttaaaagatgcccgatggccaggcgtggggggctcgtacctgtaatcgcggcactttggaagtccgaggcaggcagattacttgatgtcaggagttcgagaccagcctggccaacatggcaaaaccctgtctctatc

SEQ ID NO: 163261 - DNA, 406 bp, Homo sapiens
ccatacagggaggcaccattctgcaaacgccagattcatagactcactagcagcttgcaccctgattgtggaaaagctataggtactccacaacagcccagcccatgagggcaactggggaggttagaccctgcaaagtcacagatgcagacctgcccaaggccttgggatcccaggcctcatacccttgtgctctggatatgggatctggattcaagaaaagtgatttggagctgtaggaatcaatgactggccagttgtgttgttgacttttatggggtctgtaagtcccaactgtgttttgtacttgtttctggcaaatttcttccttttggctgggaatacttacccatgcatgtacaatcattgtactttggaagtgcttgctttgtatttcagaggctca

SEQ ID NO: 163262 - DNA, 437 bp, Homo sapiens
tcaggcattccttgcagtaataatagtttggtgactctagttactagtataggggtatggctcttccacagatggaagattttacttagtcctcagattttggtatgcagtagtgccatctagaagtgttaaaattgcagactccagagctccatctaaaagagccagtaaatagagtgggtctcaggaaactgcatttttaaccagcattggtggtgattctgttgccactgattcagtgcagcaggtcaggaactggactgctcactgaggatgacatggaacataaaacagagagggtctttgctttactgttgtttatagtcttgtgggaaagtccagaaataaaaatatcagataaataactaagataattatggattatgataaatgagatgaataaattgaataactggttgagattgatgaaatgggaa

SEQ ID NO: 163263 - DNA, 423 bp, Homo sapiens
aatgtaagccttcattttctcccagaaatcttactttaattctatcccataatatttcccatcatttaaatgtcctaggctcaaagtgcatggcacatcatgtctaatttccagttctctccagttgttcatgtataccttaactcccaacccagactctaaatttctcaagacaaagctaatgcctgtcacttttctcttccacaggctgtggtgtaatcgggacaacaatgaggcaatcctaaagaggtatcccaaattagggaaacccactgccccaactttacattaccaaataatggttccaggatgaatcaagatgatatagatgtcacagtgcaatcatcacaatgtcaacatgaccacaaagaagcctattctagctagttaagtttctcagaatctcatctatacagttggagg

SEQ ID NO: 163264 - DNA, 330 bp, Homo sapiens
tgctgtatattacataacagaatataaaaattaccagcaatccctctataaaagtttatttgcggctgggcacagtgagtggctcatgcctgagcactttgggagtgactttgggaggccgagatgggtggattgcttgagtccatgaacccaggagttcgagaccagcctgggaaacatggtgaaaccctgcctacaccaaaaaaaaaaaaaattatttgctacacttttttaggcccttcatttctgcatacatttctatgttctctttttctatactccaatagactatccccttctgttaatacccacctgttttcagacaagtgt

SEQ ID NO: 163265 - DNA, 318 bp, Homo sapiens
gtgtaccagctcagtatgattgcaccctttttttatacctattatgttggctaaaactgaacaaaaactgtgtccttttatgaatgagaaaatataggagagaatttttaaaaaccttttgtcttctatgactaaagagacttgctttttttactagcccctgttttgagagccggtcagatgtagttttagtcatattggggaggacagtgtttaagcagataccagagctccccattatgaaattctttcctgacaccagccccaactaggtcccagtaagaaatagatgcagaggacaacatcctacaaaggaaa

SEQ ID NO: 163266 - DNA, 395 bp, Homo sapiens
gcctggttgttgtggtcccacaaaccacaaatcatacgagagaggatcccgaaggcgggagaaaagtcagtacagacttgttcctgccacctttggaaagaaaaagttcctcaccaggcgcggggcgtgctttgctctgggcagggtcgcgcttgcaggggcttgggtgacccccatccctccctggcggctcacctcctgccgaggagggccacctgcctcctcctggcccagggcgcagggcgcgtcctgccccggcactgcggacgcggggatcgcctctcccgggcgcgcgggcggggaaggaggaagaggcgggcggggaaccgcggggtgctcaccgccctggggcattaggggtgcggaaccgcgttggaggcctcgcggccccggct

SEQ ID NO: 163267 - DNA, 690 bp, Homo sapiens
gactcaggaaccaaattgaagtttctactgggacaatttgagcattaataagataactgcaatggtttgaaacgcatcaagtccatgagttcataataataaaaataaacttgtatcattggccaccttttaaggataccagggaattaactcattattttgaaaactggtaaataaagagactcaggcatttattttgtcttcctgtatacagcatctcagcataaatcgttgagaaggggagtttgtctttatagaatgtagctaataaattaagtaatggtagaatgagagtattattttttgcaactcgtaaatcattaatggatctaggcaatgatcattttgtgtttcctaatgggagtacataacaaccctgttgaaatactcttgcccaggttgcccaagttacaccaacctgaatctgatcaagccccgagatctgattaccagcttacaggaagtaaagaggacagagaaacaaattaaatgacactaccggaatacagaggatagaaatatctgataggcaatcaggaatatctgcttaccaatttacaggaagtacagaggaacaaattaaatgataccacaggagtacagtgagcaaaatccaggcaatcttaggctctgtaagataaacaacgtggtttcttcaaaagatacattgcaaggaaaagagagagagat

SEQ ID NO: 163268 - DNA, 378 bp, Homo sapiens
ttaattttcaagttaacataagtctgagtatatgagactgtcaaagccagtttgcccttgggcaaaattataaggtccagtccaaaagaagagatagttccctttattctgagtcaatcaagtaccacatgtattgtgttcatttaaaggtgccacatgtaaagagggatatttacaaacttaaaacacttgcatcagaaaatgaccagaaagaagtgaaactgttgagtcaggaagttaaatattttggttgagttcaaatgtctgacagccattgggaagaagaggaattagacttactctgtgatttttagaaagtgagacttggaccagtaactgaaagttgcaaaaaaatatatttcactttactcttaggaa

SEQ ID NO: 163269 - DNA, 387 bp, Homo sapiens
tgtattatcctcctagcttctgcgactgctaaggttctgacagctgcagcctgagagctctcctgctttttgacagtgaatgaaatcctgataataactgtcttcgcttcccgtctctattaatgatgacaggttaaatggggcagccaactgaatgctaccgacagctttaaatggcaacacattaaagcaaaaggtgcaaggtcagccttttatagctgtcgcacttaacaaggttaaaatctaatcttctgctttgaaaagtcagggagttcaatttatcaactcagcatggaatgatcaggttctggggcattcacattaatgaaattcacaaaagactgattcatcctacagaacaccaattgtcatggactgaaccatgtc

SEQ ID NO: 163270 - DNA, 484 bp, Homo sapiens
ttaatgttgaacatcacccactctcttgccaggatctctccagctccctatggttcttttgccacactagctagtaaatctctgaacgaggaggatcaatccaactgcctgcttcctctattcccataccacagctactgagtcctgctgaagaaaatcataacaggttaggaattcattccactacaaatttacagtttctaatcctaactgagattactatcctgttggtaattcatccacatgcctcaggatcagtgaccttttccatcccagacagtaatcaatgggtactctaaatctcaagccaaacactctatacatctcttctctcacaattgccctttaccagaaaaaataaatctgacctcaccccattttccagcctacactcttcgtcatacccatatccttcattctaaatgttaggcaaaggtttatctcctccttccctgagctagcacagtaatcccttcttgcctcc

SEQ ID NO: 163271 - DNA, 759 bp, Homo sapiens
gtattcttttggggtatcttttttctcccatagatttttggggaacaggtggtatttggttacacgagtaagttatttagtagtgatctgtgcagatcttggtgcacttttgggtaccaattaaatgggaaaaggaatcctatgggaatccacagttttgaatggtccctgagtttatggtttttacccgttttgggtagcttctacaaagggtcctaagggtaaaactaagtttcagtacttcacttctgtatagttttatcctgataataacttacctagcatatcttcaaagattttaagcagatattttcttacctataagcctatcattttagtagtcttcagcagtaaatatatgccaaaaacagaataaagcctttactcactctttggtccagttcaacatagcttctggatccaccaaaactctttttgcagaggtcaaaaatgagtactaaactgccctatcaatttggcatacttttcattcctatctaattcaacctgtaaagttgctgacacacctgattattttcttctcttagagccagcttttgacttccacaacaacacactttcctatacaactcctatatatcattcctcaaggctcagatgagacaggtcttctcacttctatatttcctctgccacctgtttgtcttggccgaccaattcatcttctatatggacagcctgttaactggatttcttctgccaccttatgctaagaatggggaccctgagtcactgagc

SEQ ID NO: 163272 - DNA, 531 bp, Homo sapiens
gccctagaagtccaattcttcttgtcttcctctcagagtaaagtgaggtgggaagagaatcccaagtgcaatagggtatctagtctcaagaggcagcaccaccccctgaagcacagcatcttcagtgacctttcctggcttagtaactatgtgaatgtctgttattcagagttaccagatttcaacaaccagagaaaaaggcacaagcatttcctatttccattctctagagatttgctttgttaggaaagcaagactcttagtttctgtcacatggtgtattaagttttattgttgaagaggacgttatcttgagaccaagaatgcaaacaagattctatattagttctaaattgtagatggcccagtttatccagtctcatgttttaaaaatgaacacagctcaatggcttgcaagttgctacttacagatagtttcttcccattgtttgagagccttatgtcacattattaactaaaataaattcaagatagattaaaagagttacatgcagaagagaaaaccataaa

SEQ ID NO: 163273 - DNA, 1011 bp, Homo sapiens
taaaggggtgtgctggtgccttgagagcatccgtgtgcaggggtggggagtctgcaggtggggcagcaccctggctgctgagcctgtcctgtctccatgttcatagcatcccagggcttaactctttcccagttgggttgtagcatatgacactgaaggagcctgtaggccatcctgaactcaccgagagaggcaaattagcagctcctgggaagcaaggctgcctggccaggctggcctggattgggggaactagttgctactcgagaactccagcttcctatctgcttttgggatgaccctccctggaaagtccctcccactgctgtggaattttcaggctaccaaatgtgcccagcctgcctctcaggacagacagacagtgagaaaaagatctccagggcccactaagtcttccagagggagctgagacattcagccttccctggcagggctcaaagaggaaaaaagggattggaaatggggcccctctcagagccacttcaaagcaccctcccctgtggtcatgtgtttcagttccatgtgagtagtttttcttgacagtatcggtaattttggggaacagttcctgtgacactttgggtccctaaggccctgccctgaccctgtgagtggatatagttgggcacagagtgtattttgttgaggagcagatattggcttcctggtttgccaaagagctctagattgggagacaagaacttgatgttccagtgccagctctacagcaaatcactggtgactttggcctctcctggtcctcagtttttctgtatgtacaatgagattctcaagtctttccagccctgacttggtctgggatcaccctctccactccaataatgggaataatccaaagtaattttttggggattcagaagcctcttccaacaaaggatgccctaagattggaaggacaataaaaatgagtttgtgggccggccacggtggcccatacctgtaatcccagtaccttgggaggctgaggcg

SEQ ID NO: 163274 - DNA, 337 bp, Homo sapiens
tatcttaaagtagtcatgttatctccctgctgaatctctgatgagcctactgaaaaatgtgacataattagggatgaatttttcggctttgggtaatttacttaatgcaccatctctgaatttgacattgaacgttcattgttcactcattcaataaaatgtcatctatgcctaggtatgctgtgctcattcatttgaaccaggggtcagttgcaaattgaagggctaagagccatatctggtccccgccccccgccaaccttttttttggcttgcacattgtttaaaacaaaatgaaaataggtttttagttttgctaagatgtagcaacactggg

SEQ ID NO: 163275 - DNA, 172 bp, Homo sapiens
tgaatatacagtttacaaaatagcacagaggtgacaacgctaatgacacaaacttcccgcagcgtctgtgttcaggaacgtcagaaatccatggtaggcagatgacaggaacacaggaatgagagagaccagaaaagcagtggatgtgtgagaatacctgctctctccaatg

SEQ ID NO: 163276 - DNA, 628 bp, Homo sapiens
acagtttcgaggattacaagcggctgtggaactatgttcataacttttatgtgggtctgaagattttccagtgcccaggctgggcactctgcttagctttgcgcgtggattatctcatttcatcctcagagcagcttggggatgggagagctctatcacacccattttccagtggagaaaacagaggcacagctagttgtaagcccaggccacattatgcccccaccccctgttttgtgaaatttagtactaaagatactacatggctgtgtgatgtcgggcaaatcacttaacctctctgtgatctgtttccttttttcttttttttgctacgagtggataattataatatcagaaggttgttctgatgggtattatgatatataaagaacttagaacagggtttggcctaaagtaagcgctgagcaagtgtctgctgttgctgctgctaattgtatttgttgctgcagtcgtgatcccagcaccctcaccttggccagtgatggggaaacctgaagggtgttttttcttctgtacccagggcgtgcttcatgggtttgtgatctatatggtcacacagggtcccgtgttcagaagatccccccatgtcactgacttgcaattcgta

SEQ ID NO: 163277 - DNA, 116 bp, Homo sapiens
accagcagaggaattgacagttttgggtaagaaatgcaactgacttttggatacaaagcatccagcttaatataagggagcagaagtgtgaagttgaactagatagttaaccatta

SEQ ID NO: 163278 - DNA, 104 bp, Homo sapiens
ttcactctattgggtttctttatactttgtaaactttgtggtttcaagtaatatccttatgcttttatttctagttttatcagtaatagctcatttcttccatt

SEQ ID NO: 163279 - DNA, 340 bp, Homo sapiens
caatgtccactgcccctattcaaatacactcaacccagtaacctaggatctctgcatactaagaagtattgagaagatagcaggggaaataacaacaacaacaaaaaaatcctgttaaaccttccagagaaattgctgtgcccttgttttaaataaacctatctagtgaggccactgctataactctcctccaaaacaaggaccatctgttgcaagctggaagactgtctacacctaaataaagaaaactcacaatttttttttttttttttgagatggagtctcactcttttgtccaggctggagtgcaatggcacagtctcggctcctgggttcaagc

SEQ ID NO: 163280 - DNA, 580 bp, Homo sapiens
tatagtttgaagttggatagtataatgcctctggctttgttctttttgcttaggattgctttggctattcagcctcttttttggttctgcataacttttagaatagtttttttttctatttctttgaaaaatgttgttgatagtttgataggaatagtgtagaatctgtaaattgctttgggcaatatggccattttaataatattgattctattcttgatcatggaatgttttccatttgcttctatcatctctgatttctttcagcagcattttataattcttgctgtagagatttttcacctccttggttagctgtattcctaggtttttttttttctttttttcttaatggatattgtgaatgacattgcattctcgatttgacttggacattgttgatgttgatgtattgaaatgcttctgattttgtacattgattttgtaccctgaaactttgctgatttattagatcaaggaatcaatgagctttttggcagggactgtggcgtttcctaggtataaaatcatatcatctgtgaagagagatagtttgattgcctctcttcctatttggatg

SEQ ID NO: 163281 - DNA, 406 bp, Homo sapiens
gaggtcaggagtttgaggccagtctggccaacatgatgaaaccctgtctatactaaaaatacaaaaaaaaattagccaggcctggtagcatgcaccagaaatcccagctacttgggaggctgaagaaggggaattgcttgaaccagggaggtggaggttgcagtgagctgaggtcactgcaaaaaaaaggcaaaccacagaacaagctgtgatggcacttaaggctgccacatcaagaatggaaaagtaatcttcccaccaactttccaattacagatatacagtgtttacttgctataaaccacctgatattatgcagaaaccaaactaaatccataacttaaaaggtcatggttaaaactgttacaaaagccaggcgcggtggctcatgcctgtaatcctggca

SEQ ID NO: 163282 - DNA, 636 bp, Homo sapiens
ctagatgatagaaatttttcagctccattataatcttttgggaccactgttgtatatgtagttcattttgaccaaaatgtgactgtatttggaaaaggagaaattccatatgttcacaatttggccacataattacaacagttcaattacatgtgtatcacggagtgtgcttcatgcattcagtccaggaacaaatacttaacgagattatccaggcccaggttgttgtagagcccagcattaggtacagtggacaattagataactaatagttggtttgatatatttttgaaagccagtggaaagtttttggtgatctactcacctccccacaatctagccctgtgtttgataggaattaccccatcttcttccctacctcctagctaggccatgggattgggccttctagtcccaaccaatctaagtgcaaatatggattctagttttagcagcaatggtaagatgacagctttcaggaaaccagggaagtaagacctatatgaaatagaaatcatctgcatattttcatggtgtaaaaatttgttcaaacgtttctgcctctaatgtgatcccatagtcacgagtccacttgaactctgatctcatccttgtatagtgcctttggtactaacc

SEQ ID NO: 163283 - DNA, 232 bp, Homo sapiens
atctaatgatctagaaagactaaaaacaatggaatggcaaaataattaccaggcaaatattaatttttaaaattgatggcacagaattttatagccacaacagaggccagaacacagtgtaattatgttgatatcagacaaaaaagacttaaaaagtatttagggataaagaaagtcactgcaaaatgaaaacatgaacaattcactaggaatattcaacagttctgatttt

SEQ ID NO: 163284 - DNA, 346 bp, Homo sapiens
caattaaccccagaacattttcacacttcagatatggagctcccctacctatttcaatggaatcatgataaagcagcgagacaaatccgagtactggcaatgtctgttgaacagaaaaagaatccaaactgtcctgtaatcagggtgctatgtactggaaattggttttaacctgataaccttcaagctcaagaggttagccaactataacacagattgtaaaggcagcaacatttaatggtttaaaagtgctacttgtagttacccttgtacttctttactcatagttctgatgcaaaagatacttgcaaattttctataaattggaaacaaaaatagaggagct

SEQ ID NO: 163285 - DNA, 509 bp, Homo sapiens
agtggagttgggtcaaatggtctgtgcttttgtaattactttacctgttgccgagatctgcttttagaattcccacagccacatacaaggcctgtttccctaacctttaacgagcccagcgagttagcacttgctggttgcggccatacagttaggtggagacttgccctggtgtggtgtggttttatcttaggagttgataaaggttgaatattgtttcaagtaaacgatttcattgatatttggtgagttgtttgtctcctttgctcatctctgtttcaaaaaagaaaagaaaagaaacatggttcaaattatatctaaacaaaaaagaataagaaacaaaaaacacattaaaattttaagttgtattttctatgtttctagatacatcatttttgtttgatattttcctgatgcaagtatgtggtttatcacatgtagctcttttgcatgctaaatgaaaattcaaaacttgccaataaatgaatagcttattgcagaaaaaaaaa

SEQ ID NO: 163286 - DNA, 599 bp, Homo sapiens
tactaattggaaagcagtttccaggagttaactcagtttaattttcagtctcagttattttagcctgtggagtttttgatggcacacctttggagagatggccaggcctgattcccatttcaggggcatcagaccatacctttttaagaagctccgtgaatctagtcatctacccttcatcctgggcgaacagccaaaaagagaaggggacaaggtgtctttttctccttctcactggggtgacatgaattcttttagttaatggctgtttgcaaattctaaactaatgaaatacttagcagctaacatgttcaatctagtaatgatgagtttaaatctcaattgacagtaatgttttagataaacaggcccagtaattcagttgatgaactgtatatcttctcagtctagatttgtaaatgtttaatgaattcagggttataagcatagttctttaagtaagattccagatagttgatttgtaaccagtagtctacctatgaatgtatcccaaacctttagaagattggaaaagatttttgaaataatgatttagttttgtaggaaaaacacccccttgaaaattaattcggttgacc

SEQ ID NO: 163287 - DNA, 382 bp, Homo sapiens
aggatcccccttcgcagagctctaacaaaagagacaacagaagagggcaaggactgtctgctccagcacaactggacacctcagaccacaggcaccttccacctcctcagccccaggccagactcctgccaagtgcctgctgcatgcactacatagaaacgctgccaataaattaatccctctcacctgctttcagtacaaaatgaggacccattcagtgttaaaaagtaactacaaaaataaataaataaggagtaaccataaatagaatggcctagtttaatttgggaaaaaaatattttgcatcttatttgcaactcaatattatataggacaatcctaggaagaaaaggggagcagctggttttaactattagtttcc

SEQ ID NO: 163288 - DNA, 525 bp, Homo sapiens
ttaccacaatccagcgaatctactttctttctctcccttgttcccctaactctctcctctagttctttcactaaatagccttgtcccttttctttgagaagatgaaagccaattggcaggattcttcattttccataaaaatttctaaactcctccctgcacacatactctttctccctgcctcaacagcttgcacacatgttcccctcttctcaaacaccaggcctctgggttctgatcctgctccctccttccttctcgatggtggtgctcctgcaattctcttcccaactccagcatcaccaagctctcccttttctaaacatctctctacaataagcactttaaaatccttcagaatcttccatttaaaaattaaaaacaggccaggcatggtggctcacacctgctgtcccagcacattgggaggccaatgtgggcagatcgcctgagtataggagttcaagaccagccagagcaacatggtgaaacccatggctacaaaaaatgcaaaaaaattagcca

SEQ ID NO: 163289 - DNA, 280 bp, Homo sapiens
aatgtttcaaggagaaagatcctttccgttttttaagggtcagtcacgtactaaaacagaagaaggtggtgtttatgctgtgattctagtaaattcttcaagtaagttttaatttgttgaccttccctcttggccttttatgttctttgcatttggtagttgtagcaactcgggaggctgaggtgggagaattgcttgaacccaggagacggaggttgcagtgagccgagatcacgcctctgcactccagcctgggcaacaagagtgagactcggtctcc

SEQ ID NO: 163290 - DNA, 343 bp, Homo sapiens
ttctcattctttgccaaagctacatgtctctgtgccaactcacatgaggcttaagggagtgaaagaaatgtcagataaattctacctgtttagacaggcctaaaatgctgaaggcaacttccgccaaggattcctacagaattcaaaacatagcacagtgtcagaaaaagtaggagataaggaagacaggggagggagctcatgtaagtaaagacttaaaggagatggagataattatttactgggcctgttccaacaacaaacaagaagtcttcaagtgaagcattgtcgctgtaggacaaggaactcaggacagattctacccaacagatgttgtcaccaa

SEQ ID NO: 163291 - DNA, 268 bp, Homo sapiens
gtaggaacaggattcccccaactctcttttctttcctattttgccacaaaccattccatcccagactatcacttttagatgtttttaggcataagttgggcaccagtactagtgtccccaaaccccaaagagcacatatcagcttttcaagaggatcttttaagtgcccaatgctacttagtttgtaaagatagtaagaaagaagcacctctcattgccctatggggaaaatgagcagagataaagagagggtggatatcaatgcaca

SEQ ID NO: 163292 - DNA, 110 bp, Homo sapiens
aactgttccatctaaaatcatcaggcattagttagattctcataatgagtatgcgcagttcacaatagggttaatgttgccatgagaatctaatgcagctgacctgacag

SEQ ID NO: 163293 - DNA, 437 bp, Homo sapiens
atcacccttcccgtgaaagagaaccctgagaaaaacgcacaactgactttcctctactccccctttcccgtgtaaaatgcaggcttactgaggccaatcggaggctcacaacaatgtttaagcatctgcctcactgctccccagcctcccttttttcccctcctgcttgttctttcccctttaaatactgaacttctcaaagctttggaaaaagcacaaatgctcctgttacctggcacgtcctcaactgcagctacgtaaacctctatcgattgagacctgcctgaatcactttttagttagcatcaggtatattctggggaaggatggacatttggaaaaaagaacgggcagggcacctcctgctttctcaactattaagctaatggcagccaactttgttatgtggaacagctaaaactccaacaaaaatccac

SEQ ID NO: 163294 - DNA, 248 bp, Homo sapiens
gagttctcagactgtctaaagaggacactcatgatctaggaggggaagaggagatggaaatgggaaaatgagcaaggcagaggaccatctaagatgtgatcagagttcaggaatcaagggccagcctggcctagctgtgaactcttgggcaagtcaagaaacctctcagcagagcttcggtcaactctctgtgaaacagtagttcacgatctgcactcctgcaagctcacctgcctgccagcctatgg

SEQ ID NO: 163295 - DNA, 322 bp, Homo sapiens
tgacgggtacagtggctcaaacctgtaatccctgctagttgggagggtgaggcaggaggtttgatcccaggagttcaagggcaacagaaggagaccttgtatcttttatatctatatctatatccatctatatcttatgggtaaaggaaatattctatatttttatcatagtggttacatgactgaatttatttgtcaaaagtcactggaatgtatacctaaatatgtgaattgctgcattttactctatgcaaattgtacctcaaaaaacctaaccaaaaacagacaaatgaaaagataactctgagctcccgccgccatt

SEQ ID NO: 163296 - DNA, 507 bp, Homo sapiens
tcccaattcttaaaggcctacttcttcagaaaggtttccctgacctctctggatcgcttgtgtttttactgtgaatttccacacccatccatctattcattatccatttaacaggtagcttttgagtgtctaccatgtgtgatacatgggaatatattggtgaataaaacaaacacggtctggctctttcccactagagcttaccttctaattgagagacatagtaaacaagtagcagataagcagtaaatatctaactacagtagagtgcagtgagagagaacaacagggggaatgacttgatgtggaccaggaagatctctctgaggagttgtcataaaagctaagactgtagaacaaggaggcagccatgtagagtgtagctgagtctcactgtgcagcttggcatgtgttcattctccgggattttactctgtgctgctgttagatgtgcactgattttgtcccttcagctagattgcaagttccctgagagctcagaccata

SEQ ID NO: 163297 - DNA, 330 bp, Homo sapiens
aaaagcctattgtctggccagagccattggctggcttagcacttacttatttgttggataagctttttattgaaatgctaagtataaatacacaggaaaagttctctattcaaaactataagtacagcttgatgaattttcacaaagtgaacacagtcacgtcactagtactcagatgaagaaatagaacttgatcagctcccagaagccccttccagtgtcccctctctgtcactaacctccccaccgcagaaagaaccactaccgtgattgttcacaccatacattagtttttgtctgtttttagaaaaaccttatataaatggaata

SEQ ID NO: 163298 - DNA, 317 bp, Homo sapiens
gttgccaggggttagggagcagaacgaggtccccacagaacagcatccccacccagaacagggttacctcagaacagagtctcctgagaacagggttcccttcaaaatagtgatgggaagtgactgttaattgctgtgggggtttcactttggggtgatgaaaatgttctgaattcgacattgatggctacataaccttgtgaagatactaaaacccactcaattatatattttttgtatgtatgtatgtgtgtatgtatgtatatatgtacctattttattttattttatttattttattttgagacggagtttcg

SEQ ID NO: 163299 - DNA, 256 bp, Homo sapiens
atgagccaccgcgcctggccaagatgatgtttctaatgactttatttgcgaggagaactgcaaagagggtgtttttgtcctgctcagggtctacatcaacctatagggcagctttccccttatcctcacccctgacccactctcactttttctcttgttcacaaatacttaaaatgacagggatcttttcctaaatatccaaattcatttttgccaagttagagagcctagcctgcatggcatagtgggaggagtg

SEQ ID NO: 163300 - DNA, 219 bp, Homo sapiens
taccaactaacatcaacacatcaaacttactaagatttccagtaaatgactattagaatacacaggaagttcttatgttctgatgtgcggaagaaggaaaaagggagttctgagtatggtgttactgctagagaacactggcctaagtagtgtgtcatgagtaatttgagagttgcaaagggaaactctgcatttgagcagtcagtgatctgttaaaag

SEQ ID NO: 163301 - DNA, 404 bp, Homo sapiens
acctacccacctggaccaccccgctcacttgggccacaccacacttccactcttgtccccagcacactcccgctgcccccatagcatccagtaaccctttacaattaaaagtcctaacacacctttcccctgtccaggaagggcctctcaggccactgggagtcaaatctaaactgcccatcacagcccatcaggcttgcaaggaagaagatgacctgcagaaacccttcaccaagtctgcatgcaaaggagagaagaaacaggctgctgagtgaggatgagggcagagggggatattttaagttttgaagtgcggtggcaaggaggtgcggtatctcctgtgtgacagcctcgctaggctctatgaagtggaaaattggatcatctgtgaagaggaagcgggg

SEQ ID NO: 163302 - DNA, 299 bp, Homo sapiens
gggggttgtcaggtttggaggccaaggaccaggcagggacccagtggcaggtgggatggagggacctactgcaggagtgcagtgcatgggaaggcaaggaagaagatgacctgcagaaacccttcaccaagtctgcatgcaaaggagagaagaaacaggctgctgagtgaggatgagggcagagggggatattttaagttttgaagtgcggtggcaaggaggtgcggtatctcctgtgtgacagcctcgctaggctctatgaagtggaaaattggatcatctgtgaagaggaagcgggg

SEQ ID NO: 163303 - DNA, 173 bp, Homo sapiens
aattgataaaactctagaactttgggttccattcttatgatgacaataatataatgctagggatgccaagtgaatagcaagtttaaccaagttatcctgtatggggagccacagttacttaaaatgtctgataatccacagtcctggtgatgatgtggaatatcactctctta

SEQ ID NO: 163304 - DNA, 242 bp, Homo sapiens
gtaaatacagcagaggataccctaaaagagatactgaaggatttgatttttctttctccctgggaagatggaatccataagttgggtccccaagcccacaagacaggtgcaagaaagggtggctggaagattgtgagtcatgacagggaacatttttccttaggttccttgggtatataaagctcccgactatctgtctatcatggatagataaagagtgaacatggtcccctctccacaaa

SEQ ID NO: 163305 - DNA, 2837 bp, Homo sapiens
tagtcctcctgctacaccactgaccaacaggaaagtttgtgtctccagagtggacacatccataaagaggccaaacccagtcaaggtctaagcatctgatggctataactttgcttctttgaaagataataaaaagcttctgacctcccatcaacagccaacctgatttcaaagagccaagaggcctcagattcgtcaacattcctttaacgagctgagaaacttttcatggtaaactcagcagctgagtaacaggatgatggcaccacaacaggtagataatcaaggcaggaggtcaaagcattggagccaacacccgcccaggatggggtataaaagggctgggaggagaggaggcttcagtctcagtggttcagctttcccagctgatctgaagctcctgtgcagcctcagcccaacaccatgacctcttcctacagcagctcctcatgccctctgggttgcaccatggctcctggagcaagaaatgtctctgtctctcccatcgacattgggtgccagcctggggcagaggccaacattgcccccatgtgccttttggccaacgtggcacatgccaaccgagtccgtgtggggtccactcccctgggccgccccagcctctgtctgccgcctacctgccacactgcttgtcccttgccagggacctgccacattcctggcaacattggaatctgtggggcctatggtgaaaacaccctgaatggccatgagaaggagaccatgcagttcctgaatgaccgcctggccaactacctggagaaggtgcgccagctggagcaggagaatgcggagctggaggccacactcctcgagaggagcaagtgccacgagtccaccgtgtgccccgactaccagtcttacttccacaccatcgaggagctccaacagaagatcctgtgcagcaaggccgagaatgccaggctgattgtacaaattgacaatgccaagctggctgccgatgactttaggatcaagctggagagtgagcgctccctgcgccagctggtggaggcagacaagtgtgggacacagaagctcctggatgatgcgaccctggccaaggccgacctggaggcccagcaggagtccctgaaggaggagcagctctccctcaagagcaaccacgagcaggaagtaaagattctgaggagtcagctgggggagaagctccggattgagctggacattgagcccaccattgacctgaacagggtgctgggggagatgcgggctcagtatgaggccatgttggagaccaaccgccaggatgtggaacagtggttccaagcccagtctgaaggcatcagcctgcaggacatgtcctgctccgaggagctgcagtgctgccagtcggagatcctggagctgagatgcacggtgaatgccctggaggtggagcgccaagcccagcacaccttgaaggactgtctgcagaactccctgtgtgaagccgaggaccgcttcggcacggagctggcccagatgcagagcctcatcagcaacgtggaggagcagctgtctgagatccgggccgacctggagcggcaaaaccaggagtaccaggtgctgctggacgtgaagacccggctggagaatgagattgccacgtaccggaaccttctggaaagcgaggactgcaaactcccctgcaatccgtgctccacgtctccctcctgcgtgactgccccctgtgctcctcgcccaagctgtggcccctgcaccacctgtgggcccacctgtggagccagcaccaccggaagccgattctgaattcctgtggacccacaggggctggctaaggcgagggatacccaaagagagatgcttgttatacctttagaaaatctggcttctaactttctgtatgtataggcctgtccaaaggctatgagataccagggacagtggaatcttgatggaaatccttcctttcctgctcttggttttcccaggtgagctctatgccctcagtggctggattgcagccacccatggtggctcagaatatctggattggagaggcataaggttgaaaagcattttggagtaggaacacggcatgatttaaaattgcacttgcacttcaagaacaccaactttaacttgaaatttttatagtttatgacaaaggaagtgaagaacagacttcactgtctgagatttcccacatttcttgggttgtttctaacattggcagcctggattatggccctagggagagggaaatagaatcagaattgtacctgaccctgtcttttctaattcccttctcctatcctcctgcctccctatcttggaaactgattaagtggaaactttccttgtatcaaatcctgagttttctctacttcagggtttctagctttgacaaaggaccaggcttgccttttctgtggcaacacagcctcttacatatggcttccatagcttcttgctatgtgaaaggaactttcagattaagaaatttctctcttttttctctataaattctgactctccagacttgtctggctataacccctgtccctgtctaattctcccagtctaaaatctaaacaatgacttcatttttttctagtactttctcctgaagtattgaaacctattgattcaatgggtagagatttgctaagtatgatgtgcttccacctcttctcttcatactctctaccttccttaccatgattcagccacactggcctttctgttccttggacatgcctggagacctgtccctgctcttccttctctctggggtgctcttccccctccttataaatgttcaggtcagcggaaatgttccttcctctgag

SEQ ID NO: 163306 - DNA, 3023 bp, Homo sapiens
tagtcctcctgctacaccactgaccaacaggaaagtttgtgtctccagagtggacacatccataaagaggccaaacccagtcaaggtctaagcatctgatggctataactttgcttctttgaaagataataaaaagcttctgacctcccatcaacagccaacctgatttcaaagagccaagaggcctcagattcgtcaacattcctttaacgagctgagaaacttttcatggtaaactcagcagctgagtaacaggatgatggcaccacaacaggtagataatcaaggcaggaggtcaaagcattggagccaacacccgcccaggatggggtataaaagggctgggaggagaggaggcttcagtctcagtggttcagctttcccagctgatctgaagctcctgtgcagcctcagcccaacaccatgacctcttcctacagcagctcctcatgccctctgggttgcaccatggctcctggagcaagaaatgtctctgtctctcccatcgacattgggtgccagcctggggcagaggccaacattgcccccatgtgccttttggccaacgtggcacatgccaaccgagtccgtgtggggtccactcccctgggccgccccagcctctgtctgccgcctacctgccacactgcttgtcccttgccagggacctgccacattcctggcaacattggaatctgtggggcctatggtgaaaacaccctgaatggccatgagaaggagaccatgcagttcctgaatgaccgcctggccaactacctggagaaggtgcgccagctggagcaggagaatgcggagctggaggccacactcctcgagaggagcaagtgccacgagtccaccgtgtgccccgactaccagtcttacttccacaccatcgaggagctccaacagaaggtgaggtgtgggatcgcttgggtgtgctgggtctgagatggcagaggcaagacaggaggaatccatgtaaagctcagagaactttgggttcttggtttctcttggacatgatcatagacaccacacgtggagaaggagcctagggcatgatgctttgtgtgtgaactgtcttcctgttctcctcagatcctgtgcagcaaggccgagaatgccaggctgattgtacaaattgacaatgccaagctggctgccgatgactttaggatcaagctggagagtgagcgctccctgcgccagctggtggaggcagacaagtgtgggacacagaagctcctggatgatgcgaccctggccaaggccgacctggaggcccagcaggagtccctgaaggaggagcagctctccctcaagagcaaccacgagcaggaagtaaagattctgaggagtcagctgggggagaagctccggattgagctggacattgagcccaccattgacctgaacagggtgctgggggagatgcgggctcagtatgaggccatgttggagaccaaccgccaggatgtggaacagtggttccaagcccagtctgaaggcatcagcctgcaggacatgtcctgctccgaggagctgcagtgctgccagtcggagatcctggagctgagatgcacggtgaatgccctggaggtggagcgccaagcccagcacaccttgaaggactgtctgcagaactccctgtgtgaagccgaggaccgcttcggcacggagctggcccagatgcagagcctcatcagcaacgtggaggagcagctgtctgagatccgggccgacctggagcggcaaaaccaggagtaccaggtgctgctggacgtgaagacccggctggagaatgagattgccacgtaccggaaccttctggaaagcgaggactgcaaactcccctgcaatccgtgctccacgtctccctcctgcgtgactgccccctgtgctcctcgcccaagctgtggcccctgcaccacctgtgggcccacctgtggagccagcaccaccggaagccgattctgaattcctgtggacccacaggggctggctaaggcgagggatacccaaagagagatgcttgttatacctttagaaaatctggcttctaactttctgtatgtataggcctgtccaaaggctatgagataccagggacagtggaatcttgatggaaatccttcctttcctgctcttggttttcccaggtgagctctatgccctcagtggctggattgcagccacccatggtggctcagaatatctggattggagaggcataaggttgaaaagcattttggagtaggaacacggcatgatttaaaattgcacttgcacttcaagaacaccaactttaacttgaaatttttatagtttatgacaaaggaagtgaagaacagacttcactgtctgagatttcccacatttcttgggttgtttctaacattggcagcctggattatggccctagggagagggaaatagaatcagaattgtacctgaccctgtcttttctaattcccttctcctatcctcctgcctccctatcttggaaactgattaagtggaaactttccttgtatcaaatcctgagttttctctacttcagggtttctagctttgacaaaggaccaggcttgccttttctgtggcaacacagcctcttacatatggcttccatagcttcttgctatgtgaaaggaactttcagattaagaaatttctctcttttttctctataaattctgactctccagacttgtctggctataacccctgtccctgtctaattctcccagtctaaaatctaaacaatgacttcatttttttctagtactttctcctgaagtattgaaacctattgattcaatgggtagagatttgctaagtatgatgtgcttccacctcttctcttcatactctctaccttccttaccatgattcagccacactggcctttctgttccttggacatgcctggagacctgtccctgctcttccttctctctggggtgctcttccccctccttataaatgttcaggtcagcggaaatgttccttcctctgag

SEQ ID NO: 163307 - DNA, 243 bp, Homo sapiens
agggaatgggcacgttagttatggctgtattttgtctcatcatttctggttgatatcttttatcaaattcttctcctttgaattttgctgcctccaggaaggaaaaaaacccatctacctcatcttccagaacacttgcacatagttaccacgtaggactggctgtcagtcctgacatcgtcatatctgtaggacacagtgtgcttcagtggttcccttcccttcagggttgttctgtttcta

SEQ ID NO: 163308 - DNA, 385 bp, Homo sapiens
gaaatgcatttttttggtcaatgtgatgtgaactagggtccagaaactgaaactccatttgacatcagtgtagctgaattcccctaataaataaaaaggtcaactgtcagtaggaataagtatgttttctggttttcccctgaaataaaattggtcagtcaatgctgacaggccaggcatatgttcctgagctgatcacattaaatatacacaatttctctatcctgcgactactttcaaaagcacattgtttcatcaaggttatctcaaaacactagtacttgcatatagtgtatcatctgctctacttctgtactttctatattatacactgggttttgcttcccctaacacttgaataaaacatactgccaagttatagtag

SEQ ID NO: 163309 - DNA, 433 bp, Homo sapiens
  misc_feature (1)..(1): n is a, c, g, or t
nctcggcccagttattttctatgagaggttgatggattattaataagtcaattcctggaagttgagagagcaaataaagacctgagaaccttccaaaaaaaaaaaaaaaaaaaaaaagaaaaaaaaaaaaaaaaaaaaaaaaaaaaaaaaaaaaaaaaaaaaagcatgatacatgcagataatcttaagaaattcaaaagtactttaagatttatcacaaaaacattaatctttaatatcactgctgcccattcttcagtgtgacatcacagagggcaccacctttaactctgtaagctgttccttctggcatttccctctatatttagaaatgatatgttcatatttatatttattgtgatttcaattttaggtattatctattgttattttctgttatccctggtaaagaagttgaggatttaattttgtt

SEQ ID NO: 163310 - DNA, 1311 bp, Homo sapiens
  misc_feature (1253)..(1253): n is a, c, g, or t
tgggcgacagagcgaggctcagtctcaaaaaacaaacaaacaacaaaaacaggctggttggaggcctcctgtgtgagctgggcatgtggacaggtaggcatttctttggggttatcatgtgatcagccagctttttcactggggacttcctcatgttgatatgtgaaatatgctcaggagtagtttattttctccagagaagacactggtcgtgttctgcttggaggacatggtgggtgaagtctaagcctggttgctgacattacggggctgggctgaggggcttagggtctcagtgttcggtacttgctgttaatgtactgtgtggccatttcacaaaccacctcatccgtgtgagccctactcgtttctggtttggtgtctacaatggaagagggatgatggtggtcagatgctctggctttacaaactcttgatttaaatctggttttggtctggtggtctccagttcttgagctgttcaggttataccagctgtgttaatttgttccttctagttacccgatttcctgcacccctcagccagttaggattgaccttgcttttctcattcctgtgtttgctttccatctacatatattgttagcactattgtttccgtttacaaatcacttcaaaacttcattttattaaaacaatcattttttttacctctccccatttcttgggatcaggaagttgggaagggtggggttctggctgggtttcttgcacctggttgtggacaggcagtggctggagttcggaggggattcgttgagcgtctccaggaggtatcaggacaaaccttggagatgggaaacagcacagcaaggcatgctcccacagcagtccggtgcagctccagaatgagggagccatggcaggggcattagtttaataatcattggaactaattctctttccagcttctccttggacctcttcacatttctacctagatgtctcatcagaatggaattttcagatccttccttctgccccacagtgctctttgccatgctcttttaaggtaccagaatactgggaaaaaaagggcgttctggataagtgaaaatgtcctaggacctgcttggtgtttactgacttactaggaagttgatagtgaaatgtgaagggttcatgacagtgacttggtgttactagaaagcaaaagtaaagtgaggaacacaggaatctacaagtgcttgggtgtggggtagtgggtggggtgcagttgtggggtggcatcnataaacaccggtgtaatcgatgcactcttagatgtttggtatatctaccctcagatgt

SEQ ID NO: 163311 - DNA, 346 bp, Homo sapiens
cagtcaggtgattttgcccacacaaccaccccatgaggcaggtgctctttttaccaagaatctaaggcatagagagagaaagtaacttggaaaacgatttcatttgtggctttcttcccacagtagctcattagttatttccaattctcttgtgtttgacagtgttggccactccccttttcacaaaacaatcatgtcattatttgtttcttgtttctctcctggtgtccatcctcctcagtatcttccctcttcagcccattcctcatgggtgcccctcggttttgttttatgctcctttttcaggctgtattcaacacgagtaaactcatctaatcccatggct

SEQ ID NO: 163312 - DNA, 415 bp, Homo sapiens
tggtgaataatagacctttagaaaaagtatttctgctacactttgcagagttctgggaaggtgtatcaatgcctttctagtagtgagattcaaaagattgcttgtcactgttaccactgtcactgcctctaccactatcagcatcattgccatcagctccatagtgattagaactatgttcctaatcttatcttcctttgcataaagagttagttaaataaacataactggcaaaacgtagtaaaagttcagcaggtaataattaccagaggaaagaagatggcacagctattggcatttaaaatcaagtcagattactgttttgggtggagagtgagtctgtccctttgtctcttcccatattttttttctctttccttactgtgaaaggagttccttgccaaatcaagaaaaa

SEQ ID NO: 163313 - DNA, 429 bp, Homo sapiens
tagttcagtggcattaaggacatgcagacattgttgtgcagccgtcaccaccatccatctccaggactttttcatcttcccaaactgaaacaacatacttatcagatactatctccccattcccccagccttcctgcaaggctggcgttacgataggtgtgctcagcctggacaggacttcagtggaggaggacttgacaccaccaaatagtgtgaagaaaaacctagaagtctggggagaaacagagagggagagaagtaacattgatggagcccttcctgtgggctaggcttcatcatttgtgtctaacactgggcttaatccttacagctagctctgtgtggctgctgttgttagctccattttccagacaaacatattgaggcatggaggcattaactaccttgctgaaggttgcacagctgagg

SEQ ID NO: 163314 - DNA, 375 bp, Homo sapiens
agaaactggataagtggcagataactcactgcccaagccatgcactccagccccaacccagagggtgcaggggagtgaccattcactggtccatctcatgtgcacctgcgactgttggagtgaggtggtgtgcagtttcctctattctcagaagaagtacaaggatgaaaaggcttagaagcaaaagggaaaaaagattcttggtttgcatcttacccttcctcaaggcccatgtctgggcaccaacattttttagaattttctccttagctcagctaaaactgaattcttatcacaccaaggaaagattaggtttgcagacaccctgaagggtgacgagcagaatttattgggtaaaaagagaaaacaaaacga

SEQ ID NO: 163315 - DNA, 270 bp, Homo sapiens
atccattttgaattatgatgtcaggtaaagatacatgaggtggggtaaaggtctaactttattttttggcatgtggacatccagttgtctcagcaccatttgttgaagagactattctttcccccattgaatgatcttgacacctttttcggaaatcagttgacaatagatgtattggctttttttttctggaactctatttcattggtctatatgtctgtccttatggcagtatcatgaggtcttaattactgtagctttgtaagtaag

SEQ ID NO: 163316 - DNA, 168 bp, Homo sapiens
tgggtagaggccctggagtggaattgccgggtcacagggtaacacatgtctaactgctcaaggtgctgccggactgtcttccaaagcagttacagcatttcacattctcacccacaatgcatgagggctcgtttctccacgtcctcatctcctcatcaacacttgtca

SEQ ID NO: 163317 - DNA, 645 bp, Homo sapiens
ggaaaacctaatggttaacatttattaagtaaatgattgtacagcaagccccatgctaaatattttatctataacatcacacttaatactcataacaatcctttgaagtagttattggtgttcccctattttgaaatgaggaattcgaggggtaggacagtataataattgtctaatgtgatattgctagtaacagatcaagcctggactgagacacagtacagtctgattcagccccatgccctgcctaccactacatgaaggtggaatattcggcaactgttactaaacatgatttcagtgattatgtattggccaaaatatgttcacagaatattttgtgggaaaaggcagactaaaaatcaaagggtacacatattctcaattttaaaaagctaccaaaattttcagtccctggataggaagattaagggtaagggattttcttccttctctgcttccttttttcttctacccctcttcttcaccctccccactcctcttcatccctttctttctcctccccttccacccttctttctttatgtattttccaaatatttataatgtgtatatagcagtcttataatatgcaacatattattaaaggtttactttaataacacaattccaatatatgaggaa

SEQ ID NO: 163318 - DNA, 392 bp, Homo sapiens
gaaagaaagaaaagtaagcaaaactaacttcatgaattaatgtatcctggaaggggatgttacattgactctcattactataatatcattgtggatttcagtggttttcctggaatgctgaaaagaagtgctactggaagccccctggcagttaagtaaacatttacttgtggtgaaataattcctgaaagcggcatttattcaataaacatttattgagcaactacacacacacaattgcacacacacacacacacacgtatatgtaaacatatgtttatatactatattgtcacatagaaaatgcttggggatacaacagtaaacaaagccgatcaaaatctctgatctctctttttttttttttttttgagatggagactcactctgtc

SEQ ID NO: 163319 - DNA, 256 bp, Homo sapiens
aaaagtcaaagtgtatctttcccattccatataccgaacttcacttctgacatcagatatgtgggatttttttttccctcatacaccaagcagttctccagcagacaccagccaggtgatcctccaattcatttctgaaactatctagatcccacagattgaaggctccgtcctgcaagatggtccacccacttctgatgccaattgcaaactgtaggttgtgatctgtgcttctgactggctataaatcagggtt

SEQ ID NO: 163320 - DNA, 469 bp, Homo sapiens
gtgagccaccacacccagcctctgagtttcttttatgtgtaaatttgtctttaaatttaggaagtatttggctattattactttaaacatttttctgcctctttctgtccttaccatctggaaatatatacatatatatgtttccaggtacatgtcttatataataagtttatatttattttatgtatattttcaggtcaatctgctgttaagcccatttggtgaatttttttagataattttcagtttcaaatttacacttggttcttttttagagattatgtttctctgctgtgatttactaccttcttagtgagtacaagcatattttccctcagttataatagctgccttaaaatttaattctcatcatctggattatcctagggatggggccattcattgccttttctcttctgtatgggtcacagttccctgtttcattgtatatctactaattgaggatttt

SEQ ID NO: 163321 - DNA, 624 bp, Homo sapiens
caatcagaaattagaaccgtgcggctaggaaagatgagcaaaagatgcttagaaacaagacaagcagaaaacaacctccccagagctatcctgtgtggggaaacctccaaaagctagggaaagacagcgtatgttttgtatggtccaggaggagcaagctcatcatggctgcctgcaaatgaagaaatcatgtttctgtcatagcaaaatggttatgttttggagtgttctgtgaatgagacatgagaggggaaacgccaccacacaagtattccttacattcagttcttcagagaaggcttcagggatcattttcccatctcaaaaagcataaattgccattttataggagcttgagaagaatattctagaagtgattcagagccaggacatttggggatttgtttaggtaaacatgaaaattctatccatctttattcatccatcccagcagtcagccagcatccttacaaactcaaagggcaaagtaaaggtaaagaaataatttagaatatactattatcagtgctgtgataggttaatgtgcaggagagacaataaaggagtgagttctacaagtctggggacagggagtgaggagagatgggtcaggaaagtttttat

SEQ ID NO: 163322 - DNA, 210 bp, Homo sapiens
ggactggttaaaagatttgccacattctatatgtttcaaaggtttttttacagtacgtcttctgtctgtttgaatttgaaaattgatgaaagactttcacatatttatcacattgaaatattttgcaatgggtagttgtcaagcattggttaagcccattataacctcttttttgcaccttacactcatccacaatttcacatccttttt

SEQ ID NO: 163323 - DNA, 140 bp, Homo sapiens
cttatccacccctactgcccaagtctgttgtcctcactcctggaccatttccttctccttcactgcctacattgcctcccaacaaatcctatttcgtttacctccacactgtctccttatccacccctactgcccaagtc

SEQ ID NO: 163324 - DNA, 212 bp, Homo sapiens
gtgtgttcaacaggaaaaggatatggcataactttggctatggtctagccctgaggtttgtttcatatttgttctctgagtctggttctctagtcttctagtcatttctgtaagccaaccaatatgcttccaataaattccttttcttttggttcagctaaccagaattaatttctgtaatttgcaaccaagaatcctaaaatggtacctct

SEQ ID NO: 163325 - DNA, 476 bp, Homo sapiens
atcccaatataagcaattttacttttggagtaaaatccaatgacaatttacattttgatctcattatgtctaggttaggtaaaatgttatactgataccctcatttggatgtaaaacaaataaggcattcttgttctaactagtgaaggcaagataaacaatagatatcttataagaggaaagtcctgttcactgaaccagataagctttagggactcagttctacaagtaagccatagatttcttctctccttgtcatgaacatctaccactcatgttacaaatcaatactaatagaatagcatggtgttcttgccccctttagactacatgaatcattgcaaacaatcagatttgcatttgtaaaagccatggtgtactgtaaaagttaacactggaaaaattaaagaattcaaaagccacatgtaaaagaaatgcttttctagattatacttgaattatcatgattcaatagc

SEQ ID NO: 163326 - DNA, 300 bp, Homo sapiens
  misc_feature (39)..(39): n is a, c, g, or t
  misc_feature (78)..(78): n is a, c, g, or t
ttttggcccccccttctttttttttcccccctttttggnctttttccccccccccctttttgggttttcccccaattngaaaaaccattttaccactcatgttacaaatcaatactaatagaatagcatggtgttcttgccccctttagactacatgaatcattgcaaacaatcagatttgcatttgtaaaagccatggtgtactgtaaaagttaacactggaaaaattaaagaattcaaaagccacatgtaaaagaaatgcttttctagattatacttgaattatcatgattcaatagc

SEQ ID NO: 163327 - DNA, 584 bp, Homo sapiens
gcatcagaatctctaggattgacctaggggctctacatactcaccatgcgctttaggtaaatgttaggatcaggcaaatagagaaatattgccgaggaagaaaatggagaagtaattttggtaatcaaagattaccaaaaactgttatagaaattgtaaacctagaatcaaggtttcagaatggaaaatggctccaaatctgcaatagaactttaaaaaacagtaagaattaatgttttcctaagtgaccagagaactctaccttaaactggattttaaaatagtgtttactgctgttcatcccaaaaacttagtgtaggggtcaccttcctcaggaaactttttctactctgatttagaggcccctcctgcgtttctatagcatcctctgcagactctttcaaagtatttattatcctgcatcataattgtgggttgtattagcctgtacgcttgtggttgtagagaatgtgtctgtcatttccaaaactatcccagtgtctaaacataatatgttttacctagttttttattttgcatatatttgttaaggaaaagaaattaacttttctaatgaactgatt

SEQ ID NO: 163328 - DNA, 415 bp, Homo sapiens
ccctgcttcattgtatctaataaagcatctatttgaggccaacaaagccattttcccctaagtgaaacaaaataacaaaatagccatgaggatacttcttgtagaagaaacattaagtgtttagactgaatgaatttttcctccctgatttaaaaatcacagaaaagaacttagagaaaaacctgaaaaatataatacaagaacatatagaaaaggaaaccaaaatcacctttcattttgctattcaaagattgccacaataaatatttgtagtgtatcttcctagtaggactaaattctaattagatgaggtaggattacttcctttctaaaagatctactgaagataaaactgatttagttctgtttgaaaaattagctttaaagacaagaacataattatgaatgcatactt

SEQ ID NO: 163329 - DNA, 573 bp, Homo sapiens
tctctgaaacacatcaggattgtttttaattacctgttgattgcatttattagctcatcatagagataggcaggggccaaggaaccaagccttcctaatatttcatgggccacagtcagctggaagccacaccgctgtgatacacagcagaacatccctgcccagcatggtgcctggcaccgagcaggcactcaataaacacaagggatggtcatcatccttcaagtgtaccaggcatattgcctcattagtgtagatgtgccatgtttgaatatctatttttatccacaactagggcataaaggggacatcttgggagataaaaagagattagattttaaatattgactacaagcacatttctgaatcctttaggcacttacatatggtggacaaagtctttgcgggtcattgttttgcatctagtcaagtttatattcagtcagcgttctcaagctcatttatgccttgcttctcactagtgtctggaaaatgtctggcagggtcttgagaagggaagtaaaggtgggtccaatatgtagaaaggcacacttagaacaggactatttggat

SEQ ID NO: 163330 - DNA, 507 bp, Homo sapiens
agccgtggtggggtcctgcaggcctcggactcatcctgggatcacgcgaccgacgtgacagccgacactgttccatgaagcacggaggagcctcagtgggtgatggcagccagtgctggacttgatctcagacaactttgcaggctaagctcccacacaccatgctccttgtcccgcagttcagaaagcagaagataggcaactagatgaccactttacagatatagaaactgaggcacagaaagaagaaatggcaaatttgcggtcgcctagcaaattactgggaagactagaaatagtgtttcttttcctgaacacacacgcaatcactggctaattgcttggtgctgcagatgcaaagttaaataaatcacaataggaacccccaggactccctatctccagttagtaaaaagaataggggctttggaaacggaaagacccgaatacaaattctgtatcagctgcttcctggctacatcactcagaggacatcgcttaactttt

SEQ ID NO: 163331 - DNA, 537 bp, Homo sapiens
agactttaaaccaacaaagataaaaaaagacaaaaaagggtaatgacataatggcaaagggttcaattcaacaagtagtgctaactatcctaaatatacgcgcacttaacacaggagcaccctgttcaaacaaattcttagaaacctacaaagagacttagactcacacacaataataatgagagacttcaacaccctactgacagtattagacacatcacttaggcagaaaattagcaaagatattcaggaccttaactcagcactggatcaaatggacctgatagatgtttacagaactctccaccaaaaagcaacagaatatacattcttctcatcaccccatggcacatattctgaaactgtttcatggaggaaactgtttcatggagaggaagccacagggctgacaggaaaccagaccttaacctccctctgcacctgccctgaggctggctcttgtgctcagtgggtcctgagcgtccccaggtggtcctgttccctcttcagggaggcttgtttctgggctcatactga

SEQ ID NO: 163332 - DNA, 791 bp, Homo sapiens
gcctcctgggttcaagcgatcctcctgcctcagcctgtagagtagctgggattacaggcatgagccactgcacccagccattaagggtgaattttatagaaaataacatctataagcaataagcgtaatgcctgatacagtataagcactcaataagtattaactgttattgttaccctttgcaccaagcactgtatttgctaggtattggggaagtaatattgagtaagacattattcctgttcactgtctagtgatacatgtgagatggtatgtcctagagatatgaataaaacgtaatgtaagaagtcatataatgcacttatgacaaaggagcctcccataagttttggtgcttttggaagtgaaactccggagcttttccagtgtggctgtgttcgttctcagacttggcttcacattagaaatagtcattaaaaataagtcacacttgaaaaaaaaattagcagtgggctgctgccaggacatggtttttatttttaactttccccaggcaattctaatgtgcagccaggattgagaactaatgctttagatattttctcgttttctttatctttggcatttttaaggattatgtagtatcatagggtgattcttttctttttttattctatttttcaaaactaacataatagcatctgtacagagttttagactttacaaaatgcttttatgatctcattaaagccttacagtaatccttttagaaaagcattcctatcaccattcccattttgcagaaaagatgactgaggctcagagaagca

SEQ ID NO: 163333 - DNA, 356 bp, Homo sapiens
aaattaaggtttgcttgaaagagatactcttatcttttttacgtctagtaaggggtattgaaatacagcagatatggagaacaacatcgacttggaacagaagaatgacccctaacaacttagagcttagacaaatttgagagtttacaaagactgccagacaggatgttatgttagaaatacatttaagcgatattaaaataagtattcaaatacaaaattttgaagacaggaaacttcataatattcatgttaaattctcaggatcctctggaccggaaatcattgtataatgcctaagatatcgtggcaaacaaaattttacaagcaaataaaatgtactttagttctcacaa

SEQ ID NO: 163334 - DNA, 689 bp, Homo sapiens
tatttcactgatagtatctttattattttagagaacattaagaaaattatggagcctttcacatgttcactcctaatctcagagcacagctatcccatatttcccccatgaatttttaagggaaattctcctacgtgggttttcaggaccctaatccttggaggttaagggaaaagtcctatacagcaaaatgaaaattgaattctaatcaaggcttgaccacagatcagctctgtgacctcacaaatatttacatgactaggaccccatcccattatgaataatgaaaatggatagatgtcttcagaagtaccttctaactctactcttctgcaatcccgacaagatagaaagtagctttggtttcagagaatctagtaatgatggtgacctgtgtaagacccgataacacttaaatctgccacaaccacactcataagggcaacaacaaaacttagttcaagagtaaatatgcaacacagtcaagaacacacagggagagctctgctacatgaaatgctgcagacacaaagtgcagataaaaatggacagagtgtggttattttgtgtgtagcttatgaaatcacaatattttagtaacatctcatacagcattccaaggacaagtggcagtgatgagaacaaacctgaagtaaggaacctccaaaccttttaagcttaggatctgt

SEQ ID NO: 163335 - DNA, 500 bp, Homo sapiens
tctaattgctctagctaggacttccagtattatgttcagtaagagtggtgaaagtaggcacccttgtcttatttgtgatcactgtttcatacattcagtatgatgtcaactgtgggtttgtaatatatggcctttattgtgttgcagtacataccttctatatctaatttgttaagagtttgtatcatgaagggatgttaaatttatcaactgctttttctaaatctcttgaaatggtttttgtctttttgttaatgtggtgtgttgcatttattgatttgtgtatgttgaactatccttgcatccctgggatgaatccacttgatcatagtggatgatatttttaattgctgttgaatttggtttgcaaataccttgttgagaatttttgcatgtgcattcatcagggatactgacctgcagtttactttttttgcagtgtttttgtctggtttttgaatcagggtaatgctgccttcatttcctttcttctaccaatt

SEQ ID NO: 163336 - DNA, 217 bp, Homo sapiens
aacaaaacaaaacaaaagtacatagccgtgcttttcttcatttcatctgattctcacgccagctctaaggaaacagcttcactgaagtgaggaaactcttcttcagtcactgacttacaaaatggtagtgcagggattttcccagaccaccaagaaggcatccaagaagtaagcaaaaaagattacgacgtcgttcctataccgtggcagtggctca

SEQ ID NO: 163337 - DNA, 112 bp, Homo sapiens
acccttctctttgtgttgcttgcatagaatccaagctttgcataggagaaagtcagccatggacagaacccacacatggtagggcagaggtgggctaaggtaggctaaggca

SEQ ID NO: 163338 - DNA, 527 bp, Homo sapiens
aatatgaatgtactaatacccctgaaccgtacactcaaagatggttacgatggtcaattttatgttatctgcattgcaccacgataaaaaaagcctgtgctggacccctactgtgagggctggaaagagtcatatcacactgttaatgtcctttacgcgtgatcagtgtgccgggcgccattctgagcatgctacatgcagcaccttgtgtgttccccacagtgccctgtaagttgtgtgctctggttgtgcccattcacagatggccctctgcctggctctgtgtcctaggaggctgacctccacatagtgcgtcacccagctccgctgctctcttggctgactctttgagccaacacaaggcacgagcaggaggtgggaaggacggaggagaggccagggtattcattcctgctgctcattcggttccattaccactactacacacacacacacacacacacacacacacaaaagagacatactctttctagcttcaacttggatctactgctactgccagcatt

SEQ ID NO: 163339 - DNA, 832 bp, Homo sapiens
cttccaagggcctcagaggcagcattaccacaggcattaaagatggggatggggaaagaaggcccagagggaaagggaaccacatgcttacctgctaatcactgccctgcagctgaaacactgcagagctggctgctctgggataggagaggaaggcctcatttaatcaggagaagaaagagaaccaggggcctctgagatggcctgcaaggcatcacggtctgtgaactggtctgtgaactgcgggcctgcctggaaatgcattgtcagagtagagtgatgctttctttgtaaatcccttgtcttccctgattcctttttcctgactgaatcaggccaagatgctcacccagaagagcacagcatcaccctgtctttcaatccccaaagtagcccttacccctagacagcaacatcatctgttacaattgacagcatgaaggaaggcataacccctgcaaagtgactgccctacaactcaatttgattttgaatccgcaagtgcaagtctcattcctggtaactaatagtaacagaatctgctgatgtattctaccgcatcccagggagactcatgtagccatgaagactgaagaggattaagttaaccttccattttatagctgcaaattactgggttgatgtcaggtagggtgaggagtatgttccggttatagctggtagcaagatggctgcatgcatcatgaggctttggcctaaaaagcttgtcattatataaaaaagctatagagagcagagaaaatgtcatttccaatttagaagatcataatcgatttttaacacattggtccttaggtgatacagaattcaa

SEQ ID NO: 163340 - DNA, 476 bp, Homo sapiens
catggacaaggaaattgtattgggaagagacagaaaaacttgggggacttgactcctgatttacctatctctttcctagtcaggcaaatttcactgtctttcactactgtcaggcaaatctgatgtctggctcccttaagaattacacatttttaccaccaagccttgacaggggtataggaaaagaggaacagcactaggttagggctcagtaggcacagaataaaaaaaaaaatcccaactccattacttcttagtttctggaccttaagcaagttactaaagcctccctgagcatgcttccctatctataaaatgggaatgaaaatccttgccctggaccacctcaatgagataatggacaagacactttgccaaatacatcttgtagtgcagaaataccaagaagcctcatcatcactgcactcttatctgggtcctcaagcttccattcttctcttgccatgaattatgcc

SEQ ID NO: 163341 - DNA, 336 bp, Homo sapiens
aaaattaacctcacatggtggtggggcctgtagtcccagctacttgggaggctgaggcagaagaatggcatgaacccgggaggcagagcttgcagtgaaccgagatcacaccactgcactccagcctgggcaatacagcaaagctccatctcaaaaaaaaaaaaaaaaaaatccttggaggtttagccctgttagtcattcacacttcagtgggaattacacctatcctgctagaaactataacttcttaccctttttcactgatatataggagacacttaaacactccattttgcttggtaatcaaactatatgaggtaagagcctggtctcaat

SEQ ID NO: 163342 - DNA, 283 bp, Homo sapiens
tacattggctgacaggcaacacaggcctgtgatcgctaagaaaagggacacaaagtgagccctacgagtgtaccagtttactgcctacagacagttcctggatgcagtacagggagggggaatggatctcaccgagtcgaggtgactgagattagacatccaggagggcaaagtgactagaatttgtgggacagagaactgaagatagaacactctggagttctatcgacaggcctccctagagtctttgactaagcactggtctgcacatgcatgataggaa

SEQ ID NO: 163343 - DNA, 231 bp, Homo sapiens
tatgcaacgataaggataaatcacaaacacaatgtcaagccaaagacaccagaaatgaaagaactcataccgcttggttccattttcataaagtacaaaaataggcaacacaaatctctgttgttggacgtggggctagcagctacctttggggtgagggagtgactacaaggagacccaaggggcttctgagagagtgttatcatctgtgttgaagtttgcgtgatggtt

SEQ ID NO: 163344 - DNA, 532 bp, Homo sapiens
agtttgcctccatggcgataacgattacctgggaagccttgccctgtgctaatgcgcatctttagccgcagaatgtgcagagctttcatcagcttcccaaaggaatctggggccccaacaaggtcctgaaccccattccaagcggcagctcagttgctggtgaggaatgtgccaagcagggttcttagctttgttctctgtcatctccttcctcggagcacccacatatctgtgtcgcttcgggatagcaatggcgcttccgacctgtaactcacagctcccccagggccctccctcacgcagctggccgctgtgtgctcagagatccccacagaacaaagcctccctgaccagagtgtcctggggtctccacttctgcttcccaggactcaggggcagcgtggcataaggcctcagatgagtatatgtggcctcaacacccaaggaagacagacagggccttgaacggcctcaccatacatgggatccctggacctgtctcaggggccatggagcctgctaatttcaaagg

SEQ ID NO: 163345 - DNA, 380 bp, Homo sapiens
attgtaagcctcctgaggccctcatgagaagctaagtagatgttggtgccatgcttgtacagtttgcagaaccatgagccaaaatatacctcttttccttataaattacccagtctcaggtattccttgatagtgacacaaacagattcatacaatgcaacaacatgaattaatcttacagaccttatgctgagtgaaagaagctagacacaaaagaatatacagggcacagttccactcaaacgaagcactagaacaggcaaaattcatctgcagagatagaagtcagaaagcctttgcccctagggggcgacactgacaaaagggacataagagaactttctgggttgatggaaacgttctaaataaatcctgtttaa

SEQ ID NO: 163346 - DNA, 123 bp, Homo sapiens
acacataagagagaagatatcatcttgaccagtcatgttagacatgtcactagtttcagtagtgtaaaagaccatcggatgatgagaaccaaaacatagagctatgaaaaacaaacagatgtg

SEQ ID NO: 163347 - DNA, 160 bp, Homo sapiens
tgctgggattataggcgcaagccaccacgcctgcctgagacttagcattttgaaagacaagataacgtgctgagccagacagctcagaatcctccgcatctattttattattggcttttggaaaaggcactatggttgtatgtatggaaaggctgacttg

SEQ ID NO: 163348 - DNA, 632 bp, Homo sapiens
ccagcacttggggtcacacttgcatcgtggtctgccgccttttctcagggatttctggctcacttcccatattcccttacgggtgtgtccccttataagatgtcgcagactttaagctcatcttggcatctgctccttgaaggacttggactaaaaattatttccatctgcatatcaataactcttattccaacctgtaaaatccttctctttatccaacttctgccacccccacagaatctattttacttgtgtgtgtagtatctctttgagttaacagatatttgttctattaagctactaaattttgaggtagtttgtgacacagcacttgataactattaaggctttcttaagtttccattattccatggatattatctacatatcttttaatcccttgcattttaataacattagctatacttgctgtttccaactctttcctcctatttttgaacattttaaattttgtctttctctgtccttccttccttctttcctcctttcctccctcagagctttctccctccctccatttttttcataaactccaagtgtttaggccaaaaggaagcattatttgaactttatgctaaaagtataatgccgtaatttataatataaaagta

SEQ ID NO: 163349 - DNA, 671 bp, Homo sapiens
tctatcagaaggcgtatttgttcaccatcttagtagttcttaaaggggcagaaccactgcccagaggacattttggaaattttgttgtcacaatgactggaggtcactgctggtatttagtggcggaggtcaaggacctctaaacattctgcaatgtgtgggacagtcccacaaaaggaagaaattgtcttcaatatctaaaggtcccaccagacactcgggtcagaaatttgtctataattttctgagccttgagctcataaacacaaagtatttttgcccagtgttgacagtgcatgggcaatgcattcctgaaatagtaactttctaaggaaaggtcactatttttgaagagctgagggctgcagcaaggttgtctgtgatattaagtggcaatgccacccacctgcatcagcttgccaacctgtgtcctctgggggaaggtgggagaaagacacagggtcattccctgtatcattgcaacttcctgcaaatctgtaattatttcaaaattaaaagaaaaaatagagatgttgagtcatatggggctgagaaccatcaccatgaacttatcagctttaaggtaaggataaatgtcaccactccaccccaccaaggccaaagcaatcttcatctcatttacagcccatttctaacccatcacctacaaa

SEQ ID NO: 163350 - DNA, 356 bp, Homo sapiens
tagaccagggaaacatctagcatttttcttcaatgggactgagctgcgaaattcaaagctagaaggatatccaaggccgtgggtcacattgggcctggtgctgacctaactacactgcacagcactagagatttcagaacaggccccagctcaggatgtaacggttcccagctttgatgtgtttgatgcctcattataatttatctaataagccaaatgaaaagtttccttcctgatttctgcatgactggcttcagcttaacaagccatttggaacagttttgcaggcatacatctttacacaaagggatgtcagtaaacgcttagttccatcagccaattgcatgacccactac

SEQ ID NO: 163351 - DNA, 365 bp, Homo sapiens
ggggaaatctctatatgacattattgggataattggcaaaattttataaaggtctgtggattagatgaacagtactataacaatgtaaaatttacagcttttgataactgtgttttttttgtttttttttttcctcaccaaaggatttaatggggggccacctgtggcacaggttagaggacccgaattgctgtgtttgtggtggggggggacccacaaaccccggccctgccctcttgcttacataggctccccgcctaaaagcgcagccagaacatgccgctacggatccggttgtagtctgggagctgctcaatggggccatatccagccactgcggggcccgggccatagctgttcccggg

SEQ ID NO: 163352 - DNA, 303 bp, Homo sapiens
ctcgtgcctcagcctcccgagtagctgggacaacaggcgtgtgccaccacacccagctaatttttgtatttttagtagagacagggtttctccatgttggccaggctggtcttgaactcctggcctcaagcgatctgcccgcctcagcttcccaaagtgttagaattacaggcgtgagccattgcacctggccatggagacattttggaagttaccacttgtggcgaggggatactgcaaatggtaggtggaggccaggaatgccactcagtgtcccacagtgcacagcacggcccccacagc

SEQ ID NO: 163353 - DNA, 184 bp, Homo sapiens
ttctgagttaggacataatcactcagggtcctgacccactggtgaatggattgagagaggtagtgtggctgcacttgcatcaggagcaaacctgacatgactctaagctcagctgcttttctccttcttctcagaaaagctcagctgcagccaggtgcaggggctcatagctataatcccagca

SEQ ID NO: 163354 - DNA, 310 bp, Homo sapiens
gtttttgacatgcataaaatcttggcccaccatgagaaaaaaaatactttgttgatgtgtgtgtttgttttaaccagtaacttccactttctgtctttctaaaccattagaatgaaaaacatttgttctcacccttcctatgtttttgtttgtgtttgtttgtggagatggagttttacttttattgcccaggctggagtgcaatggcatgatctcggctcaccgcaacctctgcctcccgggctcaagcgattctcctgcctcagcctcccgagtagctgagattacagtcatgcaccaccatgcccgg

SEQ ID NO: 163355 - DNA, 289 bp, Homo sapiens
ggcagtgccctaagcaaggtgatccttcaatcagagggggtgcagggagacagtcaacagacttcctcttcctcagttgaagacaattggaaacaagattataaggaagcactttatccctatgaggctaacaaacaaaataaacaaacaaaaaactgtggtctttagggttagggatttttcaataaaaagatcagctctgtaaaacgtgttaggaacaaatcttctgttttactaaatgttatcaatgcaatcataggccaatcactccacagaaacattttatgta

SEQ ID NO: 163356 - DNA, 344 bp, Homo sapiens
gatggctgagaagggggagagtaggaaaatgtccgcagagaccctgcaagtgtatcctacccctagaaagggtggcgagggcctgaagagagaatgcagcaatagggatgcaaggggacaggaggggatggttgcaaagagattgccgcccaactgccttaatgtaatgcctgtttgggagcaaaggatgaaggagcttagatgctgtcattcaccaaaataccacatgataagttccgtttgggacatgatgcatttgaaagccttcatgcattgtgccctcctctggggaaagcagcagatgggactctgtaggaccaacagcctgcctgagcacccatgag

SEQ ID NO: 163357 - DNA, 284 bp, Homo sapiens
gggaaatccgtttaacccaggagacagaggttgcagtgagccaagattgcaccactgcactccagcctgggtaacaaagtgagattctgtctcaaaaaaaattagtttcagagttccaaatattaccactcctgtctcaaattaggtttaaggcactcctgtgaacaggcagattctataggtataaattaagatgtcatttccctagagaggctaagaaataaatacattcaacaaatatttgatgaattaaaggaatgagatgaagatatctggagaaaacg

SEQ ID NO: 163358 - DNA, 448 bp, Homo sapiens
cagcagggggttaaaggttagatttcagaaagaacttcctaaaggcaaggttgggaatgattgccaaactgtttccaagttaagcaggaagaaggtgggacttccttctctggagattttttaagaaaatatgagcagcttgctttctgtgattattgggaggcattcctaactagaggctggaaaggcccagtggtctgattagagacctctcagcatcttacaccagggcaggagcttacttgtctctcctcttcatttcctgccatatgctccctgcgtctgcagcctgcagtgggaaaggattctgggtccaagtgggcccttttctggtgaggctcaggagaggctgctgggccatggtagggacttagagtttgattctgagtgtgctgggaggccctcaggggatgtgatttggtttaccttttctaaatgctctctctgg

SEQ ID NO: 163359 - DNA, 382 bp, Homo sapiens
agactggaaattaagtgaaaagggaaaggttaggatgtaacttcagttttacagtgacttttaatgtgctttgtatctcaccctttgagggaaaggggtggtcacatccaactttaaacaacaaagatgaaataaatctacaaccaggtttgttacaaatgtaactaagagctctgtattttgaagatgctcaacagatgtgagttgaaccaagaacgtcatacttggaattgtcgttagttttgtttgttatgttatgactatttgagccatgtagtggctcatttaaaaggggctgctccgtggggattgtgcatatacaccatttgttgtagtggttgtggcaactagtgtaaatagatctgtatttttgttttctata

SEQ ID NO: 163360 - DNA, 264 bp, Homo sapiens
gctgaagagtatttgatttaaaataaaatccatacacttaaagcactatatatagccaagattaaatttccatgtttgctatagatctgttctcattcttgggctttcatccaaatgttttgttattgttggcaagaaagcagattctgaatccaccctcagtgatttgttttgttcagtcttggcttttggaacaaaataataaccacttattattttgccaaaaaatttatttctactaatatatttcttgacaattgcaca

SEQ ID NO: 163361 - DNA, 122 bp, Homo sapiens
gcctctctatctgacatctcgtctccgctggcagtgagacgtcctttctccccaagcttgtccatgggtgaaaggatcaaaggacattgcccgccaaaaggaagagtgaccagactgccccc

SEQ ID NO: 163362 - DNA, 441 bp, Homo sapiens
tgcagcttttaagaattccagaagctgggaagattacttagtgttaggagacaggtaatgcaaagggctgaagtgagtaatccaggaggggctgaggacagtaggggccctcctctatgactgagggacagaaaagcaacagggttaaacacaggtcctggtgccagggagagctgcagcacagccctgggtctaccatcacacatgccatgacctttggcaagttacttaacctccatctgccttagtctcctaatctgtaaaatgggaacaatagtaatactgcgtggggtcgttgtgaagactaaagctgctgtgagtgtacctgcacatagtgagcgctcagtaagtgttcggtgggtggcatacgttcttgatttgctcagactctctgcctcttgcctttattccttcctgttgggacgtgagagtctgctgatg

SEQ ID NO: 163363 - DNA, 672 bp, Homo sapiens
ttggatatagtgaggagttaatgtttggagatgcggaaaagtaattgaaaatttaagatgttactgcaaactgctgaagagttagggcggggtagcagggtggaggatttgagacccatacattaggaaaatgcaggaggaagccagtccctatagacagtgtgaaaaaatttagagcagcagcaattagactgaagtgtgtttagtgctataagaaactacctaaggacaccaaaatcaaactcaaattgaggcaggaaaatagggtctggacgcagggaacataaggcctattcaaacttcagctatgaaaggaaatacctactccatagggcgtaagccaagtaaatgattttataaccttacttcatcctctccttttacatagagtataccccaagtaaccaatggaatcctccagggggtatttaaactcccaaaaattctgtaacggggcctttgagcccctgtgctcagccccgcttgcacactgtggagtgttaaatcccttcattccttccttgctttgtgcgttttgtccaattctttgttcaagacgccaagaacctggaccccctccaccgttaacaaaatgcaattcttcttaaaactttctggtaccaaaaccacaaatcatgactgggcgtttctcactcatgaatcgctgtttgc

SEQ ID NO: 163364 - DNA, 421 bp, Homo sapiens
tgttcttacttaccccaaaagcccagacttgaataccctgttgtcctcagtggcgcggctgagaccaggctggagcttttcaacaagatgtaactcaagtggggaataacatgcaagtaacccttaaggtgactgccgcaccctgtggcccacacagagaggctctctgcccagccccacttgtctgcaaaggatatcctccagcctgtctagagtccacaaggtccaggctggagagaaagaggccaaggagccagatgtctctctctcacccacgacctactttctgagatcttacttccatactgaagacaggcctccttcccaggggataccagaagtcagagttcctttcagtgggtcttgccttattatattcagtaatgtggcccagcaaataaatatgtcaattcaacaataa

SEQ ID NO: 163365 - DNA, 401 bp, Homo sapiens
tacattgttaatgactgcattattacattgtatgggcagtcaatcatttatttaaccaatcctctgttgttgaacattgaggatatcttttgaatgtgttatctctatataacaaataatgtgcatatgaatgtgtccgtgtaaaggagaacttgtagttcattgaatgtgtctaggtcatgattagaataggcagagttgtgctgtatcagggaaaataagggtactgctattgataagagcccattttaggtataaagataactgtaacagctgggcacggtggtccacacctataatcctagcacttcgggaggctgaggtgggtggattgcctgaactcaggagttcgagaccagcctgggcaacatggtgaaaccccatctgtactaaaatacaaa

SEQ ID NO: 163366 - DNA, 499 bp, Homo sapiens
aaataaatagagccttaccacgtgatctcaccccctgtgcctgtttacttatctatgaaatggagataacttcctaaccccacaggggtgccaggaaaatgaatgcttgtaaatcataatatttaacattcatgtgacttttgcccaaagcattttgcttaataatttaatctactcactattccactgagaaagatagtctctatcactgagatgaagtgaaaggcataaagtgtcaaagggactagctccaggtcacacagcaggtcagacaaagctaaaataatggtgccataattatttgactattctgcctttggttcttcagtagtgtttctagaacactgatgctattcatatttttattatggtttgagttttcatctgtacttgcttaaaataacaagttactttttttaaagttacttactacagatctataaagcagtttattttctagtgcctaataatctttgactgataatttctcaataaatag

SEQ ID NO: 163367 - DNA, 264 bp, Homo sapiens
taatatttggaagcgcttagcctgcttaaatcttgattttatcatttctattagagaagttttaacttaaatgctctaaggtgggggtgtccaagggagaaaatacagtcatgggttcttagtttctgtttctggttgggccagaaaagctccttcctcatccctcttttccacttatcaacagagacagaagctaaaaaccatggcttctggctgctaaagcctaaaataaaacaaaacagaacaaactcatcaacaataaca

SEQ ID NO: 163368 - DNA, 305 bp, Homo sapiens
tcatggaaagctctttctgaatctttacttaagcgccgtttgttagcatttccaaatataaagtccaaaatggataaaatctgtaaaatcacaaaattaagactcttcaaaactaaaagtaattagtcaaggagaataaacaatatggaatttgtaaccccaactaataatctcaggaaagaggatgtattttctggccttacagccatttaggtaacagccatttaggtaacagccatttaggtaacagccatttaggtaacagccatttaggtaacagccatttaggtaacagccatttagta

SEQ ID NO: 163369 - DNA, 205 bp, Homo sapiens
gggtactatgtttccttttggtgtgatgaaaatattccagaaataaatggtggttatggtggtacaacattgtgaacgtactaaagtcattgaattctatactttaaaatggcttaattgtgaatttcatgtgatgtgtattttaccataattttttttttaggtagaatctcttgaaagttattgcaaatattccagttctgcc

SEQ ID NO: 163370 - DNA, 491 bp, Homo sapiens
caactctggaggctcaaggcaaggtccccatttccagacacgcacactgaagagaggctggaaattcctctcccaggctgttgtctgttcccactggctggccaggcgctcacacccttgccttggaattctaagcgattgttttctgatcccagcaaaaaaggagatggcacaggccacattcccaacagctgccctggcccctggcctgcccaggatgaaaacaagtgtcccaggcagaaagaaggagggtagagatgagtgaagggctgatggggctcgccagcactgcagcgggaggtgagagcaggggtggagcgagcagcgcaggtgccaccgccccccaagaaaggctgagacctcctgcctccctccagagggagctacaattccagatgtggtctgagaacagatgcgagtaccagggtcctctctgtccaatccctgcagcccccggctcccatggcttctcggacacctgagcgccacct

SEQ ID NO: 163371 - DNA, 627 bp, Homo sapiens
gattgtgacaactacatgggcatcaggccactcctcttcctccctactgaccaagaccttagagattaaacttttagtgtttttgaggatagtttagccactaagccaaggttcagattgctgaggaacaaatctatcctcaccatatcaacttccaggttaagtttttccatttttattaacattaccttcttttcacttctgtgactcctcagagattttgcaccagtgaactctggctagcatagaatagacatgtcatgatgccttagcttatgtagacacaacatacaaataaatgttattagaatggaatcatttacaagttcttcttagaggatgtgatgtatgatttttttggtagaatttctaattgaagtgtagccttttaaagtatattttaaaattaggctagtcattttgagatggtttcattgcagcttctttggaatcatttttagagtagaaatgcattagtataatttttatgtcacaatcaccacacttcattatgggcataacaacagcaatgcttgttttaatatattgtaaccagagtttagaaacatgtaataccacgaaaattcattactcctaatataatttaattacaaaattgttccttgg

SEQ ID NO: 163372 - DNA, 355 bp, Homo sapiens
ctagagatgacattttaatcctttcactgagtaagtctgtttcatattgtttaatagtctggactctgatttctttttgaagcttgttaattgatcttttagatgaattgtttgtggtaggttatataactgtctcctggttatatgatgaactgaacatttattaccatgccccttctgggggatgtgctcaactttttaggtaattgtattagtctcctctcacattgctataaagaactgagactgggtaatttttgaagaaaagaaatttaattgactcacagttctgcattgctggggaggcctcaggaaacttacagtcatggcacccaccaggcccctcccctgacat

SEQ ID NO: 163373 - DNA, 526 bp, Homo sapiens
ccacagggtaaattaaggggtaagtattaatactgggatttgaacattggcaatgtagatcttctgtcccaatcttaatcactgaagtgcagcattcttctagacatatagtttgcaataaaatgcactgttatgatttttgttgtcatccctatcatcaactctattagtgggttgttaaatggatttaaggaaatgtaaaacactgcaatattgactagcacataaccagtgctatacacactgattccttcttttgtataaggttgcatattatctgtttggctctattaaaactatcaaactcaaaaatatttgaaataaataacagagcagattattctttatagctgcatgaagcaattaagccttctacaacaggcattcatttattgctaatttttactttccctcgaataactcatatttattttcaaaagttactgtgaatattaagttagtgcctgaaagtcttcaagcagtttgttttcctctgatatctgggcagaggtggcccctgtagctg

SEQ ID NO: 163374 - DNA, 499 bp, Homo sapiens
tgctaacagaatcaacaaatatgacaattaattaggaaatgatttgttcagagtctatcttccctgataaactccatgaagtgcccatggctaggcctggcacacagtagtactcaattgtctttcaaataaacagccagagatggcacactgtatctaatatctccacatatctaaaatctatccatcttttaagacctactccaaaaagcatgaattttctataatccaaaatccaccacataatcttcccagttcctctctatcctcctgcctgcccagacaagaataatttctctttctttgaagtcccaaagcaatttatctatacctcttcttcagcacttctcaatttctttactgcattattgttatctaggcatatgatttatctcatctgttaagactatctgctcactaactgtatactacacatttttgtgtattctatagaaacttgcataattaagtactcaatgtttgatgaataaatggataa

SEQ ID NO: 163375 - DNA, 391 bp, Homo sapiens
tacaaactcacctgaaagggactttttttagacagagcttcatgacctgttcccaccccagttcatcctcacctcttttacgccaaaaggtctgcagggtgggttcactgtgtcttttctgccattttggggtggagagggtaatgtgatgaagccaataattcaggacttactcctttttgtgttgtgtttctttgcccttgcacgagagtatgaaatagcttccaggagctccagctgtaagcttggaagagtctgtatgattgtaatcacatgatgacaacactcagaatctaaactggacttctgtcatattctcaccactcaatttgttttttagcagtttaatgggtacattttagcgtcttgcattttgtgtggaattaattcc

SEQ ID NO: 163376 - DNA, 482 bp, Homo sapiens
cgcgaaaggcgcggcggtcccgcgggcgcccggcgtgggctagagaggccggccctggcctggctcaggtcgccctcgccccgctttcatcttgccccagtcgccctttacaattcccacaccgaaggcaaagcaagcaaggaaagaagccggcgcctccccaagcggaccctcccttccgcgcagcctcggccactcttccagagcgccccggtgcgtactgcggcgggcgcagggaatcgaattaaacgtctctgggcggttattgtctttctctaattgctccaacaatggcctctattaaaatggagacacccaattaaaggccccgccgggccgctctcggctgccggcaaagctctggcccccggcctgcgacgtgcagaccgcggggccgcggacccggctggtgcggggtactggcgccggcctcgacacctttggcctccacttcctccccagactcacagcgacagcggccg

SEQ ID NO: 163377 - DNA, 606 bp, Homo sapiens
gtggagaggggattggagagcaagccaagagagatgatagacagcacagttaggaggctttcccaccatgctggtgaagagggaaggtcctgagccacagtcgcaggagggtgatggagacatacatagagtcaggaatcacagaagcggtggggactggttggatgtgggtgattgtcagaggcaggagtcagggatgatgccaaaaaactagatgagtggccgatggttcattgaaatatggaattcaaaagagtaagaacgggttttgggtgcagtagaaaatggattcggctttgcgcatgttggttctaagaatacctgtgggctatctggatggaatgcccaacaaatacttagatttatgggtttggaacccaggagatagatctcagtaaatgataaagagttgagagtcattggcctgtagattcattcatctactcattcagtaaatattcacttactaacgtgctttgtctcaggcattaagtatacagtggtaaattaaaacattattttagttttcacaaatatcacagtctagactgctagttgatgacatggaggtagataaaataacttaggaaatagatacaccccccc

SEQ ID NO: 163378 - DNA, 385 bp, Homo sapiens
tctcaaactcctgacctcaagtgatctgcccacctcggcctcccaaagtgctgggattacaggcgtgaatcaccaagccggccccatatgtgttttttattatgtattatagtgctctttcagcttttcttcccaagttttctaaacaccaatggggaatataatttcgccccagaaggttttgagagtaaaggcaaggtagccttccttaaatgaggcacctttgggtccccttttatctatttaatgtaaaaatggatttcccccaaagttttcagggaaaatcaatattccatgaagatatactgtatatatccagtggctatatcttctgaagtagaattgcttatgtaggggtaaaattcctatgaaaaataccttaaat

SEQ ID NO: 163379 - DNA, 566 bp, Homo sapiens
caagtggctatatgactaagtgggaaataaacagcattggtgtatgtaacttctaggacaggttctgaaggtgaggaggcatgctctttttctttctgctggctagaatgcagatatgatatctggaagggaagcagtcatcatggactgagttagaaaccttgtgttgaaaatggccaaaaaaaccttgaagggacctgggtttttttttttttggagatggagtcttgctctgtcacccaggctggagtgcggtggcgtgatctcggctcactgcaacctccgcctcccaggttcacgccattctcctgcttcagcctcccgagtagctaggactacaggtgcctgctaccatgcctgggtaattttttggtattttaagtagagatggggtttcaccatgttagccaggatggtctcgaactcctgacctcatgatccgcccgtcttggcctcccaaagtgctaggattataggcgtgagccactgtgtccagcctgtgtgttgctattttaagtaagatgatctcagaagaacctcttaagtcctaccaccctccactctgc

SEQ ID NO: 163380 - DNA, 122 bp, Homo sapiens
ggcacgagttctttgacaactatttaatttcaacatcagaaagaattaatctcgcttgaatagcatacatagctaaatttaataaattacttcattctgagcagctctataaaataatcgtg

SEQ ID NO: 163381 - DNA, 388 bp, Homo sapiens
tactttaaaagaaaaaactagtgtaccttttctgacactttatatgctgtattttaaagctttgatagtcactttgatcccagaataaggtaaaaattagtttatcctcaaatactgtgacctgcctctcccttttcattgatcctaagcacagttctagtcaaatccttcgaacactgagatctgacctgcccattttgcaggaaaacattatcttccctcctgtcccgtggtaccctggggcttcactcctcccttaggccaaagacctatctccacattggtgtcattgacagccactcctgtggggtcccatgcatgcttacctgcagctgcagctgacgcggccccgcccaggcacttccagaggggttccatcctgggccac

SEQ ID NO: 163382 - DNA, 164 bp, Homo sapiens
gtgagttagagggtgtgggcgtggtggcggggtgctggccagaagcataacgtggcaccaggaaaatgaccggcaacaaatgtaaaaggactaatttaaatttctagtcctaatacttgtagaattgacttattattgagaattgacttattatttgagtattg

SEQ ID NO: 163383 - DNA, 107 bp, Homo sapiens
ccctacggacagcacgcgacggacggccttgcgggactccctgcagcagccaacacaccccagccagcccgtgcctattctgtgaactgaccacttcaggccactca

SEQ ID NO: 163384 - DNA, 358 bp, Homo sapiens
aaaaatgtggaagctttggtccaaaagtgaagttagtctaaagccaactaaatgcttttaaaagtgataattaccatgcactaaccacatcctgcatgcctgcttctccgccgaccgtatttcaactttggttcatgcaggtcccaggttctgtgatcgtactcattttgtagaggaggaagttgggtcttagggaggttaatttgtcttctttgcatagttacaaagtgtgggacatggaatcaaacccaggccagcggacgttggtgaatagactgttcatttaatttccttatgactctacatgtggctgctctgttttaggttcataatttcatagacttttctttacaaatgt

SEQ ID NO: 163385 - DNA, 689 bp, Homo sapiens
gcattatctggtgggcggccttatttacacacatatatataattgattccatattcctctcagacctacaaacagtacccatgtttgtttttaataaccagaattatttcagcttaaaaaaaggtgtagatttacatagacagtctgatgagtgcctcagattgttccattagtaacacagaggagaaacaatcttaagaaaaacattttgaatttgtgtgtggaggtggagagaggattgggttagtgaaatcagaaagcttccaagtaatgattattacatttaataataattagattagcgttccacagggactgttttctggaaattttggtaggacagtcactgagtaacacacacactcagagcaacctaggtttcaggccattgggtgggacatggcctatttgctttgttttggtcgcgtttaaagttaatccaaaatcaatttctttttcaagattaaaatgtcactactctgtcttccacttcaggcttctgcaaactttttctatgaagggtcatgtagtaactgtttagcacaaaatagacgtacacataaacaagtgagtgtgttgtgtcccaataaaatgttatttatggcattgaagtttgaatttcatataattttcacttgtcaagaaataatattcttcttttgattcttttttccctgaccattaccaaa

SEQ ID NO: 163386 - DNA, 976 bp, Homo sapiens
  misc_feature (372)..(372): n is a, c, g, or t
  misc_feature (639)..(639): n is a, c, g, or t
  misc_feature (806)..(806): n is a, c, g, or t
  misc_feature (952)..(952): n is a, c, g, or t
gaaaccagtccctgaggcttggcacagcaggagacctcctttgcagtgcttgggtgtccgggcgctgaggctccggcctgacctcttcatgggatcgacggcaacgtctccggatgccaggagtcacaaagggccgaccaggatgaggaaaccccaggcggagtccaggggaagcagcacggcatcccagcctcatgcctgcccagacggtgttgggagtgcagtgaatagaagacacttctctgcaccccaaaagctccatgctgattgcgagaaggaaatgctggatggaggagttcctggaactactgtgagggaaatggtgagagaactttggatgtggaatgtggagtaggaggaacacgaagtggngatctgcacttggggtggtcagcactgcggatgcccagcaaaggcactgcctggtccacatcccggagtggtctctgcgcccgagtcggcatcgcagctgatggtgaaacttttggtgtggcagaagagtgtccacaaactttggaaggtatccgctgcctcctccatagccgtgtatccctgccgagggcaatcatctcggggagccgaaagtccggctcatgggccagggctggctggctggagccacttgcgcggcgcacctgngcggaggttcaggcggccccggtgtcgcaagcggctgtgagtgatgcctccttggtgccggaggggtcccaggaagtctgcagaccagggctgaccagcgggcagcatggtggccgcgatggaaggtgacggggttcgcagcgccaggggacccagcagagccagancccgggcatcccgcatctccagcagcaccgcggggaggcctggcgctggtgacgtggcggccagtgcacaaggcccacgactcagtcccagaggccagcccatcgtcagctaacttcaggaaccccgggccagctgaggcccgggncccacgggcaagacaaagggcaga

SEQ ID NO: 163387 - DNA, 639 bp, Homo sapiens
cttcccaccccaggatacataaaactggggcacagagcagatggaattttcagctctgctcatcagcaggttgacctgcttgttccaagcaattttgtgaatttaagactctggtgcctggctggactcatagcacccgggtgctctgcaatttgtacagaattctaaaatttcaggctctgcttgttgcctagatctttagtaataacagcaataaaaaagtaataatacccacatgtattaagcatttatgaagctacattaattaagcatatgttgtgtttatgtagtttgcagttaatggcactggcttaatgtaatagggatagtattttttaaagaagaacttgatatatttccatcttcaaattgtgtttcactggaaactgctcctcttccagggctggacagggtacctaatgccctcacggaagaaaaggtgggttagcaagtcaatagacttaaaaatcagagtcctgctttagaccaatcagaatgacgtatgaagatctattgtatagacaaatgagaagcccatcccagaagagaaaggacataccagcttctgattctccacaacgctcagcctcaatctccggctgtctcttctccaggagcttggctaccaccatagcacga

SEQ ID NO: 163388 - DNA, 264 bp, Homo sapiens
agccccgctggcatagccactccaggacaggccaacaacacccaagaaaacctccccagttgtcaacaaaaatgcacttacatgtctcaaattccttagaaattataggacacacacaagaacaaaaagtaatggcttctgtaatagtaatataaatgtagatacagacaaagtaaatcctcaccaagaggagctcggcgtgctcaggcaccgggaactcctgcagaccagggcagtgttttactcaaggaccaactcggaggc

SEQ ID NO: 163389 - DNA, 468 bp, Homo sapiens
aggtggctcatgcccgtagtcccagtactttgggagactgaggcgggcagatcacttgagctcaagagtttgagaccagcctgggcaacatggggaaaccccatctctacaaaaataaataaataaagtgcatttcagcatatcaatgctcgggccaggccacaccaacagaagacacagtaagagacagacacttaggtctatccacggcgacagctacaaatacaaggaaaagggtcaagttcaggcactgatgatgttggcatgggattttccagaatggcaactgactctcagtgaagcgctgaaccaaagaacaatcttctctagagtcacacagatgggatattcttgtattagaacaacattttaaacacttgttaatgctttcatttaaaagcataaaaatctagaccaggcacagagtggctcacacctgtaaacccagcaccttgggaggctgagttg

SEQ ID NO: 163390 - DNA, 384 bp, Homo sapiens
acacgctaccacgcccagctaatttttgtatttttagtagaaacggaatttcgccacgttggccaggctggtctcgaactcctgacctgaggtgatccacctgccacggcctcccacagtgctgggattataggtgtgagtcaccatgcctggccaaattgtgcttttactttacattcaatttttactttacactgtaacccagaacctagatttttatctaaaccaagttttaaatgcctgtgtcaaatgtgtctgtctctcttaggagaggaacaggggtgcccagatgatgggccacctttctttgattactgataatgttaataaccagaatagtaacaaactttttttttttccctttttgagacagtctcactctgt

SEQ ID NO: 163391 - DNA, 281 bp, Homo sapiens
tgacactggagattattacaattcaggatgagatttgggtggagacacagccaaactatatcaaaatggaaggcttgtgaaatgtaaatattgattcatttaccaaaggcagcatctataagcccagacccatgaagggcttcatagcccatataaagggttttcattttattcaaaatataatggaaggctgtgggtaaatgaaaattaaactgttgggagcaagaatagaagcagaaagaccagtgaaggagtggttacattagttccaacaacagatg

SEQ ID NO: 163392 - DNA, 429 bp, Homo sapiens
gctgctccttcaccaggctgacctggtcctcactcagggcctttccgcttcctatcccctctgcctagacgcacctgcctccggtcctggcatggctgcttctttctcatcgttcacatctccagcctttgagccttaagagaaatagcttaagagaactagctcaaaaacaataaagagaaaatagccccactattcaattgtattcaatgaatagatatagaaaactaggactggatgtggttactaattacttcaaaacaattctaattactaaaactaaaggaaatgttgtagaaggcgattaatttgtaaagaaagaagcagtttcaaagaaaactctaagccattttcatcaagccatcttttaaaatgaaatatgaaagcaaatattctttttctaaattctattcagtatcattagagtga

SEQ ID NO: 163393 - DNA, 545 bp, Homo sapiens
ggcaacatagggagactctgtctctacaaaattttttttttaatttaaaaattaacaatgcatggtggcatgcacctgtagacctacctactagggaggctaaggcagaaggctcacctaagcccaggatttcaaggctgcagtgagccatgatcatgccactgcactccagcctgagtgacagagtgagaccctatctctaaaaataaaaacaataaaaatttaaaataaaaaaaaaatgactggaagcatatacataagttaataattactactaggtaacaatactttgagttataagtttttgttaatctatttcccaattttactacaatggatttccagtgtaataacatcatgtttttaaaaaacaatgatgttctacttcaaaaataaaaatgccctcactgttaaaaaagatttcagactttttacaaaaggaaaaattatagaacaacctacaaatttagaagtatttttaaaaattattattttgctgctttgggaatacgccattttttaaacctccttcctcacattttatt

SEQ ID NO: 163394 - DNA, 476 bp, Homo sapiens
aagagaagaaagattctacttttcagagacattaaaatcactcatcactgagtctggctcgcttacagttgagtcagattttttcctttcagtatatgtagttataaatatgtgtttcagagaagtataggatttatagaacatagaagtggcttattttagcaagagacattaaggctaaaatctgaaaagttgaattggaggttgctaggagaaaaggaggtgagggttatcattgcaagcagaagtgttgggccaagtagtcagaagaattttaaattaccaaatgaaaagaaaggtagagtaggctggcagagagggtgtgtagcagaatggtcaaggtcagattattttggtcaaggtcagattattttgataattttgtactttatactaagaacattatgatatggatgaattttaagctggacaggaggtagtatgatcatatttatatttaaaaggttactctggct

SEQ ID NO: 163395 - DNA, 321 bp, Homo sapiens
tatcgtcatggctgactcttgaggatccacctccataatgtgagcccaggctgggctgaaacccctgagtggaagccatctgcttgccttggcctcccaaagtgctgggattataggtgcgagccaccatgcctagcctcagaatctcatttttaaattactgaataatttcaattgtatgtctataccacatttgatttatccatttatctgttgaaggacacttggacattttcacctttttgactattgtgaataatgccgctgtagaaattggtatacaaagtatctgttgagtccctgcttacagttcttttgggt

SEQ ID NO: 163396 - DNA, 142 bp, Homo sapiens
agctgggtggagaaggcgcctggacaacggggcgaacttacacaggcaacggcaggcaccctgggaagcaaagggcgagtgctttcataaattactttgtctcgtagaatcagatcctgagcgacagctatgtatatgctca

SEQ ID NO: 163397 - DNA, 426 bp, Homo sapiens
gggtgtctagaggatccctcataggtcgcaggtcataggttcgcaggtcataggtcgcagacttatgaatgagagaatagtggagcaacacaattgcttcagattcttttcatgtctttaggtatctctcttttcccaaattaactttattttccagggtctaataatctggccatgcaaggcaggttcataggtccaaggttcattacagcatggacctctgttgacctctgtgatatgttattcaaattttctcttgtaaaatgtatggcaagagagttttttttttcccccaaaggaatttatatataccggatttcagccttccagcttactcaggggctcaggggtttttctctactatccattggaatctggtcttctataaagaggaatgcctttctgcctttcccggcgaacctaaca

SEQ ID NO: 163398 - DNA, 606 bp, Homo sapiens
catgatctctgttgttatttcaaacctggcgtcataggtctctttatattttcccccctgaattgcaagatcgattgctgattttcggagtattgaacaaatagattagaagaacattttgggctatccaaaaaatctgctttcctttctttacaccttttaccccaaacccttgacctagactctcagacttccaaagagaatctatctacagagttctggtgaagacttggcaggaagagggggcgtctgagtccctggaggtaggcgttgagaccactgtccattcataggtcctttcttcctcttccagaggtaccaagggacaccttggggtgtctcttgagtccatcgcgctccctgcatgtcttcacccagagcgtctgcctgtgggctgtctgtagcccctcgccggaaatggggcggcagaacaaaccccgggattctctctgtcagctggtgaattccacaaggagggaaatgctgcaagagaaggagaaactagttcattgttttgccagatgaagtgggagcctgaaagcatctttgggtcttatacacacacacacctcacacataccacgcacacacaccacacacacacca

SEQ ID NO: 163399 - DNA, 395 bp, Homo sapiens
cttgcccaaggtcactcagcaagtgcttgaactcaggatttgaaccacatctgccagacccccaagccacctgaaactttctatctcctcacttttcctcccaccagggtaagtgggataaaaaagacagatttggtgaccaaactctagaatgacaacactaaacaatacagaagaaatgttaagtattatctcacttccccatcagtggtaattatggatctcattattccagaagcagcacaggctaaatcatagaggtttagataaatctgagtataacggattcactaagccctattaaaaacatttgcagtgacttgttcagccctcttcaggttggctgtgtggaggacaaccatcacctcccagtgccaaggcacacaccaggacag

SEQ ID NO: 163400 - DNA, 535 bp, Homo sapiens
cacccatgtgctgtgccagctgaggatgcacagcctcagtgctgtgaacaggaaacatcagaaacacacaaaacgggaacgttgctatgaaaaagcgaggaggacaacattcctcaaaaatatcaatgtcataaagacaaagaaaggaaatgagtcagaataaaggatattaaagaaacaatctggccctgggtagatgcactgagggaagcagaactcggccagcaggtaacatgttgcttcgatggcagttcatcaagcatgcctcagtcatgagaaaatattctcattcagtcaggtgctgggaaacttactctccaggaaataaaagccctcgcttgtggcttttacaaatttctgtggtttaaagcctgtatcaatttgaagcctatcaaaggcttaataagcaatctgcaaatccttgaactctgcatgatcacctgcaggagcaggaagctgcacagcactgccagcagaacgggaggaagtgtttcttaggaagtgcacacaagcactgggccgtgaagggtcagga

SEQ ID NO: 163401 - DNA, 635 bp, Homo sapiens
tgtccttggttggagcatctctattacataaatcatgaaatgactgcttttggacaaaatttcccctttatatttctctagactagggaacctgatatagagtgtgaagaaccttttttcttctcccattctctttttttgggggctgatttttggttcatatttgtaggttcaaggacaactctgtaaagaattttgaaaattcaaacttcaaccaatttgaggatatcctaacccagtagtgttgaaagtgtgttcacagactactgacaactgtttcttatcagttcatgacaagattcataccgaaattgagaattgcatttagaatgcaataattttaaatcccttaaagctaatgacaaaaaaagaggtgtttatattttgtgtattcatccatgaggaactgggaatttaaaagaactagctggtttttaatcccagatattttgagaagcattgttctaacttgtggtcttttcaattgcccatgccttgcttttgatccatagttgtataatgattgattctgaccttctgattagcaaagcccagggtagaaaaatcaagcacaaagtccagtaaaaataattcatcacctggtaccagtataatatggcttgatttttgccttg

SEQ ID NO: 163402 - DNA, 267 bp, Homo sapiens
taccaatgagcccatttctctttgaagataaactcacagagatctactcagacaggaccttcgcacctttgccagagtttgagcaggaagaggatgatggtgaggtaactgaggactctgatgaagactttatacagccccgcagaaaacgcctaaagtcagatgagagaccagtacatataaagtaaaatgacatggatttattctactaagcaatgagactggggatcaaatccactttcttatctcaggaatcagcattatttc

SEQ ID NO: 163403 - DNA, 570 bp, Homo sapiens
caagtcctcattgctagctatattgaaatatacaatactttgttgttaactttagtcaacctactctgctgtcgaacatgataacttatttcgtctatctaactgtatgcttatacctattaagcaacctctcttcattcagccacctgccccccagccccccacaaacacacccatacccacatgcatcctagcctctggtagctatcattataatctccacctccatgaggtcaacttttttagcccccacatatgaatgagtacatgccatatttatctttctaggtctggcttattttacttaacgtaatggcctccagttccatccatgttgctgtagatgacatggttttgttcttttatatggccaaataatatttcattgtgtaaatagagcatattttctttatctgtttgtccattgatggacacttaggttcatttcatatctttgctactgtgaattgtgcagcaataaacatgggggtgtagatatccctttgatatactgatttccttgcctgtgaataaatacccagcagttggattgctggatcatatggtaat

SEQ ID NO: 163404 - DNA, 232 bp, Homo sapiens
aaggctcttctcaaggacaaaaaatatgatatcgtaagctgcatcatgttgactgtgcatttgttgcaatcctctgccaaatttaaataatggggaattatttagagacttgaaaatgacctggatccccattaaataagtttctgattggctggttttgtgattgtaagaaactttacaaagtgaagatgagaaatttagtgcttgtagggtttgagtaatattgtgtatg

SEQ ID NO: 163405 - DNA, 508 bp, Homo sapiens
atcatgtcattgctgtttcctatgatgtaaacagccggcatttgccggtttcatgacttgaataaccttgccgactcgtttccatttgtctttacacctaaaggtgataggccttcaaggatcgaaactgaatacctaggatacttaacagagccctactctttactgaaacctgaactccaagttatgtttttcctgcctatgagatttctagctgttctgctactgcctaggtaatggcaactgcctgaaagagaaaggtagggctgaatgttgggagtttacctctctgatttcatagttcttataccttcaaacagataaatttatactttagtcaaggttttctagttgttttcagcagaacagctggtgtaatataagcaaaagtgtcataatcagaatcagaagctccacataaattatttaatagttcaaatttctcaaaatattccactggattttgattgacatttcatagaatttatagattagggagaactgatat

SEQ ID NO: 163406 - DNA, 557 bp, Homo sapiens
taattacaaagaacaaaggcctaaaagagaaattcctaaccacaggcccactttcacatgggtttgaaaccagaatttataccatatttttagcccccaaatcccaactcaggatgtcaagaagcatcctgagttggcctataggctaaatcatcaatgtattgattgatgctctggaaccctatgtgtcttttcccagagattatcattaatcttaaagtttacacaacttttttaaacagaagccatggatatcatgtggtaagtaatcatggtaagctagttttcataaatgatgtaacgcatttgaagctgcgaggtaaagtgaagtttatttatacctctgaatcttgagtgaaatatcatagacagaatgagagagatgactctgtaaagaaaccagaacctgaaaatgtgatcattttccaagcaggtgaaagttgactggtaggaccagtttaggagtggaaggaaagaatgattatttaacctagcccagatgccttatggtaaatatttaaatattccaagtggtattcactactttgattagaaat

SEQ ID NO: 163407 - DNA, 563 bp, Homo sapiens
cagtcatcatctctcttcgggaaaataactacaaagtgagtgagcacattagtgaaatagaaagattagcgcttgcaggaccaacaccaaagctgtagaaacaacattgaaaccattcttccactagctgccttgcctgttgctctacctgtcttctgcacctttcttcaccagctttatccttcattccctccttcctctttcaggttttcacctagttattttaagaaaaggttctaaactatttctctagactcatctgtgtgttttcttgtcctgtgatgaattcctgtgatttatgttactttggcattaattttaatcctcctctagcacacgcagactccttgttgagaaagcttaaattctttctgtatttgagatgtaaatttgccaccctcttttctctaaaatttggtaagggattttgctatgtgggacagatacatttcaacttactttatttacagaaacgctggttgaatctaactgtcttctaaacaagggggttttacccgactcatggctcaagttttaaaataaaagctaaaagatcattaaat

SEQ ID NO: 163408 - DNA, 508 bp, Homo sapiens
aagagtgggacatgaatgttaggcaggtacttttggaatcatcatagagacgggcattgaattggcaggaatggaggagacggcacagagagaatccatgtggagcaaaaggcgggaagcagagtctggtggaagtatcagtggtgtgggcagaagcctggggcaagaggctatagtgtgagtgggttgagtggaaatagaaccaacaggtatagcccactttttcttaggaaatgtgggaaaaggagggttgagccaagggtctttgtttttctctgacatacaagagtcaatttaatggggtagacctgccacacgagtcctgctcaggtataagtctggtagttgcatgttcagcactgcccggtcctgagataataggagtatcttagcagtatctctggatctctcccacctgcgaatagggtgctgctgtcatgccatgtctgccctgggagctagagcatcatgctccaccttcctggttaactcgccctgggtatggcct

SEQ ID NO: 163409 - DNA, 838 bp, Homo sapiens
caaaccctgttctgtgctgtgtacgatgagtaagcttcccaagttaaaattattgctccacaccacagatttcagattccaagtggaacagaagtccaaagttgctgtttataaacttctaagggtcgattgtacctttcaatggtgtccaccctgtgttgacatacagcaaaaccgaagggctcttgaaacttctaaccactttctgaattacagcgaagaatattctttgcatggtatcaaagttctacaatgtctcagtaattttacatattgaaaaaagtcattgatttccatattcagtcctctgcgctgtcttctcatttcaagtagtctcatgttccatgtattattacgttatttgaggaattaaaaaaaaaaaaaaagaactggggaatctccaagagctggcgggaatattggctttgagaaaggaaccttagaattcaaacgtaatgttttacctaaaaaggagtccagtttccaacacttgggctgggaacgacaggctatggttgcccaggatctgaagtacagaggaaattgcttgtccttctggtgggagagtttgtctctagaggatcaggaggatcaggagggtcaggagaagggcagggtgtggccgggaggaaggggcatggttagagatttcttttcttgatcattttcatcccagttcagcactgagttcagatttcccttccttccttccttccttccatctgtccttccttcctcctttcctccctctctccctccctcctccccctgtccctctccttcctccttcctccctctccctctctgtctctcccccctaccttccttccttccttcc

SEQ ID NO: 163410 - DNA, 776 bp, Homo sapiens
ccaaccgccgtcttccagacttgccccaaacctatctaaccggaccacaagcctagaaccagaaggcctgggtctctctctgagctgctgctttgttcttacacctgggtggggaagggggcagtgggtacccaaggcctgaaaacagactacaggctgcccctccctgcacatctggctggtcccctccttcccatcttgatagccccctgcacccagggtggaccagcccagctcctcaaccacaggttggaggactagaaaagggagagaagggtccagggtggggagagtgggaaatggcaagcggaggaaaggagagggccagggacatcacctggctgtgagttctaggactgctgggggaggtgacagtgatacaggctttaggaacaggcctcacctccatgatccctatgatgcatacacattttctcagaggtctacttggaggatggagggaggggactttagaggctgaaacacaatgatggggggatgcagtacccaaatgtcccaaggaagggagggaaagtagaagatagggagtcagagaagcggggagcaggtgcctcctcccagcagccagccccagggagggaatgggggtggacccagacccgggccaaggctcagggcccatctgagcatgtcgcctgctaaggaggagtggaggcgggggaggggagggcggggaggtgaataaataataggaaataaaacttcatgaagcagaaaataaaaggcagattatacagatgtggcaatttgaagga

SEQ ID NO: 163411 - DNA, 705 bp, Homo sapiens
ccaaccgccgtcttccagacttgccccaaacctatctaaccggaccacaagcctagaaccagaaggcctgggtctctctctgagctgctgctttgttcttacacctgggtggggaagggggcagtgggtacccaaggcctgaaaacagactacaggctgcccctccctgcacatctggctggtcccctccttcccatcttgatagccccctgcacccaggagtgggaaatggcaagcggaggaaaggagagggccagggacatcacctggctgtgagttctaggactgctgggggaggtgacagtgatacaggctttaggaacaggcctcacctccatgatccctatgatgcatacacattttctcagaggtctacttggaggatggagggaggggactttagaggctgaaacacaatgatggggggatgcagtacccaaatgtcccaaggaagggagggaaagtagaagatagggagtcagagaagcggggagcaggtgcctcctcccagcagccagccccagggagggaatgggggtggacccagacccgggccaaggctcagggcccatctgagcatgtcgcctgctaaggaggagtggaggcgggggaggggagggcggggaggtgaataaataataggaaataaaacttcatgaagcagaaaataaaaggcagattatacagatgtggcaatttgaagga

SEQ ID NO: 163412 - DNA, 480 bp, Homo sapiens
cagcgcacagcagcacagcagcgcacagcagcacacaccagcacaaagcagcgcacgccagcgcacagcagcgcacaccagtacacagcagcacacagcaccacacagcagcgtacagcagcgcacgccagagcacagtagcgcacgccagcgcacagcagcacacagcagcgcacagcagcacacgccagggcacagcagcgcatgccagcacacgccagcgcacagcagcacacagcagcacacgccagcgcacagcagcacacgccagcgcacagcgcacagcagcgcacagcacacagcagcacacagcagcacacaccagcgcacagcagcgcacagcagcgcacgccagcacacagcagcacacagcacacagcagcgcacagcagcacacaccagcgcacagcagcacacgccagcgcacagcagcacacagcagcacacgccagcacacgccagcgcacagcagcacacgcc

SEQ ID NO: 163413 - DNA, 435 bp, Homo sapiens
catttgtttgcttcgatcagagctgcttcttcagggaaacacacggcttctgcagaaggccctctttagcctatgggcttattgacacatgcccactcactgaggcctggatggatacagcacttgggccccttgagaacaggacatggagggttttagaaatggcagtggacatgcccggaagtttgcccatgatgtggcacccatagagtctgagatgggagcctgtgctgtcgggggaccacaggagggcagtctagcaccaggagagggatggcaaggatagcagtatttgtccacgcctgtccagtgtcttcagggccccatgctcaggggtcatttgctgtgtctgcgtctctctcactctgtcagtgcagacaaagagctgcaaacacagccttagcactttgcttccagaagcaagttaaaagtcac

SEQ ID NO: 163414 - DNA, 398 bp, Homo sapiens
tgaaaaaatcagtatgaaaatggcaacctagaagaaaagtgagcgaagattacattcacaggaaaatacagaaccaataagcaaataaaaaatggaagtgtaaatcaaaacaatcttatacctatcaggagattggtaaaattaattcatccagccagacacggtggctcacgcctataatcccagcactttgggaggccaaggcaggcagatcacctgaggtcaggagttcgagaccagcctggccaacatggccaaaccccgtctctactaaaaatacaaaaattagctgggcatggtggcaggtacccgtaatcccagctactcaggaggctgaggcaggagaattgcttgaactcggggggtggaggttgcagtgacccaagatagcactaatt

SEQ ID NO: 163415 - DNA, 213 bp, Homo sapiens
gggtcaccaatcagtactcgagttctataggtccagaagcacttcttcagccactgatgaagactatctgcaaggtcttcatcataaaacatatcgccaagaacaacaaggtcccacttatcttgttccaaattcaaaatgttttggattaaaataggaaaaggattcagtctgttcaattcacaatttagtgtaatagccattcctgcaact

SEQ ID NO: 163416 - DNA, 340 bp, Homo sapiens
tgaactgaggatactcctgccaattttcatctacctagatcccatatctccttctgaccacctccacgacgccctccttggccacccagcccagagttttccctgcccccctccatatgacattaatcgaagttccttatttgctgctgctgtgacagctcccgcttgttatcacaggtaacatcttcatgtatcttgactccccaaatattacagtttgctcgctaaactgtaatattcgcagttatctttatatccacaccattcaccaacagtgcctagcaaagggctaaaaacatagtaggcactggaatacttgctacagatgtctgtaaagaca

SEQ ID NO: 163417 - DNA, 464 bp, Homo sapiens
aagttagccgggcatggtggcaggcacctgtagtcccagctacttgggaggctgaggcaggagaatggcgtgaacccgggaggcgaagcttgcagcaagccaagatcgcaccactgcactccagcctgggcaacaagagcaaaactccgtgtcaaaaaaaaaaaaaaaaaaagaatgtgaactttttcctcatcaggaagatcagtccttatagagaatcagagatggagggaccccaaaattctctttcaggccccctcctaagtccatttctaggaatcagataatttcatctttaacaagatggcagtcatcagtctcctactcatctctatatattactcccctctcacgtgggtcagagccaccacctcagagtgaatgggctttagttccaggatatgctccgctctgtgctgtgcacacattctctgccacttccctcccacatccttctctgttcg

SEQ ID NO: 163418 - DNA, 303 bp, Homo sapiens
agctgggcagtcctcttgaccttgcagactggcaggagtgaaccatcatttattactttgggcttctcagtaaaaaaaaaaaaaatatatatatatatacacacacacacacacacacatatatatatatatacacatatatatatatatataccataagcaaagtattagggaaccaaaggaactagacaattttataagggggcccacttaaaatccaggctgttgagccaggtgcagtggcttaaacctataatccaagcacctttggaggccaaggcaagaggatcatgtgagcccagg

SEQ ID NO: 163419 - DNA, 178 bp, Homo sapiens
taaatacctgatgtattataagttgctgttcttgctgttactgtcatcatcatcaacatcaacatcttcttctgaatccttctttcaaaatgttcagggaccccaatttttgaaattccctctagatactgtgcacagggaccttaggtaataccagtcacctgaattcatttaggat

SEQ ID NO: 163420 - DNA, 559 bp, Homo sapiens
tgagcttagccggtttcttaattgtgaaacccctatcgcatcactgtcactgtactgaggccatatggaccaggtatggcgctgacacttcacacatcctcacaacagccctagttttcaaataaaggaactgaagatggggaaactgtatataaaaggatatggtagcactcccgtcctcttcctcttcctactcagcaggagaagacgctttgcagctgatcaaactgtccccaccatcaccatcagtgtcagattaaatcatatgagaggccttggctggtctgtcagctgccccagagctcattctggctgtttgactgagggctctgagtgaaagctccccacgttgcaaatggctggcctctctctactgctggattctccttggaggaaaatcttccatgggaactgggtaggattctgtgttgctttggcagcaactgcagaatgattaacatggcactggggaaactgtatataaaaggatatggtagcactcccgtcctcttcctcttcctactcagcaggagaagacgctttgcagctgatcaaactg

SEQ ID NO: 163421 - DNA, 239 bp, Homo sapiens
gtcgcccaggctggagtgcagtggcgtaatcttggctcactgtaagctccgcctccccggttcacgtcattctcctgcctcagcctcccgagtagtgagattacaggcactgcgcctggcagacaatactttaaatgtagcttttgttgtttagagaaatacacatcttaaagattgcctgtataaaaaaatccacagccttaagacagttatgctacttgtagccaaagttcacagaa

SEQ ID NO: 163422 - DNA, 153 bp, Homo sapiens
tgttgaggctaacttcttcattgttaactcatgtatttctcatggcacctcttctttttggccatctctttttaaattctcttcctttctctctaccatccctcctccccagttaggcacttattgttttcttaataccctgtgcacattttt

SEQ ID NO: 163423 - DNA, 278 bp, Homo sapiens
aaataagtgggaaaggaaaatattgttcagtgatgttcccccaaaagtgtacaatgtttgggatattcaatacagatattcttaaatctatcgtgatgaattcacccaatgtgaagcccaaatttctttggaaacaccgaactataaattaaagagtacttatttattccttatgagtttctcccaatttatggaacaaaattctataccatactgtacaagataatctatgtttaattaactttaatgaaattaagctattacaaaactataagcag

SEQ ID NO: 163424 - DNA, 307 bp, Homo sapiens
ggcaggggctggggaaggggcagaggagagagcagaagccgtcccctccccaccaccaagcttctctgtcagtctcctagggctgccgtaacagaggaccatgaacttggtggcttaaaacaactaaagtgtgttttctcgcagttctggaggccagaagtctcaaatcaaggtgccaggagggccatgcgctctctgaaacatataggagaggttctttccttcctctctagcttccagtgtttgatgggaacccttggcttaaggctgcgttacttcagtctctcccgtcgcctggtcatcttct

SEQ ID NO: 163425 - DNA, 366 bp, Homo sapiens
ccggctttactgtagaatagatttctggaagtataagaacaggagacataaatatttttaggtcattgatacataatttgaaaatgactcctagaaagattttaacaatttgtgttctaccaacagtgtttgagggtgtctttttctcattgtctcaccagtaaatgacaattgtaatttgtttatttgcaaggcaaaaaaaaaaaaaatttgcaatttgatagttaaagagattaaactttttctcagatttttattttgtaatttgtatttctttttagtgaagctcttgcttttaccctggctactacctatgattgtgttatgttctggaggagagggaacttggctgagggggactttggg

SEQ ID NO: 163426 - DNA, 490 bp, Homo sapiens
aagtgaaaccttgtcactactaaaaatataaaaatcagctgggtgtggtggtgggcacctgtaatcccagctacttgggaggctgaggcaggagaactgcttgaacccaggaggcggaggttgcagtgagccgagattgcaccactgcacactccagcccgggtgacagagcaagactcttgtctcaaaaaataaaacataaaaataaataaaaattctaaaaaaaaggaaagaaaaaagaaaggaaagcaggcagggtccaagggatctctatcagctaaaagttatccatgcaggttcaatcagaatgtgtccattaagacaaaacggtattccaactgtcctgcctctatgctcaggatctcaggaggaggaacatctgaggattactttgagtcaggtgccccagattattcgggactatagctaggtcttctcaactataaccagcgaaaaagaactaattcctcctggggaaactgggatacta

SEQ ID NO: 163427 - DNA, 191 bp, Homo sapiens
gaactgttatttcaacatgaaccttgccaaaggcttaagaaaaccacattttagttttccctttctctattaaaaaatgcatctctactaacccaagatctctctttcattataagtaactttaatttcattgaaaggatttggggatgggggtaaattttagtttcattctaaataaatgccttcaattt

SEQ ID NO: 163428 - DNA, 321 bp, Homo sapiens
gactagaggacccgcgacactctgagttgcatcttaggattttatggttatttttgtctcaggtaccataggtcaccctaatttatgttctctatatatcttttggagaagataatttcagcaatgtggtagctcatgaacactgaaaattaaaaacaaatcaatttagcctatgataaataaattaaaatgtttcataaaatgcaattttacatttcagttatttatgactctagctgaaaggcaaaaaccactatgagagaaccactgactacaagaacaagtttggtttcctttaagcaactgtaccaagaaaaaacc

SEQ ID NO: 163429 - DNA, 482 bp, Homo sapiens
gcagacacagctagggttgactggatcctttctttaccttgagtggttttaataaatagcaacatttctctcaatggctgcagtacaaataattaaattacttatatctggacaggatttagcattgccttcacatggttaaattccaactactacccaaaatctctcattgataagtgggtgatttgggctgctattgtctgtggtttatttaaatgatttaaataaacatctattctcctatagtgttaaaaaacaatttatgtactattaatgaaaaaaatccacttcagttagtaactatgaatgaccttcaagatagggatataagaaagtaatcaaatcagggatgttttataaaaggaagactttggagtttaataagttctgtggaggggaaaaatactgagtaaataactgggtatttgcatgcattattttgacaacgggagggctctattttttttacctatttctttaga

SEQ ID NO: 163430 - DNA, 265 bp, Homo sapiens
gcctatgctaaatttcaaatcaaagaggctcaaatcccaaaagaaaaacttatctagaaaagaaggaatgccccagggtctgttgttcccctttttgtgttcatgagttctcattatgtggctgctacttgtatgtgagaacatgtgatatttggttttctgttcctgtagttgtttgctagggaaaatggcctccagttccatccatttttctgcaaaagacatgatctcattcttttttacagctgcatagtattccatggtg

SEQ ID NO: 163431 - DNA, 375 bp, Homo sapiens
tcctgtgtccccgggtaaggggctgtgattgttaatggatgtgaggtttctttgtgaggtaataaaaatgttccaaaattaggtagtggtgatgattgaacaactttgtgagtatactaaaaaacactgaattgtgtactttataaggatgaattttatagtattaaattatatctcaatgaaactattactttttaaaattcataggcacaaataaataagatctcttgttatggctctttacaaaaccattgtacaccttctcaatatagctcagcctggaaacacagtgcataagcaacattaacaaaaatggattgagtttttaagaaagtaaaacagcacttattttaagatgggatttaaataaactac

SEQ ID NO: 163432 - DNA, 479 bp, Homo sapiens
tgccctaaactgtgttcaataaatataatctcttgccatactctgcccgttttctggatggataagctgcaggtgggaagctattgggaaagaggaagaatactaattggtaaattgactttgggtcttggacaacagcttgtagtacaaaaactctaacttattagctaaactaggcaattggcaatagttgcctctgaaaaagatgaaaactggaagcacaaagcatattcattcaggcaataatgtaccctgtactgtggtaaatgaatcttcacctttgtaagcacagtgctacataattgttcagaatatttcctgtgactaaagcataaaattttcatacgtcccataagaattctcaaatcttaattactcactcttctattttcttcatcttcaatattttccttaggatgaggatgtcaaattccctgtgggaatgtggcaacatatatttatcactaaaacctatcttg

SEQ ID NO: 163433 - DNA, 430 bp, Homo sapiens
gggtataaggcgagtcctgggtgaggctgaacatgagttgagctctgcaactccttcccactccccattccgcatcatcaaacagagaaaacagtcatctctgccctgccaaacttgcaggcttggtgtgagcctcaaatgcattgaaaacgaggcagtgttttgttagtgatccaagtgaaaggattttattcttgtggacatcattttcattcagaccaaatttgcttttcccttggatagatgattatctctagatgtgtgctttcaaagaagtaagttttcctgccataagttgtacctttccacattgaagttgatgctccatttccaacagagacctgtccaacatgcccttcattgtggtacttgccccggtggcttctagaaagcttctctagagagagctgagccttcttcctcctcccct

SEQ ID NO: 163434 - DNA, 211 bp, Homo sapiens
tactttacagcacatgacatatttcaagtgctgtggaattagggagtgtagaggttatatttctttgagaaggtggagaagactgtaggtagaagttgccacttggctcacaatattaagttcaaaaaagtaggatgcaaaactgtccggttttctctcaattttattataatatatctctacgagaaagaaaacttttaatctttatgaa

SEQ ID NO: 163435 - DNA, 144 bp, Homo sapiens
atctacttcagtgtaaatttatggacagagtctaaaagaatatgtgtcatgattagcaatgaggagatagtcaattattttttataatatgtacttattatttgtgaaattaaaaattcactgtcactaataccgacaacagca

SEQ ID NO: 163436 - DNA, 284 bp, Homo sapiens
aggaagtaagcatgaacaaactaccttatatgggaattcccagacctcagctccacccagaccaagataaatgatggtttcagactgctattccagcaaaacagggaccatcctatatttataatattcagtcatttcttccatgctttcttactttaaaaaatgttcttgaaattttcccttggtcttctttcttcttgtgattctgcctactttgttgcctttgtcccacttaactattttcttcagtttttcccattgtacttggtttattttgttgttgt

SEQ ID NO: 163437 - DNA, 368 bp, Homo sapiens
catctactttttagtccctctgaagtgtcattctccatccacaacgggcctttgttcattttgtttttttttctctgcatgccacatctgaaatcccttctctcagtaacctaaatcaactttgtccttctcatcctccagttcttagcttgttatcacttcccctgggcagccttcctccaagaccagaccagatcctgctattttatggatcctcaaagcagcctgtacctctccttcctagcccttgtcacctttgtgatttaacatgtctttatgtgttattttgcttctctgcttccttaaataagctcctcaggacagggaccgtatcttttttgctcatcattgatatccttagcacccag

SEQ ID NO: 163438 - DNA, 134 bp, Homo sapiens
tcattgattttaggccaatttatgaatcacaccacaaatctcattactctgcagacatctttgcttttgatttttaaaaaatatattacttaaactggtgattcctttgtttgccagaccgtaaatgaactgag

SEQ ID NO: 163439 - DNA, 256 bp, Homo sapiens
gagaggccaggagtaacccggagtggggaagaggcccactcatgccatctcacagctctgcttccagagcgaacccaaacctgatcatcttgctctcccacttaaaatcctcagtgccaccccccgcctcacacccaaggtagccatgcgaaccactttgggttctactggtgtttcttcctgttcctgtctcttcctctctctctcactcctggccagcaccctctccatccgtaagcctcagcttgtgtgtgtc

SEQ ID NO: 163440 - DNA, 331 bp, Homo sapiens
aagtctgggattttgcctcagtttccttagggaattccttttctggtaaactgctaagcattccagctccctcctgggactgggccatctgccttagtccttgctcttgtcagttcctgtctccagcatgccacccaaggacagactcctcagatgtggactgcctggtggactgcttaccccattgtaatcatgcgcttagactaggtttttactttacccttgactatcatcataattgcctctgggattttccacccttccatctttccatccatccatccatccgcctcgtcgacgcggccgcgaatttagtagtagtaggcggccg

SEQ ID NO: 163441 - DNA, 114 bp, Homo sapiens
gtctctcacccttgtcctctcagatgtagttcttgtagtctattccatggcaagaccaaataaatatgattctgttctgtcatttttattcctttcggatgtaaacaaacatta

SEQ ID NO: 163442 - DNA, 162 bp, Homo sapiens
tttgacggtgagggctgtagagaagtggggagatcccagggtttctgtgttgggctgtaaaacctgttctactccagaaaagattgctgttggcttaatactagcagaattctacctgggactcattgaccccaaaacagacccaccaggactattcaagtt

SEQ ID NO: 163443 - DNA, 453 bp, Homo sapiens
gagagaagaatcaaatggatgcaataaaaaatgataaaggggataccatcactgatcccacagaaataaaaactaccatcagagaatactataaatacctcaatgcaaattatatatttgattagaaatatgtatctaaaacacacaaagaacttttacaactcaacagtgaaaagaaaaaaaacataaaaatagacaaaacatttaaataggcttttttgtaaagaagatataagtgtcgaataagtgcatgaagaaaagcctaagatcaccagccatcaagaaaatacaaaatcaaaaccacaaggagacatcacttaacacccaatagtgtgcctataataaaaaaggacaaacaataaccagtgttggtgaggatgtagagaaattagatctttcatacatttccagtgggaaagtaaaatagtacacactttggaaaactgtgaggtg

SEQ ID NO: 163444 - DNA, 450 bp, Homo sapiens
ctgcactccagcctgggcaacagagtgagactccatctgaaaaaaacaaaaaacaaaaacaaaaaacaaatacaagagaggagagacagaattggttcctccaaactccagtacttgttgcaagttcaggctagggccttaattctttaggcacctaaggcagtttcttgacctgatattctagctcagtaattattgtctatattcactcttctcagtgccatatcggttgaatccatatttcaagtattatactttttatacctgagatatctacttggatcgtcttagttgtttttttgtccttgcttcatattaaccaatataatctcctgtttctttgaggatatttattaagcttatttttaaatcatggttcatgtcttacaccaattctggttcctccaggtaggtcatttgggtggtggtttttccgtcaaacaataaata

SEQ ID NO: 163445 - DNA, 321 bp, Homo sapiens
gttccgaagcggagatgctgctcagtgatgaaaaaaaaaaagagaaagaaaagaaaagaaaagacaggaaaggaaaggaaaggaaagaaagaaagaaggaaagaaagaaagaaagagagagagagagaaagaaagaaagaaagaaagaaagaaagaaagaaagaaagaaagaaagaaagaaaaagaaagaaagaaagaaagaaagaaaaggagtagttaagaagcttaaccaaaagcccgatgccctcaggacttctggctgactcccttcaccagccccaccctgccgcaggtggtctgatcagcgtccagatcagaaac

SEQ ID NO: 163446 - DNA, 314 bp, Homo sapiens
cgggcatgagccagcgcacctggcattaaaaagtaataacaatttttaaatatcaatatgtcttatacagaaaagtgagcagtgtggtagagtgtaactggaatgtgagttgagacataacaccagacagagaagccagagaaggacttttgtttgaggaaatgacatttgaaaaggaacctgaatagtgacagaggcagatacctaaagaatatgttccagacaaaggaaacaaaaagcgtgcaattgcatagtcaacttagcctacttgaggaaaagtgtgagtggattttggtgatggagaggtaagtgcc

SEQ ID NO: 163447 - DNA, 384 bp, Homo sapiens
cctccctgccacacacacactttcaaattaattttataatttaagatggggctcacagataggtgttattagcaatgcaaggccttctggtagcttcttattttaaaaattaataattcttgctaatcgagtgatagatttttttaaaaatcattaaaattttctgtactgtctctatttcaaatttatttttccctatgttcctacagctctgttccttagagagtctcagggggatttttttagggtcagggatgctttcagccacaaatttgaagtaaacaattgtgatacctcacctatgcacatttctttttcattttcaagtcatttttatgcacattatctcacttagtccttacagctctgacataggtagggcaa

SEQ ID NO: 163448 - DNA, 451 bp, Homo sapiens
acaaataaaagttctgtggaaagtcaaaggtatccaattaggaaagcctgaggtgggagacataggacaccccagatataggatgggaagaagatgggattaaaaaaaaaggctttataaaggatgtaacattccagataggccttaaaagatggcttcgatcttttaaataaaactttttgttttagaacagatctagatttacagaaaacttgtgtagacattacagataattcctatatactctacactgtttcccatttttaatgtctgactttagtatggcacatttgtcacaattattgaaccaatactgatacattattattaaacaaagtccacacttcattcagatttccttagttttcacgtaatttccttttttctgttctggatcccatccaggataccacataatatttagtcctcatgtctcctgaggctcttcttg

SEQ ID NO: 163449 - DNA, 522 bp, Homo sapiens
ttaatagtaaatgtgactgagatatccaggctaattaactaaaaaaaaaattgtaatttactggactagaaaagttaaaacaggggagttgatagtttagggggatgaaatgataaataatgatggaattttaaggtaacactaggatgtttaaccggaactgccttgccagcctttcttaaccagtattccacaagatgtataagccctaatgccctaagtcattcattgtaagcaataaattaacttatcttctgtgcatttagaacagtaggagttatgtaccatctttgagagaacagagaaagtagacgtattttgtgttctctgattcagatgaaaaacctgtttagaaagtctgtttatggctgggcatggtggcttacgtctgtaatcccagcacttttggaggctgaggcgggcatatcatctgaggtcaggagttcaagacaagtctggccaacatggtgaaaccccatctctactgaaaatacaaaaattagccaaacttggtggtgggtg

SEQ ID NO: 163450 - DNA, 440 bp, Homo sapiens
aagactttgtcatccacagacaattgtcttattttcagtcctcttcaaaaggtcgtttataattagctattggattttgataggtgtttttgaatgcaggtttctaattactctggagattgtgacattagaataaagaaaaatgtgacatgagtctgcttgggaacatttttttttttttaaagtggaatagaggagtaaacttttaggactctcatggagagctgaagtattcgtgaatatcaaacaggagttaattgcatggaccgaacaaatagaagactgaaatgatattgttgacttttttgctaaaaaattgctgatccttaaaaaattgctgatccttttttatgttttcctgagtcaaggaaactttacttttgagctattgacagcttttaacaattcagtaaagtatactccagtgaacaaaatttgga

SEQ ID NO: 163451 - DNA, 192 bp, Homo sapiens
catcattcccataactccctgtgggagggacttggtgggagataattgaatcatgggggtagttccccctatactgtccttgtggtagtgaatatgtctcacaagatctgatggttttttaaggggtttcccttttcacttggcttcattctctcttctctgccaccatgtaagatgtgcctttcaccttcc

SEQ ID NO: 163452 - DNA, 467 bp, Homo sapiens
atcgatcatgtactaagataaatcattttatttctgtaattgaaaccaaccaaagtagatccttctgatatttttgcataataagttttgtccaagtgtactgactgaacatgtaatttacgaatgttcagaaacggactcacaagaatgtaaaaaagactggttctctgatgtctactgtttttctcctggaatcatgtctcatgcaactatttgagagtaaaaataattttaccccacaaaaatagtagatttttgtttttaaaagtctagcagaatatctgttgataaaagccaggtggttgccgggattggctcagggacttaaggagatgagaccctgttacggctgctcagtaaaaatgatagagccttgtcaccagaaggtgccagtgctgccagaaatgacttattaggtcaccaaagacctcagaaaagcacagtatctcagtacggatcgaccaacg

SEQ ID NO: 163453 - DNA, 440 bp, Homo sapiens
acagatggatggggaaagcttcctaggccagaggagcccgggagcagaggcatagggcataggacagcatggcatgagacagcaatgggcgtggcacccctagacttgtgcattgtggtcctggaggcatggttggggtcatgcatttttaaatgaaattccagaggatatggtgtttgggtagagtgtgcggaacatcaagctcagcttaattaggtactatttttttttttcaatgtgaaagaccatgatacacgacagagttctgtagtccgtggtacactgtctgctgctaacaagaaatagttaaatcataaatacagtgctctgttctaagggaagtctccagattcagcttttcatggcaacccccaaaccatatgcctccaggaaacatgccttgcagtataaaattaatctaagcaacagtggctgttttt

SEQ ID NO: 163454 - DNA, 739 bp, Homo sapiens
  misc_feature (725)..(725): n is a, c, g, or t
aaatatgaatgttattctgaacctttagaagactcataaatagcaattttaaagttaacgaaagagattctcaccaacactattggtttggagagaagctaatggatttgaatttctagttttctggtggtgaaatgtatttggtacaaaagaaaaaaaaagtaattttcaaacaagctcccagggagtagagattagccataaaagaagccaatatttaatgaaagttgctcaagccttgagtcaagaaccaatttcctcctgatgttctcattgtgacagtttcctgacttgctcattattcagttcgaaaaagtcacactttttgtgacttacattcctagattgtgaaatggggctgattcaacgctcctgtttaatgttatcattagaacttaaaagaaaaaaaaaactgtgatgacaagtagattgtcatccttaagctatctctaaagaggtgtatttttctttctacatagaagtaaatggtttttgcaatgggttcaatgcatttggagcattttagaggtcaatgtgctacccatggaagactggttttctttgtatggtagtgtagttctccacaaaattataatggaagcagggctcatttatggtgcttcccctgtcccaagacctcaccctgttacacgtccctcttccccgtaagccaagtgagcagagactaggaggctagcacttgactgctcaaaggttgcccattnctgtgctagagcgg

SEQ ID NO: 163455 - DNA, 240 bp, Homo sapiens
actggcgagttccacctgacagaaataagaacaccagtccataaagacgcatgtccggtgatgcctgcagcggcaaaagagaaaaataaagtgcagagcaggccccataccagaggatgggctacgcggagaacaccatgccacatgagggaccgtgtgccgcctgaaagcaggcgccgacctggtggggccctggcacattctgctgaaggagcaaagaggacgcaggaagagtgtgct

SEQ ID NO: 163456 - DNA, 388 bp, Homo sapiens
tgttaaaaagttatgttcacagcttcactttaattctgttcctccacgaatttctctcttgccccagttgtttttgctttgtttttctgatatttcatttttgcaaatgtaagcatatgtgtatatttttgtttccctttcctacacaataggcagcgttctatgcacactgctctgccgttctatgcacactgctcccttttacttaatttattctggagagcgcttcattgaagtgcgtgcttgcaactcatctcctaatgatgaacatttgggttgtttatattctcttggctgttataaatattgcggcaatgaataaccttgtgggtatattgttttttatttgtgcagatacagctttaagatagatgtggggtgaaaggta

SEQ ID NO: 163457 - DNA, 656 bp, Homo sapiens
ttcagaggatccccaaagatctttgagcatcacccctctgctcaaaaccttctgataactttcagttctacccagagtcttcacaataacctatgaggcctgacatgatggtaccctgtgcctgtcactgctctgacctaatttcctactttcttttttgttttgtttttctaaagacagagtctcgccctgttgcccaggctggagtgcaatggtgtgatctcggctgactgcaacctccatctcctgggttcaagtgattctcctgcctcagcctcccaagtaactgggattacaggcatgtgccatcatgcctggctaattttgtattttcagtagagacaggatttcaccacattggccagggtggtctcaaactcctgacctcaagtgatccacccaccttggcctcccaaagtgttgggattacaagtgtgagccactgcgcccagcaaagagcatgttcttgttgtattcatatgattgatctctgactgacgatgtgtgttgtctatattaagaccaagtcaaaatgtggaaaaaacaactgtgataggttctatctttagagccaagaaatttgtttttaactaaacatttcctcccactagaccagtaatttgcagactctagcatgtatcagaatgccttgggag

SEQ ID NO: 163458 - DNA, 292 bp, Homo sapiens
gtgatagctgttctagaggattcccgacggcaggttatactcatcacaggtgtacgaatgtctgaattctgtgtagagtatggcttatagtttttgtttctgctttagggttttttttttcggtcagtggagggtggggcagggttccttgcgggatatgtaccacattctctttcttaattttctggactttatttttctttggtccttttttttggagacagagtctcactctgtcacccaggctggaatgcagtggcgtgatctcagctcagtacaaccgtgccggtgg

SEQ ID NO: 163459 - DNA, 177 bp, Homo sapiens
tacctaatctggattgccaggaatatgcttgaaatgccaaatcatgacttagtattttactgtggtaattggagtagtctttgacacatcaggaagtatgggaatatgggaaagatctttgagagtggaaactataccacagttttgtttagtgctaggtaggaaaggtgaaaaaaa

SEQ ID NO: 163460 - DNA, 462 bp, Homo sapiens
tctctgcctagcccagtagccacttggagaaaaggtttcttaaattgtgatgttatcaaaacttgttaggcaggttatggataatgttcaactttatggctagtgtggatatctatattaaaatttactttatgtcccacagtatgaatgcagttctcagtgttgccattgaatataattattaaccaaatctgaaaaccagtaattaccctctgaagtttttttatggatttcccccctttcctcaggatttgacattgtaaatgattttttagtgagtggcaattagtttgaaccctttatttaaagagttcaaagtgtaatctagtagtaaaaacagttggtttggaagtcagattctggtcttgcctctgctattctctgtgatctcatggacaagatcccatggctgcttcatttactgattgtaaattataatgagaatgatgtattccttgttta

SEQ ID NO: 163461 - DNA, 312 bp, Homo sapiens
tgcttgtactcagctctcctcataaatatgtagcttttcccccaaacctgctgaatatatatgactccactgtgtaatacagaactggtgaggcataaaacccagtctgtccttttcctcttcaaagagagagcaccttcagtctatgctggagacttcctcttcccagcttacaaaccagtatcaccaataaaagttctcctttctactgtttagccatcctgggagtctttgggatgtcacttccctgtaacatgaaatttaaggttcaatggtatttttgtgttgtcaacaaaaagagtaaaactctaa

SEQ ID NO: 163462 - DNA, 632 bp, Homo sapiens
ctcccgagtagctaggattacaggcacatgccactaaacccggctgatttttctcattttttgtagggagtggtctcatcatgttgcccaggctagtttcaaactcctgacctcaagtgttactcccacctcagcctcccaaagtgctgggattttaggcatgaaccaccacacctagccctctaagattttcttgatcaatcatatttgttataatatttaaatataagacttaatatttgtcccaatagtagtagagaagtaaaaatctctttagtttatgtaattacataattgatttcgtaaacaactgtattccttccatttacttcttgcatatatattgtttgtaattctcgtgaaataaattataaatacagtgtttaccatttgattatcaagataaatatattttgtaataacatttcagttttagaaaactcagagacagatttagttatttcttcttttttatgaccaaatcaaaatttgaaaggctgaagtatttcaaaactttctttacatcatagatttcattcctaatgtttcccatttgtaagtactggggtcataaaaatactagtaccttctggctaaggaagccagtgacgtggcatggggatgagggttga

SEQ ID NO: 163463 - DNA, 429 bp, Homo sapiens
caggtgagggcagatgcaggcagatgtaggcaggtggaggcaggaggagacaggaggaggcaggtgagggcaggcgcaggcagatgtgggcgggtggaggcaggaatagacaggaagaggcaggtgcaggcaggtacagacagatgtgggcagatggaggcaggtagaggcaggaggaggcaagatgaggtaagaggagccaggtgcgggcaggtgcaggcagatgtgagcaggtggaggcaggagacaggaagaggcaagaggatgccagctgcctgaggtggctgacagcttcacccagctgaggttcttgcccatcctatacacccatcccaggacctctctctaaacactctgctctgactttggcatttccttgaataaacaccccagaagctcctcgtctccttcatacaataatccagtctg

SEQ ID NO: 163464 - DNA, 251 bp, Homo sapiens
aagggatgggctcccaaggccttgggcagctctgctcctgtggctctacagggctcagccccatggctgctttcatcggctggcattgagtgcctgcagcttttccaggcacacggtgcaaactgtcagtggatctacctttctggggtctagaggatggtggccctcttctcacagccccacctggcaaagccccagcactaaggggaggtctcagggagctttttacccatggcagaaggcaaagcagg

SEQ ID NO: 163465 - DNA, 250 bp, Homo sapiens
ctctgtcattcttagcatgtggcttccattctcaaggtcaccttgtcacctataatgacagtttggagctttgaccatcaagttagcagtccaagcaggaagtaggaagaaggggaaggagagcaaaaaaggtgtactgtcagctgtctgtttctctcaaggagctttctcaaaggtcttgccatactactactgctcacagcgcatgacctcgctctacctcatgaagtcttttttttttttttgaagc

SEQ ID NO: 163466 - DNA, 376 bp, Homo sapiens
taatgtcttaggtaaagaagtctttcttttctggtgcttggggacttgtattttttaaaaatctgcttcaaagtaaatagatgaaatttcattttctcagtggagtttggatcactgggattgagggggatgaggaagggctagatagatagtatgaaacctattggattcatactatggctgcagaagtctgggctttacacattaggttgctaccaagctggatattttgaaatatatatatgtatatgcctgtaatgttttagcatttgcttgttgggttttttttttccccataatggtaggttcttaactgactttttcaaatgcaaggtaaaactttcttttccttttcttgtctccagagtactgatgt

SEQ ID NO: 163467 - DNA, 516 bp, Homo sapiens
aacgcctgcaggaggacactagagaagccccttacaacagataattaactcacacggctcataatttaaaagcaccttatatgacccataaaaacttttaaaaccttaaaacaatttaactttttgctaaatctgacattcaaagaagttaaaaatcactatagggttccaccataaatgactgtcactacttgttcaatttcctaacagaccttagaggtaccactcagtagaagtagtagtcttaaaaagttgttttaaagaaagggaacattctgagtggcacattcgtttatccaaccaaaacactattacaaaatgaaagacaccattattttcagcattgatctcatttcttttcctacataataactggcaataacagcagttatttcaaactttcaaagaaatttatcaagtccctggttgttgttttttaatttttcaatttctgggtcaagactgcatttggaaaaccttaaaattcaaaagcaacattgctctgaaactatctga

SEQ ID NO: 163468 - DNA, 335 bp, Homo sapiens
aaattcaaatgttatcatctccaagaatcctcccctgagccctcagggcaggatttgggcttactgtcatcttacccttgtgaatatgtgttccaagaagaactggcagcctgtctgttgagacatttactagctgactcagaaatctgattttatcagcattttaagaacaaattagccaggcatggtgatgcgtgcctgtagtcccagctactcaggaggatcccattagcctgggaggtatttctcaggaaataaagttttccccaatctctccactcctcaccccactttccctgcacagctctcaccccatgcttctgataataacagat

SEQ ID NO: 163469 - DNA, 941 bp, Homo sapiens
ggggggtgggtgccacttttgtaaagttcaatgccttatttagaaatataagtagtaatgtgtttttcctacagcctaagggatcatcactccttacatcctagagtttctgagactcttgaaaggggtgaagagcagtcgtcgaaattttaaatgatcttaaaggcagggtctcgctttgccaccatgctgtagtgcagtggtgccatcagctcactgcagtgtttaactccgaagctcaagcgatccttctgcctcagtctcctgggtagctaggactacaggcacgcaccaccgcagccagctgattttttctatattttttgtagagacgagggtctccctatgttgcccaggcttgtctcaagctcctgggctcaagcaatcctcctgcctcaacctcccaaagtgctgcgattatagggatgaaccactacacctggcctagtcactgaaatcttttgaccgaaagagtgacaattacaattatcataaagttataaaaggccttcgagattatctaacacaatcttcttacctgacagatgtggaaactgtgtccagtgcacaaccacatacagatgacctgagatctttagacaaaactccttttggataagttacttagcaaacaaaccaataatacctaagcactattttgtaatatgggaagaagagtttgatctaaacatagacaagttgagttcacaagccacagctatggggggaaaaggcctcaaacaacattctaataaatatccacaatgttagagggttactgataacccatttgagtttctgtcatcagaaatctcagccgggtacggtggctcacgcctgtaatcccagcactttgggaggccgaggcaggcagatcacttgagatcaggagttcgagaccagcctggccaacacggtgaaaccccgtctgtactaaacat

SEQ ID NO: 163470 - DNA, 120 bp, Homo sapiens
tttttcatttagccaaaaatagcctatccattagtactggacatttttgatatctagccatctattttaatgatatatattttaatgactctaataaaggttacagtcactaaatccaaa

SEQ ID NO: 163471 - DNA, 475 bp, Homo sapiens
tgaaaaatgttagataaaccaaatctcaagcatagaggcttttcttctggatgaccaagacattcaaatccttcatttctagaaatgtactctgtagtgtaattagcattgtctgaactacatcttttcaaggatgatatgaagttttcaggaaatgaaaacaccatgtgggacttccagaacttggagtaacttggagttgattcccattttcctttggaggtgactggcaaatgcaatctttaggaagctcctctgacccaagagacatgcacacatatttgagtgggattccagggcccgtgagccagcagttttcccaaggcttatctcctgtcctgcaccatcccagatctccctgatagacttctcggaagttgctgctcagaaaactagtgataacaaaacaagtttcttacgttgattttactaaaactgtaaggataagctcacaacttgtttgacttctgctttt

SEQ ID NO: 163472 - DNA, 538 bp, Homo sapiens
gaatgtactgcaacacaacaaagcccatagatgaaaaacccaccaataacataatacacaatggtgaaaagttgaaaacttttcctctaagatcaggaacaagacaagaatgcccactctcaacacttctagtcaacacaacactggatgttctagccagagcaattagacaagaaaaagaaataggaggcaatcaaataggaaaggaagaagggaaatagtctgtttgctaatgacatgatcttatatgcagaaaactccaaagactccatgaaaaaaattgttagagctgacaaacaaactcagtaaatttgcagtgtgcaaaatcaatacacaaaaatcagcagcatttctttacaccaacaatcaactatctgaaaaagaaattaagaaatctaacgcactcacaatagtcccaaaaagaaaagctaaaatacttaggagtagccgggcacgatggctcatgcctgtaataccagcactctgggaggcccaggtgggtaaattgctggagcccaggagttcaagaccagcctgg

SEQ ID NO: 163473 - DNA, 217 bp, Homo sapiens
aggattgctttagcccaggagtttgagatcaacctagggaacacagtgagactccaactctacaaaaaaaatgtttttaattaggaggggctggtgtcacacacctgcagtcccaactacatgggaggctgaggcaggaggatcacttaagctgaggagttcaaggtcacagggcgctatgatcgtgccactgaactccagtctgggtgacacagcg

SEQ ID NO: 163474 - DNA, 506 bp, Homo sapiens
gtatatcacttatggaatgtgttgccggatttttagccatttgtttattaatgggattgttatgagaagattttatacttgggtcactaagaaaggtgaattaaaaaaaaaatccctattataccatttgtttctatttagacttttttttttttttttttttggagatggagtcttgctcagttgcccaggctgtagtgcagtggtgtgatctcggctcactgcaacctccgcctcccaggttcaagtgattctcctgcctcagcctcccaggtagctgggattacaggtgccctccactacacccggctggtttttgtatttttagtagaaacaggtttcaccatgttggccaggctgttcccaaactcctaacctcaaatcatctggcatttagacattcttaagttcatttcactatatgtgcatatctgcagagaaaaggatatatacccacaatggttatctctgagtgctggtcgggaagtctattgactggtgggaag

SEQ ID NO: 163475 - DNA, 675 bp, Homo sapiens
gtatatcacttatggaatgtgttgccggatttttagccatttgtttattaatgggattgttatgagaagattttatacttgggtcactaagaaaggtgaattaaaaaaaaaatccctattataccatttgtttctatttagacttttttttttttttttttttggagatggagtcttgctcagttgcccaggctgtagtgcagtggtgtgatctcggctcactgcaacctccgcctcccaggttcaagtgattctcctgcctcagcctcccaggtagctgggattacaggtgccctccactacacccggctggtttttgtatttttagtagaaacaggtttcaccatgttggccaggctgttcccaaactcctaacctcaaatcatctggcatttagacattcttaagttcatttcactatatgtgcatatctgcagagaaaaggatatatacccacaatggttatctctgagtgctggtattgagtaatttttatgtatttcctcatgatttacttcacacattttccataatcaatatttgttatattcaagaaaaataaattattgtttaaaatgcctatttcaatgttctggagtaaagttatacataattttaaaaaaatctttactaggcaccaactttgttagggcctgctgatgggctttgggcata

SEQ ID NO: 163476 - DNA, 517 bp, Homo sapiens
ccgggaggcagagcttgcagtgagcggagatcccaccactgcactccagcctgggtgacagagcaagactctgtctcaaaaaataaataaaatgttacagttcacagcatgtgtttccagagaggatgttttcctgatagtgctttagtggcatctcttccttagaaaagttagtttagtccaagaataaagtatagcctgagagtacttattgttgaaaatactttatattttctataatagtacagtactcctatactgtctcttattatatctaacccagtcagtctttcctccaacactggaaaagtgcatttgagggacatgttcagtaaatacactggcatcagtgtacggcttagggatatggtcacagttttagagggatgcagaaacagaggccctatgtaacagattaacacagcccctctcatagtctgtatcctttttatattcggggatgggaaaggttacctaacctatctatagtattaactgaatttctgaaaatgaaatg

SEQ ID NO: 163477 - DNA, 170 bp, Homo sapiens
aaactgggtatctgcaaaaagtgtgatgctcaggtcataccagacacaaacattaaacttgaaatcgatcatagatctaattaaaaagctaaacatataaatattttctaaatagatttctgctcttcaaagactagaaatttaaagggaaaccacactgggagcaatta

SEQ ID NO: 163478 - DNA, 563 bp, Homo sapiens
agcgcccggtccatctgtgggatgacatcttggtgcacatggcaacttcggagaagatgtgggaggacgtggggcccgtgggactctgcaggattttaggaggggtttcccttcggggccccctcctcctacctcgttaaaatcaatataagcaatcatcagtgaataatctctcttttggtttcaaatcctgcccaggagggctgatagtctggccacagacaatgccaggattgcagaggcctgggcttcagtgccccatcagggaaagtcccaccccacaccacatgctgactgcaggaggtgtgtgtgtgacctggtacaggggtgtggtttatcctcggaagggtttgaggagtgttgtgtgtgtgcaggacagggcaggcgttgggacagctgtggtagtgagggccactttattctgtgctacatgaagagaggctgtctgacaaagcttgccatgtgtttgatgaatgctacgtggcccatctcttttccataggaggacttcctggacatgaagctagattccggcagggccactggtgtcagcagcactcctg

SEQ ID NO: 163479 - DNA, 671 bp, Homo sapiens
tagaggactccgggacatttcacgagtacactctatgctgccaattgcatgatctcatggttccttgagttttggggttacaggcaaaaaggcaaagaagtgagcaaggaggataacagatcaaaagtgagttgtgcagctgataattcagcaaagaacaaagagacaatggcatgggaccgtgtcctgtttagagcctacagctactgtctcttgctggccttgctgtcccagagatgaccgaggaggagtcaggccagggcagagtacatggccagggtaaagaatactaggtttggttgtttgtttaaacctgagctctccaatcgcgctgctttggtcagatacctccagtggtgtcacaaagggaaatgtgatcttttgtcttgcctttcctcctctgcctgccagggaaaaatatatttacatatgttagtttttattttcctagcaacgaaagagtagaactattttacaaaccaaacacaatgtaaacactttggttcaaggggaaccagataatcataggtcatgacttctttagtaaaaacagaactgtatattatgtacaactcattagtcatgagttccataagtatgtgcaagtgctatgcatcttttattccctaaagaactcagtcttacccagagcatcattggtgactcgtgga

SEQ ID NO: 163480 - DNA, 571 bp, Homo sapiens
tcagttctattcagaagcaattcaaatgcattttacagacttagatttatgactattcccttgctcttatatacttcagggccaactttcatgttccatttttgacatcccagatagaatattgagatatgtttggcattggagatgagaggttatgaggaaagaatttctacaaaagcaagttgaaaataagctttcttctcattgtgtacaaaggggaggaagggctgagaaagtagctccagagagaggagagatggtattcctctacatcctggatctcccaggaaggcactgatttcaaactgcaccaacactcctgttgttgcccaacctgaatttagaaaagcttcagtaacagcgagaaattgccagaaaccagctgggtttttttttgttttttttggtcaggttttgaaaatagcacaaatataactgtagctggattcacaaattaatcctgcagaagggactctcaattaacaacacctcctatccctcacttcagtctgaagaactggggaggaatgcttaaaccgcattgtcttaatgcacggagaccaacgagtcc

SEQ ID NO: 163481 - DNA, 307 bp, Homo sapiens
taggtttgacatcagccaaatggtgtagcgcgatgtctctgacagatattcttactgatttaaagggaggcacaactcaggaaagatggatcttctgagacaggatttcagagtggctgtttttcccttttccaccccattttcctctctttatgattccagttgatgtgttgttcctattcacagtcaaatcattagagccttcagaacttgggaagaactgtgtttgattgacgacagtgaggcttcatgttgactgccacatgggctaggtggccagcatactggaaatacgatttttaaaaaa

SEQ ID NO: 163482 - DNA, 745 bp, Homo sapiens
cataggaatccacagtactaagacacaattcacaaattgctactctttaaaaagtgcaagaaagatcagtgctgattataggtcttaattatcaccttctgaataatctgtgtgcctggctcatagcaagcatttaataagtgtctatcaaataaagtcaagccttgcattttacttcttgcatactttgtataaattcctatttaatcccacgggtattaacagagtacctgagagactagtagtcttctattaacatatttatctctagcctctttcttttttgaaaaaaacaaaacaaaaaccttactacccctaaggttagctgtttctcctagcttgtggcctcatctggatcccctcctccccttttgaggctcactgacacttttctattgagtccgtcagatttccctgccctcaaaacgtaagacagaactaaggtaatgatgcagacaaaagatttattactgtctcctcttctcctttacatcatctttagaaaggttaatcctctccattcattttctcttaaacattttttttggccagctatggtggctcatgcctatagtcccagcactttggtaggccaaggtggggaggatcccttgaggacaggagttcaagacagttcaagactgacctgggctacacagtgagactatgtctctaccaaaaaaaaaaatttcttttaaattagcaaggcattatagcgcatgcctatagtcccagatactggtga

SEQ ID NO: 163483 - DNA, 200 bp, Homo sapiens
ggtggcaacggaaagagacttggtgtagagaaggctctgtgtgttaactgatgggagagactgtttgtttataaatgtgtacagttttgttttctcgtaaggggagaagtcagaactcagttcaaattctggttctgttgtttaccagctgaggggctttgagcatgtttcttggcctcggagctatagctttttcatgt

SEQ ID NO: 163484 - DNA, 409 bp, Homo sapiens
cgttctgattatgaatgtcaaaaaggcagagcatgaaattaacttccccttagtcattgggcacagggagacactacactaattcactgcccttggtatgaaaacttcccatgacaacgtcgcatcaaattagggcccatgctaccctggtgccatctctatctctccccagtgcactcttttacaatcaggcccagcctgaaaacaagggccctgcttgttccagaaaagttagggcgacaggcaggaggtgatggttaactgggacagtagggagaagggctgctctggtcccccgtgggggctgcccactgaaaagtggaggtgggatctcattgtgctaaggagtaactcactcggcagagcatctgatgcagtaatgtaccactagccccacctgagagatggg

SEQ ID NO: 163485 - DNA, 364 bp, Homo sapiens
ccaggagttcgagaccagcctgggcaacaaagcaagaccctgtctctacaaaaaataaaaaataaaaattacctgggtgcagtggcacacacctatagtcccagctactggagaggctgaggcaggaggatcacttgagtccaggagtttgaggcttctgtgagccatgatcgtaccactgcaccccaacctaggcaatacagagagagagagaccttatctcaaaagaaaaaaaaaaaaaaacattgagtctgggggttaatagcacagcaatccaccatctcatcttgctgcccaagacacagatatggacatggcttctgttccttagtcgctattaaatgtttcttcccaaggaacttta

SEQ ID NO: 163486 - DNA, 477 bp, Homo sapiens
tgccctaatgggcatttcggtatatgtatttttattgtttggagctctttgcaatatttccagagcaatagatttttttagatatcacttaaaacgtgctcattttatagataaagaggtttaggtctgtatattgacttggttaaagtcatgttgatttccagtatatatgaagtgtgccatacttttgctgcttttgtgaacctaaatattgtgctaattttagatttatcagagctataaaacttctactagtttctggtttcttgttctagcttcctcttcctggtccctggctttctttcagcctttgaaacctctggagctacttctgccaggattaagcttttttgttgcaagttgcagaaatctggcgacaaggccagaagagaagagagagattaagttagtctaccttttggaattgtttcaagaatgaaaaatgagaatagaagtctcctgaatcccagtctggat

SEQ ID NO: 163487 - DNA, 250 bp, Homo sapiens
aaatctggcttctcctcacacttttcctgggtcactttccaccctcccctgacatcaggatgatacaggcttggcgaggtgaaacactgagagtatttatataataagccgggccttggaaagagaccctcccaagaacagagaaggagaaaacattccacctacccacccacccatccagctacctacctgtctatccaaacatcttatcattgatcctaagtctgttcgcttctccctacctcctctg

SEQ ID NO: 163488 - DNA, 1545 bp, Homo sapiens
ctcatattagagcccacttagtgtataaagcttgctgctgccttgagatcaactaaatatgaaatattaatttaatctcccagttgttcctgtcttctggcacttaatggattctgtttcaaccacgtggttgtccctgtcagtggcctaggcacacagagtgaggcctgagtaactctagagccctcaccttcttgtgacccgtggtggtgatgcatctttgtgagcagaggatctatgtatattagcacctaacatctggagcaaaactagtcctatggacataagccagatgctgttccgaggtccaaaaggtgagacagctggcagttctatcaaggacagcccgtgttccctgggctttcaccctcttttaacgcttttgtgtccagtaaagctcaaagtcaaatgaaagacaatgacacgtcttaatcagatagtgcacctataatcagagtagcagatgaaaaagtttacagtctgtactaattgcacatttattgttggggattttccatgttttctaaacacaagtcattgcatatatctggagtgatagatggggaataaaggagatctggctacacagttttgtggcatttctgatagataagctgaggaatggtggccataactcaagctcatgaggacatctccctgtccttgtcttgtgacttctggccactagacagggccactctgagtcttttactctgcgtgttggtatatgagatggaaatgcctgttcttaggaattttacacagattttcttactgtaatggtcaaagagtaataaaagttctgttttaaaagctagatggccaaagagtaataaaagttctgttttaaaagctagattctctcttttaatagggttaccatccatataatttattcttcaaaccacgatgcttttgagagtgaaaagggggctgttaataattctgatgggacaatagtcatacatagatcaggagtgtcccaagcaaactggatatgtggtagccctgcattttagcaccggcttctctgtactctacccctaagctttctagctcctaagtggagcgaaaaatgtatcaaggcatatatccaatttagtgctacttaccttttcaaagagctgaccaaaattcacgcaacaaaatgacactgcctttggtgagatctaaatgaaagctataactaagctattctttcaggctgggtaaggggaaagtatagccaatatccccatagttatatatcaaaacttttttttttaactttttaagttcagaggtacaagtgcagtaaagctttaatactaaaggaaatagttcacaagtcaaccagggatacttatgtcatacttgggaaaccagggcccaggaggtctgagaattgcatgttaccttcagaggaaaaatctaacagcagatctctcgtgtgttgaaaattctcagattgttttgtgtaaatttattgttgttttgctacttaattgttaaatttgtaattagtaaattattcgactagtaaatttgttttcatgtgatagtaga

SEQ ID NO: 163489 - DNA, 543 bp, Homo sapiens
catcatataccaccactggaatataaatttgaaagagagtcctgcagattatatacatgaatctacttaggcctaataaccaagcagtcctcagtggcagatcaatgaaaagtgaaactaaaggcaagtgaagggtaggagagattggccagtgtttgtgcagcctctgtgggaagtgtctagttcaattcctctcatgtctgcttctattttcctgttccccccaattctaaaaagccagtgtctccttctaatgtctgtatgttctgtgggaattttaaagtccaggtgatactctatacagactgatatggtttggctctgtgtctgcatccaaatctcatctggaattgtaatccccatgtattgaggagaggaggtgattggatcatggggtggttcccccaggctgttctcatgatagtgagttctcacaagatctgatagttttgtaagtatctggaagttcctcctgtgtgcttctctctcctgctgccatgtaagacatgcctgcttttccttccaccatgattgtacattttc

SEQ ID NO: 163490 - DNA, 276 bp, Homo sapiens
gagtgagtgtagatagagaaaagatgaagttcttagactgagttgctggataaatatttttgatactgggagaaatttatctagaataccagaactaaaagagaatcttttgataatttgaggactaacaccttcctggctaagaaactctaacaagtactaactagtcaagatgtagagacaaatgtaaaatggttggtgaatgaatgtctattttttatctctcttttgtttgatacggagtctggctctgttgcctaggctggagtacaatgg

SEQ ID NO: 163491 - DNA, 451 bp, Homo sapiens
gctggattgagattgtgatacaataaccagatggtaaacatagcaatactgaaatggagagctacttggagaaggtcagataatcccaaggattctggtggtaaccagtccactaaattatcagtgatctgttgtaacagaactcattcaaaagcatgaaggcctctcacaggagcaacaaagtcagccaccaagactgttgttacagagaagtccgacgcttttctagtttattttgtgcttggcgctaggaatttctgtaaaaaattacttttaataagggaggggaaaaaaggcttagaggagtagaagcaaagcagtgtgggatgttacgggatcaagaataatgtttctcaagaaaatcaactagtcagaggaagctgcctaatgatatcaggtctggaaaacctaacaggataaaaatgcagacttttggagtgtctaggtcctg

SEQ ID NO: 163492 - DNA, 188 bp, Homo sapiens
gttgtggaggaaataatgaaagtcactgactggaaaagtaacctgtgacgttagccaggtcaacctccaaattccttcccccatttctaacaagtacatcaaactagagacagtgtgtgaatcaaagaattccaggcacagttggctgttaactagaatagtaagtggctgcctaggttctgtcattc

SEQ ID NO: 163493 - DNA, 156 bp, Homo sapiens
gtgggaaagtatgtttgtagtccccagttgtcttccttttctggtaaattcctcttctgaagtgattgctttctgggatatgttccttttcttcaccttttgctctctgaaattcagggcaggatttgtaggactcccactggcacttgtgagagg

SEQ ID NO: 163494 - DNA, 377 bp, Homo sapiens
  misc_feature (371)..(371): n is a, c, g, or t
  misc_feature (374)..(374): n is a, c, g, or t
gcacttgagcacttacagagagaaaagcaaaaagctcaagtctttacctctcagcataagtcatggtctgagatccagagagctcccatgatagcacaaacacaattccttatttcttgtatccacaggggtgatattattggtaatcaatatcaattggtaatcaataattattaaacgtgttggttgctgaattaccatgacagttgaattcactgtgtcaccagggttctcatgataatgttagggcactaataagtgaagaatgggaactttttctcttttcttttttttttttttttcccccaacggggggcccgggggggccccgggctcaatttcgaaataagggcaatggttttttcttgtgnttnatt

SEQ ID NO: 163495 - DNA, 237 bp, Homo sapiens
ggaaagaggtacaatgcaatcagtagaaaggtcaccagaaaagaggaaggaggaacaacgagctgtggggaaatgctgatgggcgcatcttgctcccatcagcttcctccttcccaggcttttgtttgctgcttgtcttgtctgctctcccttgcctcaggtggctatgggtagtatgtttttaaatcttttcaatagactccacattaggaagccacttcagacctgatgggaggt

SEQ ID NO: 163496 - DNA, 468 bp, Homo sapiens
caggtcagcaggctgatggccaacacagcactgtggttaagagcatggttcaagaggcagaccacatgtatttgaaccttcactccatcacttactggctgtgagacctcaggttgattactgtacctccctgtgcctccgctgtcttcactgttaggttagtcatcaatttatttcctctctattccaaattcactcttcattgcctgctctgcaaaaatgcatctggctccaggatagagccccaaactcctaagcttgttgttcaaaggcccggaccccatgctacgtctccagccttatctcctcctgtcttcaagctaccctgctctgcctgtccctgacaacaaccacatcctccatagcctcaagcatgccactctggccaccgccttctaccttctctaactccttagccctacaataaccacgagcaggccctccgtgctgccggcaatccagcctcat

SEQ ID NO: 163497 - DNA, 187 bp, Homo sapiens
aactcagcctgcaggagtactcagcaatcttgttaaaaatgcaggtggcactgatgccgcaatacagaccacgggcaaagttgagaggagctaagggagaacccacggatttttaaacaacaaaatcgtatatactgccagacacaggggctcacacctgtaatcccaacgctttgggaggctgagg

SEQ ID NO: 163498 - DNA, 233 bp, Homo sapiens
gctactctgacatatttatgataggtttatccttagatttggatgtatttaagaaagatatatgatgttgatttatatatgcatgtatttttaaccctacataaattgcactatggagctgggcacagtggcttatgcctgtaatcccagccttttgggatgctaaggtgggaagattgcctgaggccagggtttcaagaccagcctgggcaacagagcaagactcttgtctc

SEQ ID NO: 163499 - DNA, 383 bp, Homo sapiens
ttcccatctggctgtcgatgatggcatagtcgggaccacagcagggctgttggttggacacctagatacagtctcacctgtggcctctctgcatggatggattagtttgggattcctcactgcatggtggccgggtccaaagagtgactatcccaagacagcaagacagaaaggtatttgtgtgacctaagcttggaggtcacagagcatcacacaaaaagcgccaccgtacacacaaagtatccattatacacaaagctccacccaggctcaagggaaggggacagaccccagtgctggatgggcggagtgtcaaggccattttgcaagaagagcaagtggaacagtagccagggttgcagccacatttgggaaatataatc

SEQ ID NO: 163500 - DNA, 774 bp, Homo sapiens
ggccgttcaggtggagctggagccggttaatgcccaagccaggaaggccttttctcggcagcgggaaaagatggagcggaggcgcaagccccagctagaccgcagaggcgccgtcatccagagcgtccctggcttctgggccaatgttattgcaaaccacccccagatgtcagccctgatcactgacgaagatgaagacatgctgagctacatggtcagcctggaggtggaagaagagaagcatcctgttcatctctgcaagatcatgttgttctttcggagtaacccctacttccagaataaagtgattaccaaggaatatctggtgaacatcacagaatacagggcttctcattccactccaattgagtggtatccggattatgaagtggaggcctatcgccgcagacaccacaacagcagccttaacttcttcaactggttctctgaccacaacttcgcaggatctaacaagattgctgagatcctatgtaaggacctgtggcgcaatcccctgcaatactacaagaggatgaagccacctgaagagggaacagagacgtcaggggactcccagttgttgagttgaatatgatggagcatcagattttacctaatacagcagaactcctaaaaagttacagccatatgcaggacggcagtactcagcatggtcttatgcacaggaactaaaggaaaaagagatcgagtcacaaaaattcaggaagagggggtaaatgtggattgtatggaatgaaaaataaacattctcaa

SEQ ID NO: 163501 - DNA, 372 bp, Homo sapiens
atggctccaggaaataccaaaccgtctgagatgttagtattagttagttttgttgtgagtgttaggaaaagggcatacaggactaggaagcagataggaaaatgattatgagggcgtgatcatgaaaggtgataagctcttctatgataggggaagtagcgtcttgtagacctacttgcgctgcatgtgccatggagcctcatgtcacatgaggctcctcccaggtgtcctgatctgtgatttatagtcacagagtttccagcacctggcctagcatgaattgtattcatgaatctttcagctgatgagtgaatgcaattaatgatgggtcaggaaagaattgcagagatgaagtcacagttcagggtggcc

SEQ ID NO: 163502 - DNA, 596 bp, Homo sapiens
tcaggaagctcctcagttcagtgaaaattcaaagggttggcactgagctaggaagcgagaatgcagggttatgaaaaaggatccctgctttgggagctcatggacttgtagcagagaccggtagtaaattggcagtctcagtaacttctgtaaatgattgcatctctttgcaggcttctcttcccatactctcccccactcctccttggacagtgttccgggggttctttcctaagcaactgctttttcagtatacatacttcagatgattgtgtctactccaggatttccaacgatgctaggtttctttcctgtgccctagacgtataggtctaagttccacctggatatcccacagggctatcaagctcagttcatcctaaacagaacttacattcatccccaactcaggatgctgtcaagaagcatcctgagttcacgtaatcctcctgagtacctgggactacaggtgcccaccaccacgcccaactaatttttgtatttttagtagagacatggtttcccacattggccaggctggtctcaaactcatgaccttaagtatccacctgccttggcctcccaaagggctggga

SEQ ID NO: 163503 - DNA, 155 bp, Homo sapiens
tcttcataatctgtatatctgaaaaaggactaatacccagaatctacaacgaattcaaatcagtaagaaaaaagtaaacattcccatcaaacaaatcacaagccctccccagaccagatcatccagcccctcttagaacttgacccaatatcgtg

SEQ ID NO: 163504 - DNA, 263 bp, Homo sapiens
gcaaggatcaggaaggaagagggagggaaggcaggaaggagggaagcaaggaaggaaggaggaagggaacgaacacctgaaagaactgggatacctagtggactacaaaaaagcctgataccccaacaccaaatatgttttatgtgcaatccttctgcagtctcctgtcacataaatgcttgactgtagggacagaagatagtggacatgagtggctactgattcatccagaactatttctttattactactgcaggcatgcc

SEQ ID NO: 163505 - DNA, 372 bp, Homo sapiens
ggctcaagtaatccttccccctcagcctcctgggtagctgagactacaggcatctgtcagcacacctaattttttgtggagatgggcttttgccatgttacccaggctggtcttggactcctgggcttaagggatccgcccacctcagcctcccaaagtgctggggttgcaggtgtgaaccactgcacccggctctggatactactttaaagcccaacagaatccaccacaagtcactgaagcactgtgtttagagccaggcaacttccttgactgcatgaaccaggacggcaattttcacctctctttcccaacttcaattctctacccacaccctacctttcccgtcttcccgttatcaacagaatgggc

SEQ ID NO: 163506 - DNA, 512 bp, Homo sapiens
caccagagaacccccctttgagtgtaatttttctttacctacccaaatcctataaaacggtcccacccctatctcccttcgctgactctcttttcagactcagcccacctgcaccaaagctttattgctcacacaaagcctgtttggtggtctcttcacacggacacgcatgaaactggccctactgcatctagggtgaaagacggagctgaataactttctgtgaggctaaatttctcccttgcagtggtcctagactcaagtgactgtttgtgtgacagttaggacatttccaggacagcctttagggggattatgtggctgtttcccctagagcatatgcagctttgcgtccagtgctgatctaacatagtctcacctctaacaaagcaagggcctctaactcttttaaatttccaccttccatatcagagatctaatgtgaaagttcctcacagctttttcttgagttttattcttttctctctcctcacttcctctttaacagatct

SEQ ID NO: 163507 - DNA, 265 bp, Homo sapiens
cattttttcccctaactctgagctctaaaccacacactgggaggcattcctaattgacaggctttgttggtcgccttgacatttggtctgtttcaaagcagatactgcttaaagctgtgtgtctggaaatgtaccagcaggcaaaccctcagaccttctttcggctgcatgtgtttatatacatccttggtcactgtaatgagtaaaatgtgaacgtggcctatgacaatggatcaatcaggctttgaggtgtaacgtgaaccgt

SEQ ID NO: 163508 - DNA, 851 bp, Homo sapiens
ggtctcagaaaggaaagtccacaagctgatgctgcagaacatctccccctcagatgctggggaatacacagctgtggtcgggcaattggaatgcaaagcaaaactgtttgtggagacattacatattacaaaaaccatgaaaaatatcgaggtgcctgagaccaaaactgcctcttttgagtgtgaggtgtcccacttcaatgtcccttccatgtggctgaagaatggtgtggaaattgagatgagtgaaaagttcaagatagttgtgcagggaaaactccatcagctgatcatcatgaacaccagcacagaggactcggcagaatacacatttgtctgtggcaatgaccaagtcagtgccaccctgacagtcaccccaatcatgattacttccatgctgaaagacatcaacgctgaagaaaaagacactattacttttgaggtgacagtgaactatgaaggcatctcttacaaatggttaaagaatggtgtggaaatcaaatcaactgacaagtgccagatgagaaccaaaaagctcacacactcactgaacatcaggaatgttcactttggggatgctgctgactacacctttgtggctggaaaagcaacatcaacagccacactttatgtggaagctcgtcatatagaatttaggaaacacattaaggacattaaggtactggagaagaagcgagccatgtttgaatgtgaagtttctgaacctgacatcactgtacagtggatgaaagatgaccaggaactgcagatcacagacagaataaagattcagaaggagaaatatgtccaccgccttctgatcccatccacccggatgtctgatgctggga

SEQ ID NO: 163509 - DNA, 292 bp, Homo sapiens
gactctcatgttggagagagaaatcgagatgcaaagaaactttttaaagttctactaattcctaatgaaataatagggatgcaatgcagcaagaatacaaataattgaagtagcctggcatcaccgctgacatgtaggcaggttggcaggtaacagctccgctcatggtctcaagtccaaatttgtataagaaaggaggtttaagagttcaacggctaagggacaaaaaggtagtttatgggaacgctgaaggccaccctcaattctctcccgtttctccagctgggcttgg

SEQ ID NO: 163510 - DNA, 285 bp, Homo sapiens
aacaccaacattgaaaacaagatatcaaattgataacctaagcttttacctcttaagataaattctaaaaaattaaagcaaaccatataaaacagtgaaaggagaaaaaaatgaaacagaaaatagaagaaatacagagaaaacaaatgaaatttaaaaaattaattcttcaaaaagatcaacaaaattggcaaactttcaggtagactgaccaagaaaatcaaagagaaaacagaacatactcatcactcccaaacaattccttattttgcctatatttttaaa

SEQ ID NO: 163511 - DNA, 348 bp, Homo sapiens
ctctcaggctcagccacgcctggcccatcctgggccccctcctggccccaggaacccaaagcgggatgcaccattcactgggcccaggcaatcagatccactgattctacttggcggtcaacgcccctgactgctgctgggtatggaggccaggagcttacctcattggtgaggacacagatccctggggcctctgcctccagggaagggaaggctgcctggagcagaagaggcagtacctctggaggaacaccaggccttgggggaatgtcgtgggtacaaaggcagttgattggccacagaaggcccaatcggggcccaggttcttcgagagggagagtctatgct

SEQ ID NO: 163512 - DNA, 158 bp, Homo sapiens
ctgtttgcctggatatcaccagcggaggctgcagaacagcaaatattgcagaacggcaaattttgctgtctgatccttcttctgaaagcttcatctcagaggggcacctggctgtatgaggtgtcagtgggcccctactgggaggtgtctcccattta

SEQ ID NO: 163513 - DNA, 222 bp, Homo sapiens
acctgctgaacgattctttgcctccttctccatctagcacactggtgtttacaccaggttttttcttgcctgtaatgaagggaggataaatggctaaaataaaccccttctctctttcaaaatctcaatttgcttttgactcaggcgctcctaacagagcaacaatcaagcatcggtccccaggaagacaaggctgtcacgactggaagaaagaagacctgc

SEQ ID NO: 163514 - DNA, 309 bp, Homo sapiens
caaggggacgtgctggtggaggttttctctctgcacagtggggggacaaggacagaagaaaagaaaggcatctttcggcttaattttaaaagaggttcttttttcttcccagagaacagctggagccctggaacctggccaagtcagagcctgagacctgaagtcaggaaccagcacgcctacaaaatccagccacggatcttcctttaattcagtctgactcattaccttcagcctctggcaggttccagaggggttactaatgcagaatccagagccttcttctatttataagccaatggaagggct

SEQ ID NO: 163515 - DNA, 565 bp, Homo sapiens
ctggggttatatggcagtgagaccaacgcaggcaggggacccgcacctgaccctggcccacttggagttaccccagagttacatgagaggctgagtaagaggatcatttaagaccaaggttcaaggccgcagtaagacatgtttatggctgctgcactctggcctgggtaacagagtgagacttggtctaaaaacaaaagcaaacaaaacaggttcttacattaaaaccctgagtttacattaaaacccaggcagaggacccacacctgaccctggcccacttggaggtgccccagagcccctggcttctggcttttccctttatgagtcaaggacaaatgaggtttattctagaaaatgcagctggtctgaaagtggccagtttactagggaactatttcaactttaacacacaggggtccttggcaggttccgagccaaatcccaacaacataaaatgagtggaaagcagccttacaagcttcctcccgattccggaacacactccatcaaaggctcaccaaaatccttgccagtgctgcctcctggagtcggtcagtgctag

SEQ ID NO: 163516 - DNA, 405 bp, Homo sapiens
gagctaaacttctaggaactttgtcatggtctaactctttgtatactactaagtatttagtggatgttctttctctttgtcatatccacttcatatcaacttttatctctccgaataaaaggaatttgaattgctctttagtttgacaatttttcatatatacaattgtctcatattttctgttttattcaattagtagtcatggagaggaaaaaagacaggaataggcacctgtgattgtaaaatattttaccagtaaacaactagtatagaatatcaagggcaactggttataaaatgaaagcctgtagacctgtcaggtggaggtctttgatggctaagattctaatatgggttattaaaagcatgattttaagcacctagaaggtgagtagttggagccaa

SEQ ID NO: 163517 - DNA, 346 bp, Homo sapiens
attaattttgcagggcacaagggaaacagcattactaaatgcttccatttaaaaagaaatactgaaataaacaaaaagtattgaaacaaatattaaaaacaaatattgagttagaaaattaagacagtgattagcctatactttttcaattcagttatcaatacagtcaatgtaattaattctacagatggaatctaaacaagtatcttattgaatatttatctaaagtactaaggaaaatatttccaaggtatatatatgacttgtctgataatatttctattgagatcacttaacattcaactaacaaaacataaaataacatatgcatgataaactcatttaa

SEQ ID NO: 163518 - DNA, 185 bp, Homo sapiens
ggcaaaccccgggctctgtactcttcgtttttgttttgtaacttaatctagcaggacaacgcagttttaaaaaatggtgtctcatacatgggtccatgacagaagtcgtggctatggttaagctaaaaaagagatacttgcagctgttcaacaagggccaagaaatactcccaaggcttgtgcaa

SEQ ID NO: 163519 - DNA, 484 bp, Homo sapiens
ttccttgttactgatttctagtttcattccatcgtgattagaaaatacttagtattttgcatactttcaaacttttaaaacattaatatttgttttgcagcctaatacactgtatactctggacaatatcccacacgctcttgaaaagaatgtgtattttgctgttgttgggttggtgtctgcatatgaccattagatctaattggattatcatgttgttcaagtgctctctttcctattgatctggtctctgtattattaacattgaggtagtgaggtctccaatgatcatcctgaaactctatttctccctttaattctatccttttttacttcatatgttttgatgctctgttgttaggcacatatgttttaaattattatattttcttgttggattaaactttttatcagtatagaattcccttgtctctcataaccattcttggcttaaaacctattgtgcctaacatgtggccactcc

SEQ ID NO: 163520 - DNA, 665 bp, Homo sapiens
aaaattaaattttaaaaaatcgtattaactggaggtaaatggatagaattcgaaataaaatatgtgtcccttggggacataaacctgtgtaatcacttatgcattactatatatacttgatattacaatgtgagcattagagttgatgttttcacttcccagtacataaaactttttcgattatagaggtgtaaactcttgttttacagttttcatttaagagaataagctgtggaattttgaggaacaggttggctatttttatgattcaattatctttgttcgctttgcacttgctgtggcttccatgatttatgccaacagtcttggttttgtcttcagcagaaacaccaggggaagttctcatgacatctctcaccatcagtatggctaacatctgttaaaacagagttgatatgaaattggatagtttttctttttaatacttgatctgggtatggctctgatctcaaattgttaaaacaataaaactacattttatatgatttatgttttttctgattataagaataatacatgcttgttgtataatgtgtggaaagtgctgatcattagtgggaaattgttgaattcatatctaagtaatatgatagctttcctttaatgagcacctactatgttaaggctctttccatgaaatgatt

SEQ ID NO: 163521 - DNA, 520 bp, Homo sapiens
gaccaacctgagcaaaatagtgagacctcatctctacaaaaattttgaaaagttaaaaagttaaaaagttcatggtggtatgaacttgtagtcctagttactagggaggctgaggcaagataattacttgagcccaggagtttgaggctgcagtgagctatgattgcaccactgcattctagcctggacaacagagcaagaccctgtatcaaacaaagaaagaaaaagtataagctattgagccatggaaagacatgttggaagcagaaatgcactgaggaattcttaagtaaaagaagttagcccaaaatggctgtgtactgtatgtttccaaatatataacattctagaaaaggcaaaactatggagacaataaaaagatcagtggttgccagtggggagggagggaggaatgaatgggtggagcataggggagtctcaggggagtgaaagtatttggtatcatactctaacggtggatacatgacattatgcatttgtcaaaactgatagaatggtg

SEQ ID NO: 163522 - DNA, 646 bp, Homo sapiens
cacctccagcaccattgcttccacttccatcaccattacctccaccatcatcaccttcatctctacctccatcttcaccatcaccatcacctccaccttcaccaccaccaccacctttatggaagatccctaaagaaactgagccaactctaggtcggcttccaggctgaggaagtagggcttgattatgttcaagctgagaagtggttggagaaaggggtaatatctgccctcctcactcagtggagcttcagtatctgcacttcccttttctgtagccttcaagttccaggatttttatttttattttttgagacatggtcttgtgtcgcccaggctggtcttgaactcctggactcaagtgaccctccccactcagcctcctgagtagctaggattctaggcatgagccatggaacctgctagttccagggtattttctgtttccctgcacctcctccctctcgccactacccttccatatacagaagaagaaaagtctgcatctctgtgaaagtaggtctgtacctctctgcacgcactggcagctgctctctgtgtctgtagtcttccacggaagccttgtgcaggaggagctgagctgagagacagggctatttatcaatagaaagtggggtaaagtctg

SEQ ID NO: 163523 - DNA, 470 bp, Homo sapiens
tgtcccaaaaccacattctgtggtgagtgtggaaacccctaaactcacccccttcacttctgacgccctggggggaaagcctgtgataaatggaaaggctaaagtccaaggtgggtactgagaaaagacttcccagttgggagttttggtgccaaggttttaggaaaagaaaaacccataagaagctaggtctctattttctgaggctgcattcccagaaacagggcccagcccacctccgggggcctcaactgagcccctctgtactctattgctgtgtgatctccaaggatcacttcacctctctgaacttctctggtaaacagggctaagacccatctggcagggtttgtgtaaagaatcattgaaataatggaagtgaaagctgtaaaagcacttatgcctacgagagggttgagaccccatgccgcacgcaggctgggtgaggacagggaggagaaggaggcctg

SEQ ID NO: 163524 - DNA, 633 bp, Homo sapiens
tttaccaccatcgctattacttcctcattttcccaagtacattttgtgcccattcataaggattttgccaattgatggcctgatccgagaaacttaactaatcacccaggagtgagtgactgtactttctccacgtcctgatggcactttttgtacctcccactcttaattatatcttacttatttctagatcttctaaatagtctgtaaggtcattaagtgcagggacttagtcaactaaatcattttgccctctgtgctatatacactgcctggcacagaatgaacatgcatttactatttgattaacttaaccaaactaacatgaaagaaatcagataaactctgtcatacatattttgttaaatgaagagaccctagctcaccagcctaactttatgtattttgttttagagacaaggtcttgctctgttgcccaagctagagtgcagtgcccaatcaccactcactgcagcctttaactactgagctcaagcaatcctccagcctcagcctccaaaatagctgggactaaaagcatgcaccactatgcctggttattattgtgtgtgtgtgtgtaatttgagtttagtcatatatgacagagtgctgacagtccccaagtgactcgtg

SEQ ID NO: 163525 - DNA, 506 bp, Homo sapiens
ccactaatcacctaaattatatgtatagcctgtgaggcatctttatgatgctttatgatttaacagccttataaccttttgtgctcagtactgaactgggattggactttaattcctaagaagccttcttccttctttgatgtcacattcccttcctctctctagtttacatttttgtattatcctttaaatttttattttaaacatacatacagaaaaactcactcttttgggtgtacagttctgtgagttttgacaactgcatagggtcacataactcccaccacagtatgagacagttccatcacttcaaaatcttgcccagtgcttcccctttgatgttattccctacctctacccctaatctctggcaaacactgatctgtactctgtcactgtatttttgcctatgtccctatatttttgttatataaatggaactctacagtatgtagtttttcaagtgtggcttctttcacgtcccataataaatttagggttgattg

SEQ ID NO: 163526 - DNA, 280 bp, Homo sapiens
aaccaaattttacgtggggatccatcctctctctgcacactggccagaacaaccatccttaacatgcagcccctgggcctgcactcccacgtgacaatagcaggtagcaggtggggtgaggaggggcacacttcacacagggcacatgccaactggccgcagtccccgccactcccaactgccttactccagcctgctgcactcattcccactattgcccggccctgcaggtgggtaggtatagagtccaaggtctaagagaaagttgcctagcgacagg

SEQ ID NO: 163527 - DNA, 459 bp, Homo sapiens
atgtgcggctaggactcaatgagatagggttgatagtggaggaataaatcagaagaaattaagtgtcacagaaactgtaaaaagaatgtttcaataaatagattgtgatgaagatcatcaaatgatggacaatcatggagaagcagtgttaaatattaaaaaggtacatttaagctttggaggcagagagaattgggtttaaatgttatctgtactaactagctgtgtcagctatgaaattcatgttacctcactaaaccttatttttctcacctgtaaagaaggggcaatatgtgtctttttaaagtttggttgtaattaagagcagccacactctctctctctcacacacacacaaacacacacacacacaaatgcttagcaaacaggtgctcaataaatggccactgttgttactgctgtaagacaatagagaaaggtgtgggactagactactag

SEQ ID NO: 163528 - DNA, 345 bp, Homo sapiens
  misc_feature (10)..(10): n is a, c, g, or t
tcatagctgnctcctgaaccaaaaacaagggagcccaatccataatgtgtgcccattgccatgaccgactccctcaacacacacacacacacacatgcaacacctgactcccataaatagctcccccataaatagcttggaccactcccagacccaacctctccagtagggattctcctgacacaccccagagatggtccacgccaccgctgccccggggaggttttctccggagctagggaaagtctaccatcacggttaggagaagtcggaagctcagagaacctctttctccacagctactggtgatctgtgctgtattttagtgcagtcacctcccgcagc

SEQ ID NO: 163529 - DNA, 582 bp, Homo sapiens
ggaactttggatagttgtctaattctggttctaactgccttttcctctcactttatttacaatttatttttacaatagagattgggtctccctatgttgcccaggctgaccttgaactcctgggctccagtgatcctcctgccttggtctcccaaagtgctgggattacaggtgtgagccaccatgcccagccgtccagtgcctttttaaccaaacagtgcactgtgtacatttctagacaagtcctggagctccctgcaggccggaaaaaggggcctccgggaatgtctgacgtgaaggggaagtttcagtcttgggttcagtgctttgaatgaggccgtgtggcagaagtttgcttggagctgtttgctgaggctatctgtctgcattggtggtggtatcacttagtgtatattggggtgtccaatcttttggcttccctgggccacataggaagaagaagaattgtcttgagtcacacataaaatacactgacactaacaatagctgatgagctaaataaaaatcacaaaaaagtctcataatgttataagaaagtcccgttgaagccgtcggggatcc

SEQ ID NO: 163530 - DNA, 238 bp, Homo sapiens
aatattgacatcagtgacaatgctctttatgccagtgactctgaagaagaaggagggaaatcctgtaccctttgcaaaagcctgcaggtgattttgaaacaaccacctcactgatctgggaattggtagccatatagggtagccatagaagtttggggaggaaggaagtgttgtaatcttatttttattttatttatcgctcaaggcattatgtggagaattgatcaaagtggacaag

SEQ ID NO: 163531 - DNA, 412 bp, Homo sapiens
aaagacagtttcacagctgaaattggcaatcaacctatgaagacaatcacttaatagcaaaatgctcaaaaacctggaagatatcaattatttgtatgttatcttttaaaagccatggatgaatgtcagatgagccaccttccaagaaacagcatagctgaagaaatactgtgttaatagttgctccaggaccaaacccattctcagcacagaatcagagttttgcaatctgctctgactcacacaaacgttcaaagagaaaactttactacccagcaggtgtcaggctgaaaggtaaagtggccacctacactggtacctcaggaagaatttgctagtcatgccttaagtcatattaaaatagaagaacgaccttcttttttggagacagggtctcactctgtcacccggg

SEQ ID NO: 163532 - DNA, 254 bp, Homo sapiens
agtaacttggcattgaattgacacataatgaaggctcagtaaacattcatttttgttaacctgtggggtttgatttaaactcaaggggaacttgaaggactctttctcagggacatgagttgcgcattagaagacgaggttcagagccaggcactgtggctcgcgcctgtaatcccaatactttgggaggctgaggtgggcggatcatgaggtcaagagatcgagaccatcttggccaacatggtgaaaccctg

SEQ ID NO: 163533 - DNA, 152 bp, Homo sapiens
tggccaagtaaaaaacatttttctgcattcttgctgatgctgagggccagtctcctttttctgagtatagtcaacccctcctcccaagccatcactgcccaacaaaacagttattaaaaatatcccagcattcatggtaaccataccttccc

SEQ ID NO: 163534 - DNA, 520 bp, Homo sapiens
tctgcaactagtgcgtagtcatacatctcagcctcatttttttccatccttaaaatcaggcaaattggatgtcataatctctaaacttccactaacaacacagttttcaccaacaccaggaatataagcaaatctcaaactgtgaacaggtttctaaaaagaactaagacattgcttttgttgttttcaaaagaatttcagtttaaagaaaaaggaagccaaaaatacttgttttcattatgacaccaaatcctaaagggaaagaaatagatttaatgccaaaaagatgtcagaataaccagctcaaaagctagaggtcacccaatacagagtaggaactaacctaggcagcaagtgtgatggaagttttaaatagcaaatgaaaagattatataataatgagctgtcaaaggcagaattaaaactggcataagtcaacttcaagaaagaaatggactgtaatcccagcactttgggaggccgaggcgggtggatcatgaggtcaggagatcgagaccat

SEQ ID NO: 163535 - DNA, 159 bp, Homo sapiens
gttgtaatggaaacggaattctgtatccattcaaagagcaaaacagagatggaaaagcaaggacccacattttaccatgtgtggccactttctgaaagaatagtcaagggactatccaacaaaacataacaattctaagagatacaatgtattaaagaa

SEQ ID NO: 163536 - DNA, 415 bp, Homo sapiens
tatcatcaaaagtagcatcacttagtctagagcagtggttctgggctaagtctaggtcctgcttgtccatcacaattacctgtggagtttttccaaaaacttgcttagcatcctaaggttgcagcttcatacctaccccagggcttctggtttaggactggatgggatctgtatgtgtgtgatacagacatctgtgtgcaaaatgcacaggaaatactacctggcccatgatcccctatccccaaagaatagacgggaaggaaagggccatttgctcgtaggttcttttttgcaagaaaatgttcacctctaacagctcgactctggtttagtgacattccctgacccttcccactttcttttctgcacactgctgttaccactgttatctctaggcagaggtgtgccaaaccac

SEQ ID NO: 163537 - DNA, 314 bp, Homo sapiens
taacttcctgtttcactcaaaaatacagaaccaaacacagattttccacaagctctccaactataacctgtgtgcactgtgcacatatattctgccttgctttctcttactatggagaaatcatccatattgccattaaatacccctcattaggccaggcatggtggctcatgcctgtaatcctagcacattaaaaggctgaggcaggcggatcacgaggtcaggagattgacactaccctggctaagatggtgaaacctcgtctctactaaaaatacaaaaaaattagccaggcgtggtggcacacgactgta

SEQ ID NO: 163538 - DNA, 693 bp, Homo sapiens
agcataccatccaattgcagtaacccaaaatgtctccagatattaccaagtgtccctgggggtgaggaggacaaagtcacccacctattgagaagcactggcctcaacagtgtgcttagccaaggcttctgggagagggagttatcttaacaccaatgaacaggctgcagcaggtttcagatattttacttcattattttatttttgtggagacaacatcatgctttgttgcccaggctgatcttgaactcctcggctcgagcaattctctgacctcagcctcctaaaatgctgggattagaggcatgagccaccacgtctggactcacagatcatttcttcagtccagtggttactccatcctgcccctaaaggagaaggtagagaagcatcaccctgtccttaaggacagagtttttattttttgtttgttcattctgagacagagtcttgctctattgcccaggctggagtgcagtggcacgatcttggctcactacaacctccacctccgggttcaatcgattcccatacctcagcctcccaagtagctgggattacaggcatgtgccaccatgcccagctaatttttgtatttttagtagagacaaggtttcaatatgttggccaggctcatctcaaatgcctgacctcaagtgactcacccgcctcggcctcccaaagtgctgggat

SEQ ID NO: 163539 - DNA, 427 bp, Homo sapiens
tacccctcacgttttcttttcacttgatgaggcttcatgaggaataattttcctccttaaaaaattctgaagcaaggatattattcctgtaaatatctatgttatccatttcattctataataaggtataataatataaataaatctttcaaattagttctgttaaaatattttttcctctgataatttagaaaatgaatctaatttcacaactacctctagggacaacattgagcttttttcatatttgtaatttctttagctctaatcactataatttttaaggtggttcttcacaggccatttctttggtagcccaatgatacaaatatcttagagtagcctccttaacacttctgaaaccatctttagctagcaccaacaatttaaaatgtccctaaggtctatatcaatgttcaagaatagc

SEQ ID NO: 163540 - DNA, 185 bp, Homo sapiens
cagttccgttcttgatcatattaccagggtgaggccaagccctcagtcttcacattttcattagacctagaaaaacaacgggaaacagagagcctgtgcctattgcatctgcaagagttttggttcaacctctgtgggtccatcttttcttgatacagtgggctcatacagagaagcactgatat

SEQ ID NO: 163541 - DNA, 977 bp, Homo sapiens
tgacagctaaatgcaatgtgggatcatagatcagatcctggaacagaaaaagagcactggagaaaattggtgatattaaaataaagtctgtattttagttaatagtattgcatcaatgttaatttcctagttttaatgaatgttaggtaagatgttaacattggaggaactgaggtgaagggtatatgggaaccctttgtactatctttgcaagtcttctgtaagtctaaaattatttcaaaaagaaaaaattaaaaaaagtaaaatggtatgtaaatgatacatgaattgtctgcttcctgtggctgacctgtgccttctggaaagttctattaggttttaatactttatgtagtaaaagttaaacatggtccctatgtagaaaattatctcttcagaaagataaataccagtagaccacaagctccttgacagtggaatccacctttttttttttttttttttttttatatagacagtaggtctcactctgttgctcaggctggttttgaactcctggcttcaagcagttctcccacgtcagcctcccaaagtgtcgggattacaggcatgagccaccgtgcccggcctatagaacatcaatcttttggactcttctcactttatatctccccatgcccaaggtttgcctgttccataacactcactctcttcccccttggctaatcagaaagccattctccctcctcagggtctgatctcggcgtcttccataacatgattcaccgttcatggcggtacacgagcgcttcgctcacctccatcgcagacaatcctaatgggggctcccaattttcccaggctctccagcaacacccttgtcgcgcgtgtcgcgatttttcacaccgtccaacctccctggtaccaccaggttggattcgcccgccaaccggccttcactcctcaatcgcgacaaccggcccgtcacgcggacacacacccaccaacgcctcctg

SEQ ID NO: 163542 - DNA, 580 bp, Homo sapiens
atagtaagtacttggctggttccttctatcagtggtggaggaatgggcatgtctatagctttgggacttcttttatgtggagtaaaaaggaacaacctttacctcacaccaaaggggcctctatgtccaccctcttgggtatcatatcatgttttgtggaaaggacacttggtgtcagaagactttggtgtgagtcctgattcaacacatttttactgcatcctcttggaaagttcaccttatatctctgaatctcactttcctcatctgtaaaatcatgataatactagtaatagttatcccatagggtctttgtcatgacaaaatggggtcacatatagaaagcaccttatacagtgcctggcacaaagtaggattcaactaatattggttactgcctgcctgtgagcatgcatgtgtgaacacaaaagtgaacagttatcagcctgtactccaccacaaagagatgcgtggactgtggattcaggaattccttatgaaaatcacaactctttgcttaaattaaaatatttacttggctgggtgcagtggcccatgcctgtttcccaccactgtggga

SEQ ID NO: 163543 - DNA, 384 bp, Homo sapiens
tttggctaaaactgggtcactggtatacctctttcttcaggcctggtgcagcgcacatgcatcccgtgactggcttggaccattcatgatttattccctaggacgaggagacagtttgccttctctgaggttaggtaatctccaccagagctacataaacataaacctagggatataaagcaggtaataatgaagtatgattgtagggtagaaaaaagtctgaatacggttattccttagcttttgtgattgctccatgtatctatcaatctagctttcactgcacttatctagctatatatgatctctcatatataaatatatatatacactccaccttgtgacagtttaaggtaataggatttttcttttttgttttttttt

SEQ ID NO: 163544 - DNA, 472 bp, Homo sapiens
ctggaattgtaggtttggccaggagtttgccaggattgctcgaaggtcatcttccaatcccaggaggctgggggtaaggggaggttcatcatagttctcaaaatagatctgttgagccccccccccccccagattacatgtcagctacaaccagtaaatgtggaatttgaggcctggggttagcacaagagagccctccagttgccaggagtaaggtagggctgccagaataccagtgacccagtgatcaccctgtccctgggccccttcttaacaagcccagatgcagtgacagcaaaagctccagaatcccaaggcaggaggtgccaaaaacaccccccaacaaccattaccaaaaaaaattttcagtaaaatgttctcacccctagaggggaaaacctgtccatgcctgaagcagcttgaccccagcaaacaccctgcctccatggagtgaactgcaaatctccaaaaa

SEQ ID NO: 163545 - DNA, 495 bp, Homo sapiens
cattgacttcaggatgtgtgtcattctaagttcctgcaacttttcaaacacccctcgggctagcgtgtggctgcacggtgtccatttgtgcaggccaccactcctcttgcatctgggtctagccacctctccttcttgacttaccatagttcattttgtaccatgctttcagaatgagctttctcaaatccaagtctcaccacggttcttcccagctgaaaacccttgtgcggttccctttgcctcacaggataatacatggtgtggcttacggaaccctgcaggtctggccctaggcccctggacacagacctctcaccactcttggaactttagccaggacaaagttttctgtttttagtttcttaccatgttctctgggccgaggagtcccagtgcccacgttcatcccacttgcaggcacccctggacggctgcccccagctccccaactgcctgcattctcccctgccctcctcactctgttggaatagc

SEQ ID NO: 163546 - DNA, 240 bp, Homo sapiens
ttcctgtggaactgagcttcgactggtgggggacataagaggcagccactggtccaaccagccaaggcctaaagctcgcagaagagaaattctcattagcagaattttcagtcgttggagctgagctgcaggatgtttgagtgtggacacctagcacaaaatgtaccaatggggggctggtccgagtctttagtcccctaccatgctccctacctctgtactgtgtgctcctgtcactct

SEQ ID NO: 163547 - DNA, 158 bp, Homo sapiens
accgggcggggcggggggctcctaaaatgtgctgcacagtcagccgtgcctctgttgctcctcagctcatggctcaggaaggccaactaacgcaaggaaaacaaactccaaagcaaggggatgagagcacacagatggtcacgagtcggatattccgg

SEQ ID NO: 163548 - DNA, 639 bp, Homo sapiens
gattgcacaacccaaagaaaatgtatttgagaaaaaagctgactttccgtgatcaataaggttgtggtgttttaacttgtcctgtccccattttcttctcagctccacagtagccttgaaaatcagcaaccttgagaccacagtagctgtgacaaccagtagcctagaaaccactgaaggaatttagagtccccccaagataggtttggagttatccaagacgccccatccccagagatttgtcactccttgacctgtctggcagctccctggaatagtcccaatcacagggcttgtcttcatttaacccaactcaggtcactcaatgaggaaactatcctcaggttgtttgttataaacaattggtggcaataatttaaatagcacagttgcctgacatggctatactagttgggacaaatgagactggccagaaaacttaaaaaaaggggagtgtgatgtctacagaggctttgaaaagtgccaaaatattcttgggagctagaaagtcaggtaaaggtgagagacttatgcttcaaccacttaaggaaatccctgtctaatcatatgctcaagactaaagtaaccaagcagagattttggtgactgcaacatgacaaagaacacagactaaacaga

SEQ ID NO: 163549 - DNA, 590 bp, Homo sapiens
cacacccatctttgtagagttgtaactatagttatttaaattgcatggtggtatgtctagtacctttcctcgactaattctattaagtctgtgttcttagtcatgttgcagtcaccaaaatctctgcttggttactttagttcttgagcatatgattagacagggatttccttaagtggttgaagcataagtctctctccttgacctgtctggcagctccctggaatagtcccaatcacagggcttgtcttcatttaacccaactcaggtcactcaatgaggaaactatcctcaggttgtttgttataaacaattggtggcaataatttaaatagcacagttgcctgacatggctatactagttgggacaaatgagactggccagaaaacttaaaaaaaggggagtgtgatgtctacagaggctttgaaaagtgccaaaatattcttgggagctagaaagtcaggtaaaggtgagagacttatgcttcaaccacttaaggaaatccctgtctaatcatatgctcaagactaaagtaaccaagcagagattttggtgactgcaacatgacaaagaacacagactaaacaga

SEQ ID NO: 163550 - DNA, 112 bp, Homo sapiens
ttcaaagagactaaacacttattttgagaaacatcagggaatatggatgataccttgtggtgagaaatgaacataccagataatagataaaatattattaaattcttctagt

SEQ ID NO: 163551 - DNA, 586 bp, Homo sapiens
atattataatggaaaattccagaaataacacaattgataaattttaagttgatcaccgttctgagtagcatcataaaatctcatactgtcacacttggtacctccttcatcagaagaagggtgcatacagtacaacatgatattttgggagaccacattcatataactattattacagtgtattgtgataattgttctattattagctattgttaatctcttattgtgactaatctataaattaaaatttatcataggcatgtgtatataggaaaaaacagtatagggttcagtattatccgcagtttcagtcacccatgggaggtcttggaacacagcccctgcagataaagggggaccactgtacattttgctacaatctccagtgtttttgagaacacccttagccttggacttttctaggtgtgttgcaaatgaagtcagttcctttgggaagagattaggagttgtctgctttgtttcctgtcctggctggctcccctaccccagccccgcccttctgcctctcactcagggcaatctctgagccaaggttttggagctgggggtggggacaatggctcat

SEQ ID NO: 163552 - DNA, 307 bp, Homo sapiens
gataattaaaagaaaaaaatatttaacacaataggtgcagaaaaagcatccaagaaaatgcaatattgacaaaaatattctcaatacactagacactgatgaaacatacctcaaaataatgtcatctgtgacaaatccttagccatcatgatactaaaacaaaaatggatgcattctccataagaataaaaataagaatatccattctaaacagtcctactgaacatagttatggagtcgtagccagagaaataaaaggaatctgaatagaaaacgaagtcaaattatctttactgatgatataatt

SEQ ID NO: 163553 - DNA, 517 bp, Homo sapiens
cggacagatatgcagagaacccaagtagcttaagaaaacaagtgttcataatatcaccatctgcttcagtcgactttttgagaataacatcgtacagtctgaatcccacagatgttgggttccatatttcctcttcatagtcttgtcttctcagtgttgcctgcaggtccacgggccttactgacctgtggatgtggatggagcatataatccacaacaatccacattttctgtttatgcacctccctgctcctgcaggacctctagcctccataaagtctccctaatctttttatgtccgcgtccccaggaatgtcttctatgtacatgtgaattactgtatcagctagttaccctgaagagtcttctccatctctgtctactgcttgctccccttcttcataaaacctctgtgaggggctcatcattgagattctaactccagttagaatcctcatgtcacatgtctagagagatcgttcagagccctctacgttgccagcccttgaggagaggg

SEQ ID NO: 163554 - DNA, 488 bp, Homo sapiens
tgggagagccccccagaccctcaaaaagaagggagtagcagatgtcagtaggggtaggcagagggactggaataatgcctcgccataacacacagtactttatagtttaccaagcacgtgtacacatgcgttgtctcagtgaatcccactgtggttgagaggtgagctctggaagccaacaacctgggtcacacctcgcgctcctatttcctggccgtgtgacttatgactcatgacctccttcccagtgtctcgtttgcttttcctgtaaactgggactacctcataggtagaataacgcctggcccagagcaaaggccactaagagctagctatgaacaaggattttgtttcatctctgcgtggttgctgaagtaggcactgcaggcaggaggtgagtggatgtgcctaaaggcactaagtgcgcatcctgctacaaaactgtgaagccagggctccttcctgccacttaaaggaggagtggagca

SEQ ID NO: 163555 - DNA, 398 bp, Homo sapiens
aaagaataagaaaaagtttggtgtagaaagtgataaaagagtaaccaatgatatttctccggagtcgtcaccaggagttggaaggcgaagaacaaagactccacatacgttcccacacagtagatacatgagtcagatgtctgtcccagagcaggcagaattagagaaactgaaacagcggataaacttcagtgatttagatcagattaatactaacaagagcaaagatgcatctacaaaccccccaaacagagaaacgattggatcagcacagtgtaaagagttgtttgcttctgctttaagtaatgacctcttgcaaaactgtcaggtgtctgaagaagatgggaggggagaacctgcaatggagagcagccaggtgataacgtttgtttcttttg

SEQ ID NO: 163556 - DNA, 390 bp, Homo sapiens
aggatccacatacattgtctgatgacaatctcatgataaaacttgaattgatgacaaatttcttctactggatgagcaaagaaaatggtttcttttctttttgagacagtctcgctctgtcgcccaagctggagtgaaactctgtctcaaaaaaaaccaaaaaaacaaaaaacaaaaaaccaaagatataaaatgagactttctgaacccagcattacaggagctaattcaaattacacataataatcaaaagttaacttaaattttacataacaaatatagttaccctgagccctttagtaaatatttaaatcctcaacttctatcaaacttgaaaataaccagtggaggccaggcgcagtggctcacgcctgtcatcagacaatgtat

SEQ ID NO: 163557 - DNA, 373 bp, Homo sapiens
cacccaaaacaggtcatagtgtatggtaaatgctcaaaaaatgttagctcgtacttattgccactttacaaatgtctagacatttctctttacttttaggtgataagggtttacaaactttaaatgccatattccatcaatttgaagatgcacatttattagcactgatggtatgttaaatacattgattctaaagatagaaaaatttattgttcaaaaaaccatttatgtcaaagccagatataatattgatgaattatctattgtttgaattatttcatctagttctcatatttcccaagaggttacctcatatttcccaagaggttatcctgagggacaagaatacactgacagtgatggtcagggtacc

SEQ ID NO: 163558 - DNA, 624 bp, Homo sapiens
atctctggagagtctgctggctgcgcatcaaacacggctgtgcttctgggcatgatatatggatggcaagccagccccgggcaggagatagaacagagaggatgctgggattacaggcgtgagccactgtgcctgtcagagggtaaactttgatggttgttctcagttggtcgttgtcaactttcaatggctgggcactagcttcatcttcaaggctctcgtctcctttgaaaaacttcttgaaccactactgcactgtgcattctttagccattcctgggggcaaatgcgttgttgatgttgagagttgtctccgctgctttaccacacattttgaactcgaataagaaaatcgcttgaatttgctttttgtctaacatcatttccatagtctaaaataaaataaacagcaagtaataagtcattagcaaaaaaagtgaaagaatgtgcattaaaatgatgtataacataaccacatttatttaagaatgtattccaatatcaaatggcaaattccaacagtgcaaaaacttacccctgaaaacaggcatagtcactttcaaacttgatttttctttcattttactctaccttttcatttaatgaaacacctttgcattttat

SEQ ID NO: 163559 - DNA, 403 bp, Homo sapiens
cacacgtgtagtcacaaccactcaagaggctgaggttggacgatcccctgagcctgggaagccgaggctgcagtgagccgtgatcacacactactgcactctagcttgggtgacttttgagtgagactctgtctcaaaagatgcaaatagcacaagtcataaagaaaaagaccagacaacataaaaagatcaacatcactagttatcagtgaaattaatataacttattctcatcaggtaggcaaaaatgttaaattctgagcccatcaagtgtaggcctctgtacagagaaataggtaccttacacactgctgatatgactgaaaaaaagtcaaacataaagaaagtaattaatttggcatactttagtaaacttaaaagatactcatattccatgcaattc

SEQ ID NO: 163560 - DNA, 578 bp, Homo sapiens
ctaggttctcctgtgtctctttcttcctttgcagccaggctggtgttaaacctggagtataagtcacctttttataaagttaacctaagacttttcagtgctgaagatggagctatagggttaagtaactggaaaggtaacatatttccaaagccatttcagaaaatcagtcttggcgttaagttagagtgaactattccattctctccctgctatacccattgataccccatcctaacccagacaccttaggcgcctatataaggcgcctaggttacattggctaggaaccttttgccaatgtgtgaagatttgtatataggttccatattctccacctgtaaagtcagaggactaagttttaagcaagcattaaaaatatataggctcaggagcatgatttggattattctcagccccagaacgaacatggaaattagaaagccaggaatgcaaggaatacagatcattcatagaaagaaggaagagaagggggaccctaatatagggcttagttttttaagatgaagtctgtcatgtcacctagcgcctatagggatcctctagaacagccctga

SEQ ID NO: 163561 - DNA, 208 bp, Homo sapiens
ccttgctgcttctctatctgcctctgactgcctgtctctgtctccctctcctcttctgctctccctcctccacaccaggcttgcaccaaccccagagatgaccgcaaggccttcctgccccactgagtagtgtccacagcatgtcctgagtagcctgcagccaggagatcagcccagaccctggaccatccccctgcctcagccacca

SEQ ID NO: 163562 - DNA, 404 bp, Homo sapiens
ggcttccagtctgtgaagggatagggtgggagacatggctatctcttccattagacaaggattctgacaaatgcaatgctagagagtctccacttcattctgtgaaatacagtaggaatgtggtccattctggattttatgagatgttggtgagataagagtatgacctgtcggtatggcaagagattaggcaaaagattacttaggttctaattaaggcatatttccagacatctcaatggttacaacagggatggaggctgacagaatcaactcagggaggaaagagagagagagaaaaagaaagtaaactaagcaagtaagtgaaatacaaacctgggtacaccgagaaatccataaatttgactagcttacttcaaagttccttgactacttctgtgtca

SEQ ID NO: 163563 - DNA, 499 bp, Homo sapiens
aaaattattttccaaaggcagcaatagtgtaatatggatacttcagcactgtctagttgaggagacctatgactgtcttgaggagtgtcaccttggagcagttcataaagttcagaaaaataatggggcaattattcatgtcacttctggctgatccaagagcattgatggaaggcactcaccagacatcaactagaaagctaagatgtctctttatcacagagcaagtgatgggcagtctatagactttgcttcaacttgcacacatttcttagtatggaccataggtgggtttggcagtatcttattgctgaattccttcttcctacctactggctccctccaccccaccaggtttattggctttgtgctagatctcattaccaatccaactcctttttctctcccagccagaaagactgtcatgtggtctcttggagagaggctcatttagttcatcctcatattcttgctaggctgttttaataacaaaaacaca

SEQ ID NO: 163564 - DNA, 249 bp, Homo sapiens
agagaggaagcatgaagggcttgaggggaaggagcaggactgccagcatgagggcccttttgaggttgagagccatgtccttagaccaggacctcagcttagttgcgtgggtttcaccagctgcattcaggtactaagataggcaaggagtgggtatagtgttgtttttagagggggctgggattttaaggtagcagacactattagcttctttattctggtgctgtaatagcttgtttccacatgttg

SEQ ID NO: 163565 - DNA, 341 bp, Homo sapiens
acactacccctcatgccttcttctcataagaacccttgtgatttgtctggacccacagaagtaatccaggataatctcaagaacattaacttaatcacctgtgaagccctttttgctatgtagtcatacctcattttattgtgctttgctttattgctctttgcacatattgcctttttacagattgaagttttgtcacaaccctgcatggagcaagcctatcagcaccatttttccaacagcatgtgctcacctcatggcttggtgtcacattttgataattctcacaatatttcaagttttttattattattatattttttgtggtgatttgtgatcag

SEQ ID NO: 163566 - DNA, 604 bp, Homo sapiens
acaaagtgacagctaacatcacacttaatagggaaaagctgaatgcatttcctctaagaactagaaccagacaagtatgccaacttttcaccattcttactcaacatagtactggaagtcccagccagagcacttaggctagagaaaaaaataaagggcatccagattgcaaaagaggcagtcaaatgtccctgtttgcagacaacatgttcttatatctagaaaaacctaaagactccatcaaaacaatcttagaacttataaacaaattcactaaagttgcaggataaaaaatcaacatataaaaatcagtagcatttccatacaccaataacaaaccagctaaaaaagtaaccaagaatgcaatcccatttacaataagctacaacaacaaactctaagaataaattgaaccaagaaggtgaaagagctctacaatgaaaattacaaaatactgataaaagaaattgaagaggacacaaaaaaaattggaaagacatcccatgttcatggataggaagaatgctgttaaaatgaccactgtcatcccagctacatgggaggctgatgtggaatcatttgagcccaagagtttgaggtttca

SEQ ID NO: 163567 - DNA, 311 bp, Homo sapiens
accaggatttgaatcccggtctgtcgggatctttccactatgccattctgtcttccatggaacttgttctgatcagtatatttcagaaagaaattccaagaaaagttttggactagtatattaatcatatttgactctgggactaatcaggtacgagaacaatcttcatttgtaaatggaataaacatctagtcttctttttaaatagtcttggtcatgatctcaattttttttaagtacatagcaattgatgtttgtttctttagttctagtcatggtagggatttagtagaacatgtatatgatgcagt

SEQ ID NO: 163568 - DNA, 216 bp, Homo sapiens
gtgctaccttttctttggtaggctttcatttggtctcttttcgaatcagaagacccagaaaacttggatccacttctggctctcatccctctgggcagtgtgatttggagtaccgctttgcagtctggcagctttcctattgcactccgaggacaagctgaacgcctcgctcggatctacgaggcctgtgtgggaatcccgcttccactggcttca

SEQ ID NO: 163569 - DNA, 366 bp, Homo sapiens
ctagcacactgccacatctggtttcccggaggaacttcacagggtctttgttctttatctacagtctctggaagtctcagcagcctcctgtgttcgcaactgtcattccagagcagccgtctcgtgttatgcatttgcttactcataagcaaatatttcacaagaacctgcgagggccaggctgggccaggcaggtattgcaggtgcaaggatctatataagacagtgccctttagaagatccctgtctcattgagaagcgttgagtaaatgggtctctctggtcattctctccagaacatgaagccaaagggctgagagggagagactccaagaatgaattagtgtccagcaaggtatcgcttgt

SEQ ID NO: 163570 - DNA, 154 bp, Homo sapiens
caaacctaggtgcttcgattccagtctgaaatgaagcaggaccccctctcggcaggagccataatgtgggactgaacatattctgtgcctggcatggtgggtgcttcacgctgctttggggaacttgaaggcagtgggaaggaagggaaagggt

SEQ ID NO: 163571 - DNA, 216 bp, Homo sapiens
taagttatcttttctggagtctgttcagaagctaaatttgcttttttgttttatatttaataactatcaatggctgttattttgaagtcaattaataaaaggaaagtttgctagtaggagatgtcacagaattcatgaaagccctttgacaatttgctacgcctcttgtatgtactgggattggatatagtgatatgcactatatccaacagggga

SEQ ID NO: 163572 - DNA, 576 bp, Homo sapiens
ctcctggtattctaatttttctttatctaattttggggataatggaggtacaaaggagttgttggtttggtggtgtttttcttccctttagctgtctttaggcagaaatttgttttgtaagggccaagaaaagagggctcttatcaattgactccaggccacccctggtgagcagaagagaccacctgggctgggctgctcaggacctacttgagataagggaagaaaagagaaggtgcatcatagctgaggagccatgaggtcaccccaggccctagttcctccgcaggaatccagagtcacaacaattctaaaggcagagcaagcccagcgagaaagaaataactgaatttccaggaactgcactctcatgattttctgggtacttttcgcctgggagacatcagctaagacatcgaataataaaagaaaaatggcagtgttaacctaacataaaatggaataaaatgacaaacacttcatccgctctaaaaaattcagagctttccttcatcaacaacccatcacaaaaccgtggactctcaatagaaagagttggaatagagtctaacatgg

SEQ ID NO: 163573 - DNA, 158 bp, Homo sapiens
aatctgaggccacaccaaaaggaattagataattcttccttgaaagcctataagaagaaaaaatggtttatgaacaaataactacagaataacaagaaaagtatcaaacagaacctagatggtaccttgttgctttaatcatacattatcttaataaa

SEQ ID NO: 163574 - DNA, 251 bp, Homo sapiens
taattgtgttaaattactattaagagggtcaagtaatagatgttaagtaattttttggattaaatagatcttatcaactagataatagagagattaagagctgctttgcactcaggtttcatgtttttattgcaaagatcaattgtgcttacaagaaaacactgaaggaaattggggattatatatactaattaataacatccagagaatgataaaaatatcagtgtttgtattcttgctgtgacaaaata

SEQ ID NO: 163575 - DNA, 117 bp, Homo sapiens
ccatacacccatccacacatccacacataatacatgcacactctcccactcatttattcagacacccatgcataaacacataatccatgcacactctcccatacatttatccacata

SEQ ID NO: 163576 - DNA, 235 bp, Homo sapiens
aactgataacacagaaatacaaaagatcatcagcgactattataactgtatgctaataaactagaaaacctagaagaagtgaataaattcctagatacatacaacccaccaagattgaatcaggaaaaaatagagaacccgaatagatcaataatgagaaatgagattgaatcagtaataaaaggtctcctaacaaagaaaagtccatgaccagatggttcactgccaaattcta

SEQ ID NO: 163577 - DNA, 430 bp, Homo sapiens
ggagggatgggggtgcggggcacctgggaggttgagctaagctgtggagtagggaatgacctcccagcccctccagctcccgcagtcaggccagtgagtggcaaaacaagcagctgcagcaggttgcctgaggctcccaggcagcgtgaggcacacccagcccagggccggccctccatgcggcctggggcagaagtcccacctctccaagtctgcagaaccaggcaggggttgacccaccgggctgtcccactctgcgctatgtccctcagagcactgagactcaagctggggcacccccaaaccctgcacatctccacttggtcattcctaggcttcaaaagggcccattttcccatcccttcgtcagctcagctgctctcaaggctttctattgtccacactcctctcaaactgtggcgttcttgca

SEQ ID NO: 163578 - DNA, 200 bp, Homo sapiens
aaggtacaaaacagagataaccatcaagtagataaaataattgagtctccaaataagaaagttacatctgtgtaaggttttttccccttcctaaagcaattaataatttgtatctgattttttattgtagtttttataataaaagaagccaaagaaagcaaacagactggacgtggaggctcatgcctgtaatcccagca

SEQ ID NO: 163579 - DNA, 424 bp, Homo sapiens
cgccctgtgtagctgtgcagtctcactttgatcaaggctttgctgtgtatttccaggaagcctcttccgccactgagcctcggtctctacctggaaagttaaaaggttgcgtaggcctgacatcctgcagctcttggggggcctaaaactctggccctcccaccccaccttctggtcagttcaagctctaccccagccaagtccgattccgaagccctgagggccagaccgaatccctccgaaagtgccaaataccccgccccagggcggtgctcagagcctggggcgtggccggagtcccaaggggcggggttccagtgggggggcggggccaagacctagatgcaggcgtgcgcggcccgcccagaagcgtctcgcccagccaatgagcgtccgagggcggggaagccccgcctctgggtat

SEQ ID NO: 163580 - DNA, 396 bp, Homo sapiens
ccagctcgtaccccgcaactgctcggaaggtgtcttgagattatcatccgctgagggtggaagcggcccccgcagacgctcagcaggtgtcttgatattatcatctgctgagggtggagctgagggtggaaggggagtgagctgacgctcggaaggtgtcttgagattatcatccgctgagggtggaagcggcccccgcagacgctcggcaggtgtcttgatattatcatctgctgagggtggagctgagggtggaaggggagtgagctgacgctcggaaggtgtcttgagattatcatccgctgagggtggaagcggcccccgcagacgctccccgcagacgctcggcaggtgtcttgatattatcatctgctgagggtggagctgagggtggaa

SEQ ID NO: 163581 - DNA, 461 bp, Homo sapiens
tctgagctcaatcatttctcaagtgcctttaggttcaaagaccttgtttctctgaggttttcttcaaaaatacaaatcaccctgccacacttacttaaacttgaaatagtttccaacacccctctctaaaacaattttcagagggcagaaaattgagccaatgggagtcagatgggagaaaagcaaaagacatttagtagctttgacactgccttggagaggccgtggcagaagacaaactccggatatcctgggcagtggcaggcatctgcaaagagaggccagatagagaaaaggtatgaaaggcagtggaagaggctgctttgtaatattgctgtggccaggcccccagtgatatttctgagaaatgttctgttctttgaggccaataaggattgtatggtctgcagctgactggagctcttctttccctgggacctgattgcctttctgggcaagga

SEQ ID NO: 163582 - DNA, 352 bp, Homo sapiens
gggtacctgcctgttgtctgcatgctctgggaggtgccctctgcagctgtgatttcccagcactgaggccagcttcacacctccaaggtgcactgaagcatgttttcatcgtggttcttttatccaccctgtttgcagtcacccctcttcaccattcaggtcatccctgaggtctgggccagcattcaggaaatactggcagcaaaaagtcattgttattttaaaagcacatgtcatccaattataaagttataaaaaatatttgagctctccagccttggaatcattgtcatttgtataagagctccctgggtttcatttcagatcttctctattgtttagaagaggtagg

SEQ ID NO: 163583 - DNA, 358 bp, Homo sapiens
gttaaataagttaatactgaaaggtgcctagaaaagtgcccagaatgtagtaagcatgatatatgagctgttgttgctgttattattgctattaaagaccgagtgcatggaacacagatgcaaacctcctccctaacttctcccatatcttcctcatgtaaactgctccagccaagcgatttatctgttgttgttgttccatacacagcttttttgtttgttttgtttttttagagacaggattttgctctgtcactcaggctggagtgcagtggcatgatcacagctcactgcaaccttgaactcctggcctcaagcaatgctcctgcctcagcctcctaagtacctgggactatgg

SEQ ID NO: 163584 - DNA, 424 bp, Homo sapiens
ccactgtgacctatcaaggacatcaccatgacatgacataattagaaagctgtgtgtggcagctgcaggaaaaagatgtaacacagaaaggctgaacaagaccaagcagccagccgctcagggacacccaccctggtgtgctctataacaaaggccaagggaatgatcagtcagggctgtgggctcactaggcacaggctgactcaggacagaatgggtggcagatactctttttaactctagaaaagtcacccaaaatccctgcagatcctgaaatgcttcctccaggccaatgtcattatcccactggtaataaaacacctcccttctgttgacggctttacagttataaagggcttttatctacgtaatctcatttgaagagtcattccgtaacaaaaatttttgagtatatactatatgc

SEQ ID NO: 163585 - DNA, 1254 bp, Homo sapiens
ggcccggcggccgccgccgggaaccacctacgcgcaggtcaccgtctccaccgggcccggggcgccctgggaggaggatgagatccgcagggaccgagtggaaccccagagcgtgtccctgtcgtggcgggagcccatccctgccggagcccctggggccaatgacacggagtacgagatccgatactacgagaagggtcagagtgagcagacttactccatggtgaagacaggggcgcccacagtcaccgtcaccaacctgaagccggctacccgctacgtctttcagatccgggccgcttccccggggccatcctgggaggcccagagttttaaccccagcattgaagtacagaccctgggggaggctgcctcagggtccagggaccagagccccgccattgtcgtcaccgtagtgaccatctcggccctcctcgtcctgggctccgtgatgagtgtgctggccatttggaggaggccctgcagctatggcaaaggaggaggggatgcccatgatgaagaggagctgtatttccacttcaaagtcccaacacgtcgcacattcctggacccccagagctgtggggacctgctgcaggctgtgcatctgttcgccaaggaactggatgcgaaaagcgtcacgctggagaggagccttggaggagggcggtttggggagctgtgctgtggctgcttgcagctccccggtcgccaggagctgctcgtagccgtgcatatgctgagggacagcgcctccgactcacagaggctcggcttcctggccgaggccctcacgctgggccagtttgaccatagccacatcgtgcggctggagggcgttgttacccgaggaagcaccttgatgattgtcaccgagtacatgagccatggggccctggacggcttcctcagggtgagtggccctggggctgccaatgaccactttattctgtaaagcgggcaggggtccctcacttttctctttggtagggcttggaattggcatcatccccactggccgggctgacctgtggtcacagggtgaactaaagcctggcgagagctaggtgaccgccctggtgtcacacaacaccaggggatccaagcgcacagccctggcctcagtcttctccctccacagcggcacgaggggcagctggtggctgggcaactgatggggttgctgcctgggctggcatcagccatgaagtatctgtcagagatgggctacgttcaccggggcctggcagctcg

SEQ ID NO: 163586 - DNA, 182 bp, Homo sapiens
ggtcctgaaatcccctgcatataccgagtgacaactgtaaaaggataataatgctaagtccttttcatatgtatttccttagttgattggttattttatttattgacccagtgatttagtaattgatcaattccttccttcactcaccatccagtgaagcatccagccagcgagaccatgga

SEQ ID NO: 163587 - DNA, 715 bp, Homo sapiens
agggactgaaggccgtttccggctctggtagtgtagggacttcggcacgtgtgtcattccccgggatttctgtagtaaccctgcttctggtgaacttgtctggccggcattcatttaaggcctaaggatgaaggcgagaagaaataaaaaacagatcccaagctttcgcaagttaataaaaactagtaaagtcaaacttgaaaacaagctaaaaaataagcagtttaaacaacaaagcactctcaagaagtaccgaaaagaacagaggaaactaaggcaagctgtgaaagatgctgtgtctaagaaacccattccattggagaacccaaaggaaaagcgaccaggtaaaaggattgagagggaagaagaggaagaagaagaagcccttcctttagatatgatggatgaagatgacttacagttaatgaaggatttaggacaaagagtatcttttctaacaagagatctttcttctaggtaatacttcatttgggttataatcattcatatccatttagtgttaaaaacttggttctgaatttcacttaggtggttcaaggtgttcacctttgagcacaatgtttacaaagaataaagtattatttagcttatttcctaaataaaggaggttcatgtataagataagctgatttcatttaatgtacatctttcttttgagtctgaatagtcaagtagagtgaatgggggaagaatg

SEQ ID NO: 163588 - DNA, 953 bp, Homo sapiens
agggactgaaggccgtttccggctctggtagtgtagggacttcggcacgtgtgtcattccccgggatttctgtagtaaccctgcttctggtgaacttgtctggccggcattcatttaaggcctaaggatgaaggcgagaagaaataaaaaacagatcccaagctttcgcaagttaataaaaactagtaaagtcaaacttgaaaacaagctaaaaaataagcagtttaaacaacaaagcactctcaagaagtaccgaaaagaacagaggaaactaaggcaagctgtgaaagatgctgtgtctaagaaacccattccattggagaacccaaaggaaaagcgaccagatcttcctagagtgggtaaggatagtagtcctataggactgctataaagcatatatgctttatcacagtcagtatgagaaaacatttcaatacagtattcattcaagcttctgcttttagtttgtctggaaggcagatctgaagatgcactacttgggaaaacaaactgaaagtactccgttacataaatattgggcagtgtgccagtgctgccactttgccattcaccagcagttaggtaaaaggattgagagggaagaagaggaagaagaagaagcccttcctttagatatgatggatgaagatgacttacagttaatgaaggatttaggacaaagagtatcttttctaacaagagatctttcttctaggtaatacttcatttgggttataatcattcatatccatttagtgttaaaaacttggttctgaatttcacttaggtggttcaaggtgttcacctttgagcacaatgtttacaaagaataaagtattatttagcttatttcctaaataaaggaggttcatgtataagataagctgatttcatttaatgtacatctttcttttgagtctgaatagtcaagtagagtgaatgggggaagaatg

SEQ ID NO: 163589 - DNA, 498 bp, Homo sapiens
tctttggactgatgcttgaatcagtgggtgcttggcattgctgatagggatcagtgtaaatgagctattgtaaaatttagagttcagtggaactatcccccaggtaatagtatttttagattaaggtcccttcccctttttctgtgcatggttaggtcaatatttctctgtctctcatatcactcctttcctcctcatagccactgacaccatgctcatccaactcaaactaagctattagaatcctctttttatggacttactttcttttagaatggggactttcttcccccattccaatccatcttccactgggcaaccgagtgaattttccctaaatattgttttaactgttcattcattgaaaacctttttgtgcttttctaattaccccagaataaaatttacactcctctgtccacaaactaactcctacacaattcttttaacatttaatcctgaattgtatcctcataaagcaatgcatagagaaaaaaa

SEQ ID NO: 163590 - DNA, 516 bp, Homo sapiens
gagatgagatgttgctatgttacccaggctggtcttgaactcctggctgtaagcaatcctcctgcctcagcctctcaaagtgctgggattacaggttgagccactgggcctggcctttctttttttccttttctagaatatgctgacatcattccttccttgggaccttcacactggcgattctctccatttcaacgatcttcctggaactggctccttaccatcatttgaggtgcagctcaaatgtcacttcttcaaagaggcctcccctgcccagtctcagagggcagtgagagcttgtgtcagaactccaccctgccattagtggggccattttactttggaaaagttagtcttcttgtgcatcagtttcttaatctgcaaatagggttattaacagtagtaacttcttaggcagatttctttttttttctttttgagatggagtctcactgtatcgcccaggctggagtgctgtggtgtgatctcagctcattgcaacctctgccaccaggg

SEQ ID NO: 163591 - DNA, 306 bp, Homo sapiens
agagcaatttcgcctccattcgagtgggatctttctcaacatacagcattttacactgtctcagaggaaaaagcaaagcccaggtattctaataaagattgcatccagtcccagaagaactatctcctcaccccagtttcctcttttaccacctacagaaatgtagaggaaatggacagtactcttagagagaggaaaacaggcctcatatgagatggacaggaaatcaatgagaacctctgcagacatttcagagcaaatagatggtcttaactgagttgccccctttaggtgtgagctagatga

SEQ ID NO: 163592 - DNA, 560 bp, Homo sapiens
tatttcagaacttgatttcaactgtattattggtcaactattacatttccttttttatttcaaatgtcgatcaacagggtgtagccatttataatatttataattatttatatctacaattacaggcatttaatttgtcatttgaacaatgatatgacattgtgctaaatacttcaaggagagacacagaaggggaaatattattggttattacttcttaaatataaaagtttgtctttaaatagctgtgaaaggtgttataggagcatagattccgaattacaagccaaacataaaatcttctaaatgttattttggaactatactttcctcaagatagcgttatttttaaatctgtgaaactgacttgattgaatattgtttgttcattatagtaattcatacatttaatgttaagaaaaatattggacttcagaataatatgaatgaattaatccttataaaaataattgtatgttttgtatttatgtacaagcctgtgaatctcttttcccaaacataaagcaaacttccaaatacacacatttattttgtaccag

SEQ ID NO: 163593 - DNA, 408 bp, Homo sapiens
gtctgagcatgcaggtgcaggcatgcatgggggcatgcagccaggtgactggagaggctgggacagacacacctcaaaaggagttggagggctgggcatagtggctcacgcctgtaatcccagcattttgggagactgagacagaggatcacttgagcccagaagttcgaaaccagcttgggcaacatggtgaaaccctgtctccacaaataatttttttttttaaagttagccaggtgtggtggcccatgcctgtagtcccagctacttggcaggctgagatgggaggatcacctgagcccaggaggtcgaggctgcagtgagatgagattgagccactgcactccagcctgggcaacagagtgagactctgtctcaaaataaaataaaaataaaaataaaaataaa

SEQ ID NO: 163594 - DNA, 226 bp, Homo sapiens
actatagaggatcccagttcgacggacactctccactgtactccgtctcaaaaacaaaacaaaacagtgagttgacagagtacagtggagaggatcgagaagcaaataaagcattttgcccaagggaatggagaagggcggcactggcactcttcttgctgcaaactattcttaggcatatgattataatcaaaccacatgcaaaataaggaaatgtctctcccac

SEQ ID NO: 163595 - DNA, 509 bp, Homo sapiens
tgggcatggtagcacatgcttgtagtcccagctactcgggaggctgaggcaggagaattgctcgaacctcgtaaacagaggttgcagtgagccgaaatcatgccactgcactccagcctgcgtgacacagcaagactccatctcaaaaaaaaagtaaaaataaaaaaataaaattcaaattgaaaaagttcattttcacgattaaattcatatttacagtgctgccaaacttaaataccttaggattgtttctctcttcatgtaaaagatacataaagtgactacacatttcagtatctggtatggtttctctttataaaatacaaaatttaaagttcatgctttatctaataatctaagatccaagtattaatctatacttcattaatggttctttaccacatttgattctgctattcaaactggattcttttaacccaaccttggtcacatttactgataatcagaagtccacattgctataaatactactcacctaagccttgatt

SEQ ID NO: 163596 - DNA, 359 bp, Homo sapiens
tgggcatggtagcacatgcttgtagtcccagctactcgggaggctgaggcaggagaattgctcgaacctcgtaaacagaggttgcagtgagccgaaatcatgccactgcactccagcctgcgtgacacagcaagactccatctcaaaaaaaaagtaaaaataaaaaaataaaattcaaatatgaatttgataatgaaaatgaattgcagttcctcactaaaggaatttaaattttttgcatactagtgatgaggacttgattttccaccctgaagttgtaaaggtctttcagtctctctaaaagtgtgagttaaatctgttttctcacggccagcttttaaaggtcagtgaaggacggc

SEQ ID NO: 163597 - DNA, 285 bp, Homo sapiens
cagccttcagcgttgttccgttctgccccttcagccatgtaaggacacagtgttcttcccctctgaaggttgaggcaatgaaacaccatctcggaagcggaaagtagccctcaccagaaaactgaacctgctggtgccttgatcttggactacctagctccagagctgtgaacacatttctgttcttttatattacccagtctcaagtattttgttatagcagcacatatgaacttaaacagaattcaacaatgtataaaaagaattacatgctatgacaaagtg

SEQ ID NO: 163598 - DNA, 154 bp, Homo sapiens
cctgcatacagtggggaaaagggggatccccagggccaggtatggggaaagtccctggctcatcagactggaaggcaatcttgattctaatccctaatgctgtgtggtgtatggaaagtcactcaacctctctgagcctgtttccacattcctc

SEQ ID NO: 163599 - DNA, 359 bp, Homo sapiens
ctatcccaaagactacccatcataatctacagattgtcatctctcaccccagggaccccacagattccccatccctgattccaggatctacagaacctcatctcttacccccacagacctattaataaaaggatacattcataggagactgtgttgaccattttacacacccattgcctgtgtgtgtgtgtgtgtgtgtgtgtgtgtgtgtgtgtgctgattaatggacttaggtaaactttagcattttggtaggcaatgcaatttttcaatgccttttctttctttttcttgtacatctttaaaggccttactccagtaagtatgcattgcagtttattaatgcctatcccttactg

SEQ ID NO: 163600 - DNA, 431 bp, Homo sapiens
gtcgactcgtaggaggttcccgactcattccacggattgtcccgagttttcttgttcttgacagccgctgttgtcaggaaacagacttgctctgagcctattgttaaactagtgccgtttccctccttccagctctctctgggtgcatgcggtcttgtcgttggtctgccttctatattcttcgtgcttggaaaaccccttgcggtagcggtaaaaatcacagaagcatcggagctcctgtctatagtcatagtgtctaaagagacactatgattgtgtctctctacagattttctttcaggcttgtggatgctgagcctccagtaactcagtagttataattccagttctcctgcctcaacacttgttcctgcagaggttagggctatcagtctttccaatttgggagcaaatcgttttccctgtgacca

SEQ ID NO: 163601 - DNA, 349 bp, Homo sapiens
tggatatacttcgggaagggaggctgctttgaaatagtagggacagctcattacctccagcttccaggtatctttgcacagaagacagcaaagtggataaaggaaaccaaaggaagaaaggttgttatcaccagcaactgaacttagcctcctaaggatatcttcatgaattccagggacacccagtgaacttgggtcaccttaaggtgtcccaagcaactttttactgttgatggaacttctgagctctaagaagtcctggagatcttctaattaattccctcatcctagagatgaagaaacgggagaagtttgccctcctggagtgggaccctacccccattctgtt

SEQ ID NO: 163602 - DNA, 623 bp, Homo sapiens
atatttgaaatgctggagaaatcctggttgccccagaattgtacactggttgatatgaagattgaatttggtgttgatgtaaccacaaagaaattgttcttgctgatgtaattgacaatgattcctggagactctggccatcaggagatcgaagccaacagaaagacaaacagtgttatcgggatctcaaagaagtaactcctgaagggctccaaatggtaaagaaaaactttgagtgggttgcagagaaagtagagttgcttttgaaatcagaaagtcattttcctcgtaattttggactgccacacattggtacctttagttctctgaaggcccacgtttttatcattaagacctatttgttagctagtagagctttatgttcgctgtccatgaaaccttctgtaaccacagtgactacaagtagttctttctctattgaattattaggtccagaatagaagatgtcattgtacactttatttccctcacactgtgttacgctctgatgtgctatgcttagctatctgtcagagattagtaaattataaaactcatgtgtactacttaagtttatatcttatgctagtttataagaacaattaaaaggacttagaagatta

SEQ ID NO: 163603 - DNA, 596 bp, Homo sapiens
aaagcctttctaagtgtaggtttaatcatttcagtgctatctctcatgcctcccatttcacataggcggctctcttacccacattgattgatttccctcaaactgagggtgactcaatacgacaacacgtagcgatgatgactgtgattcagtttgctgggaggctgcctcatgctttctgctaatgtcagtggcaggttcacgggaatatgtatatattctagcttaggagctgttttgagatttgggaatggtacacgtgcccacatctggggcagctggtggtgttggtgtttctaagtagtgtcctcaatattcttccattctccttttaggggaagaattttatggtctacaagaccaaaattactgtatgtgtatatatatatatatatatatacacacacacatacatatatatgtatgtatacatacatatatatatatacatctggtttccctatgttttctcagtcccatggaaagcttttttttttgagtgtttgtgtaatatttctaagcatattcttgccatattttctaactgtaaaatctacatgaaatggagtgtttggggaattaggtgcctggttcat

SEQ ID NO: 163604 - DNA, 497 bp, Homo sapiens
ccatggatgatggggtctgctccatctcttcaccctaatccaaacaaagatgttcttcctaattcttgtttccttggagaactgaggtcttcagcgtgggttccagttgcatgctgtattcccaggctgacaccttctgcccactgcagcctgttccctgaccctctgtaactttgtttaattctcttgacctgatgtcaacataaaagaagactggggaatgaagcgagaagtgacaggcccagcttgacctcttgaaggtcttccattgtgtgaggcttgcaggggagtcttggctttggaagcccaaggacctatctatcttgaatcttaattctgttatctcattgggcacctatacttcagccccaaaggctgttcaatggctgtcatgatatagcacaggagacaaagctggctttatcagacttgctcagtaagtgggtggctgtctttttatcgtgttcctcctggctacacacacacctcccctggtt

SEQ ID NO: 163605 - DNA, 396 bp, Homo sapiens
ttctgcagaaactcctggtacaaataagaacttgcaaagcttcatgttcaatggagttcttgtctggatgagataaggagtgcaatactgcacgctcttctgtacttgtgataaatcaaaactctaatgatgctattaaaatgggttttcttttggccctggtaagctggaaagcattgggaggtggggaggatagatttcacttggaaatacctgaagctaaaaagtggtggctttttcttctttcttctaaatgtactccttgctctaattaagcgatgtgatcactgtcccaacactgacataccccaggatgaaacacactttctattcaagtagcctttttttcccttgccttcttccatgagacttgctgaaattgtcatgttatttctt

SEQ ID NO: 163606 - DNA, 288 bp, Homo sapiens
cagtttgttcaactccttacttcaaatatatcatttgatctaactccatttcttggcctttccttttaaacacatcctttctagaatgagagaacttccctctgggctcattgcagattgctccattaatgagccctattttcagtggttagtcatgctctctctcttcagatctctgatacatggattagcttctcggtaaatatttctgtttgaaagcagttggcctccagtctttgtaaagtcttaaaaagcctggcatctaccatctccacagggtactatgca

SEQ ID NO: 163607 - DNA, 307 bp, Homo sapiens
ggaggggagccaggtgaatgcctgctagcaacaggaatttaagggggagaggtgtgcacatttatctgccatttagctgtagatgtgggaagaaaatatatccattacccaagtggagatcttagtgttaacagcaaccaaccactatttattagtaaatgccaagtctacatagatcctactttataagagatgagtaaaaagtgggggtggatgatatgatgtacaaactatgaaaaaagttactcacaaggtaaaggaaacataatctcttatgaaatacccggggaggggggggtaccgagct

SEQ ID NO: 163608 - DNA, 435 bp, Homo sapiens
tcaaatcaatcaatgaatcaatcagaagtatagacagacacatccactatggctttacttccttgtttggaacaccaaggggcaggcttccgtccttttctatgagagagtgcaaagcatcaagcctagaaaatgataacaacagtgcaggatataaagctgaaggaatatgtcatactttgttttctctcatcttctaaattgtcccctgggagtgggccagccctgaccatgctctccagggagagcccaccaggtcctacgtgttcacacactcaggaaaacaagtggctaagaatccctgtggtctagcctcagcaggattgtccaagcaccccaaagttaacataaaatctaaataattgatgtttggggtgaaataaaagaaactaaaatcccagatgatctaaatatgtgaggcacaaggggaaggag

SEQ ID NO: 163609 - DNA, 311 bp, Homo sapiens
ttttgagatgagggagaaaccttgttgtaggaagacagtgtttgcagcgaatgtccatgtattttccggccataatctctccctgtttagctttaacaggctgcttgagagagaatgccagctcctatcttgtgcaaaccaacagcagaattgattaattagaaataagctgaaccctagattcaataagaactgggcttaggttcagaaccttggagcaagagatacaccctggaagagccaagaaaaatctagggagactttttatactcgaagttgaaaatgttgtcaaaggcgacaggttctctgtc

SEQ ID NO: 163610 - DNA, 503 bp, Homo sapiens
ttactcgctattactagaccttttcatggttagaaatttaacttactgctgtctatttcaacttagaatgtaacagacttgattgcctcttccgatagggcaagctagacatctaaattttataaattgattgtattggaagcagtagatcatgtagagactttaaaaaagctgtatttagttttgtttgggtccattagtgatacactttaaatgtgaatattagaaaaccagagagtcaaaaaagaaagagtcaaagattacaactctatgcaaatattataggatgaaggattttttgtttgttttgtgcagaggggccaagtatgacttaaatttgctatgatcatgagtgtgttaacaagtaatgttggtagaatatcctttgtctttaaagaggctagaaaaattataggagtttaaacttaaagctgttatgatttggggttgtagaatatgatttgggattatagggcaaggaaactttgtttatagcacttgtt

SEQ ID NO: 163611 - DNA, 393 bp, Homo sapiens
actatgctcttaaaatcattcactgaggttcattccaatgacagcatcaacaaaaatactgaatgaagtacattcctaccaagccaccctctccctctaaataaccacttcaagccactatcaggcagcagtagaaataaggtgttggaactacaccagcgcttctgagagcactctcttgtgaaaagcaaagcatggccttgaacccaattccacttcttctccttttgcttaaaaggaatgacacagaaggtggtgactgaaagtattagtgaggtttacatacaggaaagccaagagaaacactctgatggggtacaccattccatcccttcttcaggaacacaaatgagcatgaaagaaatcaaagttataaataatctttactggtta

SEQ ID NO: 163612 - DNA, 452 bp, Homo sapiens
ctacaatgatcatgtgggctataaattacttgctcagcaaatgctgccaaattcctacatatgtatttttggtcagcttcatgcaggatgctgccatttgagattttacaaagctaaaatcagtaagattatgcccaaagcaactcaaaaaataaaacctagtctttgtaccaaatggagatatggtatatgtactaatctcaaggaaatatttgtacatctttaaagcaagtgaaggtcaccagattctaaggaagtatttctagtcttttacttatcaaggcacacacagaaagtgttaatattagcttttcaaatatttaacctatgagctgataatgatgccctcatttagttgaacttgtcagaagaccatgtattacatacggtgctccaaggactgcgaggaagatgtaggctaacaatgaaacctttaccttgttgtacacgcc

SEQ ID NO: 163613 - DNA, 241 bp, Homo sapiens
tctgtacccaggggcggtgcgcttaacgacgtcctgtccactaaatggccactgtgtcctgcacgtccttttctgtgccggtttgtgtccacagtggcaggtgcccgtgtttataaatgtgctttgcttctatcagcaatgcgggagtagcgtggtggctgcttgcgttctcaggagatgaccttacagagcatcaccaagttcaaagttccatggcttggtaaaccaggcttgcatttag

SEQ ID NO: 163614 - DNA, 646 bp, Homo sapiens
tacaaaaattagccaagtgtggtggcacacacctatagacccagctacttgggaggctcagctggagtgcagtggcacaatcacgactcactgcagattcaacctcccgggctcaagcaatcctcttgcctcagcctctggagtagctaggataatgccaccatgccaccatgcctggctaatattttatttttattttatatagagacagggtctcattatgttgctgaggctgatctcaatctcctgggctcaagcgaacctcctgcttcagcctcccaaagtgctgggattacaggtgtgagccactgtgcccagccaactatgtagctttcatgtacttatatgcttcatagtctatcaggcttctgacagttgcatttttctcctttggaacatcagcaagacgttggatttatactaggactagccatgttgggggaggtacctcttaacatattgaggacatggagttttgtttggaagggacttcagtttcctctctacccaccaaatgctatgcttatgcctatggcttgtccttctggttgggcttattgaaagaaaaaaaaaagaaacttaggaggcagaagctttgaggccagggactgttgagtgtggcatagtcggttggtctgtctgaagt

SEQ ID NO: 163615 - DNA, 315 bp, Homo sapiens
ccagaggtttgtgtgggagaagaagcgaggactacacccagtgccatgtgcagttgtagggctgctcatgtgcagtctggtgattcctctttttgcctgcaagtgtggcttgtctgtgtgattgtctgtgtctgatctgctgcttctgcttcttggttccaagcttacctgtatctcacatgccactgtcatgagatcacaggccccactcctgctcatgcagataagggacgttggttggtgggcagtgtgatcccttctcactgcttcttcccaaacatctgtgtggtatttcctgcctgggcaaccctctga

SEQ ID NO: 163616 - DNA, 1120 bp, Homo sapiens
aggatacaggggagttattagggttttgttctgcttgttgttttagacataccctgagttaaacattttttgactattgctgtgaaaaatgggttcttttcttttcagtaagtaaagtgatacctttagcctgacaacctttcagctgccaggacttagaacaaattccactacatcatacagcatgattattatagaaaaggaaatgtatttaatacaaaaccaagggtcaataagagacaagaagacacatatctacgactctcatgatctcacagatacatgtgctggggagatgtgctgaatacacagctgtggtttacgtttaaatggagagatacttctgtctcctcctctccatcccccattgttctccattcctaaaggacaagctcaagagtaatcttgttagtaaagagacatttaaactgcctatgacttaggccattgaatacttgttagatatttataggagttgtttgagaatgctagctgtgtaatccaggaggtcctcttagcagagattagaagctactaattgcctgggaaagttgaccatgggttgagatggtcagtggtgggtgtcttagctctgtccttccatgcagcccaggatgagcactcagggtcattttggaaaatcttgctgcttgcattattatcagtcatcctttaagtaagtatcaggttctgtgtgggaaatcattttgtctcagaatttaaaaaattttcttttataatttaggctcttacattgttattgagaaatcgaaagctacgtagattcttgatttttttttcctctgtgacctatttttttttttctagaagcttttaggatcctctctttgtccctgcttttctaaaatttcataataacatgccttgtggtagacctatttttatacatgtgctgggtactcattgaactctttcagtctggttattcatatcctttaatttgggcaaagtttcatgaattgtttaatgatatcctcctctgttttctccttctagttagatgacctcttagactgttcctctcattttcttatctttcttctcattttctatctttgtgttttgactacttgctaagagaactcctcaattttatcat

SEQ ID NO: 163617 - DNA, 679 bp, Homo sapiens
gggttttcaaacaccttgctccaaaaactgacttaactagccatttttttattagccatcatcactgtcactacagttgccatttaaggagaacctgctatgtgctgcaaactaggttaagaatattacacaaagcatcttatttaatccagccaacaactttaaaaggtgagtatcattattcttatttatcagatgagaaaatgatggccaagtcaaaatttgaactcagattttattgttgaatacaaactctgttctcttttccctatgtcaggctgcctctctaaaaataggcattgtctcctgcagctccgtctctcccaagtattcagattttatttattatatctgttaccactaataacaatatttttaaaaataagccaatatgtgatgatagtgtgaaaagtaaacatggtaattaggcaacatcaaaatgaagttaattattgccttgatgactagggtggtttgtgtacagtcttgagacagggaaaggcgtcacatcagaaagtggtactcccacatccctgccgtatcacaaggctgtgctcagcctatcaggggattgctggaaagggagcaaacctgaattcgctggtgccacacaaagactttttacccagggctgctatttccccaaggctttctctttattttgtgatatccctgtagc

SEQ ID NO: 163618 - DNA, 640 bp, Homo sapiens
agattaggatggccccagtgccaggatgacacacaaatttgtgaagtgtttaatttaaaaaataaaaacaaaaaagagatagtttttatggtagatagtggattttatgaaagagagtggattttttttttcgaaacagggtgtcgctatgtcacccagactggaatcttggctcactgcagctttgacctcctgggctcaagagatccacccgctttggcttctaaaattgctgggattacaggtgtgaaccactgcactcagccttagctgtggattcttaaagacagagacttaaaaaatgtgtgtgtgtgtgtatgtgcatgcagatgtgtgcagggaagggggaagaactgatccttttctacatccaggctgtgggatactccaatgaggacagaataaaaggaaaaagtaagggagggccagtttcttcctcaagttcacatctaatatcatttgcaatgaaaagagcgaaggagtggtggcattgaacctgagctgaagggaaagcgtacattgcagatgatgttggaagtgttgttcaggacccctttatgtgaaaacaagacccctggaaggcagctgaggcttcccaagcagcagtgcccactgtgggtctgcctggggtggtaaatgg

SEQ ID NO: 163619 - DNA, 557 bp, Homo sapiens
ttacaacagctccattacaacagctccagttacaacagctccagttacaacagctccattacaacagctccagttacaacagctccattacaacagctccagttacaacagctacctccttcaaaggataaattgtattgataagggattaatagtttttcttaaatggacatttggtctgggatagcaccattggaagaattctgaaacgcttatctcacaggttttcttaaagcatccaatcggtacccctcattttacagatgtgaatatggaagcccatggagactaagtgtcctgcccagggtcatgcaaaaggtgagggcagagctgagggcaaactgagactccatttccattccaggctttcttccaccctactgtacagccacacgtccttgtcctgtggggtgtatagctttctcccatctaaatgacactttctaaggctgggtgtggtggctcacctgaggccagcatggccaacatggtgaaaccttgtctctactaaaagtacaaagaattagctgggtgtgctggtgggtgcctgtaatccc

SEQ ID NO: 163620 - DNA, 561 bp, Homo sapiens
ttttctgttgcaactcttttaaatggtctgaagttcctattccaggctttcataactcactctctcgggatcctgatctccaccaaatctgctgaatgtgcatgactatattctctggccccactggctcttttgacattttggatggcctttcttttactctctcccattctccccaactagctggatgggttgaggccacaccttcttcccctaacaaaccaccttcacattcaattacacctactccatctgctccctctctctcaccttcccctcaacatcccaacctttgatgttgttttccagtgcctcctccttatcagggattctactccccttctcatactaggtcagaggccacctatgatctcattttggcctcagaaaaagttctgctgctccaggacgtggcaaatggggatctaggaaccatcagagtccatgttcccttcctaatgtctgatctttcccaaataaaaactaagctttggctctttcagtaggggccctcctcatttcatgaaggaatttacaggactattgcttccctctacctca

SEQ ID NO: 163621 - DNA, 191 bp, Homo sapiens
aaactgtaaagaaatgaggtgatttttaacaagtatgttggagtttgtgcactgaaagaatcatcgaacttcaaaaggccaacatgcaaaacattcccaaattcctctttggaaacttcttccagaacttggttgtttttgaccaaatgtgatgtactacttcacttaatcttattccccagccttggtac

SEQ ID NO: 163622 - DNA, 203 bp, Homo sapiens
tgatcaatttgcatgtgtcattcagttacaaataccttcacatgtccagttttctttcttatctgacctaggggttatttaaatgtttgttatttaactcccaatcattcagggatttttctacttttcttctcattaatttttgccttaattccatttggtcacaaaacacattctgcaagcccccatcctgtggcattgag

SEQ ID NO: 163623 - DNA, 387 bp, Homo sapiens
taggctccccacgtgatgtccactgacatcctccaggtatggacagaagtaccagcttccctcctcagccttccctgacaccatgacagtggaggggagggcatagccggggagttagagtgccccattatagcctggtgaggatggaagtctgggctccccactcagcctatgctggaataggtaggggtggagccacattttttctgtggtgtttggctgaagtagatcagttaatatctaaacattttctgtctttctggctgcccctttccttgtctgtcccttagctgcgagcataggctcttgtggtggtggtattattgttttttggggatttctttttggtctgtgcccagtggcatttccaggttgctgctgtcttcc

SEQ ID NO: 163624 - DNA, 119 bp, Homo sapiens
aaggctgcagtttgaaggggttcctttcaaaggccaagtctgcagtaatttgagcataaaaatacatgatatcatggattataatcattcaagtaaagtaggaatccatgagtccattc

SEQ ID NO: 163625 - DNA, 342 bp, Homo sapiens
tatttcttattccagcacagagaccaagataactatgagaggaatttaacttatagttcaacttgcagacaagggaaactgaccctccttcttgtccagagattgaagccacattcataagaggctggagtgcagtggcatgatctcagctgactacaacctccacctcccgggttcaagttatcctcccacctcaccctcccaagtagctgggactgcagggcccagcatgtctctgcaggaaggcagggcatcccacgatatcaccagctcctctaggagtataggagccaaggagctgctgagacctgctgatcacccactcactcccctccagccacc

SEQ ID NO: 163626 - DNA, 331 bp, Homo sapiens
agatggaatcttgccctgtcgcccaggctggagtgcagtggtgtgatcttggctcactgcaacctccgccttccgggttcaagcacatcctgtttttaatccatcatccatcgtgtctaaacctctcttaaacacatttctgtgttcagcatgtacaacccctggtgggggctgggaggtggcagatgggtgagtaaagagttctttacttgttgcctggtaaattgtataaactttttatctggtgtcccctagttcttctacttggggattttgtaaacaggtctgtgtatccttatttattaccacatatgaggttattttggtcgac

SEQ ID NO: 163627 - DNA, 161 bp, Homo sapiens
ccactaagctaacccagctagatctaatcctattttaaatgagttacatccactactgcttaaaactctctttgctccagaggggctgaggcagggtggccagtgccctgagtgtctgggctgggacatacccagggacaaggcccaacagtcaaatcccc

SEQ ID NO: 163628 - DNA, 581 bp, Homo sapiens
cgtaacattcgtcatagcctgattcctagagtatacccgcagttgtgtcagcaactgatcttgccagaccccctccctcagaaccaaatcccactccttataagagaaagactacagaaaaaagcttatgcaatccacacacgaaaaggcatggagaagacaaaaataaaagtggcagtggccttttgaatcataaagaaactactggctttcaatatagttggattttttttaagccaagccatgtattgcttttataagcaaaagaaaaaagttaaattcctcttgcggggagcagggggaaggtactttctgtctctgaaaagtctttttgtaataaagtcacccaagaccagcagtgtataaaaactctatctataatatgaccatagctatacgtttcttaaaatggattaagattgtaggaatgaacaaaaaatattaaaatggctgtccctgagatacagaagagtagaggattatttcccattttttccaaaatgatgtgttacttctataatattattttgtagtaattaactctgtaatctttgtcttcttaaataaatgtacccctgtgt

SEQ ID NO: 163629 - DNA, 301 bp, Homo sapiens
catgtggatgcagtgatccaattaaatggagagctgccaggcacattttgtcctctctggtcagtgagaatggttgggttggctcgctgcttcaatctgtggaatcagccaggagcccagtgaggaagctcagaaccccagtaacagcagagcatctttcagatagctccagagttttcctgcttttctgaggaagctcagcatcactgccacaatacggaaagtggtcttcattttagcctatttatttttaggcagagagtggatggttatttgtgtgggacttttggtggcgatatat

SEQ ID NO: 163630 - DNA, 841 bp, Homo sapiens
cagttcagcctaccacctaaaattcagaaatcctttccagagatctaagttctaagagcagaaattttaaaaagctaatagctttttacttctgctggtggaacaatgtagcagatgtgttttttcctgtaagtccacttaaaagtcggagtatcatacacaaagcaaacataagacttggaaaggtagagaaaaggcaaacaagttagaaaccttggaacacaaacgataaccgttgagtttcccgggttttcttttgccttatgtattccagactagataagagagaaggcagcaactcacaaatgctaatgagtgaagacaacaacaacaacaacaacaataaaagcctgctttttctagccaatgaaccaaaaaaagtagcagcctaacaggacaaaattttcagacaacaatgctctactccagccaaacaccctagaaaaatctgtggacccacctccatctgaaccagtgaaaacccatgctcaggttgtaactaagcaccccaagtgcctaccccatgactctccctgtacctcttatagcaatggggtgacccgcctcctctcgggctagggtggtatcagaggaggcctaatagagttaggacattcataaccattcattggtaaagccaccaccaactacccagagtgtaaatggagaccactagggggggcagtaattaggcatcctggcccttcccagctagggtggtatcagctgaggcctacggagagccttaactcccaccccgactgagcagtaatgaagcaccaacacaaggtcaaccgagtggacccaggacagctaacgcggctgttcaggatacgctgga

SEQ ID NO: 163631 - DNA, 81 bp, Homo sapiens
aggtaggttggtctttttcttcctttgttttataagagctgtgtcttagattgcctgtggttaactctagtgcctgaaata

SEQ ID NO: 163632 - DNA, 521 bp, Homo sapiens
ttcactgatgatatgaacgtatacctagaaaacccctaagactcatccaaaaagctcctagatcgataaatgaattcagtaaatgttttagtctgttttcatgctgctgatagtcatagctgagactgggcaacttacaaaaggaagatttaatggacttacagttccacatggttgggaaggcctcacaatcatggtggaggatgaaaggcacgtctcacatggtggcagacaagagaagagagtttgtgtagggaaactcccatttttaaaaccatcagatctcatgagacttattcactatcaccagaaagagctgcccccatgattcagttacctcccaccaggtccctcccacaacgtgggaattcaagatgagatttgggtgaggacacagccaaaccatatcagtaaagttttaggatacaaaattcaggtacacaaatcagtagcactgctatacacaaacagtgatgaagttgagaatgaaatcaagaactcaacttcttttataacagctg

SEQ ID NO: 163633 - DNA, 237 bp, Homo sapiens
ctgaactcctaatttggagaggatttgcttttccagcagaaattgtacattgatatactatatgcatgcttgttagaggtgattttattgttttatttctgtaaataattaacctgttttccatgctttctgtgatactaattaagaatatttagtgtggaataactcattcagatgaaacttcagcatttccttgctttgtaccgcttgccattgaagatgttgtaacataactat

SEQ ID NO: 163634 - DNA, 289 bp, Homo sapiens
ggtgctggaaaggaaccagagtgtgggaggactttgctcccaaggactgagttgaatgtcaccctgcatatgctttgcaaaagtttccctccgtaagatttccccctcttccatctcctaccctccaaatcgaccctagagtcccagatcctccaacagagagaaagtgagaactatcagggaagagaatgaaatgtgcccttcatatctacagtccagatccactgtccaagctgaatggaaacttaaagaacagcagcatcaacagcatctagaggtggggcatggt

SEQ ID NO: 163635 - DNA, 251 bp, Homo sapiens
acaagaccaaggtgtgggctggggctgcgggcagcctgcaggtgtggggagttctgtgccctgggagctgctctcactttgtagcagtgaattactaataaagtagccaggcatggtggcgcctgcctgcagtccccgctactggggaggccgaggtgggaggattgcttgagcccaggagttccagactgaaatgagctatgatcatgccacttattccagcctgggtgacagagtaagaccctttctct

SEQ ID NO: 163636 - DNA, 405 bp, Homo sapiens
tcacaagtcaattttgtccacacaccctgtttcaacaaacaggctttctcattgaccttcaatgacttcatacatggttgttcaggaatgttctttctctctgccttacaaaccctacccatcttgtaaggcccagttcaaactgccccaagtttgaggtctcccgctcacctgagctcctgcagcacttcctgtccacaccattccagcctggccctgttactttatgcatccgtttcacctgttcagcgagatgaccagtttctggcaggcctaatcactggcttaattctctctaagcacataacgtggtgtcttactgaatataatctatgggtcactttactgactgaggaagactcaacaacacagagcaaaggttgtgtaagaccccactgacacggg

SEQ ID NO: 163637 - DNA, 401 bp, Homo sapiens
gtgttagaagtgcaaatagtctatctgtcactaagctattcacaggaaggggcaggtgataagacttcatcggaaccgaacttaggttgagtaccctaattttccttgcacccatgcctgtccaatcagatgactctgggaaacgccaaacaggctgaatcaatgtctttgtgtggttttgttctaccagattgtattttactcacctataaaaggatctatctttaaaaataaactgtattaaatctgtaacatcaaaggcagaaggtggtgtgtgtgcgtgtgtgtttgtgtgtgtgtgtgtgtatcaatgacaaatacttaccaccccaaatgtcgactataacttctatgtggtagagtgctgtctggactgaggtaatttatgtagcttcctacaa

SEQ ID NO: 163638 - DNA, 393 bp, Homo sapiens
agtgtggcaaagttgggcctgtaggagtgagcacttgatgctttatcccagggcattagagcctatgagctctctctggcctctgttgaggattaacattggaaacagtaggaggaagtctccattgaagtgtcaagggcttccatgcagctggagaagctgagcagtgcagaggctgggaatggcagtgtctatgcatgaggcatttcaaaggtagatttttgttttcccagggaagtttttacttgggtggtcagggggactgttagtccatggagagtttcctggcttgaactgaatgtggatccaattcttctaaagaggcactgtgccttccaacatgttttatttcagtcagtgcaggcacaactgtagtgccacattttgctgacc

SEQ ID NO: 163639 - DNA, 648 bp, Homo sapiens
ttgagattacatccagaaaccagtgactatatttagcatttaagatcaaatggttagtgattgatgtttagctatgttattgtgctgataatttgtaaaataatctgcttctggggataggtagcaggctgaatttgtgattgactatggagattttagaatcaagagatctcttgaatcagagacatagagggaattggtgacttgctcaggttctcagataggatttgattctggatctcagtcagatcccttcccgtgttactatactgcttcttatgaattctatattaggccaagtgggcgaagacaaatattctcttttgttagaaatgggtatgaggataatccgtgtaccatagatatgattgtttgcttagagagccaatcagttgtataacctattataagtatatagtatgaaccactttttaagtagcttacatgtttattaaagtgatgattttcagatgtgaagcagtattataaaaatttgatatttcgaattcagaacatcctataacttccataatatattccaaaatatagtgtaaatctccccagagattaacacagtgaaactgtcagctagtatgtttcctgtgattctcaaattagggacaaggaacaaccttaaactatagtgag

SEQ ID NO: 163640 - DNA, 337 bp, Homo sapiens
gcaattgagaaaaaatgaacacacttcttgcagaaagcagaggctcagctcctggctaagtgttgagtctaaaccattcctctcctctgtcctcgaaaagagcagagtccccaactttctagaaaccctaacgcagtgtcccctcttgccccattccctcagacccttggtgcagtattgggaagagattcagaagggcaggactttgccctaagtcacaagtcaatgacagagctggggccagaactgaggttagggctcagttctccttggtgtgtgaaagagggcctcgcacaaccctaaaaccctcccccttccgagtacacgcagccccccg

SEQ ID NO: 163641 - DNA, 1022 bp, Homo sapiens
aagtagtgccacggactcctgtgtgataacattagccagaaccaaacagttagtaaggaatctgctacaacaaatttatacagagcaaaatataaagtattttaaaattggcatccttttgagatagtctgttcctctcctgcccttcgttagttgggtactcaagagttggcagtgttttcccatctagaagctcatgctgcatattgacctgcaaaggtattagtccaggtaccaatggcaacttttatgttatccatcaatcactttaatgagtacaagaaagcatcctatcaccctgccaaaagacagaggaattaagaatgactcatttatcacttaaatgtgtgagtgttttctatgtgtcaggtgccatcctggtgctgtggggcacagaacacagactccagtttccagggggttaccgttaaatggggctgaagcagcaacagtgtgtcggtctcctgtattcaatctcctcataataactgagccactagatcaggagcagctgcacgcctgtggtcccagcactttgggaggccgagacaggtggatcacctgaggtcaggagttcgagaccagcttggccaacatggtgaaacccagtctctcctaaaaatacaaaaattagctgagcgtggtggtatgtgcctgtaatcccagctgctcagaaggctgaggcaggagaatcgcttgaacttgggaggcggaggttgcagtgagctgagatcgcgccactacactccagcctgggcaacaagagcgaaactcggaatcaaaaataaaaataaaaaataagatggtaaaatttgtatgtgtattttactacaattttttaaaattagaaaacaaaaacgtaaatcctctagataccaaaacccaagccccatggaaaacatttaccacaaaaaggtgacaagctatccccacaaatgccaaaatataagtgggttggaacaagccacctatgccaccaagcctgcaggctgtcagcagctaggtggaaagacacagagggc

SEQ ID NO: 163642 - DNA, 374 bp, Homo sapiens
acaaggacacatactgacacaccagcactgatgcacaggcacacaaggatacaacatgtgccctggccctgcattaataggcaagtacagagacaccagccctgacatgcacaaatgcacactgatgcacactcacagataaacacagtctagcatacagacaggtgggcacgtatgcagacagacagtgctggaaaacagacccatgagcccacagggaccagacacccaaccacagacatacatggagaagaggtagaccaaggacacggccctctttgtccccacctcagctccaagttaccctcaggcagcccttggctgtttatcagcaggatgggctgctgccagtccttgaatgcccaggcccatga

SEQ ID NO: 163643 - DNA, 349 bp, Homo sapiens
tgataattctggcattgatagtagtgggtatggtggtaataattgtgtgtaacactcaaactttctgaaaacctacacttgatctgtaaatccaaaagtatatgtagcaaaagccataatctgctcttatttctgcaccacttgcaccagtgtggagtgataaggcaaattattcaggcacctgtgtaagccttcagtgtcctcacccccttgttataactctccactaatattacattggtaaagacgtccctgacctatatgtcactgagacctcaaagaaaagagcaaagctaaagcgtaagggggaaaaaagccagcttaaaaagacttaaaggtttctgggacc

SEQ ID NO: 163644 - DNA, 452 bp, Homo sapiens
ttacttccaagagacaacagggaattcagtgatgcatagaaattcatcaaattttgctttatgtgtatttaacctcagatatgtttatggttttatttaaatatgtgtttatgtatatatatacacatgcacagattgtatttaaaaataggagttaaattttaaattccccttagattctaaatttctcaaactcagcaagagtccacagtgcaacacacttactggggaactaatatcacttgacaaaaagagaactttcaaaattcaataaatacttgtttcatgcagcagacacattgtattagctagatcttacataacttcttactcctaaagtcagaataactttttgtgtttccctaaatatctgaagaagcaaataaaagggtaatgttaataaaaatgtaattataaatgcaataaagatgtaattatttgcctaacttgaa

SEQ ID NO: 163645 - DNA, 526 bp, Homo sapiens
accattgatttccaagagatacacgacaattcatctctgtattaatctaaaaattaaagttttctgttaaaaagatatcttacagatttcctttcactttaatacacattattttttaatgcatttacagaaaatgtggaaatgtacatcggtttccacagaacgactgctaaccccctctaagctctaaaagccttttaaaaaggacaattattaatggcacccaaattcaggagattgttgacttactggtatacaaatacatgtctgtgttcagaggaagcctgtattttttaggacaattccctttaccacacacacagatgggagcaaagtgggaggtaatatgcaatgaaacagccactgaacgaccaagcatacccgcttcacataaatacagccccactgtatttaactcccgggagagtctagcatcgcagctaacaatggatgaaaccacggaccagaattccaagttagaatgcaatatacagagggtgtaaatatactacagtgttctaccaca

SEQ ID NO: 163646 - DNA, 414 bp, Homo sapiens
tgctttttagttttaaaagtttctgttgtcatatcctcaaactcggagatccttttttcattttttttttaccttttattttggaattgggggtacttgagcaggtttgttacaaagatatattgtatgatgctgaggactagagtatgaatgtactccaggtagtgagcatagtatgcaataggtagtttttcagcccttgcctccctccctgtctcccctctctggtagttcccagtatctatttttcctgtctttatgtccatgtacacccaatgtttaagagcagagattctttcctcagtcatgttcaggtttctaatgaacccatcaaagacattttttacttctgttacattgtatttcatctccagcattttgtttctttccttctcggaatttttatctttttac

SEQ ID NO: 163647 - DNA, 396 bp, Homo sapiens
gggggcgtgggacagcgtgtctctgtggtttcaggtgcctggtctgtgcactttgccatagcagccctggccaactcgtgcaggtgcccagggccggagcaggctggagagctctggacggggagcaggcagtggctaggggcacatgggatggggactctggtcctaacagtcacgccagtaccctttgacctcagaaattgtggctctttccagcctgttatctcatgttatgacagagacctcaacccttcctctggatggggtcatgagatgtttgcacgtccagcgcaaggtcaagccctgggatatggaacagctctgctgatcgtagtggagcccaggaaatgaggtatctctggtgtgtttgtgcacacatatacatgtatgtgtgca

SEQ ID NO: 163648 - DNA, 157 bp, Homo sapiens
acaactgttaatataataaaaattactgaattgtatactttaaatgggtatggtatgtaaagtctctatcaataaagctgtttagaaaaagaaagaaatccagtaatgtaagagacactcataaaaagaaatatacttgaaattatcatctgtaatt

SEQ ID NO: 163649 - DNA, 550 bp, Homo sapiens
caacgctctatacataacaagttcagaaaccacagtgataaactaacctaagaaaatcgtttaacttttatctacctgaaacacaaaattacaaggcaacctataacactggaaaacaatatttgcatcaaatataacaaaagattatcaatatccttaagatgtaaatggcttttgcaaaagcaatcaatagaaaaatgactaggaattagaaaatcatacacacacacacacacacacacatacattcaaatgtctgggtagtcatctaaacactaacaatgactaataattcacagagctccaactgctacaatatttgtaacgtgataaagaaattataactttaatatgcaaagatgacttcatgatttaaaaaatgacaagtcgtatatagtagtgggcaaaagtcataaaactcgcaaaagaaggaagacagtgagagaattgtgttaaaatgggccaaggattgattttaatcggatatggtaagacatgcagacctggataattgtcaggaaagaactttatactcagatcctagaaacag

SEQ ID NO: 163650 - DNA, 238 bp, Homo sapiens
agcttgggatgtatagtttgctagggagagagaaaacagacttttttttccttttcaaatcaggaaaaatgtagtaagaatgtatatactaagtatttcttagcaactcaaactaacaaaagtcaactcagctgggcacagtggctcacacctataatcccagcactttgggaggccgaggtgggcagatcacctgaggtcaggagttcaagaccagcctggccaacatggcaaaacc

SEQ ID NO: 163651 - DNA, 520 bp, Homo sapiens
  misc_feature (451)..(451): n is a, c, g, or t
  misc_feature (454)..(454): n is a, c, g, or t
acatgaaaacaaaaattatctttgtatctctcacacatttattcaaagtttgtcttaccaggatcataatatttagcttgaagccttttaaaaaatgtcaagaagtatgaattttaaaaaatttgtccctggtaatactgcaagggtatagggctattagaagaaaactggatttccactctacttctgaaaggcagttctgattacaaaagttaggtgattatctggccaggaaacaggagctttgatcctctggaactgtactaaacaatttagagcgaatgaatcaggccccagggtgccaagaggaattcagtaatttctctgtgattgttttctttcaggcctaatctcataaatgttttagtctctgttatcatatttttacatgtgtttgcttcataaaagtaagtgcttttatgctaataaaaaggggttcttccgagaggtnggnagcgtgcagtgagccaagatcacgccactgcactccagcctgggtgacagagcaagactccatctc

SEQ ID NO: 163652 - DNA, 1001 bp, Homo sapiens
cggcattgttctggattctcactgtaatttaaagggaaattttcacagtgtccggagcccttgatgtcctgcaaatgaagaaagaggatgtccttaagttccttgcagcaggaacccagttaggtggcagcaatcttgacttccaggtggaacagtatgtctataaaaggaaaagtgatggcatctacatcataaatctgacgaggacctggaagaagcttctgctggcagctcgtgccattgttgccattgaaaacgctgctgctgtcagtgttatatcctccaggaatactggccagagggtcgtgctgaagtttgctgctgccaccggagccactccaatcgctggccccttcactcctggaaccttcactaaccagatccaggcagccttctgggagccacggcttcttgtggttactgaccccagggctgaccagcagcctctcagaacggaggcatcttatgttaacctacccaccattgcgctgtgaacacagattctcctctgcgctatgtggacattgccatcccatgcaacaacaagggagctcactcagtgggtttgatgtggtggatgctggctcgggaagttctgcgcatgcgtggcaccatttcccgtgaacacccatgggaggtcatgcctgatctgtacttctacagagatcctgaagagattgaaaagaagagcaggctgctgctgagaaggctgtgaccaaggaggaatttcagggtgaatggactgctccagctcctgagttcactgctactcagcctgaggttgcagactggtctgacggtgtgcaggtgccctctgtgcctattcagcagttccctactgaagactggagcactcagcctgccacggaagactggtctgcagctcccactgctcaggccactgaaggggtaggagcaaccactgaatggtcctaagctgttctcgcacaggctcttacgcaacatggaaataaggttgatggaaaataatcagtttctaa

SEQ ID NO: 163653 - DNA, 1000 bp, Homo sapiens
gttctgcatcacacactctcatctgactctatatgacggacatgtggggattggtattccaattagaatcgtaaacatcttttcaaaacacttccttagtgacactatatatatgtgtgtgtgtaatatacatagacacacacaatacaacacatatcacccctccctctcgaaaaagcaacaaccaccaatcctgccatagggggagctacacatttcttactagagtgggtgcatacgattgttaagcatatgattggcattgtgtgtcatgtaaggaacacatagaaacctttatgcggttcattgtttttccagccttttaacagtggtgattcaggtttcattccatttataagccaggtgagtctgcagtcttttttctgccgtttacaaaccaagtctgctttactggtgtctgttctattgttagtccccaacgaggcactctcctggtattcctgtgcttgccctgtgactgtcttgagcctgcagaatgcagcagagatggtgatgtgccagttccaggctttaagccctaagaagttggcagcttctgcttttgtgttcttgggagcctcaagtgatgtgcagtagatgttaggaggagacacagagaaagggagaatgccccgccttcccagctgtgtagcaccaccagcccaccagataaaggccccccaaagagtaaactaaaagtgagcccagcgttgactgtagaaccatgagcacatgaaatgggtggtgtcagtcactcagctgtgggtaaatgaaacagtaattttctgcttcagcctcccgagtggctgggattataggcatgcgccaccagccttggcttattttgtgtttttagtagcgacagggttttgccgtgttggccaagctggtctcaagctcctgatttcaagtgatccacccgcctccccctcccaaagtgctgggattataggcatgagccgctgcacccagccaataatcgcctttcttatctcactcc

SEQ ID NO: 163654 - DNA, 428 bp, Homo sapiens
actagctcataaatgtcataattttaaaaaatagtttcaatcaatagccaattaaaatttactcattatgattggctgataagtcttttaggcatcctttgatctgtaagatcccccagacccccactccatcctgcaatttatttgttgacaaaaatcagatttttatttgttgagtctcctaaaaccttcatttttctacatccctgtggtattccttaataatatgtctttatgtcctcatattttccataacttaatatatggatctagaggcttgatcagacacaggttcaaatctttttgacaagactatttcacaggtaatgttcctctatctggaggcatgtaataaatggttgcctctctttttgagtgctagctaccattatgatctatgtatagatccattagttcattaagcactg

SEQ ID NO: 163655 - DNA, 243 bp, Homo sapiens
ctgatcttttttttttaaaaagtaaataaaacagtttcttctgtgaccagatagttcatagaaaagtgtgttgatgatactttgtagtggcttaagctgaggtgtttgtatctaaatcttatagaagacattaaaactttaaaaatactgtacagatcagcttattctattcttcattataatcaataagaaaaattgagatccagtaaggaataaattatttgattctacagctagttatag

SEQ ID NO: 163656 - DNA, 291 bp, Homo sapiens
gtctcaaacacgcacacgcgcgcgcgcacacacacacacacacacaaacacaaagatgaaaaacctaactgaaatcttgttcccctcaaaatttcaagtggcttcattgtgccttatgttttacatgtaacccttacagaggttacatgatgtgtgataacacaataggccagatgcagcagatctgagaatctactcatcttctagcttaagacattaaagacccctgtgccaggtgcggtgactcatgcttgcaatcctagcactttggggaggctgaggcgggaggat

SEQ ID NO: 163657 - DNA, 458 bp, Homo sapiens
tggtgcgatctcagctcaccgcaatctccgcctcccagattcaagcgattctcctgcctcagcctcctcaggagctgggattacaggcgcccaccgccatgcccggctaatttttgtatttttagtagagacggggtttcactatattggccaggctggtctcgaactgctgacctcaagtaatccgcctgcctcagcctcccaaagtgctgggattacagacgtgatccaccaggatcacaccaggccgcgcctggcctgctttcattttaaaagtcaaatttgtcatccgcctcagtgcttgtaatcttttctgagtgagatactgaaatttgcagtttcgttttgcttgcacttgttcactggaccagtagtcactgttaaatgtaaaagtatctacttcctctgaaagttttttattcctttatttcctgcctgggcttgtcctccaccctaca

SEQ ID NO: 163658 - DNA, 484 bp, Homo sapiens
gtttttgcacatactactaacacttggtctgtcattttcgttttctccattctggtggttatgtggtattgtcacattatggggctggttagcaattccctgatgactagtgaagcacctttcttatattattggccatttggatatctttgaaggatctattcaagtattttttgcatattttcattgaatagcctatcctttaaatcaggggtccccaacccctgggctggggaccagtaccagtccttggcctgtaaggaaccaggctgcacatcaggacgtgagtggcaggccagggagcattactgtctgagctccgcctcctgtcagatcagcggcagcattagattctcataggagcacgaactcttttgtgaactgcgcatatgagggatctaagttgtgcacttcttatgagactctaaccaatgcctgatgatctgaggtggaacagtttcatcccatggaaaaattgtcttcc

SEQ ID NO: 163659 - DNA, 508 bp, Homo sapiens
gaaaccagatgccaggactgtgggggactcttgagcagcatcagccaaactgtaggagctgagaagaggaagctttgctcagggtaagcgccctgggataatgtctttaatgtcaagaggatgcacgctgtgaacgtggaaagccctccaggctgaaagagggaataacacaggcggggagtgttgccaagcatttgcgagcactctgttcggtggacagacagccggcttgctcatgattccgccttctctgttattggcaacaagccgtcactggaactttgtatccttaagctttgaggccttgactcaggtgggggtcccggaataagctcatgaagtttttgcctcgttacccccaggctccaaatcactggtacaaatttctcagtctgatttaatgcttagggaaatgtcgtatttttggatccttcattttaaaaaaacatatatatttaccagtgctatctccgccaattccgaataaaccttagacttcagatcatga

SEQ ID NO: 163660 - DNA, 281 bp, Homo sapiens
atgtgactcaggaggaaagtactttagaagaatataagaaacttagctttgatttttaaaatggcatgaagtaaacatggtaagggggaaaaagcctgccagttctgtaatttttcagattccttatagttttctttcctgttttcttccatggaagttggaatgtaggatgtttgctaatgagtggggagttagaaaaagggattctgaggaagtaggttggcattagatttgaagtgtcctatcttgaggaatctggactttattccttacgcatttgg

SEQ ID NO: 163661 - DNA, 181 bp, Homo sapiens
ccataagcaggattttctgaccttgatcatccaataccttgttggattttttgaggtcctttatctacatcacaacttgctatttatattcttttttcgagagagctttatggtctcattttcaatgctgactgttaacaaggggctttgtacataatatgttaaagggttagggagtttt

SEQ ID NO: 163662 - DNA, 133 bp, Homo sapiens
ttccctccatcatccttctgttccaatgtaatagggctgctgcagttttgctgtagaaaggcttaaacttttgaagatgtcagctgcctctgccttttgcagaaaattctgttaaaggtgaaacaagtaaaaa

SEQ ID NO: 163663 - DNA, 279 bp, Homo sapiens
gttaaatgtcactccactgctcaaagcccacttatagcttcccgcttcccacacaaaggccctatgtgatatgcccctccttcccttaggtgttcctctgaccccatatccccacacacttctcctgctcactctgctcagccatggtaggggagctgctactgcagtatttgctgctcctctaatacaccagcacgctcctgcctcagggaccactgcctagaatgctcttccccagatacctgtagggcttttttctaacctccttcatggctgtgc

SEQ ID NO: 163664 - DNA, 516 bp, Homo sapiens
tcagcagagaccgtgccagggcaggattctttgtgtctcagaatttcacttctgatagcttaaagcagaggttggaaaactctttctgtaagagtcagaaagcaaatattttagtttttgtgggccagtctctgtcataactacttaactctgccatgtagtgtaaaagcagtcatagccaatacatatacatgtgagcatgattattccaagaaaactttttacaaacacaggcagaaagctggatttggcccagcgcagggatagtctgccaatctctggctgagggtttgaaatggaaccatcttctatgactgcaggtagattttcccttgtcggttggcttttgtctctatggctgctagggggatccagggcagggcagacgagtgtcttacacttggcttactctctcctttttctttgagcaatcataagaagggcctctggaggttgcggtgagccgagatcgcaccattgcacttcagcctgggcaacaagagcgaacctcagtct

SEQ ID NO: 163665 - DNA, 380 bp, Homo sapiens
cccaaattattgggaggcagatcctaaaagtagagatagtttcttctttcttctagtccagggagcattgcagttttccacctcacactagaaacttctgagtccaatcaactctagttatgacctggggtctggtctttactctatcctgatgccgttcctttgagattttcagcaagcttaaatataactttccaaacctatttgggagaacaaaaaaataataatccgaactcttagagctcctttttaaacgtgttgttcttcaatacttcttatcgctaagtccagttataagcctttttcactgaagcctcatgacaaccttataagacagggcttattatcatacccactttacagatagggaaactgaggca

SEQ ID NO: 163666 - DNA, 369 bp, Homo sapiens
ttggttttgaatatgctacttttgatttgtctattagacactgaagtagagaagtcacataggcagcttactatatttgatctggaattcagtgaggaggtttagcttagagatataaagtgggaaattgttagcatatggattgcatataaactatgaagttggatgggctcaataagggagtaaatgtagataggtgaagaagattgaggactaagtcttgggacacactggcattaagaagccagataagtaaccagaagctagtgaaggagtgtgagcggcgtcagtgaggtgtcagaggaggcaaaccagaatgctgtggcctttaagccaagtgaagaaagcttcaagggaagagagatcagc

SEQ ID NO: 163667 - DNA, 475 bp, Homo sapiens
  misc_feature (360)..(360): n is a, c, g, or t
gtccaaaaagttcctcaaatgtagtttggtactttacaaatagagtctttataaagactcagacaaaaatttcagattacaatactcaatcaattattgataaattagtagaatattttccatttaaatcaacatatatgatgtgaatatatttccaggactaaatttcatgtacccaaagcttataaagagacttcattgtaaaattaggaaactggagaaaaaacatataatctgttgtattctgtagcaggagactatggtactgacagtgcgattaacaattaaaaagaaaaaaaaagagaggatcctgagagtatgtaaaaattaaaagttgttttgtgtgtgtgtgtgtgtgtngtctctttcatttagttctgctctgattttcatgatttctttgcttctgatttggggtttggtttgttcttttctagctccttaaggtaatccgggaggggggtaccgagcgcaa

SEQ ID NO: 163668 - DNA, 269 bp, Homo sapiens
ctataattggatacacatgtgagaaaatcctctctgaaagtaatagggatgatggatttgtgaaagtgaacctgcaggaaagatgaccagttaggtgcccatgcaattgtccaggtgggaaacatgatggcctgaatgagataggagcataaaagtgcaaacaggtggagagactgacataagtggagcagaattggctggacttgatcactgatgagagatcagggcaagtgaaggagtgcaatccaattaggctcttgcatgtctaa

SEQ ID NO: 163669 - DNA, 828 bp, Homo sapiens
agcgggggcaccgcggggcagcggcgccgcagcctgggctggcggaacctcgcgctccgactcgccccccgcctgtagctcggtcggcgttgcgggcaggcgccgctccgctggggattgctatgctatgccttgtatgactaagacctcttaccaagaatacgtgtcagaccataaaaccactgccaaggagtgcgggggtggcaatgaaacagcccaacaggaaaaggaagcttaatatggattccaaagagcgtttggatcaggacggacgcttggagcaagctgaagaggaaaagaagcccaaggatagcacaacccctttgagtcacgtcccttcagcggctgcacagggagcatggtcttgggagtggtacttgaaagaacagaaggctgtcgcagcacctgttgagctgttttccaaggatcagtcctttccagagcatgaaaatggttttcagattggaatgagattagaaggcattgatccccgacatccatcggtattctgtgtgctttctgtagcggaggtttgtggttaccgtctaagacttcattttgatggttatttaagttgctatgatttttggaccaatgctggttcccctgacattcatccagtaggatggtgtgaaaagaccaaacatgaactgcacatccctaagggttatagaaaagataaatttgtttggatggattacttgaaggcctgcaaattgcaaaatgctccaaagaaattattcagaaacagaagtcctaatgggccaatgtctaaagaatttcaggttggaatgaagctggaggccgtggacaggaagaacccttcct

SEQ ID NO: 163670 - DNA, 318 bp, Homo sapiens
tgctgcaaagaacatgggagtgaaaatatctctttgagattctaatttcaattcttttggataaataaccagaagtgggatgctggattatatactagtcctatatttgattttaatttttgaatgcttggagaaactttcatactgcttttcatagtggcagcagcattttacatttacactagcagtacataaagattctaatttctctacatccttgccaactctttcttttctttttctttctttctttctctttctttctttcttttcttttttctttctctttctctttctctctctctcctccctccctcc

SEQ ID NO: 163671 - DNA, 266 bp, Homo sapiens
ggtcacccacctggaacgaagctaacccccccgcccccggctgcccagcccagagacttgtggggagtatgactcacttcgcggggggccattgtggctaatgtttaactctgcccctccttcagcaaggcactttagccccagcagcccttagcgctgggccctgccctgatcatgcctgctgctgagtgggctcagacacacagctgagcttggcctccttgcgccgtggggaccgggcaccctgtggggaaaggtgggagcaa

SEQ ID NO: 163672 - DNA, 339 bp, Homo sapiens
atgtatgtttgtgaaaggttacttttttaaaatcatcagttttctagatttcagagtcctttgtttggtagtctcaccagcagccattgacattactgtggttaactacacacttagaaggttaagctggttccctaataactgcaagaaataaaacagcagtggcaataagaaatggtgaattaatgttctggaaaacataggtcttactaccccaaatgtcccaggataaagcttagcaaacataccttcttcatcacttgtgtgtgttggccttcaggatcacgacccgccattggtaagattctaattttctgtgtctttgaacttctattagca

SEQ ID NO: 163673 - DNA, 551 bp, Homo sapiens
gcgcccctcattgtagtcttccaggatattgtagggcttcagcagcctctcacctttatgagtgttctttttaactctctgtactgtatgtctgatccctgtccaaagaggcttatgagtgcccatttcacgttaccccaggaagagattggtccacctgactcaggagttcatccattcattgcccaaaaactaatttattcagtcccgactgtgtatgtaataagacccatgctaatcactataggagatcctaagaagcatattgccctcaacaaatgtctcctctggttgaggagataagatgtggcttgaaaattcatgatttcaatggatgcttcatgcaagatgaaaatctgaacccttcaaggcaatgtgtgatcaaagaccaagtgaccttatggcaccaagggctgttgtgttcccagaggacagagaaccatggctaagggccacagggtttgagaaagctgcttggaggaggtggaacctgagaggaaggtttcgtcaggagtgcggttgagctcagagagtggactgaagtccaagtc

SEQ ID NO: 163674 - DNA, 178 bp, Homo sapiens
caaacgaaatcaaacgcctaaaagaaatgaccttggttcccctctccctccacaaccccttcccagcatggcaaccagcagacaggctcgatctcaccacccgccacttcaggggctcattcctccacagttcacggaggccttttggggccctgcacgctgctgagtgcacatgcat

SEQ ID NO: 163675 - DNA, 243 bp, Homo sapiens
gatttattataaaaagctttaagtattcattgaaagagaaaatatgtatgaaccactatataccagctttaattaccattaaattttgccatacttgtttcttttctttcccttttattttgtttaaagcacatcccagataagatgtcattttactctaaatacgtgaggatatatcaaaaaagaatatttctacatggaattacaatgtcagtatcccattgaacataattaatacctttt

SEQ ID NO: 163676 - DNA, 297 bp, Homo sapiens
gtcttttcctcactgaatataaatgagtagactgaatgaatgtgcttgttattttgtttgcaacctacactattactttatctcctccctctcctcccaccccgcaaaaccatataaacaacagcaaaagaaaaaaatcctccacaaaacttcttaccatcttacagagaacagctaacagttggtgaccacacaagaattaaaatgtgttgaagtatggtcttatatttgcctggcactctacagagtactttcatgaagatgacctcatgatcttaaacaactctgagaaatgga

SEQ ID NO: 163677 - DNA, 258 bp, Homo sapiens
ggaatctgcatttctaggactataaacagtaactgggcatgtgggatgaatggctaccagagagtcagagagccatccacaccagcaagtggtactatggtatcacttcaggcttccctagcaagatgaatttgtacctaaatctagagttgccttaagaacacaatctaggttctattcatttttaaaatataaatccatcttttatcttcctcagatagttactgaatttccaaaccagcactggttcttttttta

SEQ ID NO: 163678 - DNA, 261 bp, Homo sapiens
gacactttgggggcgcctaggaaaggggaactaggatcaaaaaagagatcaggacctgggcactcagctctagagatggcatcagggcagccaaggcactggggacaccccacacccactgtgccagcctagggcagggagcccgaggaagccacaggctctgccctgctcagtgctggactcagtgcctggcccaggctgagaaggagataaactgcagccttgggggtgtggggaaggggcaccacactgggatctcag

SEQ ID NO: 163679 - DNA, 333 bp, Homo sapiens
tgagattatggggaaataggcacaaacacaccttgtcattatagatcccctataccttttatgtttcctgcgttttctttcacgattatgtctttctcccagatgttactactaccctgaatttagatattggggttatgtatgcatctgttaaaggtgttctaacctttttatgaatggaatcctactgaatgtaatttttatgacttggtttttattcagccttatgtttttatgattcagccatgttgatgcatacaactaatgacagttctttgttttactgctgtattgtattctgatatgtgaatatgctataattcactcattctg

SEQ ID NO: 163680 - DNA, 509 bp, Homo sapiens
tgatagagtgaatgtgtgtgggactgggtggcaggagaatattggcagatagaggaagtcgtgaaggggatttccaaggttgctctcagtacactggtttgagctactgtcctgtgatataatacagtgtttgttgattttactttggaagtgttgtttaaacttgcatttcatcttcagtccctctaatattgccttaacacacagatgatagcaacattttccttggaggcctatcactagttcccttatctgctttaggctgccttcctcacaattgacagcttgatttttctcaaaaacaaatatgatttcatcactcttccaaaacttctcattggatgtctattgattaaaagtccaagccagttaccgtggcatatagggcccattgcaaactcccacagctcatcgtcataacctttttatattacatttccccaactaacatattttgctccagttctacttaaagcctcacttctcttcaagactcttcccacgggctg

SEQ ID NO: 163681 - DNA, 317 bp, Homo sapiens
ttgcccactacctaattattaactgaccacagttatactcaatttcagtgtaagaaaaaccattttagctgtgcacagtggctcatgcctgtaatcccaacactttgagaggccaaggcaagacgatcacttgaggccaggagttcaagactgcctgagtaacacagtaagaccctgactctacaaaaacttaagaaaaaccattttagtcattgtgataagcaaaactgtaagatgaccccaaatgacccctgccctgtgaatataatgagctatcactctcataattgttatattacagggcaaagggattttaa

SEQ ID NO: 163682 - DNA, 198 bp, Homo sapiens
tacttccactcttgtgttcccatgatctgttcgaacccatgatgtgttcactacccagcagtcaaacatttttgaaaatgtttatcacatcacttcactcaacacccttcaaagggttcctaacacattcagattttactcaagtccttaccatgtcctataaggccctacaattgtactggccctttgtgaccctct

SEQ ID NO: 163683 - DNA, 291 bp, Homo sapiens
tgcatggtagggtcactgaggtcatagaggtcacagcctcatgggagcttaggaggtcaaatattcacagggtcagaagatcatgaggaggtcacagggtcaggaagccatgatgtcctaagagtcacaaagattgttcctctcagggccacagagatcatgaaggtcatggaatcatatcttcacagggctatggagctatgaggggatcacaggagtaagggactcagggtaatgggggtcacaaggggttcacagggccatggtggcctgccgtcctgggcagagaca

SEQ ID NO: 163684 - DNA, 148 bp, Homo sapiens
taaggtcctgggcttatatgagcacaagataggggggcatggcaggccaaaaggcaactttttgggtgcgtaaacagaaatgcttgttctcacttaggtccgtgagcacaggcccgagggtggagcactcaccatgtaccctactcat

SEQ ID NO: 163685 - DNA, 380 bp, Homo sapiens
ggccccagtacatgaagagatataacactgtatctatggcattaaaattttatgggaggagggatgatgtgaaaaaaatgtttaaaatgactccttagaggggctagtaatgaaacactgatccatggaacctgggctgtttggcctgttgtgtttccctcaaactgcattttgctattgcatactcctgatgattgaagttcctttctgtatttccttcagtttggcagatgaatccaaaggcttgatcagtctcaagcctgatcctttggcaagacttacaggtggttttgcattctttcattgggaggcacaccgtgtctgctttgtgcccttttttgatgttgcatctattgaggcttaatgcctacacctctgtc

SEQ ID NO: 163686 - DNA, 152 bp, Homo sapiens
atgtaccaaccatcaagaagcaacttagtcactttaccaagattaatcccatcacctgaaggagagtttagggaatatatcttcttagggttgcctgtaataaatttcctacccgagatactagaattctatttaaaacaaacagtaacaga

SEQ ID NO: 163687 - DNA, 323 bp, Homo sapiens
aattctaacattttcatcctgttcaatatcttggcaatttagatgctttgagatgttcccccacctactgacttcatagaaacatgttaaaacaacaccaccaccacactttctagaacttgaaactaagcctaatttttaaaagtacaacctcatcaatgtctctaaaactaggtcttgaatctaaaatggaattatacatagaactattacatgaagcagttctttcactacaatcatttttagccccccagtgaccaatctcctcaggtaaacaatgtctaatgactgatgattgtttactgtatgccaattactgctaa

SEQ ID NO: 163688 - DNA, 274 bp, Homo sapiens
tgagtgccagtgggaaaaggaagacttcagagtgtacggtcatgtggaagccacgcaggacaggttgagcgagctgaagagagaacacgggtgcaaacaccacatagggaccatgttctggggcaggctccatgggatgtcctcatacccacaactgtgacccgtggtctacaccagaaacaagagcttctgtctcctacactgtccctccagttccctgtactaagaaagtataatatcggccgggcgcggtggttcacgcctgtaatcccag

SEQ ID NO: 163689 - DNA, 554 bp, Homo sapiens
aaagggtggggtttgagatcgggggaaggaatgagaaagtagaagcaatgtcacttcagtgccactgttgactagtctttggtgcttatgtcagtatttgttttatttcctgatttttttaaagttggcaaaactacatatttttatcttgatgaaggcagtgggagggtggaacaaaaacaagccattactgctatttctagttcatttactggagactgtcccttaatagctaatgtagaataaatttgaaacatagacctagatgacaaaaagaatgggaatagaaatgaatctcaggatttgaacaaacagaagacgtttatgctgtgttgatgcccagttctacaactgcactgccaagactgagtggttggatggcaagcatgtggtgtttggcaaagtgaaagaaggcatgaatattgtggaggccatggagcgctttgggtccaggaatggcaagaccagcaagaagatcaccattgctgactgtggacaactcgaataagtttgacttgtgttttatcttaaccaccagatcattccttctgtag

SEQ ID NO: 163690 - DNA, 106 bp, Homo sapiens
ccaagcaaagggtggaattccatctttaaaaactaaacaggcattttggacaacacattcttggcaatagaacctggacaacatttatcaaacacggtagggaaag

SEQ ID NO: 163691 - DNA, 451 bp, Homo sapiens
tattccataacgttaccttcaagttatcctgaaagacacacatgacatacgcttttatttaactctactaatctttttactattttctctttccctttttttatgtatctcttcctttcactatcaatgtccatttcatctcccccaaagcaaatttttacatactgtggctaatataggtatttgttgttaatgtggttgatcttgtaatgtgttactttccctgatgaaacccagagcagtttcagaggcctcaaattctgagatcttcctaagttcaaaatagattgctggtagaaaagcattgacattaaccatgaaaatatatatttgtgtattgttcccacttctatagacatatattacttttcaaaatgtcagctcaaggaccagaaattttttctgaggagaaagagaaagcattgcctttacaaaagtttccctgatcatt

SEQ ID NO: 163692 - DNA, 480 bp, Homo sapiens
gcgatctagacatcccttataggttcgcaggagggaacaaaccaagttagttcccctccagacctaggaaatccacttacaaaactgcaaaatagcaccagattggttattagaaaaagtgggttctgaacctgccctggtagaaaattgtgggcaagtagtttaatttctttagtactctccatacctgcgaacctatgtcataggttcgcaggcaggggagatgagtggttagatataaaataggacttggtttgaggcatttaaaagtgaacttaaagtgcattttaaagaagatctatggcatgatatgccagtggttcccaaatgttgatgcatattataatcacctagaaagcttgtttgaaaacagatttctagtattcacactagacctttctaaatcaaaacctctggggtgaggcctaaaaacatttacttttagcaagataccctgcgaacctatgatgttatttgttg

SEQ ID NO: 163693 - DNA, 920 bp, Homo sapiens
tggatgctctgtcccttttttcttcgcacatctgagacttcctgtaacaaaagttaggcagagagacggctcccagggcgccagggggtggggctgcagggcccttggcggctcctggccgagctccagacaccagccgggtggttttggcgggtggcagggcagagggcatggagatgcccatgctgaacgctggcgaagatgaggctgttctgtaccaggtgctgaaaagcacataggggagaactgggaagattttcttctctagagatttttgggaaagggattagttttcaggaatgagtgtcctgcctgaaggcaggggactggcacttagcctgtggtctccaagtttaaatcaggcagtgaggtgattgcgatagcaccagctggcatggccctggtggaggcaggtgagcagggtgctctgcgctccgtggctgcggctcctgtgtgtgccctgcagtgccaagcatttgtgcgtggctgctccccgcctgcagggggaagcgttgttcccggggcgctgaaggacgcgctggtgagggcttgacgtgggcagccctgagcttctggccatgctgtgaggtgctcttctccgagcaaaggcagctgagagttgcagagttcacctttgtcggaggccacctgggagatggacactatgttattaggtggggccaggcctcccgagtacctgggagatgggagtgttcgcttcagacagtccatccactcgtgcccatccccatacctggcagatctgcaaagggctttgaaaaccttgatagagccaggcgtgggagctcacgcctgtaatcccagcactttgggaggccgaggcaggcggattgcctgagctcaggagttggtgaccagcctgggcaacatggtaaggctctactaaaaatacaaaaaaa

SEQ ID NO: 163694 - DNA, 208 bp, Homo sapiens
gtaaattcactagaatgggatcaaccattagccttgaaaacaataaaggcatatacttctgcccatccatccatcaatccattcattcaatcctccattccttcatccatccattcatcccttaatccattcatccatccctccgttccttcatccatctatccctccatccatccctcccttcatccatccctccctccatccatcc

SEQ ID NO: 163695 - DNA, 260 bp, Homo sapiens
tggaaagctgcccagcccctacctccactgccagcagtgactcctaggaccccggggaggaaataaggggaaaagggaggcagggtggggccaacctgagcgctaatgctgtgcccggcagcaagagcttcatatgaatcatctcgtttaatccttgcaacagtcaacgaggtaggtgctattgatacttccatgttacagatgaagaaacaaaggcatagggcatttctgtgacttagcccaggcccaaagctcggccg

SEQ ID NO: 163696 - DNA, 612 bp, Homo sapiens
attgccttcacaccaaacccaagggaccacacagcccattctgctccgtataccaggtaagtctctgattgcaacaaactggcaattctagtgtactttttcattattagaaattagctaaaggcaaatatgtgtaagcaggttaatccagggtttcaatgggagatagagaatagtggaatatctttattttaagttaaattacagtctggatttgaaaggaccttagagatggttagggctcccacctcagtagatagtcattgaactgggagtcctggagaagattgttcaaatgcccatgggaagttcatagcagaactagaactcaggcccagagcactctcagtaacactgcaatttccccctgacaagatatttatagaaattttaatttattagatggatctctactgagcatttattccatttaaggcagtatgctaggcactttggacaaatcaatgcctaacgtacttacttaacaaacataaaacctagcaggaaggtaatacatatatataaataaatgaaatgcaaagtagatagtaattggcatgacggagatgggcagagaagggctgtgcacttttgggagaccttgctcaagga

SEQ ID NO: 163697 - DNA, 267 bp, Homo sapiens
attgccttcacaccaaacccaagggaccacacagcccattctgctccgtataccagaaaaaaacacattggaagcatgaatcgctaccctctcctcacacattcttaaaatacacggagattctcagacatggaagagggaagggtacagtcagaacacggcaggctgtacacatttcattttgtgtgtgaaagaggtttccccagctaggagactgatttcagatagaaggatcgtgtgtgtgctactatcccggaagtatgtagt

SEQ ID NO: 163698 - DNA, 359 bp, Homo sapiens
catggtgctggcatctgctcggcttctggggaggcctcaggaaacttacaatcatggcggaaggtgaactgggagcaggtacttcacatgcccagagcaggagcaagagggggcaggtggcacacactttgaaaccacgagctcttacaacagattcactattgtgaggacagtaccaaggggctggcgctgaaccatgagaaaccacccccatgatgccgtccctcccgccaggccccacctccaacagtggtgactacaaactacaagttgacatgagatctggtggggacacagatccaaaccatatcagtgcctgacctatgctgagcctcaataaatgttaaatgccaccatca

SEQ ID NO: 163699 - DNA, 249 bp, Homo sapiens
aacatttgagaacattaaataactgaataacagtaaatgtgctattccctataaatttgttatttaccagcagtaacttaagcattagaagtttcatttgctgaccaaatacactgttactatttaaattgatggatttaagggtaaattgaggctggaagctgatggaagcttgggggaataccaaatcttccccaaaacaccttatggcattgctactagtttttctatattatattctcccattgc

SEQ ID NO: 163700 - DNA, 583 bp, Homo sapiens
taattttgtatttgtagtagagacagggtttcaccatgttggccaggctggtctcaaactcctgacctcaggtgatctgcccgcctcagcctcccaaaatgctgggattacaggcgtgagccaccacacctggcccacccttattaactttttaatgaacattcctcccagtgtgtcagtccactgtttaataactactaatggctccctcaactactttagaatcaagttcaatctcttcctgttgacattggagggactctatgatttagcaatagattttgtccccaaaggctttttaatcttgaaaggtctgtctactgtcttctagggctgccatgtttgctctcacttcagttttcactttatccaccccttttacctggaataacctcttcccttctgtccttttatccaaaccctaacactgtcttcaagatgtaactgctaacctttccaagaggctctgatttttccattcctcattcatctcctctctgaactcttaccatgtttaatttgtcccccattaatatctgtcttcggtttgctagcttttgcataaatattttaatatacatca

SEQ ID NO: 163701 - DNA, 196 bp, Homo sapiens
ttattattacatgacacaagtaagactacctgggaaaacagaagctgattctacttaaatactttatttacactttcccatagcctaagaaaagatagtaaatcaggaaaaaagggcaaacagatatattaaacataagggctagtatttgtgctgctaatgaaatttgtatttggtattgaccttcctggcagcc

SEQ ID NO: 163702 - DNA, 488 bp, Homo sapiens
ggcgctccgcctcctctcgttccgcgactttgcggagctgccgccggccctgggctgccccggcgcgcggcggacagtgccgagggatccgccgcagctgcaaccgctgggctttccctgcgaaatcccggccccgactcgcgactctgaaatcgcctggagccccctccccgggccctcggccccgccccctgctttgcattcgaccaatgggcgcgaggccttcccggccccgctggggagccaccccctccccaatgacacactatctttaatgggattagcgttctgctgtgtgcctaaacaagtgcgccgcgagcactcgctaaatgtcaagggctctgcagctgaggggtgaaccagaaccttcaacggaaagcgctggtctcttttacccgagcaagggggcggcgaaaggagggggatggctggaggtacccacggcccaagcaagccagaggaaaggtctggggagaaggactggaggg

SEQ ID NO: 163703 - DNA, 195 bp, Homo sapiens
agtatggagagggaaactggtctaaaatactgttacattataaattcaccactggccaagtgtcatgtgaaaagacagatgaaggactatgaagaaattaaaactgatttgctcagacagtgaagactgaatgtgtttgtaaaagcttcatacatggacagttaaatatgttgatcactgcattttgtttgtaac

SEQ ID NO: 163704 - DNA, 226 bp, Homo sapiens
tgtaaatgtttattggaatgaattagaccatttacatggttacattatatcactagcatttctttcctggaaacagagctgcttgctggtgctcacactaatatctcaagttgacccttcttgagtatgtacttaagcaatcacagtgcagaaatcttcttctttcataagctcagcatatccttaaaggttttcaccatacatgaactgttaaagtcactaatgc

SEQ ID NO: 163705 - DNA, 169 bp, Homo sapiens
aggtgacatttcagcagagtcccaaagcgagcctgagccaaggagataactgtcagaagaacgttccaagtagcacaagggtgccagggcaggcacatgcttggtgtgtttggtgcgggggggaaagccagcagggtgctaacgagctagagagcagtgacgggggaag

SEQ ID NO: 163706 - DNA, 243 bp, Homo sapiens
tcccacccaccccacccaaggaagcccagcacagaccatctcagctcactccaacatcacttctttgccaaatgcatttccaaacaccctcatgagcttgctgatctctttgctatctctccctgccccactccaagggctcctcctgcctggtgaagactgccctgggtaccccagaactgaacctgcagcagccagcacagctgaccttgggggcaataagcagccagggaaaggctttct

SEQ ID NO: 163707 - DNA, 129 bp, Homo sapiens
gtggtggcgcgtggggcgtgcctgtagtcccaacttcccagctacttgggaggttcggctaagcccaggttacagtgagctagaatcatgccactgcactccagcctgagcgacagaaacagaccagtc

SEQ ID NO: 163708 - DNA, 356 bp, Homo sapiens
tatatatatgtatttatcttagtgactgattgattgatacagagtcttgctatgttgcccaggctcaagtgcttgttggttcctctgtaataaaacagctcctcaaggatccactctctgatctgttccctgacctgttttccctcctccttccagtagcttcacttccctccttccatgcacctctggaaaaaggtgaccttccttctctgcctctgtgtcttggacatcctatcctcggcctgccctcccaacagagaaccaactcaccaaagtcaatgtcctttcctcagcccccattctactccacctctgtagcactagaggtttctgggtcgccccaccctagaggggag

SEQ ID NO: 163709 - DNA, 196 bp, Homo sapiens
tgcctgtcaaattgccaaagaaaaacaaaaaactcaaagcgtaaagcatggcatgatgtgggaactcttttgtgttgctagtgagagtgtaaagtgattgtataattcatggtccaacaggaaacagatggcccacttagattaggataattagagggaagtttatacacaaaggatgattcacagagatgtgggc

SEQ ID NO: 163710 - DNA, 222 bp, Homo sapiens
tgctgggactacaggcgtgagccactgcgcccggcctgatacctatatcttgaccaagctgctgtggaaacattgagttccccttgatagttttgtccacagagtgaatgtttaggaaccggtgaggcatctctcacccccacccagatggcggcctggaggcagcgtttctgaccctgtgatgggatttgtctctcttgtccaagagactttagagatgtg

SEQ ID NO: 163711 - DNA, 496 bp, Homo sapiens
gcaggaagagggacaaggtcagatggcctcctgagccagggaggcagcctggaggtttgaatcctagttctgccattttctagttatgtgatcctgagcatgttgtttacctctctgagcctctgctctaagatgggaataattccaaactctataggattggcatgaggactaaatgaaataatgcatctaaagtgtctattagtgagaagatactccatacacagtggcttgttttgatcataaatggttccctatttatttccagggcagcccaatattacaggttcctactcctttcaagagaatgaatttctttgtattaggaagtcaagactgttggcaacttaacaacatttttttttgtatttatgctttaagttctggggtacacgtgcagaacgtgcaggtttgttacataggtatacatgtgccatggtggtttgcttcacccatcaacccgtcatctacattaggtgtttctcctaatgctatg

SEQ ID NO: 163712 - DNA, 272 bp, Homo sapiens
tcctcaaccatcctcaacaaaagttctctcttatttcccaaagtactcagtccttctgccactcatgaatcctgaagtgtttgcttttacaagctgtttaaatgataaacagccatatggtatagcgtcaaggctgctaataaatgtactaaaatacacaattctgtcttcgatttggatttttaaaaatcaagtttttagctggatgcggtggctcaatctttggacttttttattttttttttttttttttttttttttttttttttttt

SEQ ID NO: 163713 - DNA, 338 bp, Homo sapiens
ggattaaagtggtatcactgattttaaaagtttgagaggtaaaaataaatttgttattttagaaacaaaagataaagaagaaaatgcattatttggtactcactcgtatttatattttcttcggtaagcttagaactcacattagttcagtgactttgaaagaatgttaatttagcatttagcctgcttggtatttggaattaatgaatataaaaattaataatcactttcatttgtcaccaaaaatgatttcaagatatatctgctgataaatagaattgccatgtatagcataaatttctatatgagaatgtccacagaaatgatttcaatatatc

SEQ ID NO: 163714 - DNA, 313 bp, Homo sapiens
tctccctttgcccagacccctccagacctctcaagagacgttctggccagtctccctgccccacccagcagcttcaaattggccaggcctacagtagctccagggaatttttaaaaatcagggtctggaagtgggcctgggaattcaaacctaggctcttcccacacccttgctaggacctcacttccctagactggcgactgactccctctcctgtgtccccactccctccatgggagaaggagcctatcccctggctcaccccgggacccacagtccccatcttccaaacaacctccctcctttctccctg

SEQ ID NO: 163715 - DNA, 232 bp, Homo sapiens
ggaaagcaggttaaggattgggaggggggatactggaaatttggcagtattcaatttcctgatttgggtggtagttacgtgatggcattccctttgtgaaaattcatcaatctgtatttttacggtttgtgcacttttcatttggtatatattttaattgaaagttaaaagaaaaaacagccatgacagccatgcacagtggttcatgcctgtaatcccagctactcaggaa

SEQ ID NO: 163716 - DNA, 164 bp, Homo sapiens
tggggaagaataaacagcatgatatgcataaagtctcttgcacaacctagctgctcaataaatggtagcttttatgcttgtcttaaaaataacattaagttaatgtgaaatagtcatttttgtaggccaaaagtggtcatataataacaatttcatatggttca

SEQ ID NO: 163717 - DNA, 363 bp, Homo sapiens
aattgcttaaatgtgaaattattcatgtaagccttcatgtgttagtccatttgccttgttgtaaaggaatacctaagactgggtaacttgaaaagaggtttgatcagctcacggttcagcaagctgtacctgaagcatagtgccaccacctgcttctggtgaggcttcaggaagcttactgttaggacagaaggcaaaggggagccagcgtgtcacatggccagcactaaagcaagaaagagaagggggaggccccagactcttttaaacagccagatctcatgtgaagtcagtgagaactcactcatcaccaaggggacggtgctaagccgttcatgagggatcttcctccatgatccaata

SEQ ID NO: 163718 - DNA, 465 bp, Homo sapiens
cactttggattttatagcttcaaaagaagaacacgaagtcatatgtgttgacctaattttattgaaaatctattcacttgaagaaaacctaaacacaggtggatgctgttttctagtagagcatatgctctaatgagtaatgtttcctagaattagtgaaaatgtatacaacttaagctgcccccaaactgctatggcagattagaacagttcctaccaaataagcataaatatttagttggcagttgatgctgtggtgttgacacgtgttctgttttatatgctgctcaaacatggcatatgaaagtatacctttgttctataggaaagttgaagctttgcaagcatagtagatattcatgacaaagaaaccattggaagaaacccagtagacatttttgggagaggtggtagccagagttaaaactcccatccctatttctttgttaggtttattcttgctgc

SEQ ID NO: 163719 - DNA, 460 bp, Homo sapiens
actagtccacggttggctggtacgtgcctgtaatgccagctactcaggagcctgaggcttgagaattgcttgaacgtgggaggcggaggtggagacagaggttgcagtgagccgagattgcgccactgctctccagcctgggcgacagagagagactctggctcaaaaacaaacaaacaaacaaacaaacatgaaaaaaacttggctggttttgtagactggttctatgctagaaaatacttacatttctgtccaaatttttgcttggaaaagatggtactactgtcaaactatcagctatctcagagtatccaaatgtctgctaacgttagccaagctaatttctttgccacctatgatgacattttcctgtacacattctaattattttgacgtttgatgtagctgaaattctctagtctgggaaagagtgaacttaactaaccttacatttgtttgt

SEQ ID NO: 163720 - DNA, 329 bp, Homo sapiens
aactagttgattggaccgaatatgtcaaacaccctctgacccaggaactaaaagaatgtgaagggattgtcccaatcccacttaaaggaaaattatattacacaaagaagaggacgaagtgagaagattcaccaggaattagccttatatttaatcccttcatatttgagcagcatggatgagaagaaatagtttacaagcttggccttttatatataagagtgtactgcaggtgctgtttgatttttctgagatatttttagcccttgatcccctttgctgcaagaggtgaggaactgctcactgacagcttctctgtaatctgtgat

SEQ ID NO: 163721 - DNA, 693 bp, Homo sapiens
tactcagaaagacatcacctggagctgacctacaaataataagggagatgtggtaattttttaatcaaaatatacctagaagataaatttctcaaaataatcctagaaatgacttttaaagcagaagagaaaaaaggaagggtggaatagcaacaatggaaacaaatgaggaatcctgctccccaccccacctcaaagcccactgtatatgtggggttatggtcagtatttctggtgttagagtgtatatttgcaaatctctgaactgtttatatgtatgaatctcatcataatagattcacattcttcttaaaggcaatgcttaacatgtttcctgatcataagatgttcatattgaagattttaaaaaaatacaggttgaatgtgctgcttaaaatgagctgctgctttatttttaaacatttaaaaaattttgttaaatttagtctcgttcttcctacaaaagagcttaaactttgacagtaacagctgttcttttgtgtgggacatgttttcatgaggatttttgtgcacattaaaaataaccatttttgtgaatcgtagttattattcatagtcactttataagagatataaaggttttccagtgagttacttctgattcataaccaaattatagcagagcagatgtagactaccagtggaataattagccaaaaaatattagggggc

SEQ ID NO: 163722 - DNA, 464 bp, Homo sapiens
ggagtaacattttattatgttctcaacttctctctggtattggtgacagtgaactaatgaattgttgagaacatgaaaatgctattgtttaatgcttcaataggttgtgtggttttgcttgtttgtttgtttttaacttatctatacttttgaaatagccactttgaagcctgatattttggaattctttatatcacctctcttggttcagattgtagacagtttcatagggcccattttctgtcactagattcctcttcactaggtcctacatcttctctaaaacatatttctaccaattaaaattgtggtgtagtgaaaacagtaatggcgtaatgaaaacaatggtttttattataaaatggcagacttaacatacccatttacttttccctacttctcagatgtcattggaaatgacaaaacagacataagacaaagaataaatcattgtaattaaaaaa

SEQ ID NO: 163723 - DNA, 556 bp, Homo sapiens
tttcttttctcaaaaatagcattactgttaccatacaattcacccatttaaattgtacagtggtttttaacatatttccagagttcagtaaccatcaccaatatttaattctagattttcatcacctcagaaagaaaccttgcactcagcagtcaatccccattttatggccagcctccccagccctaggaaactattaatctgctgtctgtctctgtagatttgcatattctggacatttcatagaaatagaatcatacattgggtgcagtggctcacgcctataatcctagcactttgggaggccgaggtgggtggatcacaaagtcaggagttcaagaccagcctggccaatatggtgaaaccccgtctctactaaaaatacaaaaattggtcgggcgtggtggtgtgcacctgcagtcccagctacttgggaggctgaggctgaggcaggaaaattgcttgaactggcaggtggaggttgcagtgagctgagattgtgccactgcactccagcctgggtgacagagcgagactccatctcaaaaaaaaaaaa

SEQ ID NO: 163724 - DNA, 188 bp, Homo sapiens
agagacgggtctttgtcctgttgctcaggttggagcgcagtggtgcaatcatagctaactgcagcctagaccttctgtgctcaagcaagccttccacttcaacttcccaactagctagagctacaggcatacaccactatgcctggctaattttgtttatttttgtagagatggggtctgctatgttg

SEQ ID NO: 163725 - DNA, 429 bp, Homo sapiens
acagttgtaggggctgtgcaggattaaaggggggctctgcagtgggtaagtctaagaaggtctgagttatataaaggttaacaagatctcttttctgccttgtgtctcagagcattgaaaatacaagtgtgcgtggagaactttcgagaagaggacattcccaaacgtatcaactggatgcagtgctgagaactgacaatccacggactcacttggggaaaccattctttaggggccccttttttcatttctcaagttctgttagcaattcagtcattcacacaatgaaaggagactattgctctctcccctaaaggaaagcagagggatggtctctgctcaccatccttcagccagggctcatgaacaagacgggagaagcacttgagtttgttttgttgggatgcaatccaacgttcggtaaaatgg

SEQ ID NO: 163726 - DNA, 701 bp, Homo sapiens
actagttctagatcggagcggctgcccttttttgtgttttttaaataaaatgtcagatgcaaaaatgctgcacttatttctcttaatacattgaaaatagtggaagatgcagattttaatccttcatgagtccaagctggaacatgacttctgctaatcagatgtcatcaacatagcgaactccaactttgcggccatcaccgaagcgggagcggccaaaatgaagtttaatccctttgtgacttccgaccgaagcaagaatcgcaaaaggcatttcaatgcaccttcccacattcgaaggaagattatgtcttcccctctttccaaagagctgagacagaagtacaacgtgcgatccatgcccatccgaaaggatgatgaagttcaggttgtacgtggacactataaaggtcagcaaattggcaaagtagtccaggtttacaggaagaaatatgttatctacattgaacgggtgcagcgggaaaaggctaatggcacaactgtccacgtaggcattcaccccagcaaggtggttatcactaggctaaaactggacaaagaccgcaaaaagatcctcgaacggaaagccaaatctcgccaagtaggaaaggaaaagggcaaatacaaggaagaaaccattgagaagatgcaggaataaagtaatcttatatacaagctttgattaaaacttgaaacaaaga

SEQ ID NO: 163727 - DNA, 531 bp, Homo sapiens
ccacctgctctcctccgttgtaggccatcaccgaagcgggagcggccaaaatgaagtttaatccctttgtgacttccgaccgaagcaagaatcgcaaaaggcatttcaatgcaccttcccacattcgaaggaagattatgtcttcccctctttccaaagagctgagacagaagtacaacgtgcgatccatgcccatccgaaaggatgatgaagttcaggttgtacgtggacactataaaggtcagcaaattggcaaagtagtccaggtttacaggaagaaatatgttatctacattgaacgggtgcagcgggaaaaggctaatggcacaactgtccacgtaggcattcaccccagcaaggtggttatcactaggctaaaactggacaaagaccgcaaaaagatcctcgaacggaaagccaaatctcgccaagtaggaaaggaaaagggcaaatacaaggaagaaaccattgagaagatgcaggaataaagtaatcttatatacaagctttgattaaaacttgaaacaaaga

SEQ ID NO: 163728 - DNA, 538 bp, Homo sapiens
gctgccgctactactactaaattcgcggcccgtcgaccaccgaagcgggaggccaaaatgaagtttaatccctttgtgacttccgaccgaagcaagaatcgcaaaaggcatttcaatgcaccttcccacattcgaaggaagattatgtcttcccctctttccaaagagctgagacagaagtacaacgtgcgatccatgcccatccgaaaggatgatgaagttcaggttgtacgtggacactataaaggtcagcaaattggcaaagtagtccaggtttacaggaagaaatatgttatctacattgaacgggtgcagcgggaaaaggctaatggcacaactgtccacgtaggcattcaccccagcaaggtggttatcactaggctaaaactggacaaagaccgcaaaaagatcctcgaacggaaagccaaatctcgccaagtaggaaaggaaaagggcaaatacaaggaagaaaccattgagaagatgcaggaataaagtaatcttatatacaagctttgattaaaacttgaaacaaaga

SEQ ID NO: 163729 - DNA, 705 bp, Homo sapiens
tcccagagttatatgggggaagcgaggtacaggctggctagaagtcctcgagagcattagtggatagatgttgaagtccctgagagagggttatgatgcgactttgaggagcgttcgtagtttgagtttgctaggcagaatatgttatgaggatgtaagcccgctgggcgattatgagaatgagctgcgccggggaagctatcaccgaagcgggagcggccaaaatgaagtttaatccctttgtgacttccgaccgaagcaagaatcgcaaaaggcatttcaatgcaccttcccacattcgaaggaagattatgtcttcccctctttccaaagagctgagacagaagtacaacgtgcgatccatgcccatccgaaaggatgatgaagttcaggttgtacgtggacactataaaggtcagcaaattggcaaagtagtccaggtttacaggaagaaatatgttatctacattgaacgggtgcagcgggaaaaggctaatggcacaactgtccacgtaggcattcaccccagcaaggtggttatcactaggctaaaactggacaaagaccgcaaaaagatcctcgaacggaaagccaaatctcgccaagtaggaaaggaaaagggcaaatacaaggaagaaaccattgagaagatgcaggaataaagtaatcttatatacaagctttgattaaaacttgaaacaaaga

SEQ ID NO: 163730 - DNA, 654 bp, Homo sapiens
cctgcattattacttaatttcaaatctctctttaaaatacattttataagaaagaaagaaataaaattcatagaaaaattagtagcatttctatatcccaatagaaatcattctgaaaaaaaattttctttacaatacttacaaataccatcaccgaagcgggagcggccaaaatgaagtttaatccctttgtgacttccgaccgaagcaagaatcgcaaaaggcatttcaatgcaccttcccacattcgaaggaagattatgtcttcccctctttccaaagagctgagacagaagtacaacgtgcgatccatgcccatccgaaaggatgatgaagttcaggttgtacgtggacactataaaggtcagcaaattggcaaagtagtccaggtttacaggaagaaatatgttatctacattgaacgggtgcagcgggaaaaggctaatggcacaactgtccacgtaggcattcaccccagcaaggtggttatcactaggctaaaactggacaaagaccgcaaaaagatcctcgaacggaaagccaaatctcgccaagtaggaaaggaaaagggcaaatacaaggaagaaaccattgagaagatgcaggaataaagtaatcttatatacaagctttgattaaaacttgaaacaaaga

SEQ ID NO: 163731 - DNA, 572 bp, Homo sapiens
  misc_feature (23)..(23): n is a, c, g, or t
  misc_feature (35)..(35): n is a, c, g, or t
tttaaatccccttttctactacnatgctgcgagangacgacagaaggggcttttcccttttgcggccatcaccgaagcgggagcggccaaaatgaagtttaatccctttgtgacttccgaccgaagcaagaatcgcaaaaggcatttcaatgcaccttcccacattcgaaggaagattatgtcttcccctctttccaaagagctgagacagaagtacaacgtgcgatccatgcccatccgaaaggatgatgaagttcaggttgtacgtggacactataaaggtcagcaaattggcaaagtagtccaggtttacaggaagaaatatgttatctacattgaacgggtgcagcgggaaaaggctaatggcacaactgtccacgtaggcattcaccccagcaaggtggttatcactaggctaaaactggacaaagaccgcaaaaagatcctcgaacggaaagccaaatctcgccaagtaggaaaggaaaagggcaaatacaaggaagaaaccattgagaagatgcaggaataaagtaatcttatatacaagctttgattaaaacttgaaacaaaga

SEQ ID NO: 163732 - DNA, 556 bp, Homo sapiens
tacgagacccggagttggtgaattcggtcacgcaggacgtagtgcgggtcagctggcaattaatggaggcccaaaatgaagtttaatccctttgtgacttccgaccgaagcaagaatcgcaaaaggcatttcaatgcaccttcccacattcgaaggaagattatgtcttcccctctttccaaagagctgagacagaagtacaacgtgcgatccatgcccatccgaaaggatgatgaagttcaggttgtacgtggacactataaaggtcagcaaattggcaaagtagtccaggtttacaggaagaaatatgttatctacattgaacgggtgcagcgggaaaaggctaatggcacaactgtccacgtaggcattcaccccagcaaggtggttatcactaggctaaaactggacaaagaccgcaaaaagatcctcgaacggaaagccaaatctcgccaagtaggaaaggaaaagggcaaatacaaggaagaaaccattgagaagatgcaggaataaagtaatcttatatacaagctttgattaaaacttgaaacaaaga

SEQ ID NO: 163733 - DNA, 531 bp, Homo sapiens
taggggcgcggcccgtcgacagcattcgacctgatgctcttagttccaaaatgaagtttaatccctttgtgacttccgaccgaagcaagaatcgcaaaaggcatttcaatgcaccttcccacattcgaaggaagattatgtcttcccctctttccaaagagctgagacagaagtacaacgtgcgatccatgcccatccgaaaggatgatgaagttcaggttgtacgtggacactataaaggtcagcaaattggcaaagtagtccaggtttacaggaagaaatatgttatctacattgaacgggtgcagcgggaaaaggctaatggcacaactgtccacgtaggcattcaccccagcaaggtggttatcactaggctaaaactggacaaagaccgcaaaaagatcctcgaacggaaagccaaatctcgccaagtaggaaaggaaaagggcaaatacaaggaagaaaccattgagaagatgcaggaataaagtaatcttatatacaagctttgattaaaacttgaaacaaaga

SEQ ID NO: 163734 - DNA, 745 bp, Homo sapiens
gctgccgctactactactaaattcgcggcccgtcgaccaccgaagcgggaggccaaaatgaagtttaatccctttgtgacttccgaccgaagcaagaatcgcaaaaggcatttcaatgcaccttcccacattcgaaggaagattatgtcttcccctctttccaaagagctgagacagaagtacaacgtgcgatccatgcccatccgaaaggatgatgaagttcaggttgtacgtggacactataaaggtcagcaaattggcaaagtagtccaggtttacaggaagaaatatgttatctacattgaacgggtgcagcgggaaaaggctaatggcacaactgtccacgtaggcattcaccccagcaaggtggttatcactaggctaaaactggacaaagaccgcaaaaagatcctcgaacggaaagccaaatctcgccaagtaggaaaggaaaagggcaaatacaaggaagaaaccattgagaagatgcaggaataaagtaatcttatatacaagctttgattaaaacttgaaacaaagatcgaaaaaaaaaataaataatggtcttctttctacttcacagatactttcttctcccatgtcggcccgccttgcccccagcccactttagacctcggccaagtttatgcatcgcggccgaaagttgggctccaatttgccaattcgccctataatgaggcggtattacaattacttgcccgttgatttaccaacgattgtaaccgat

SEQ ID NO: 163735 - DNA, 358 bp, Homo sapiens
actactactaaattgccggccgcgtcgacggatgatgaagttcaggttgtacgtggacactataaaggtcagcaaattggcaaagtagtccaggtttacaggaagaaatatgttatctacattgaacgggtgcagcgggaaaaggctaatggcacaactgtccacgtaggcattcaccccagcaaggtggttatcactaggctaaaactggacaaagaccgcaaaaagatcctcgaacggaaagccaaatctcgccaagtaggaaaggaaaagggcaaatacaaggaagaaaccattgagaagatgcaggaataaagtaatcttatatacaagctttgattaaaacttgaaacaaaga

SEQ ID NO: 163736 - DNA, 459 bp, Homo sapiens
gggctgcatggaattggacacgagccgaagcggggacggcccaaaatgaagtttaatccctttgtgacttccgaccgaagcaagaatcgcaaaaggcatttcaatgcaccttcccacattcgaaggaagattatgtcttcccctctttccaaagagctgagacagaagtacaacgtgcgatccatgcccatccgaaaggatgatgaagttcaggttgtacgtggacactataaaggtcagcaaattggcaaagtagtccaggtttacaggaagaaatatgttatctacattgaacgggtgcagcgggaaaaggctaatggcacaactgtccacgtaggcattcaccccagcaagggttatcactaggctaaaactggacaaagaccgcaaaaagatcctcgaacggaaagccaaatctcgcaggtggaggaaggcatcaggagaccttagaggtcggtt

SEQ ID NO: 163737 - DNA, 515 bp, Homo sapiens
  misc_feature (1)..(1): n is a, c, g, or t
  misc_feature (3)..(3): n is a, c, g, or t
  misc_feature (6)..(6): n is a, c, g, or t
  misc_feature (110)..(110): n is a, c, g, or t
ntngcnttcctgagggagtgggtggagagcatgggtggtaaagtaccacctgctactcagaaagctaaatcagaagaaaataccaaggaagaaaaacctgatagtaaganggtggaggaagacttaaaggcagacgaaccatcaagtgaggaaagtgatctagaaattgataaagaaggtgtgattgaaccagacactgatgctcctcaagaaatgggagatgaaaatgcggagataacggaggagatgatggatcaggcaaatgataaaaaagtggctgctattgaagccctaaatgatggtgaactccagaaagccattgacttattcacagatgccatcaagctgaatcctcgcttggccattttgtatgccaagagggccagtgtcttcgtcaaattacagaagtcgccaagtaggaaaggaaaagggcaaatacaaggaagaaaccattgagaagatgcaggaataaagtaatcttatatacaagctttgattaaaacttgaaacaaaga

SEQ ID NO: 163738 - DNA, 447 bp, Homo sapiens
agtgaaaaagaaacaaatcttataatgaagcacagaagaggctttaagaattactgataccatcttgccttttctcctttgttggtaggaaattagtaaataagccaggtttgatggctaaagagtgatttctggagttttttaaaagttaaaatcttttcttattaggcatccacctaccccaggtttgggaaatggtattgaatgttgggctttcccttgtgttttagtgattatttaaagcttgggagtgtttttttcttatttttctgcaggtggttatcactaggctaaaactggacaaagaccgcaaaaagatcctcgaacggaaagccaaatctcgccaagtaggaaaggaaaagggcaaatacaaggaagaaaccattgagaagatgcaggaataaagtaatcttatatacaagctttgattaaaacttgaaacaaaga

SEQ ID NO: 163739 - DNA, 1015 bp, Homo sapiens
taaatttatttcccagtttactcccctcgctcaaactccgcgcccctctcgctccgagagacataggtctcgcgagatctttggtaaacttacagaaccggaagcagcgtgtagttctcttcccttttgcggccatcaccgaagcgggagcgggtaaggattcggcgggcaagcgggtgtaatcagcagccatccgttcttgggcatggtggcttccgaccgcggggaccccgagagtctcttgtcggccgagtagcagccaggaaggagagactgggatggttttttatctgttgctttcttaaatcaagggccgccgggccggagatggatggagggaccggggatttgggaactcgaaaacgagctgagggaagggagcctgtggaaatagactggagtctgggtagtgtcgtttcctagagaatggtctcgaagtaacttctcggtaaagtcttcacggaatttccagaccacacttgcccactgggaggcttttaggacccgagacgtgtgcaggcttttccagccaaaatgaagtttaatccctttgtgacttccgaccgaagcaagaatcgcaaaaggcatttcaatgcaccttcccacattcgaaggaagattatgtcttcccctctttccaaagagctgagacagaagtacaacgtgcgatccatgcccatccgaaaggatgatgaagttcaggttgtacgtggacactataaaggtcagcaaattggcaaagtagtccaggtttacaggaagaaatatgttatctacattgaacgggtgcagcgggaaaaggctaatggcacaactgtccacgtaggcattcaccccagcaaggtggttatcactaggctaaaactggacaaagaccgcaaaaagatcctcgaacggaaagccaaatctcgccaagtaggaaaggaaaagggcaaatacaaggaagaaaccattgagaagatgcaggaataaagtaatcttatatacaagctttgattaaaacttgaaacaaaga

SEQ ID NO: 163740 - DNA, 1080 bp, Homo sapiens
actagttctagatcggagcggctgcccttttttgtgttttttaaataaaatgtcagatgcaaaaatgctgcacttatttctcttaatacattgaaaatagtggaagatgcagattttaatccttcatgagtccaagctggaacatgacttctgctaatcagatgtcatcaacatagcgaactccaactttgcggccatcaccgaagcgggagcggccaaaatgaagtttaatccctttgtgacttccgaccgaagcaagaatcgcaaaaggcatttcaatgcaccttcccacattcgaaggaagattatgtcttcccctctttccaaagagctgagacagaagtacaacgtgcgatccatgcccatccgaaaggatgatgaagttcaggttgtacgtggacactataaaggtcagcaaattggcaaagtagtccaggtttacaggaagaaatatgttatctacattgaacgggtgcagcgggaaaaggctaatggcacaactgtccacgtaggcattcaccccagcaaggtggttatcactaggctaaaactggacaaagaccgcaaaaagatcctcgaacggaaagccaaatctcgccaagtaggaaaggaaaagggcaaatacaaggaagaaaccattgagaagatgcaggaataaagtaatcttatatacaagctttgattaaaacttgaaacaaagaaaaaaaaaacaaaaaaaaaaaaaaaaaaaaaacaaaaaaaaaaaaaaggggggggggcgcaaaaaaaacatcccccggagggggaccacactactaagacgagacacccactgatgttaggctgcaaaaaggagggggctcccacagaggagcgcccgacaatataaaggaacaaggacgacacacgcgcgcggattaaaaccaagcgtcgacgacggcggaacaacacatggccacgggggcagcctgtggcggaaaggcaccctatatctgggggggcgcacaccgcgggcgacccacactcagacagaaatgacaccgtccgcggacacaacaaccacaaggcaacgcggtacaacaggcgactatcgcgcggcgc

SEQ ID NO: 163741 - DNA, 1232 bp, Homo sapiens
actagttctagatcggagcggctgcccttttttgtgttttttaaataaaatgtcagatgcaaaaatgctgcacttatttctcttaatacattgaaaatagtggaagatgcagattttaatccttcatgagtccaagctggaacatgacttctgctaatcagatgtcatcaacatagcgaactccaactttgcggccatcaccgaagcgggagcggccaaaatgaagtttaatccctttgtgacttccgaccgaagcaagaatcgcaaaaggcatttcaatgcaccttcccacattcgaaggaagattatgtcttcccctctttccaaagagctgagacagaagtacaacgtgcgatccatgcccatccgaaaggatgatgaagttcaggttgtacgtggacactataaaggtcagcaaattggcaaagtagtccaggtttacaggaagaaatatgttatctacattgaacgggtgcagcgggaaaaggctaatggcacaactgtccacgtaggcattcaccccagcaaggtggttatcactaggctaaaactggacaaagaccgcaaaaagatcctcgaacggaaagccaaatctcgccaagtaggaaaggaaaagggcaaatacaaggaagaaaccattgagaagatgcaggaataaagtaatcttatatacaagctttgattaaaacttgaaacaaagaaaaaaaaaacaaaaaaaaaaaaaaaaaaaaaacaaaaaaaaaaaaaaacaaaaaaacaaagcaaaaccaacggacgcacccccaacaaaaaacagacaaaaaggggggggcgagtcccaaagaaagaccaagcaaaggacggacacaacgcgagcacacagcaaaacacaaacacaagaaagcacgcgcacaacacgagagaagaaatctaacagctcgagaggagaaacacagaccgcccaaccggctgagtgcacacacaaccctgccgctaacatcagcgagagaagaccacacagcgcgcagcaaacagcagcaagcaacacagaaacaaaaagcgagcgacaggcagatccacccgaacaaacgaaagacaactgtgaacaagtgagagagcacaagaaacacaagcctacgcacacaaaaaaatgcaacgcgacaacataacagaacagccacgcaatcagcagaaacacgaacgaccaacgacagacgacacaagcaacgtcacgatcgacacagacgacctga

SEQ ID NO: 163742 - DNA, 1049 bp, Homo sapiens
  misc_feature (789)..(789): n is a, c, g, or t
  misc_feature (792)..(792): n is a, c, g, or t
  misc_feature (801)..(801): n is a, c, g, or t
  misc_feature (803)..(803): n is a, c, g, or t
  misc_feature (813)..(813): n is a, c, g, or t
  misc_feature (826)..(826): n is a, c, g, or t
  misc_feature (832)..(832): n is a, c, g, or t
  misc_feature (840)..(840): n is a, c, g, or t
  misc_feature (847)..(847): n is a, c, g, or t
actagttctagatcggagcggctgcccttttttgtgttttttaaataaaatgtcagatgcaaaaatgctgcacttatttctcttaatacattgaaaatagtggaagatgcagattttaatccttcatgagtccaagctggaacatgacttctgctaatcagatgtcatcaacatagcgaactccaactttgcggccatcaccgaagcgggagcggccaaaatgaagtttaatccctttgtgacttccgaccgaagcaagaatcgcaaaaggcatttcaatgcaccttcccacattcgaaggaagattatgtcttcccctctttccaaagagctgagacagaagtacaacgtgcgatccatgcccatccgaaaggatgatgaagttcaggttgtacgtggacactataaaggtcagcaaattggcaaagtagtccaggtttacaggaagaaatatgttatctacattgaacgggtgcagcgggaaaaggctaatggcacaactgtccacgtaggcattcaccccagcaaggtggttatcactaggctaaaactggacaaagaccgcaaaaagatcctcgaacggaaagccaaatctcgccaagtaggaaaggaaaagggcaaatacaaggaagaaaccattgagaagatgcaggaataaagtaatcttatatacaagctttgattaaaacttgaaacaaagaaaaaaaaaacaaaaaaaaaaaaaaaaaaaaaacaaaaaaaaaaaaaaaaaaaaaaaaaaaaaaaacatggtgggccgccttggcccantcnattttagantngggcaagctntgcttgcggcccnattcgngctacttngccattngccctatagggaggcgattaaattactgggcgggttttacaacggggggcggggaaacctggcgtacccattaaaggcctggagaaaatcccttttccggggggggaaaaagaaaagcccccccccaccccttttcaaaagtggcagcctgatggggaaggaaatttcccgtaatttttgtaaaaacccggaaatttttgaa

SEQ ID NO: 163743 - DNA, 984 bp, Homo sapiens
agcggccgccttttttggtacttctagcccaccggcttgggggctaggttggctccatcttccccatggccctgggcctgagaatagtgggcaactccaggggaatggtatggcaaggctgcagccttggggctgcaactcctcactcaggagtctgcctctagacatctccctggtgggtattggcattaggggtagaacccgggcttgcctgacagtctgagggctgtttggccaaattgggtgtgcgatggtctgcaactggagtgtcacctcacttgactgaatggtggtggtgagctcaccccattactgtgtgtggatgtctgctgagctgtgtagagtgggagtgtccctgggtgactttggggtgggtgtagagaagaaacaggcaagcgggaagtgaggggctaggacttcccagaaaaattacagggcatactaggagcttgactggggttctcttcccttttgcggccatcaccgaagcgggagcggccaaaatgaagtttaatccctttgtgacttccgaccgaagcaagaatcgcaaaaggcatttcaatgcaccttcccacattcgaaggaagattatgtcttcccctctttccaaagagctgagacagaagtacaacgtgcgatccatgcccatccgaaaggatgatgaagttcaggttgtacgtggacactataaaggtcagcaaattggcaaagtagtccaggtttacaggaagaaatatgttatctacattgaacgggtgcagcgggaaaaggctaatggcacaactgtccacgtaggcattcaccccagcaaggtggttatcactaggctaaaactggacaaagaccgcaaaaagatcctcgaacggaaagccaaatctcgccaagtaggaaaggaaaagggcaaatacaaggaagaaaccattgagaagatgcaggaataaagtaatcttatatacaagctttgattaaaacttgaaacaaaga

SEQ ID NO: 163744 - DNA, 670 bp, Homo sapiens
gaaaatatgcaaacactctgtgatcaaacttaaaagtcattgccattcatcattaataaaagttgccatttcaactacgtcccaacattccctaatagggtattcagggaacctgtcttaaattgtatttagtctaatacattctcctcccctagctcaaagttccaagatttagataagccggccaaaatgaagtttaatccctttgtgacttccgaccgaagcaagaatcgcaaaaggcatttcaatgcaccttcccacattcgaaggaagattatgtcttcccctctttccaaagagctgagacagaagtacaacgtgcgatccatgcccatccgaaaggatgatgaagttcaggttgtacgtggacactataaaggtcagcaaattggcaaagtagtccaggtttacaggaagaaatatgttatctacattgaacgggtgcagcgggaaaaggctaatggcacaactgtccacgtaggcattcaccccagcaaggtggttatcactaggctaaaactggacaaagaccgcaaaaagatcctcgaacggaaagccaaatctcgccaagtaggaaaggaaaagggcaaatacaaggaagaaaccattgagaagatgcaggaataaagtaatcttatatacaagctttgattaaaacttgaaacaaaga

SEQ ID NO: 163745 - DNA, 1279 bp, Homo sapiens
agcggccgccttttttggtacttctagcccaccggcttgggggctaggttggctccatcttccccatggccctgggcctgagaatagtgggcaactccaggggaatggtatggcaaggctgcagccttggggctgcaactcctcactcaggagtctgcctctagacatctccctggtgggtattggcattaggggtagaacccgggcttgcctgacagtctgagggctgtttggccaaattgggtgtgcgatggtctgcaactggagtgtcacctcacttgactgaatggtggtggtgagctcaccccattactgtgtgtggatgtctgctgagctgtgtagagtgggagtgtccctgggtgactttggggtgggtgtagagaagaaacaggcaagcgggaagtgaggggctaggacttcccagaaaaattacagggcatactaggagcttgactggggttctcttcccttttgcggccatcaccgaagcgggagcgggtaaggattcggcgggcaagcgggtgtaatcagcagccatccgttcttgggcatggtggcttccgaccgcggggaccccgagagtctcttgtcggccgagtagcagccaggaaggagagactgggatggttttttatctgttgctttcttaaatcaagggccgccgggccggagatggatggagggaccggggatttgggaactcgaaaacgagctgagggaagggagcctgtggaaatagactggagtctgggtagtgtcgtttcctagagaatggtctcgaagtaacttctcgccaaaatgaagtttaatccctttgtgacttccgaccgaagcaagaatcgcaaaaggcatttcaatgcaccttcccacattcgaaggaagattatgtcttcccctctttccaaagagctgagacagaagtacaacgtgcgatccatgcccatccgaaaggatgatgaagttcaggttgtacgtggacactataaaggtcagcaaattggcaaagtagtccaggtttacaggaagaaatatgttatctacattgaacgggtgcagcgggaaaaggctaatggcacaactgtccacgtaggcattcaccccagcaaggtggttatcactaggctaaaactggacaaagaccgcaaaaagatcctcgaacggaaagccaaatctcgccaagtaggaaaggaaaagggcaaatacaaggaagaaaccattgagaagatgcaggaataaagtaatcttatatacaagctttgattaaaacttgaaacaaaga

SEQ ID NO: 163746 - DNA, 526 bp, Homo sapiens
gggctgcatggaattggacacgagccgaagcggggacggcccaaaatgaagtttaatccctttgtgacttccgaccgaagcaagaatcgcaaaaggcatttcaatgcaccttcccacattcgaaggaagattatgtcttcccctctttccaaagagctgagacagaagtacaacgtgcgatccatgcccatccgaaaggatgatgaagttcaggttgtacgtggacactataaaggtcagcaaattggcaaagtagtccaggtttacaggaagaaatatgttatctacattgaacgggtgcagcgggaaaaggctaatggcacaactgtccacgtaggcattcaccccagcaaggtggttatcactaggctaaaactggacaaagaccgcaaaaagatcctcgaacggaaagccaaatctcgccaagtaggaaaggaaaagggcaaatacaaggaagaaaccattgagaagatgcaggaataaagtaatcttatatacaagctttgattaaaacttgaaacaaaga

SEQ ID NO: 163747 - DNA, 1018 bp, Homo sapiens
taaatttatttcccagtttactcccctcgctcaaactccgcgcccctctcgctccgagagacataggtctcgcgagatctttggtaaacttacagaaccggaagcagcgtgtagttctcttcccttttgcggccatcaccgaagcgggagcggccaaaatgaagtttaatccctttgtgacttccgaccgaagcaagaatcgcaaaaggcatttcaatgcaccttcccacattcgaaggaagattatgtcttcccctctttccaaagagctgagacagaagtacaacgtgcgatccatgcccatccgaaaggatgatgaagttcaggttgtacgtggacactataaaggtcagcaaattggcaaagtagtccaggtttacaggaagaaatatgttatctacattgaacgggtgcagcgggaaaaggctaatggcacaactgtccacgtaggcattcaccccagcaaggtggttatcactaggctaaaactggacaaagaccgcaaaaagatcctcgaacggaaagccaaatctcgccaagtaggaaaggaaaagggcaaatacaaggaagaaaccattgagaagatgcaggaataaagtaatcttatatacaagctttgattaaaacttgaaacaaagaaaaaaaaaacaaaaaaaaaaaaaaaaaaaaaacaaaaaaaaaaaaaaggggggggggcgcaaaaaaaacatcccccggagggggaccacactactaagacgagacacccactgatgttaggctgcaaaaaggagggggctcccacagaggagcgcccgacaatataaaggaacaaggacgacacacgcgcgcggattaaaaccaagcgtcgacgacggcggaacaacacatggccacgggggcagcctgtggcggaaaggcaccctatatctgggggggcgcacaccgcgggcgacccacactcagacagaaatgacaccgtccgcggacacaacaaccacaaggcaacgcggtacaacaggcgactatcgcgcggcgc

SEQ ID NO: 163748 - DNA, 928 bp, Homo sapiens
cacttggctcgcagctgtctcactagcccgtcccttttgcggccatcaccgaagcgggagcggccaaaatgaagtttaatccctttgtgacttccgaccgaagcaagaatcgcaaaaggcatttcaatgcaccttcccacattcgaaggaagattatgtcttcccctctttccaaagagctgagacagaagtacaacgtgcgatccatgcccatccgaaaggatgatgaagttcaggttgtacgtggacactataaaggtcagcaaattggcaaagtagtccaggtttacaggaagaaatatgttatctacattgaacgggtgcagcgggaaaaggctaatggcacaactgtccacgtaggcattcaccccagcaaggtggttatcactaggctaaaactggacaaagaccgcaaaaagatcctcgaacggaaagccaaatctcgccaagtaggaaaggaaaagggcaaatacaaggaagaaaccattgagaagatgcaggaataaagtaatcttatatacaagctttgattaaaacttgaaacaaagaaaaaaaaaacaaaaaaaaaaaaaaaaaaaaaacaaaaaaaaaaaaaaggggggggggcgcaaaaaaaacatcccccggagggggaccacactactaagacgagacacccactgatgttaggctgcaaaaaggagggggctcccacagaggagcgcccgacaatataaaggaacaaggacgacacacgcgcgcggattaaaaccaagcgtcgacgacggcggaacaacacatggccacgggggcagcctgtggcggaaaggcaccctatatctgggggggcgcacaccgcgggcgacccacactcagacagaaatgacaccgtccgcggacacaacaaccacaaggcaacgcggtacaacaggcgactatcgcgcggcgc

SEQ ID NO: 163749 - DNA, 766 bp, Homo sapiens
  misc_feature (709)..(709): n is a, c, g, or t
  misc_feature (713)..(713): n is a, c, g, or t
actagttctagatcggagcggctgcccttttttgtgttttttaaataaaatgtcagatgcaaaaatgctgcacttatttctcttaatacattgaaaatagtggaagatgcagattttaatccttcatgagtccaagctggaacatgacttctgctaatcagatgtcatcaacatagcgaactccaactttgcggccatcaccgaagcgggagcggccaaaatgaagtttaatccctttgtgacttccgaccgaagcaagaatcgcaaaaggcatttcaatgcaccttcccacattcgaaggaagattatgtcttcccctctttccaaagagctgagacagaagtacaacgtgcgatccatgcccatccgaaaggatgatgaagttcaggttgtacgtggacactataaaggtcagcaaattggcaaagtagtccaggtttacaggaagaaatatgttatctacattgaacgggtgcagcgggaaaaggctaatggcacaactgtccacgtaggcattcaccccagcaaggtggttatcactaggctaaaactggacaaagaccgcaaaaagatcctcgaacggaaagccaaatctcgccaagtaggaaaggaaaagggcaaatacaaggaagaaaccattgagaagatgcaggaataaagtaatcttatatacaagctttgattaaaacttgaaacaaagaaaaacaanaaanaaacaaacaaaacacacaaaatgtgggcgcaacgcgccccaaacattcaagcc

SEQ ID NO: 163750 - DNA, 867 bp, Homo sapiens
  misc_feature (711)..(712): n is a, c, g, or t
  misc_feature (714)..(714): n is a, c, g, or t
  misc_feature (716)..(716): n is a, c, g, or t
actagttctagatcggagcggctgcccttttttgtgttttttaaataaaatgtcagatgcaaaaatgctgcacttatttctcttaatacattgaaaatagtggaagatgcagattttaatccttcatgagtccaagctggaacatgacttctgctaatcagatgtcatcaacatagcgaactccaactttgcggccatcaccgaagcgggagcggccaaaatgaagtttaatccctttgtgacttccgaccgaagcaagaatcgcaaaaggcatttcaatgcaccttcccacattcgaaggaagattatgtcttcccctctttccaaagagctgagacagaagtacaacgtgcgatccatgcccatccgaaaggatgatgaagttcaggttgtacgtggacactataaaggtcagcaaattggcaaagtagtccaggtttacaggaagaaatatgttatctacattgaacgggtgcagcgggaaaaggctaatggcacaactgtccacgtaggcattcaccccagcaaggtggttatcactaggctaaaactggacaaagaccgcaaaaagatcctcgaacggaaagccaaatctcgccaagtaggaaaggaaaagggcaaatacaaggaagaaaccattgagaagatgcaggaataaagtaatcttatatacaagctttgattaaaacttgaaacaaagaaaaaaaaaannananctcgaattcggcacgagtctccctatcaggagttcactgaccacctcgtcaagacccacaccagagtctccgtgcagcggactcaggctccagctgtggctacaacatagggtttttatacaagaaaaataaagtgaattaatcgtgaaaa

SEQ ID NO: 163751 - DNA, 826 bp, Homo sapiens
actagttctagatcggagcggctgcccttttttgtgttttttaaataaaatgtcagatgcaaaaatgctgcacttatttctcttaatacattgaaaatagtggaagatgcagattttaatccttcatgagtccaagctggaacatgacttctgctaatcagatgtcatcaacatagcgaactccaactttgcggccatcaccgaagcgggagcggccaaaatgaagtttaatccctttgtgacttccgaccgaagcaagaatcgcaaaaggcatttcaatgcaccttcccacattcgaaggaagattatgtcttcccctctttccaaagagctgagacagaagtacaacgtgcgatccatgcccatccgaaaggatgatgaagttcaggttgtacgtggacactataaaggtcagcaaattggcaaagtagtccaggtttacaggaagaaatatgttatctacattgaacgggtgcagcgggaaaaggctaatggcacaactgtccacgtaggcattcaccccagcaaggtggttatcactaggctaaaactggacaaagaccgcaaaaagatcctcgaacggaaagccaaatctcgccaagtaggaaaggaaaagggcaaatacaaggaagaaaccattgagaagatgcaggaataaagtaatcttatatacaagctttgattaaaacttgaaacaaagaaaaagaaacaccacgaacaaaacctttttgtggccggctcggccccggaaaaattttcttaaacccctccgtgggggccggggcccccggggttagtacaccgcggccaaaccggtcccaggaac

SEQ ID NO: 163752 - DNA, 959 bp, Homo sapiens
  misc_feature (744)..(744): n is a, c, g, or t
  misc_feature (747)..(747): n is a, c, g, or t
  misc_feature (756)..(756): n is a, c, g, or t
  misc_feature (758)..(758): n is a, c, g, or t
  misc_feature (768)..(768): n is a, c, g, or t
  misc_feature (781)..(781): n is a, c, g, or t
  misc_feature (787)..(787): n is a, c, g, or t
  misc_feature (795)..(795): n is a, c, g, or t
  misc_feature (802)..(802): n is a, c, g, or t
actagttctagatcggagcggctgcccttttttgtgttttttaaataaaatgtcagatgcaaaaatgctgcacttatttctcttaatacattgaaaatagtggaagatgcagattttaatccttcatgagtccaagctggaacatgacttctgctaatcagatgtcatcaacatagcgaactccaactttgcggccatcaccgaagcgggagcggccaaaatgaagtttaatccctttgtgacttccgaccgaagcaagaatcgcaaaaggcatttcaatgcaccttcccacattcgaaggaagattatgtcttcccctctttccaaagagctgagacagaagtacaacgtgcgatccatgcccatccgaaaggatgatgaagttcaggttgtacgtggacactataaaggtcagcaaattggcaaagtagtccaggtttacaggaagaaatatgttatctacattgaacgggtgcagcgggaaaaggctaatggcacaactgtccacgtaggcattcaccccagcaaggtggttatcactaggctaaaactggacaaagaccgcaaaaagatcctcgaacggaaagccaaatctcgccaagtaggaaaggaaaagggcaaatacaaggaagaaaccattgagaagatgcaggaataaagtaatcttatatacaagctttgattaaaacttgaaacaaagaaaaaaaaaaaaaaaaaaaaacatggtgggccgccttggcccantcnattttagantngggcaagctntgcttgcggcccnattcgngctacttngccattngccctatagggggtggtattaaaaataacgtgccgtggttttcaaacgttggaatgggaaaaacccttgtgttccccaatttaaatgggtatggagcaaaatccccttttgccaatttgggtaaaaaaaaaagagccccacccgatgtctttttcaa

SEQ ID NO: 163753 - DNA, 1267 bp, Homo sapiens
actagttctagatcggagcggctgcccttttttgtgttttttaaataaaatgtcagatgcaaaaatgctgcacttatttctcttaatacattgaaaatagtggaagatgcagattttaatccttcatgagtccaagctggaacatgacttctgctaatcagatgtcatcaacatagcgaactccaactttgcggccatcaccgaagcgggagcggccaaaatgaagtttaatccctttgtgacttccgaccgaagcaagaatcgcaaaaggcatttcaatgcaccttcccacattcgaaggaagattatgtcttcccctctttccaaagagctgagacagaagtacaacgtgcgatccatgcccatccgaaaggatgatgaagttcaggttgtacgtggacactataaaggtcagcaaattggcaaagtagtccaggtttacaggaagaaatatgttatctacattgaacgggtgcagcgggaaaaggctaatggcacaactgtccacgtaggcattcaccccagcaaggtggttatcactaggctaaaactggacaaagaccgcaaaaagatcctcgaacggaaagccaaatctcgccaagtaggaaaggaaaagggcaaatacaaggaagaaaccattgagaagatgcaggaataaagtaatcttatatacaagctttgattaaaacttgaaacaaagaaaaaaaaaaaaaaaaaaaaaaaaaaaaaaaacaaaaaaaaaaaacaaaaaaaaaaaaaaaaaaaaaacaaaaaaaaaaaaaaacaaaaaaacaaagcaaaaccaacggacgcacccccaacaaaaaacagacaaaaaggggggggcgagtcccaaagaaagaccaagcaaaggacggacacaacgcgagcacacagcaaaacacaaacacaagaaagcacgcgcacaacacgagagaagaaatctaacagctcgagaggagaaacacagaccgcccaaccggctgagtgcacacacaaccctgccgctaacatcagcgagagaagaccacacagcgcgcagcaaacagcagcaagcaacacagaaacaaaaagcgagcgacaggcagatccacccgaacaaacgaaagacaactgtgaacaagtgagagagcacaagaaacacaagcctacgcacacaaaaaaatgcaacgcgacaacataacagaacagccacgcaatcagcagaaacacgaacgaccaacgacagacgacacaagcaacgtcacgatcgacacagacgacctga

SEQ ID NO: 163754 - DNA, 1272 bp, Homo sapiens
  misc_feature (708)..(708): n is a, c, g, or t
actagttctagatcggagcggctgcccttttttgtgttttttaaataaaatgtcagatgcaaaaatgctgcacttatttctcttaatacattgaaaatagtggaagatgcagattttaatccttcatgagtccaagctggaacatgacttctgctaatcagatgtcatcaacatagcgaactccaactttgcggccatcaccgaagcgggagcggccaaaatgaagtttaatccctttgtgacttccgaccgaagcaagaatcgcaaaaggcatttcaatgcaccttcccacattcgaaggaagattatgtcttcccctctttccaaagagctgagacagaagtacaacgtgcgatccatgcccatccgaaaggatgatgaagttcaggttgtacgtggacactataaaggtcagcaaattggcaaagtagtccaggtttacaggaagaaatatgttatctacattgaacgggtgcagcgggaaaaggctaatggcacaactgtccacgtaggcattcaccccagcaaggtggttatcactaggctaaaactggacaaagaccgcaaaaagatcctcgaacggaaagccaaatctcgccaagtaggaaaggaaaagggcaaatacaaggaagaaaccattgagaagatgcaggaataaagtaatcttatatacaagctttgattaaaacttgaaacaaagaaaaaaanaaaaaaaaaaaaaaaaaaaaaaaaaaaaaaaaaaaaaaaaaacaaaaaaaaaaaaaaaaaaaaaacaaaaaaaaaaaaaaacaaaaaaacaaagcaaaaccaacggacgcacccccaacaaaaaacagacaaaaaggggggggcgagtcccaaagaaagaccaagcaaaggacggacacaacgcgagcacacagcaaaacacaaacacaagaaagcacgcgcacaacacgagagaagaaatctaacagctcgagaggagaaacacagaccgcccaaccggctgagtgcacacacaaccctgccgctaacatcagcgagagaagaccacacagcgcgcagcaaacagcagcaagcaacacagaaacaaaaagcgagcgacaggcagatccacccgaacaaacgaaagacaactgtgaacaagtgagagagcacaagaaacacaagcctacgcacacaaaaaaatgcaacgcgacaacataacagaacagccacgcaatcagcagaaacacgaacgaccaacgacagacgacacaagcaacgtcacgatcgacacagacgacctga

SEQ ID NO: 163755 - DNA, 1291 bp, Homo sapiens
  misc_feature (708)..(708): n is a, c, g, or t
actagttctagatcggagcggctgcccttttttgtgttttttaaataaaatgtcagatgcaaaaatgctgcacttatttctcttaatacattgaaaatagtggaagatgcagattttaatccttcatgagtccaagctggaacatgacttctgctaatcagatgtcatcaacatagcgaactccaactttgcggccatcaccgaagcgggagcggccaaaatgaagtttaatccctttgtgacttccgaccgaagcaagaatcgcaaaaggcatttcaatgcaccttcccacattcgaaggaagattatgtcttcccctctttccaaagagctgagacagaagtacaacgtgcgatccatgcccatccgaaaggatgatgaagttcaggttgtacgtggacactataaaggtcagcaaattggcaaagtagtccaggtttacaggaagaaatatgttatctacattgaacgggtgcagcgggaaaaggctaatggcacaactgtccacgtaggcattcaccccagcaaggtggttatcactaggctaaaactggacaaagaccgcaaaaagatcctcgaacggaaagccaaatctcgccaagtaggaaaggaaaagggcaaatacaaggaagaaaccattgagaagatgcaggaataaagtaatcttatatacaagctttgattaaaacttgaaacaaagaaaaaaanaaaaaaaaaaaaaaaaaaaaaaaaaaaaaaaaaaaaaaaaaaaaaaaacaaaaaaaaaaaacaaaaaaaaaaaaaaaaaaaaaacaaaaaaaaaaaaaaacaaaaaaacaaagcaaaaccaacggacgcacccccaacaaaaaacagacaaaaaggggggggcgagtcccaaagaaagaccaagcaaaggacggacacaacgcgagcacacagcaaaacacaaacacaagaaagcacgcgcacaacacgagagaagaaatctaacagctcgagaggagaaacacagaccgcccaaccggctgagtgcacacacaaccctgccgctaacatcagcgagagaagaccacacagcgcgcagcaaacagcagcaagcaacacagaaacaaaaagcgagcgacaggcagatccacccgaacaaacgaaagacaactgtgaacaagtgagagagcacaagaaacacaagcctacgcacacaaaaaaatgcaacgcgacaacataacagaacagccacgcaatcagcagaaacacgaacgaccaacgacagacgacacaagcaacgtcacgatcgacacagacgacctga

SEQ ID NO: 163756 - DNA, 733 bp, Homo sapiens
actagttctagatcggagcggctgcccttttttgtgttttttaaataaaatgtcagatgcaaaaatgctgcacttatttctcttaatacattgaaaatagtggaagatgcagattttaatccttcatgagtccaagctggaacatgacttctgctaatcagatgtcatcaacatagcgaactccaactttgcggccatcaccgaagcgggagcggccaaaatgaagtttaatccctttgtgacttccgaccgaagcaagaatcgcaaaaggcatttcaatgcaccttcccacattcgaaggaagattatgtcttcccctctttccaaagagctgagacagaagtacaacgtgcgatccatgcccatccgaaaggatgatgaagttcaggttgtacgtggacactataaaggtcagcaaattggcaaagtagtccaggtttacaggaagaaatatgttatctacattgaacgggtgcagcgggaaaaggctaatggcacaactgtccacgtaggcattcaccccagcaaggtggttatcactaggctaaaactggacaaagaccgcaaaaagatcctcgaacggaaagccaaatctcgccaagtaggaaaggaaaagggcaaatacaaggaagaaaccattgagaagatgcaggaataaagtaatcttatatacaagctttgattaaaacttgaaacaaagaacaaaaaaaaaaggatggcctcgctggcctca

SEQ ID NO: 163757 - DNA, 1037 bp, Homo sapiens
  misc_feature (777)..(777): n is a, c, g, or t
  misc_feature (780)..(780): n is a, c, g, or t
  misc_feature (789)..(789): n is a, c, g, or t
  misc_feature (791)..(791): n is a, c, g, or t
  misc_feature (801)..(801): n is a, c, g, or t
  misc_feature (814)..(814): n is a, c, g, or t
  misc_feature (820)..(820): n is a, c, g, or t
  misc_feature (828)..(828): n is a, c, g, or t
  misc_feature (835)..(835): n is a, c, g, or t
actagttctagatcggagcggctgcccttttttgtgttttttaaataaaatgtcagatgcaaaaatgctgcacttatttctcttaatacattgaaaatagtggaagatgcagattttaatccttcatgagtccaagctggaacatgacttctgctaatcagatgtcatcaacatagcgaactccaactttgcggccatcaccgaagcgggagcggccaaaatgaagtttaatccctttgtgacttccgaccgaagcaagaatcgcaaaaggcatttcaatgcaccttcccacattcgaaggaagattatgtcttcccctctttccaaagagctgagacagaagtacaacgtgcgatccatgcccatccgaaaggatgatgaagttcaggttgtacgtggacactataaaggtcagcaaattggcaaagtagtccaggtttacaggaagaaatatgttatctacattgaacgggtgcagcgggaaaaggctaatggcacaactgtccacgtaggcattcaccccagcaaggtggttatcactaggctaaaactggacaaagaccgcaaaaagatcctcgaacggaaagccaaatctcgccaagtaggaaaggaaaagggcaaatacaaggaagaaaccattgagaagatgcaggaataaagtaatcttatatacaagctttgattaaaacttgaaacaaagaaaaaaaaaaaaaaaagacaaaaataagaaaataaaaaaaaaaaaaaaaaaaaacatggtgggccgccttggcccantcnattttagantngggcaagctntgcttgcggcccnattcgngctacttngccattngccctatagggaggcgattaaattactgggcgggttttacaacggggggcggggaaacctggcgtacccattaaaggcctggagaaaatcccttttccggggggggaaaaagaaaagcccccccccaccccttttcaaaagtggcagcctgatggggaaggaaatttcccgtaatttttgtaaaaacccggaaatttttgaa

SEQ ID NO: 163758 - DNA, 693 bp, Homo sapiens
actagttctagatcggagcggctgcccttttttgtgttttttaaataaaatgtcagatgcaaaaatgctgcacttatttctcttaatacattgaaaatagtggaagatgcagattttaatccttcatgagtccaagctggaacatgacttctgctaatcagatgtcatcaacatagcgaactccaactttgcggccatcaccgaagcgggagcggccaaaatgaagtttaatccctttgtgacttccgaccgaagcaagaatcgcaaaaggcatttcaatgcaccttcccacattcgaaggaagattatgtcttcccctctttccaaagagctgagacagaagtacaacgtgcgatccatgcccatccgaaaggatgatgaagttcaggttgtacgtggacactataaaggtcagcaaattggcaaagtagtccaggtttacaggaagaaatatgttatctacattgaacgggtgcagcgggaaaaggctaatggcacaactgtccacgtaggcattcaccccagcaaggtggttatcactaggctaaaactggacaaagaccgcaaaaagatcctcgaacggaaagccaaatctcgccaagtaggaaaggaaaagggcaaatacaaggaagaaagcttgtatataagattactttattactgcatattctcaatggtttcttcatgtcgagc

SEQ ID NO: 163759 - DNA, 1045 bp, Homo sapiens
taaatttatttcccagtttactcccctcgctcaaactccgcgcccctctcgctccgagagacataggtctcgcgagatctttggtaaacttacagaaccggaagcagcgtgtagttctcttcccttttgcggccatcaccgaagcgggagcggccaaaatgaagtttaatccctttgtgacttccgaccgaagcaagaatcgcaaaaggcatttcaatgcaccttcccacattcgaaggaagattatgtcttcccctctttccaaagagctgagacagaagtacaacgtgcgatccatgcccatccgaaaggatgatgaagttcaggttgtacgtggacactataaaggtcagcaaattggcaaagtagtccaggtttacaggaagaaatatgttatctacattgaacgggtgcagcgggaaaaggctaatggcacaactgtccacgtaggcattcaccccagcaaggtggttatcactaggctaaaactggacaaagaccgcaaaaagatcctcgaacggaaagccaaatctcgccaagtaggaaaggaaaagggcaaatacaaggaagaaaccattgagaagatgcaggaataaagtaatcttatatacaagctttgattaaaacttgaaacaaagacaaacacaaaaaaaacaaaaggaaaaaaaaaaaaaacaaaaaaaaaaaaaaaaaaaaaacaaaaaaaaaaaaaaggggggggggcgcaaaaaaaacatcccccggagggggaccacactactaagacgagacacccactgatgttaggctgcaaaaaggagggggctcccacagaggagcgcccgacaatataaaggaacaaggacgacacacgcgcgcggattaaaaccaagcgtcgacgacggcggaacaacacatggccacgggggcagcctgtggcggaaaggcaccctatatctgggggggcgcacaccgcgggcgacccacactcagacagaaatgacaccgtccgcggacacaacaaccacaaggcaacgcggtacaacaggcgactatcgcgcggcgc

SEQ ID NO: 163760 - DNA, 1658 bp, Homo sapiens
  misc_feature (1658)..(1658): n is a, c, g, or t
agcggccgccttttttggtacttctagcccaccggcttgggggctaggttggctccatcttccccatggccctgggcctgagaatagtgggcaactccaggggaatggtatggcaaggctgcagccttggggctgcaactcctcactcaggagtctgcctctagacatctccctggtgggtattggcattaggggtagaacccgggcttgcctgacagtctgagggctgtttggccaaattgggtgtgcgatggtctgcaactggagtgtcacctcacttgactgaatggtggtggtgagctcaccccattactgtgtgtggatgtctgctgagctgtgtagagtgggagtgtccctgggtgactttggggtgggtgtagagaagaaacaggcaagcgggaagtgaggggctaggacttcccagaaaaattacagggcatactaggagcttgactggggttctcttcccttttgcggccatcaccgaagcgggagcgggtaaggattcggcgggcaagcgggtgtaatcagcagccatccgttcttgggcatggtggcttccgaccgcggggaccccgagagtctcttgtcggccgagtagcagccaggaaggagagactgggatggttttttatctgttgctttcttaaatcaagggccgccgggccggagatggatggagggaccggggatttgggaactcgaaaacgagctgagggaagggagcctgtggaaatagactggagtctgggtagtgtcgtttcctagagaatggtctcgaagtaacttctcgccaaaatgaagtttaatccctttgtgacttccgaccgaagcaagaatcgcaaaaggcatttcaatgcaccttcccacattcgaaggaagattatgtcttcccctctttccaaagagctgagacagaagtacaacgtgcgatccatgcccatccgaaaggatgatgaagttcaggttgtacgtggacactataaaggtcagcaaattggcaaagtagtccaggtttacaggaagaaatatgttatctacattgaacgggtgcagcgggaaaaggctaatggcacaactgtccacgtaggcattcaccccagcaaggtggttatcactaggctaaaactggacaaagaccgcaaaaagatcctcgaacggaaagccaaatctcgccaagtaggaaaggaaaagggcaaatacaaggaagaaaccattgagaagatgcaggaataaagtaatcttatatacaagctttgattaaaacttgaaacaaagaaaaaaaaaaaaaaaaattcgcagaaatagttctctctggggcctggagccctgtgtcaaggcctttgaggcccagaatctagaacccaaagcgcctgtgttgcttgttgttgaacaggcctgtgccatgcctagagggttgcggtaatcctcgtggcccacggttaccttggccttggtagtctccagcccagtttttcccaaccaggggtgccctgagtccagaggcttttgtctaaaggttgggggccgttccccttggccaggggcgtttaaaaaatatgggcgcaaagaggggcgaagagcggcttcagattggccacgactgtggcgtgctggttgggcccggacctctccctttggccaaggggagcacgagn

SEQ ID NO: 163761 - DNA, 1096 bp, Homo sapiens
aaatagctagtagagcggtggtaacggcagaggcgaacgggacgccaaaatgaagtttaatccctttgtgacttccgaccgaagcaagaatcgcaaaaggcatttcaatgcaccttcccacattcgaaggaagattatgtcttcccctctttccaaagagctgagacagaagtacaacgtgcgatccatgcccatccgaaaggatgatgaagttcaggttgtacgtggacactataaaggtcagcaaattggcaaagtagtccaggtttacaggaagaaatatgttatctacattgaacgggtgcagcgggaaaaggctaatggcacaactgtccacgtaggcattcaccccagcaaggtggttatcactaggctaaaactggacaaagaccgcaaaaagatcctcgaacggaaagccaaatctcgccaagtaggaaaggaaaagggcaaatacaaggaagaaaccattgagaagatgcaggaataaagtaatcttatatacaagctttgattaaaacttgaaacaaagaaaaaaaaaaaaaaaaaaaaaaaaaaaaaaaacaaaaaaaaaaaacaaaaaaaaaaaaaaaaaaaaaacaaaaaaaaaaaaaaacaaaaaaacaaagcaaaaccaacggacgcacccccaacaaaaaacagacaaaaaggggggggcgagtcccaaagaaagaccaagcaaaggacggacacaacgcgagcacacagcaaaacacaaacacaagaaagcacgcgcacaacacgagagaagaaatctaacagctcgagaggagaaacacagaccgcccaaccggctgagtgcacacacaaccctgccgctaacatcagcgagagaagaccacacagcgcgcagcaaacagcagcaagcaacacagaaacaaaaagcgagcgacaggcagatccacccgaacaaacgaaagacaactgtgaacaagtgagagagcacaagaaacacaagcctacgcacacaaaaaaatgcaacgcgacaacataacagaacagccacgcaatcagcagaaacacgaacgaccaacgacagacgacacaagcaacgtcacgatcgacacagacgacctga

SEQ ID NO: 163762 - DNA, 834 bp, Homo sapiens
  misc_feature (704)..(704): n is a, c, g, or t
actagttctagatcggagcggctgcccttttttgtgttttttaaataaaatgtcagatgcaaaaatgctgcacttatttctcttaatacattgaaaatagtggaagatgcagattttaatccttcatgagtccaagctggaacatgacttctgctaatcagatgtcatcaacatagcgaactccaactttgcggccatcaccgaagcgggagcggccaaaatgaagtttaatccctttgtgacttccgaccgaagcaagaatcgcaaaaggcatttcaatgcaccttcccacattcgaaggaagattatgtcttcccctctttccaaagagctgagacagaagtacaacgtgcgatccatgcccatccgaaaggatgatgaagttcaggttgtacgtggacactataaaggtcagcaaattggcaaagtagtccaggtttacaggaagaaatatgttatctacattgaacgggtgcagcgggaaaaggctaatggcacaactgtccacgtaggcattcaccccagcaaggtggttatcactaggctaaaactggacaaagaccgcaaaaagatcctcgaacggaaagccaaatcgttggctggcgacacgtgtcgccagccaacaggattccaggaaccagtgtttgatgaagctaggactgaggagcaagcgagcaagcagcagttcgtggtgaagatagganaagagtccaggagccagtgcgatttggtgaaggaagctaggaagaaggaaggagcgctaacgatttggtggtgaagctaggaaaaaggattccaggaaggagcgggtgcaatttggtgatgtaagttgca

SEQ ID NO: 163763 - DNA, 635 bp, Homo sapiens
actagttctagatcggagcggctgcccttttttgtgttttttaaataaaatgtcagatgcaaaaatgctgcacttatttctcttaatacattgaaaatagtggaagatgcagattttaatccttcatgagtccaagctggaacatgacttctgctaatcagatgtcatcaacatagcgaactccaactttgcggccatcaccgaagcgggagcggccaaaatgaagtttaatccctttgtgacttccgaccgaagcaagaatcgcaaaaggcatttcaatgcaccttcccacattcgaaggaagattatgtcttcccctctttccaaagagctgagacagaagtacaacgtgcgatccatgcccatccgaaaggatgatgaagttcaggttgtacgtggacactataaaggtcagcaaattggcaaagtagtccaggtttacaggaagaaatatgttatctacattgaacgggtgcagcgggaaaaggctaatggcacaactgtccacgtaggcattcaccccagcaaggtggttatcactaggctaaaactggacaaagaccgcaaaaagatcctcgaacggaaagccaaatctgaaggcactcgaactgatgacggcatgaaagccctggaca

SEQ ID NO: 163764 - DNA, 909 bp, Homo sapiens
actagttctagatcggagcggctgcccttttttgtgttttttaaataaaatgtcagatgcaaaaatgctgcacttatttctcttaatacattgaaaatagtggaagatgcagattttaatccttcatgagtccaagctggaacatgacttctgctaatcagatgtcatcaacatagcgaactccaactttgcggccatcaccgaagcgggagcggccaaaatgaagtttaatccctttgtgacttccgaccgaagcaagaatcgcaaaaggcatttcaatgcaccttcccacattcgaaggaagattatgtcttcccctctttccaaagagctgagacagaagtacaacgtgcgatccatgcccatccgaaaggatgatgaagttcaggttgtacgtggacactataaaggtcagcaaattggcaaagtagtccaggtttacaggaagaaatatgttatctacattgaacgggtgcagcgggaaaaggctaatggcacaactgtccacgtaggcattcaccccagcaagggttatcactaggctaaaactggacaaagaccgcaaaaagatcctcgaacggaaagccaaatctcgccaagtaggaaaggaaaagggcaaatacaaggaagaaaccattgagaagatgcaggaataaagtaatcttatatacattgaacgggtgcagcgggaaaaggctaatggcacaactgtccacgtaggcattcaccccagcaaggtggttatcactaggctaaaactggacaaagaccgcaaaaagatcctcgaacggaaagccaaatctcgccaagtaggaaaggaaaagggcaaatacaaggaagaaaccattgagaagatgcaggaataaagtaatcttatatacaagctttgattaaaacttgaaacaaaga

SEQ ID NO: 163765 - DNA, 733 bp, Homo sapiens
actagttctagatcggagcggctgcccttttttgtgttttttaaataaaatgtcagatgcaaaaatgctgcacttatttctcttaatacattgaaaatagtggaagatgcagattttaatccttcatgagtccaagctggaacatgacttctgctaatcagatgtcatcaacatagcgaactccaactttgcggccatcaccgaagcgggagcggccaaaatgaagtttaatccctttgtgacttccgaccgaagcaagaatcgcaaaaggcatttcaatgcaccttcccacattcgaaggaagattatgtcttcccctctttccaaagagctgagacagaagtacaacgtgcgatccatgcccatccgaaaggatgatgaagttcaggttgtacgtggacactataaaggtcagcaaattggcaaagtagtccaggtttacaggaagaaatatgttatctacattgaacgggtgcagcgggaaaaggctaatggcacaactgtccacgtaggcattcaccccagcaagcttgggagtgtttttttcttatttttctgcaggtggttatcactaggctaaaactggacaaagaccgcaaaaagatcctcgaacggaaagccaaatctcgccaagtaggaaaggaaaagggcaaatacaaggaagaaaccattgagaagatgcaggaataaagtaatcttatatacaagctttgattaaaacttgaaacaaaga

SEQ ID NO: 163766 - DNA, 1117 bp, Homo sapiens
actagttctagatcggagcggctgcccttttttgtgttttttaaataaaatgtcagatgcaaaaatgctgcacttatttctcttaatacattgaaaatagtggaagatgcagattttaatccttcatgagtccaagctggaacatgacttctgctaatcagatgtcatcaacatagcgaactccaactttgcggccatcaccgaagcgggagcggccaaaatgaagtttaatccctttgtgacttccgaccgaagcaagaatcgcaaaaggcatttcaatgcaccttcccacattcgaaggaagattatgtcttcccctctttccaaagagctgagacagaagtacaacgtgcgatccatgcccatccgaaaggatgatgaagttcaggttgtacgtggacactataaaggtcagcaaattggcaaagtagtccaggtttacaggaagaaatatgttatctacattgaacgggtgcagcgggaaaaggctaatggcacaactgtccacgtaggcattcaccccagcaagggtaggtgtttttgagaatgcttgagagaaggaaattatggcaattattgttgacatgattgtttacagagcaaggccatagaaatagtccttgattttacatgtgctggaaaaaaacattttaaagtaaatactactgcacttgtattgaaaattctaataccatttaaaatgtttctgacatcaaagtgttaacggtcattatgtttctattagtttgtttttgagacagtcttgctctttcacccaggccggagtgcagtggcacagtctcggctcactgcagcctccacctcccaagtgcaagcgattctcccgcctcagcctcctgagtgtagctgtgactacatgcgtgcaccactacacccggctaatttttgtacttcttagtacaaagtttcaccatgttggccaggctggtcttgaactcctgacctcaggtgatttgcctgcctcagcctcctaaagtgctgggattacaggcatgagccaccatgcctgtcccattatgtatattgggcggaggttgcagtgagccgagatcgcaccattgcacttcagcctaggcaacgagtgaaaacgccatct

SEQ ID NO: 163767 - DNA, 1487 bp, Homo sapiens
agcggccgccttttttggtacttctagcccaccggcttgggggctaggttggctccatcttccccatggccctgggcctgagaatagtgggcaactccaggggaatggtatggcaaggctgcagccttggggctgcaactcctcactcaggagtctgcctctagacatctccctggtgggtattggcattaggggtagaacccgggcttgcctgacagtctgagggctgtttggccaaattgggtgtgcgatggtctgcaactggagtgtcacctcacttgactgaatggtggtggtgagctcaccccattactgtgtgtggatgtctgctgagctgtgtagagtgggagtgtccctgggtgactttggggtgggtgtagagaagaaacaggcaagcgggaagtgaggggctaggacttcccagaaaaattacagggcatactaggagcttgactggggttctcttcccttttgcggccatcaccgaagcgggagcgggtaaggattcggcgggcaagcgggtgtaatcagcagccatccgttcttgggcatggtggcttccgaccgcggggaccccgagagtctcttgtcggccgagtagcagccaggaaggagagactgggatggttttttatctgttgctttcttaaatcaagggccgccgggccggagatggatggagggaccggggatttgggaactcgaaaacgagctgagggaagggagcctgtggaaatagactggagtctgggtagtgtcgtttcctagagaatggtctcgaagtaacttctcgccaaaatgaagtttaatccctttgtgacttccgaccgaagcaagaatcgcaaaaggcatttcaatgcaccttcccacattcgaaggaagattatgtcttcccctctttccaaagagctgagacagaagtacaacgtgcgatccatgcccatccgaaaggatgatgaagttcaggttgtacgtggacactataaaggtcagcaaattggcaaagtagtccaggtttacaggaagaaatatgttatctacattgaacgggtgcagcgggaaaaggctaatggcacaactgtccacgtaggcattcaccccagcaagggttatcactaggctaaaactggacaaagaccgcaaaaagatcctcgaacggaaagccaaatctcgccaagtaggaaaggaaaagggcaaatacaaggaagaaaccattgagaagatgcaggaataaagtaatcttatatacattgaacgggtgcagcgggaaaaggctaatggcacaactgtccacgtaggcattcaccccagcaaggtggttatcactaggctaaaactggacaaagaccgcaaaaagatcctcgaacggaaagccaaatctcgccaagtaggaaaggaaaagggcaaatacaaggaagaaaccattgagaagatgcaggaataaagtaatcttatatacaagctttgattaaaacttgaaacaaaga

SEQ ID NO: 163768 - DNA, 734 bp, Homo sapiens
gggctgcatggaattggacacgagccgaagcggggacggcccaaaatgaagtttaatccctttgtgacttccgaccgaagcaagaatcgcaaaaggcatttcaatgcaccttcccacattcgaaggaagattatgtcttcccctctttccaaagagctgagacagaagtacaacgtgcgatccatgcccatccgaaaggatgatgaagttcaggttgtacgtggacactataaaggtcagcaaattggcaaagtagtccaggtttacaggaagaaatatgttatctacattgaacgggtgcagcgggaaaaggctaatggcacaactgtccacgtaggcattcaccccagcaagggttatcactaggctaaaactggacaaagaccgcaaaaagatcctcgaacggaaagccaaatctcgccaagtaggaaaggaaaagggcaaatacaaggaagaaaccattgagaagatgcaggaataaagtaatcttatatacattgaacgggtgcagcgggaaaaggctaatggcacaactgtccacgtaggcattcaccccagcaaggtggttatcactaggctaaaactggacaaagaccgcaaaaagatcctcgaacggaaagccaaatctcgccaagtaggaaaggaaaagggcaaatacaaggaagaaaccattgagaagatgcaggaataaagtaatcttatatacaagctttgattaaaacttgaaacaaaga

SEQ ID NO: 163769 - DNA, 426 bp, Homo sapiens
cacttggctcgcagctgtctcactagcccgtcccttttgcggccatcaccgaagcgggagcggccaaaatgaagtttaatccctttgtgacttccgaccgaagcaagaatcgcaaaaggcatttcaatgcaccttcccacattcgaaggaagattatgtcttcccctctttccaaagagctgagacagaagtacaacgtgcgatccatgcccatccgaaaggatgatgaagttcaggttgtacgtggacactataaaggtcagcaaattggcaaagtagtccaggtttacaggaagaaatatgttatctacattgaacgggtgcagcgggaaaaggctaatggcacaactgtccacgtaggcattcaccccagcaagacaggtgtatactgctaactgacaagccaaaagtctgacgaagcattgc

SEQ ID NO: 163770 - DNA, 1390 bp, Homo sapiens
taaatttatttcccagtttactcccctcgctcaaactccgcgcccctctcgctccgagagacataggtctcgcgagatctttggtaaacttacagaaccggaagcagcgtgtagttctcttcccttttgcggccatcaccgaagcgggagcgggtaaggattcggcgggcaagcgggtgtaatcagcagccatccgttcttgggcatggtggcttccgaccgcggggaccccgagagtctcttgtcggccgagtagcagccaggaaggagagactgggatggttttttatctgttgctttcttaaatcaagggccgccgggccggagatggatggagggaccggggatttgggaactcgaaaacgagctgagggaagggagcctgtggaaatagactggagtctgggtagtgtcgtttcctagagaatggtctcgaagtaacttctcggtaaagtcttcacggaatttccagaccacacttgcccactgggaggcttttaggacccgagacgtgtgcaggcttttccagccaaaatgaagtttaatccctttgtgacttccgaccgaagcaagaatcgcaaaaggcatttcaatgcaccttcccacattcgaaggaagattatgtcttcccctctttccaaagagctgagacagaagtacaacgtgcgatccatgcccatccgaaaggatgatgaagttcaggaggtttcaatgtttggtcattgaagaggcagttgaggaccagtaaacagaattgctcccaatctagattcaggagctgtaactgaagcacagtcacgttatcgtttgcacttacaggttgtacgtggacactataaaggtcagcaaattggcaaagtagtccaggtttacaggaagaaatatgttatctacattgaacgggtgcagcgggaaaaggctaatggcacaactgtccacgtaggcattcaccccagcaaggtggttatcactaggctaaaactggacaaagaccgcaaaaagatcctcgaacggaaagccaaatctcgccaagtaggaaaggaaaagggcaaatacaaggaagaaaccattgagaagatgcaggaataaagtaatcttatatacaagctttgattaaaacttgaaacaaagagaacgaagacacacacaacaacacctcaggggggaccggacccataggcctatggagccaataaatacaggcggagataacagcggcgggcaaccgggtaccagaacccctgcaaatccctcccagcgcgataaagggggaagccatcaaatgccctcagacgatggcgactgaaccgactggccttcaaggggcctaacgggcgcacgagccgcttgcggaggccccccgccccccccccccagcgcccccaccccg

SEQ ID NO: 163771 - DNA, 528 bp, Homo sapiens
actagttctagatcggagcggctgcccttttttgtgttttttaaataaaatgtcagatgcaaaaatgctgcacttatttctcttaatacattgaaaatagtggaagatgcagattttaatccttcatgagtccaagctggaacatgacttctgctaatcagatgtcatcaacatagcgaactccaactttgcggccatcaccgaagcgggagcggccaaaatgaagtttaatccctttgtgacttccgaccgaagcaagaatcgcaaaaggcatttcaatgcaccttcccacattcgaaggaagattatgtcttcccctctttccaaagagctgagacagaagtacaacgtgcgatccatgcccatccgaaaggatgatgaagttcaggttgtacgtggacactataaaggtcagcaaattggcaaagtagtccaggtttacaggaagaaatatgttatctacattgaatggggtgaatgcctacgtggacaattgtgccattagccttttcccgctgcagtcgatgc

SEQ ID NO: 163772 - DNA, 1056 bp, Homo sapiens
taaatttatttcccagtttactcccctcgctcaaactccgcgcccctctcgctccgagagacataggtctcgcgagatctttggtaaacttacagaaccggaagcagcgtgtagttctcttcccttttgcggccatcaccgaagcgggagcgggtaaggattcggcgggcaagcgggtgtaatcagcagccatccgttcttgggcatggtggcttccgaccgcggggaccccgagagtctcttgtcggccgagtagcagccaggaaggagagactgggatggttttttatctgttgctttcttaaatcaagggccgccgggccggagatggatggagggaccggggatttgggaactcgaaaacgagctgagggaagggagcctgtggaaatagactggagtctgggtagtgtcgtttcctagagaatggtctcgaagtaacttctcggtaaagtcttcacggaatttccagaccacacttgcccactgggaggcttttaggacccgagacgtgtgcaggcttttccagccaaaatgaagtttaatccctttgtgacttccgaccgaagcaagaatcgcaaaaggcatttcaatgcaccttcccacattcgaaggaagattatgtcttcccctctttccaaagagctgagacagaagtacaacgtgcgatccatgcccatccgaaaggatgatgaagttcagggtgtgtatccctacttgttctcgttgtcttgatggatattttacgcacttagcttagaagagggattgcattcctgagaaagatgcttctgagactcttgctcccaaagagtggcaagatgagttgagccagggaccaaaaaacagtaagtaagctgcttttcagtttttaattgtattatttggtgaaaatctttttttttttttttttgagatgaagtctcgctcttgtcccccccaggctggagtgcagtggtgccatctcagctcactgcaaccttcgcctcccgggttcaggcgattctcctgcctcagcctcccgagtagctgggattacaagcgcccgccaccacg

SEQ ID NO: 163773 - DNA, 223 bp, Homo sapiens
  misc_feature (29)..(29): n is a, c, g, or t
cagggcttcccaaggatgtccagcccccncacccacacgttaacataatgagtggttatcactaggctaaaactggacaaagaccgcaaaaagatcctcgaacggaaagccaaatctcgccaagtaggaaaggaaaagggcaaatacaaggaagaaaccattgagaagatgcaggaataaagtaatcttatatacaagctttgattaaaacttgaaacaaaga

SEQ ID NO: 163774 - DNA, 207 bp, Homo sapiens
  misc_feature (34)..(34): n is a, c, g, or t
gcggccgactactactaaattcgcgggggcgtcnagtggttatcactaggctaaaactggacaaagaccgcaaaaagatcctcgaacggaaagccaaatctcgccaagtaggaaaggaaaagggcaaatacaaggaagaaaccattgagaagatgcaggaataaagtaatcttatatacaagctttgattaaaacttgaaacaaaga

SEQ ID NO: 163775 - DNA, 528 bp, Homo sapiens
  misc_feature (26)..(26): n is a, c, g, or t
tcagcatccgaaaccccacgcgtcgnccgaagcgggaggcggccaaaatgaagtttaatccctttgtgacttccgaccgaagcaagaatcgcaaaaggcatttcaatgcaccttcccacattcgaaggaagattatgtcttcccctctttccaaagagctgagacagaagtacaacgtgcgatccatgcccatccgaaaggatgatgaagttcaggttgtacgtggacactataaaggtcagcaaattggcaaagtagtccaggtttacaggaagaaatatgttatctacattgaacgggtgcagcgggaaaaggctaatggcacaactgtccacgtaggcattcaccccagcaaggtggttatcactaggctaaaactggacaaagaccgcaaaaagatcctcgaacggaaagccaaatctcgccaagtaggaaaggaaaagggcaaatacaaggaagaaaccattgagaagatgcaggaataaagtaatcttatatacaagctttgattaaaacttgaaacaaaga

SEQ ID NO: 163776 - DNA, 399 bp, Homo sapiens
gcggccgcctactactactactgctcgaattcaagcttctaacgatgtacggggacatgcccatccgaaaggatgatgaagttcaggttgtacgtggacactataaaggtcagcaaattggcaaagtagtccaggtttacaggaagaaatatgttatctacattgaacgggtgcagcgggaaaaggctaatggcacaactgtccacgtaggcattcaccccagcaaggtggttatcactaggctaaaactggacaaagaccgcaaaaagatcctcgaacggaaagccaaatctcgccaagtaggaaaggaaaagggcaaatacaaggaagaaaccattgagaagatgcaggaataaagtaatcttatatacaagctttgattaaaacttgaaacaaaga

SEQ ID NO: 163777 - DNA, 544 bp, Homo sapiens
cggacgcgtgggtcgacccacgcgtcgcccacgcgtccgatcaccgaagcgggagcggccaaaatgaagtttaatccctttgtgacttccgaccgaagcaagaatcgcaaaaggcatttcaatgcaccttcccacattcgaaggaagattatgtcttcccctctttccaaagagctgagacagaagtacaacgtgcgatccatgcccatccgaaaggatgatgaagttcaggttgtacgtggacactataaaggtcagcaaattggcaaagtagtccaggtttacaggaagaaatatgttatctacattgaacgggtgcagcgggaaaaggctaatggcacaactgtccacgtaggcattcaccccagcaaggtggttatcactaggctaaaactggacaaagaccgcaaaaagatcctcgaacggaaagccaaatctcgccaagtaggaaaggaaaagggcaaatacaaggaagaaaccattgagaagatgcaggaataaagtaatcttatatacaagctttgattaaaacttgaaacaaaga

SEQ ID NO: 163778 - DNA, 639 bp, Homo sapiens
taaatttatttcccagtttactcccctcgctcaaactccgcgcccctctcgctccgagagacataggtctcgcgagatctttggtaaacttacagaaccggaagcagcgtgtagttctcttcccttttgcggccatcaccgaagcgggagcggccaaaatgaagtttaatccctttgtgacttccgaccgaagcaagaatcgcaaaaggcatttcaatgcaccttcccacattcgaaggaagattatgtcttcccctctttccaaagagctgagacagaagtacaacgtgcgatccatgcccatccgaaaggatgatgaagttcaggttgtacgtggacactataaaggtcagcaaattggcaaagtagtccaggtttacaggaagaaatatgttatctacattgaacgggtgcagcgggaaaaggctaatggcacaactgtccacgtaggcattcaccccagcaaggtggttatcactaggctaaaactggacaaagaccgcaaaaagatcctcgaacggaaagccaaatctcgccaagtaggaaaggaaaagggcaaatacaaggaagaaaccattgagaagatgcaggaataaagtaatcttatatacaagctttgattaaaacttgaaacaaaga

SEQ ID NO: 163779 - DNA, 554 bp, Homo sapiens
agagagggagcacaatggcatgagtgagagcgtgtggatatctggacgaggcacggaagcgggagcggccaaaatgaagtttaatccctttgtgacttccgaccgaagcaagaatcgcaaaaggcatttcaatgcaccttcccacattcgaaggaagattatgtcttcccctctttccaaagagctgagacagaagtacaacgtgcgatccatgcccatccgaaaggatgatgaagttcaggttgtacgtggacactataaaggtcagcaaattggcaaagtagtccaggtttacaggaagaaatatgttatctacattgaacgggtgcagcgggaaaaggctaatggcacaactgtccacgtaggcattcaccccagcaaggtggttatcactaggctaaaactggacaaagaccgcaaaaagatcctcgaacggaaagccaaatctcgccaagtaggaaaggaaaagggcaaatacaaggaagaaaccattgagaagatgcaggaataaagtaatcttatatacaagctttgattaaaacttgaaacaaaga

SEQ ID NO: 163780 - DNA, 812 bp, Homo sapiens
  misc_feature (22)..(23): n is a, c, g, or t
  misc_feature (593)..(593): n is a, c, g, or t
atcgaaaaccttgggatgaacnncgtcattttgatcgaaccctgcaattcggccattatggccggggctcttcccttttgcggccatcaccgaagcgggagcggccaaaatgaagtttaatccctttgtgacttccgaccgaagcaagaatcgcaaaaggcatttcaatgcaccttcccacattcgaaggaagattatgtcttcccctctttccaaagagctgagacagaagtacaacgtgcgatccatgcccatccgaaaggatgatgaagttcaggttgtacgtggacactataaaggtcagcaaattggcaaagtagtccaggtttacaggaagaaatatgttatctacattgaacgggtgcagcgggaaaaggctaatggcacaactgtccacgtaggcattcaccccagcaaggtggttatcactaggctaaaactggacaaagaccgcaaaaagatcctcgaacggaaagccaaatctcgccaagtaggaaaggaaaagggcaaatacaaggaagaaaccattgagaagatgcaggaataaagtaatcttatatacaagctttgattaaaacttgaaacaaagaaantaaataatgctctacatcatgtcggtcggcttggcccaagcgtctttaaacttgaacaagcttattcaatgcggccgaatttcgagtctatttggccaattccccctattatgagttgatttacaattaactggcgatgttttacaaccgcttaactggggccttgccgttccccaatttaatcggcttcgaatacattctcctttctcccttgcggcg

SEQ ID NO: 163781 - DNA, 348 bp, Homo sapiens
ttgatccgaattcggatccaaccggatcaactcaggttgtacgtggacactataaaggtcagcaaattggcaaagtagtccaggtttacaggaagaaatatgttatctacattgaacgggtgcagcgggaaaaggctaatggcacaactgtccacgtaggcattcaccccagcaaggtggttatcactaggctaaaactggacaaagaccgcaaaaagatcctcgaacggaaagccaaatctcgccaagtaggaaaggaaaagggcaaatacaaggaagaaaccattgagaagatgcaggaataaagtaatcttatatacaagctttgattaaaacttgaaacaaaga

SEQ ID NO: 163782 - DNA, 284 bp, Homo sapiens
gctgccgctactactactaaattcgcggcccgtcgaccaccgaagcgggaggcgggtgcagcgggaaaaggctaatggcacaactgtccacgtaggcattcaccccagcaaggtggttatcactaggctaaaactggacaaagaccgcaaaaagatcctcgaacggaaagccaaatctcgccaagtaggaaaggaaaagggcaaatacaaggaagaaaccattgagaagatgcaggaataaagtaatcttatatacaagctttgattaaaacttgaaacaaaga

SEQ ID NO: 163783 - DNA, 549 bp, Homo sapiens
cacttggctcgcagctgtctcactagcccgtcccttttgcggccatcaccgaagcgggagcggccaaaatgaagtttaatccctttgtgacttccgaccgaagcaagaatcgcaaaaggcatttcaatgcaccttcccacattcgaaggaagattatgtcttcccctctttccaaagagctgagacagaagtacaacgtgcgatccatgcccatccgaaaggatgatgaagttcaggttgtacgtggacactataaaggtcagcaaattggcaaagtagtccaggtttacaggaagaaatatgttatctacattgaacgggtgcagcgggaaaaggctaatggcacaactgtccacgtaggcattcaccccagcaaggtggttatcactaggctaaaactggacaaagaccgcaaaaagatcctcgaacggaaagccaaatctcgccaagtaggaaaggaaaagggcaaatacaaggaagaaaccattgagaagatgcaggaataaagtaatcttatatacaagctttgattaaaacttgaaacaaaga

SEQ ID NO: 163784 - DNA, 536 bp, Homo sapiens
gagctccttggaaaggaggggacgaataatcatcaccgaagcgggagcggccaaaatgaagtttaatccctttgtgacttccgaccgaagcaagaatcgcaaaaggcatttcaatgcaccttcccacattcgaaggaagattatgtcttcccctctttccaaagagctgagacagaagtacaacgtgcgatccatgcccatccgaaaggatgatgaagttcaggttgtacgtggacactataaaggtcagcaaattggcaaagtagtccaggtttacaggaagaaatatgttatctacattgaacgggtgcagcgggaaaaggctaatggcacaactgtccacgtaggcattcaccccagcaaggtggttatcactaggctaaaactggacaaagaccgcaaaaagatcctcgaacggaaagccaaatctcgccaagtaggaaaggaaaagggcaaatacaaggaagaaaccattgagaagatgcaggaataaagtaatcttatatacaagctttgattaaaacttgaaacaaaga

SEQ ID NO: 163785 - DNA, 1121 bp, Homo sapiens
  misc_feature (538)..(538): n is a, c, g, or t
ccacctgctctcctccgttgtaggccatcaccgaagcgggagcggccaaaatgaagtttaatccctttgtgacttccgaccgaagcaagaatcgcaaaaggcatttcaatgcaccttcccacattcgaaggaagattatgtcttcccctctttccaaagagctgagacagaagtacaacgtgcgatccatgcccatccgaaaggatgatgaagttcaggttgtacgtggacactataaaggtcagcaaattggcaaagtagtccaggtttacaggaagaaatatgttatctacattgaacgggtgcagcgggaaaaggctaatggcacaactgtccacgtaggcattcaccccagcaaggtggttatcactaggctaaaactggacaaagaccgcaaaaagatcctcgaacggaaagccaaatctcgccaagtaggaaaggaaaagggcaaatacaaggaagaaaccattgagaagatgcaggaataaagtaatcttatatacaagctttgattaaaacttgaaacaaagaaaaaaanaaaaaaaaaaaaaaaaaaaaaaaaaaaaaaaaaaaaaaaaaaaaaaaacaaaaaaaaaaaacaaaaaaaaaaaaaaaaaaaaaacaaaaaaaaaaaaaaacaaaaaaacaaagcaaaaccaacggacgcacccccaacaaaaaacagacaaaaaggggggggcgagtcccaaagaaagaccaagcaaaggacggacacaacgcgagcacacagcaaaacacaaacacaagaaagcacgcgcacaacacgagagaagaaatctaacagctcgagaggagaaacacagaccgcccaaccggctgagtgcacacacaaccctgccgctaacatcagcgagagaagaccacacagcgcgcagcaaacagcagcaagcaacacagaaacaaaaagcgagcgacaggcagatccacccgaacaaacgaaagacaactgtgaacaagtgagagagcacaagaaacacaagcctacgcacacaaaaaaatgcaacgcgacaacataacagaacagccacgcaatcagcagaaacacgaacgaccaacgacagacgacacaagcaacgtcacgatcgacacagacgacctga

SEQ ID NO: 163786 - DNA, 1094 bp, Homo sapiens
  misc_feature (26)..(26): n is a, c, g, or t
tcagcatccgaaaccccacgcgtcgnccgaagcgggaggcggccaaaatgaagtttaatccctttgtgacttccgaccgaagcaagaatcgcaaaaggcatttcaatgcaccttcccacattcgaaggaagattatgtcttcccctctttccaaagagctgagacagaagtacaacgtgcgatccatgcccatccgaaaggatgatgaagttcaggttgtacgtggacactataaaggtcagcaaattggcaaagtagtccaggtttacaggaagaaatatgttatctacattgaacgggtgcagcgggaaaaggctaatggcacaactgtccacgtaggcattcaccccagcaaggtggttatcactaggctaaaactggacaaagaccgcaaaaagatcctcgaacggaaagccaaatctcgccaagtaggaaaggaaaagggcaaatacaaggaagaaaccattgagaagatgcaggaataaagtaatcttatatacaagctttgattaaaacttgaaacaaagaaaaaaaaaaaaaaaaaaaaaaaaaaaaaaaacaaaaaaaaaaaacaaaaaaaaaaaaaaaaaaaaaacaaaaaaaaaaaaaaacaaaaaaacaaagcaaaaccaacggacgcacccccaacaaaaaacagacaaaaaggggggggcgagtcccaaagaaagaccaagcaaaggacggacacaacgcgagcacacagcaaaacacaaacacaagaaagcacgcgcacaacacgagagaagaaatctaacagctcgagaggagaaacacagaccgcccaaccggctgagtgcacacacaaccctgccgctaacatcagcgagagaagaccacacagcgcgcagcaaacagcagcaagcaacacagaaacaaaaagcgagcgacaggcagatccacccgaacaaacgaaagacaactgtgaacaagtgagagagcacaagaaacacaagcctacgcacacaaaaaaatgcaacgcgacaacataacagaacagccacgcaatcagcagaaacacgaacgaccaacgacagacgacacaagcaacgtcacgatcgacacagacgacctga

SEQ ID NO: 163787 - DNA, 1098 bp, Homo sapiens
taaatttatttcccagtttactcccctcgctcaaactccgcgcccctctcgctccgagagacataggtctcgcgagatctttggtaaacttacagaaccggaagcagcgtgtagttctcttcccttttgcggccatcaccgaagcgggagcggccaaaatgaagtttaatccctttgtgacttccgaccgaagcaagaatcgcaaaaggcatttcaatgcaccttcccacattcgaaggaagattatgtcttcccctctttccaaagagctgagacagaagtacaacgtgcgatccatgcccatccgaaaggatgatgaagttcaggttgtacgtggacactataaaggtcagcaaattggcaaagtagtccaggtttacaggaagaaatatgttatctacattgaacgggtgcagcgggaaaaggctaatggcacaactgtccacgtaggcattcaccccagcaaggtggttatcactaggctaaaactggacaaagaccgcaaaaagatcctcgaacggaaagccaaatcaaaaaaaaaaaaaaaaaaaaaaaaaaaaaaacaaaaaaaaaaaacaaaaaaaaaaaaaaaaaaaaaacaaaaaaaaaaaaaaacaaaaaaacaaagcaaaaccaacggacgcacccccaacaaaaaacagacaaaaaggggggggcgagtcccaaagaaagaccaagcaaaggacggacacaacgcgagcacacagcaaaacacaaacacaagaaagcacgcgcacaacacgagagaagaaatctaacagctcgagaggagaaacacagaccgcccaaccggctgagtgcacacacaaccctgccgctaacatcagcgagagaagaccacacagcgcgcagcaaacagcagcaagcaacacagaaacaaaaagcgagcgacaggcagatccacccgaacaaacgaaagacaactgtgaacaagtgagagagcacaagaaacacaagcctacgcacacaaaaaaatgcaacgcgacaacataacagaacagccacgcaatcagcagaaacacgaacgaccaacgacagacgacacaagcaacgtcacgatcgacacagacgacctga

SEQ ID NO: 163788 - DNA, 1624 bp, Homo sapiens
  misc_feature (1060)..(1060): n is a, c, g, or t
taaatttatttcccagtttactcccctcgctcaaactccgcgcccctctcgctccgagagacataggtctcgcgagatctttggtaaacttacagaaccggaagcagcgtgtagttctcttcccttttgcggccatcaccgaagcgggagcgggtaaggattcggcgggcaagcgggtgtaatcagcagccatccgttcttgggcatggtggcttccgaccgcggggaccccgagagtctcttgtcggccgagtagcagccaggaaggagagactgggatggttttttatctgttgctttcttaaatcaagggccgccgggccggagatggatggagggaccggggatttgggaactcgaaaacgagctgagggaagggagcctgtggaaatagactggagtctgggtagtgtcgtttcctagagaatggtctcgaagtaacttctcggtaaagtcttcacggaatttccagaccacacttgcccactgggaggcttttaggacccgagacgtgtgcaggcttttccagccaaaatgaagtttaatccctttgtgacttccgaccgaagcaagaatcgcaaaaggcatttcaatgcaccttcccacattcgaaggaagattatgtcttcccctctttccaaagagctgagacagaagtacaacgtgcgatccatgcccatccgaaaggatgatgaagttcagacggggacatgcccatccgaaaggatgatgaagttcaggttgtacgtggacactataaaggtcagcaaattggcaaagtagtccaggtttacaggaagaaatatgttatctacattgaacgggtgcagcgggaaaaggctaatggcacaactgtccacgtaggcattcaccccagcaaggtggttatcactaggctaaaactggacaaagaccgcaaaaagatcctcgaacggaaagccaaatctcgccaagtaggaaaggaaaagggcaaatacaaggaagaaaccattgagaagatgcaggaataaagtaatcttatatacaagctttgattaaaacttgaaacaaagaaaaaaanaaaaaaaaaaaaaaaaaaaaaaaaaaaaaaaaaaaaaaaaaacaaaaaaaaaaaaaaaaaaaaaacaaaaaaaaaaaaaaacaaaaaaacaaagcaaaaccaacggacgcacccccaacaaaaaacagacaaaaaggggggggcgagtcccaaagaaagaccaagcaaaggacggacacaacgcgagcacacagcaaaacacaaacacaagaaagcacgcgcacaacacgagagaagaaatctaacagctcgagaggagaaacacagaccgcccaaccggctgagtgcacacacaaccctgccgctaacatcagcgagagaagaccacacagcgcgcagcaaacagcagcaagcaacacagaaacaaaaagcgagcgacaggcagatccacccgaacaaacgaaagacaactgtgaacaagtgagagagcacaagaaacacaagcctacgcacacaaaaaaatgcaacgcgacaacataacagaacagccacgcaatcagcagaaacacgaacgaccaacgacagacgacacaagcaacgtcacgatcgacacagacgacctga

SEQ ID NO: 163789 - DNA, 859 bp, Homo sapiens
tgaggctgactcgtgtggaagctggagattctgtgttcctcataggcagattccagaacagctgcctttaaggaccgttttaaagtgggggcagtgagttgatcatgtttgaggctgcattctcttgtggctgtatctgctgttgtcattacagaagggtgtcaacatggaatgtgagtttctcctattctgaattatcattgcagctcgatccacggtatgctcaagttgtcactttatttttgtcctaaacactgacctacataacctcggaagaacaagcggtggttttagatgaagggcttcctattcaaattttcctgtaggccaatggttattagtgctgtatctactgtagtgctgtgtctattagtagtgtgtattactgtagctagttatcagtagtgtgtatctactgtagctagaggagtctttctgagatccacgaccccgggccttccccctctagtctgtctccttccctccttcccctgttgcttagattgttgttagctgttatgtaggttgtaaacttttcatcctaccaaaccccatactggatcttatggtgtccatacatttcagatatgggacagttgatatttttggagtaatatagcgggtaagatgtggagtactccaagaagcttttgcttcacatatgcagctccctctgtagctgtttggcctgtgctcttttgagtgccagtctctgagtaatcattactctcatttattgaccacccactatgtgcaaggcactggcacacaattcagagcagcagcttgtagctattaaaagtttttgttcttggctgggcgtggtggctcacgcctgtaatcctaggactttgggagg

SEQ ID NO: 163790 - DNA, 588 bp, Homo sapiens
gatcccgagcagacaatattgcctaggctggagtacagtggcacaatcatagctcactgcagccttgacctcccaggctcaagtgatcttcccacctcagcctcccaaatagctgggaccacaggtgttacgccacaacacccagctaattttttaaatttttgtagagatggggtctcactatgttgcccaggctagtctcaagctcctgagctcaagcaattctcctgcctcagcataccaaagtgttaggattaaaggtatgagtcaccacgcccagccttaagttcagttttcttgtgctaacattccttgatcacttagtgctaggttctgcactaagaactttacacaaatcattttacttaatcctcatcacagccctatgatgaaaatcagactcccagggttcacacaccagctctgatgctcattaactgagaatctacttagcctctctgtgcctcagtttccctatctgtagggtggagaccctagtagtataccatatagacactgtgaggattagaatgagttaatatgcacaagcatagcactctgcctgtcacataatagacattcagtaaa

SEQ ID NO: 163791 - DNA, 248 bp, Homo sapiens
ctaagtgtaggaaggattgagaagactgccatttgagctgtcagtaatgacttcaaagccacacagcagagccacaccgcttagggagctgctgcctctcctgtgaccaggaactgcactgccactcccacagtctgaaaaactgctgtgatcagggtgctacttttgctaccagctgcagacccatgcatgccacatctgctaggatgcataacaacatggatgcttgtaccttgcctcttggtgtt

SEQ ID NO: 163792 - DNA, 320 bp, Homo sapiens
ctacttaagataataatggggcatacctcatagattttaatatcattaagtgataattaattataagataatttggagaactggaaaaagttatttgaagtatggaatcagaaactgcaaagagtagggctgttgcttttttccaaacagcattatttctgtcctgtttttttgagacagagcctcactctgttgcccaggctggagtgcagtggtacaatcttggctcactgcagcctctgtctccaacctctgtttcccaggctcaggcaatcctcccacctcagtctctcaagtagatggcactacaggtgtgtgcc

SEQ ID NO: 163793 - DNA, 321 bp, Homo sapiens
agcaccctcccagacacacccaggatcaatactttgcatccttcagtcccatcaagttgacgcttagtattaagcattacagaaggaaacaaaaccaatccaaagagggtttagtttaaagttgtcctggtataagagtgaccacaaactcctggcagaaaaacataagtccttctggagtgagaagctacgttctgaatgaatcagtgaacagaaaacatgaaaaaggttcacggaagctctggattgagatgttagaccccaaatacactgcctttgcctctctcccaaggtctcatttaagtatcccaaagtattttt

SEQ ID NO: 163794 - DNA, 667 bp, Homo sapiens
gtggtggctgatatatgtaatcccagcacttttgggagactgagtcaggaggatcacttaatcctcatttaaaaggagtttgagaccagcctgggcaacaaagtgaggccttgtctctacaaaaaaattagctgggtgtggtggtaggcacctgtagtcccaactactctggagactgagctgagagaagattgtgtgaggcttggaggttgaggctgcagtgaacggacatcacaccactacactctagtcaggtgacagagcaagactctctaaataaataggaacattagatggtctctctgcactcttgcctggtggggacgtgttagataccctcgttaggttgtgatttagtttttaatctgtgagatgtttgggccaaacaacttttagctgccatggaataaactttacagtcagcgtgtgagtttgtgtttgcctttacttttttttttctatattgttttggtccatttttatcttttaatttcagaaagctgattaatctcttccttttctctttaaaaattttctttatcatgtttgtgctacagtggttattttgagaacttgttggcaggataagtggcaaaagttacgaagtagaatagagatgatttctgtttttttttttttttcttttttttgagacagtctcactctc

SEQ ID NO: 163795 - DNA, 180 bp, Homo sapiens
tactgcctcagccccagtccccgtgggagatttggggctcgccctccgtcctgggtatttacacacccacacttgcgctcacacatgtgcacacacaggcgcattcacacacttgggccacaccacgcactcacaggctgcattcttgccttgtcaggtggttttccacattccacaaga

SEQ ID NO: 163796 - DNA, 629 bp, Homo sapiens
gatctcactatgttgcccaggctggtctcaaactctgggttcaagtgatcctcccgccttggcctccccaagtgctgggattacaggaagagccataatgcacagcagggaaactgagattacaggggtgaggcataatgcacagcagggaaatatttcgggttacagatgtctgggcaccattcccattgttgtttaggtctgagtgtgtgcagtttggaaaagctgtaaagatagttgttatattcccctattaatttagaaccacttctcatgtggaatgagaggaattgaaatgagtcatgaaataactttataggattttaatttagaagacaatataaaaccataaaatatttagtgatgcagtatttgaacatgaagcatttgtgttaaagtgcaaaattaattgccaagattaatgataccaaaaggaactatattagaagctcaatgacaagtgaataatatttatcctacctatattgagggcttgttatgtgctatgcagtgggggtacattagtgaaaaagacaaacctgttccctacactcatacagtttacattctactgggagagacacgagtaagaggattacctatttgataagtactatgaaggaaagaaa

SEQ ID NO: 163797 - DNA, 282 bp, Homo sapiens
tgattgctcacagttcaatgaatatgtattgaacatttgcttggtactagattctggagctataaagaagaaaagagcaattccctgtacctgagatgcttatatattttcctggggaaatagacatgcaaacagatatttaaaatgcagcatgggctgggtgcagtggctcacacctgtaatcctagcactttgggagctggaagcaggcagatcacttgaggtcagtagttcgacaccagcctggccaacatggcaaaagcccatctctactaaagatac

SEQ ID NO: 163798 - DNA, 402 bp, Homo sapiens
gtctctgtaaacattaactaaaagtaaataaaatcaattttcatgaatacactaaaataaattcttattttattttatttattgttgacacggagtctcgctctgtcacccaggctggagtacaatgatgagatctcagctcactgcaacctctgccttccaggttcaagcgattctactgccgcagcctcccaagtagctgggactacaggcatgcaccaccatgcccagctaatttttgtatttttagtagagatgggttttcaccatgttggccaggctggtcttgaactcctgacctcaagtgatctgcctaccacagcctcccataccctaagtagttttgttaattattgtatttcctttctctactgttagaatatagatacactgaaaatctaa

SEQ ID NO: 163799 - DNA, 308 bp, Homo sapiens
aaatcagctcctacctcttagctgccacgcctggctgactttctggatttttagtacagaaggtgtttcactatgttgcccagactggtctcgaactcctgagctcaggcaatccactcaccttggcctcccgaagtgctgggattacagtcatgagccactgcgcctggccctagctggaactttcttagtcttttctagttcatgcatttctggaaaggattccccatctcctcattatttcttttgcatccactttggattcatttacttttctacaactctggctggagagagcagcagtagcc

SEQ ID NO: 163800 - DNA, 193 bp, Homo sapiens
tctctggggaggattgttggggtcttgctagctgctgtctgggttggggaagctgtgccaggtgagcttggcacaccagcctctactgctctgtagcggggcctcttccagccactctctggggcccgagcgtgatgtatcccatcagcacatacgagaactggtcatttcctatcacctccctcagccggtg

SEQ ID NO: 163801 - DNA, 265 bp, Homo sapiens
agaagggataggagagtactgagggattttaccacctctagaccctgaaggcacatggagcaggcattattactagatcctggggaaagcctggagacatggaggaagggcttcagtagcagctgtatccagagaacacagaagcccctacaaggagagggagatggggatggaggcagaggtagagtaggtgcctgacttctttctcttccactctgtaatctcctgcaagagcctcacattagctgaatacaaccagagcccc

SEQ ID NO: 163802 - DNA, 496 bp, Homo sapiens
atggttgtaaatgaacctatatgattgtaaggtctctacattctatgtgaaatggtataatatgaactctgagaagactgttaaaagttatggatagatatttaaatttgtaaagcaaccactaaaaataatgcaaaaagataaaacaaaaaagccagcagagaaattaaaacagaattctttttaaaaattcaaataatccaaaagaaggcagaaaagggggtatacaaaagaacaaaacacagagaaagcaaacaaaaagcaaattttaaaatgacagacctaaccatatcaataaggacattaaattggactaaatactccaattaaatttcagagtcaacagaagaaataaaaaagcaaaacccggctgggcacggtggctcacgcctgtaatcccagcactttgggaggccaacgcgggaagatcacctgaggtcgggagttcaagaccagcctgaccaagatggagaaaccgtctctactaaaaatacaa

SEQ ID NO: 163803 - DNA, 448 bp, Homo sapiens
attgagtaacctataaggctgcagggttggagtggggtccagagaaaaggaaagtttccaggtggtccagaatgaaaggcaagcagctctgccacatggccctgatagcccagccgatcccaagatggctcaagtgtctgcggcagatgggatggtatttgaacccatggcaaactctgatagaagaatcaaaatggagtatctacaatttaggagtgaagcctggtgctccttagcaagcagttttcctccttttggggaaggactcttggctcactgctggctgggcttagctgacagtggtctcagtgtgggaggcaccaagggattgtgaaagtaattaatgactgtaacacacagtgtgttcttttctcagggatacttgggttatatgtgctcagtggttgctaaatgagatgtcagtaaattatgcatcaggtatgaaaac

SEQ ID NO: 163804 - DNA, 513 bp, Homo sapiens
tctagcctggtgctaacacacaacaggcactcacttttgtgaactaaatgaatgtacatacttaattctcataatagatcaataagtattaccgccccattttacaggtggggaaactgagactcatagaagtaaagtgacttattcaaagtcaaatagctagtggctaaaattcaaacctagtttcctgtacttcctcgctgaaggatcctaaacagccactgctgaatgatttcattctcctttttgaaagccttgtgccctcaaaggagatagagctgaggcaggatagaaacccaggaaggggcccggctcggtggctcacgcctgtaatcccagcacttagggaggctgaggcaggtagaccactttgagctcaggagttcaagaccagcctgacatcatggtgaaaccccgaatctactaaaaatacaaaaattagctgggcatgcttctgcgtgcctataatcccagctactcaggaggctgaggctggagaatcacttgaacatg

SEQ ID NO: 163805 - DNA, 515 bp, Homo sapiens
cctcatatgacattgtttccttactcccttgcttatctcagaagctccaattagatattatcattttttgactacctcaaaaactgacactagagagtatccctttgccattaggagataaatctgtttttcttgagttatctcaaagtgatcctatgatatacagaaattagtgttgtataaggccagatttgaattacacaatccacaaggctgcccttagctagcaagcctacatcattacccaacacgtgtgtctcaacacaactttgtgattcctcactgcatacccagcaagtctcatgaagtgatcagaatgttctttgcataaagagacagtaagtggaagttaaaacttcagcagaagcaaggaatggtggcgcacacctatagtcccagctatctgggaaacagaggtaggagaatcgcttgagcccagaggttccaggccagcctgggaaacatatgagatcttgtctcttaaaaaaacaaaacaaaagtggcggccgcagcta

SEQ ID NO: 163806 - DNA, 457 bp, Homo sapiens
aagctgggaggtcagagggtaagagccaggtaggcgtggtcttaattctagcaagtccagtttaagaatcctccaagtcccctacatctcctgcaaaacacagcccagaacctcatccttctgctgaagggattcaggtatcatcaaccgaagtgagaaaaagcaaagcagattgggtctgggctcggtggccacgtctgtaatcccaacactttgggagaccaaggcagtagaactacttgagtccaggaatttgagaccagcctaagtaatttagtgacaccccttctttacaaaaaatttaaaaattagccaggagtggtagtgtgtgcctgtagtcccagctacttgggggactgaggtgggaggatggcttaagccgaggagttggaggctgcagtgaaccgtgatcatgccactgcattccagcctgggcaacagagtgagacgctgtttc

SEQ ID NO: 163807 - DNA, 166 bp, Homo sapiens
taaaaaaatgtgcattccttatcctaagcaaatccatctctgggcgactatcccaaggaaattatcagacatgcggacaaaaggggtgttcaaaaatgtccattacagcatgagttaggacaatgtaaatctggaatgagcgaaacattcaacaacaatgcccggg

SEQ ID NO: 163808 - DNA, 306 bp, Homo sapiens
gcttgaaaataatcacttccacatctggctataaaacaaggactaaccagatgttttcattttaagacattttttcactagttattttaatcttctacataacacaatcattttaacatttagttgcagtaggttattagtaatatctgcaagataaaggcgaatagtagactaactcaagtttttttttttttttttttttttttaaattgagatggagttttgctcttattgcccaggctggaatgcaatggcacgatctcgggtcactgcaacctccacctcccaggttcaggtgactctcct

SEQ ID NO: 163809 - DNA, 234 bp, Homo sapiens
atatgacgtgtggaagctatcaactatcgcattgtccccaatgtcagaatgtgctgaataagattttgctttttctcagggcccagcatttattaagcactcagcaaatgcttactaaatgaatgaatgactctacccaagcttgtgtctttgtctcgaagctgtatcttccatcacagtattaaaatgttttttatgaacatgagcatctggctgcacatacagagcagcaca

SEQ ID NO: 163810 - DNA, 147 bp, Homo sapiens
gttacaatattgttatataaccatagctagctaatacaatggagaatttggagcttatcttaaaatcaatggcaagccagctgctaaatattgtcaagcaagaaagtggcttgacatctttcctttaggaaagaaaatctagggctg

SEQ ID NO: 163811 - DNA, 922 bp, Homo sapiens
atgaattggagttatcttgtcatacccaactaaatttagagtcagtggaccaagggttacggtaaaaaagtgcttggggcacaaaccgcttgcccagggattatattgcaggccagctgccacaatgacatgctgtaaccttaaatccagttttacctactagctgttgagatgaactcttgtgactctaagtctagttttaccaaccgtgttcactcaccaatcagagcttaccagctcccaaaagctttagtagttccagtgagttttctttcaaaacaataggtcacatttctttttctaataaaactcccaaccttctttgtgttctttggacacactaggaggctaccctagtatgtgtatgtatgtatgtcctggattgcaatcctacttatatattctttctaaataaaaccttttttacttagagatttgtttctctctatatttttgactttaacagttcataacaagttgtcattactccaaacccaaatgtataatgtggaaatgccatcttttaaaaacccatctctccctttgcttttcccttttacttcatctagttgtcacgacagtggtgctcttggctgtggcactgggacttattggttggttatgattcaggaaaatgattgtctgatttagggatagtgagagtatatgtaaggtccttacatttacagggaacaattgaggtaagattttcagtaagggtagacactgaatttctgtaccaatgtctttttgggtataatgtagcagtattgcagcagttaaactgaggtctcagcaggcataggttgggatgaacaggccaaagcacctggagtttgtataatcacccacccacatggcctggaaaggccttttgaaaagtgctttaaaatgcaaaaaatgtcaacaactcccacttatc

SEQ ID NO: 163812 - DNA, 299 bp, Homo sapiens
caggtattcattaaagcaggggctgcaggggcaaccagcgagaagccaaagtgcatcttgggaggtgagatggtgctgtctatgccagagggcaaatatcctgacctggctaagctcccctcctctgggctcccacagcttccgtctcagctgatgccacctttccatctttctgtctctgccctgtcccctgaccggcgtggtgtggagcactcagcagcaacgtgaagtaattagcacaggacctgtgtacgccagggcgaggctgtgtggtggaaaccaggtgtgcagttagatcc

SEQ ID NO: 163813 - DNA, 640 bp, Homo sapiens
tggttgcctagttaataaatgactactgtctagccactggccaactacagtccatcatctacttattcacatatgccatgattagactgtatttgtcagatatgatattcaccaatttggggatccctatgtatctttcatagatagcccaaatagaaggtataagttttgcagtctgttgatttactataatgtaagaaaagggggaacattttattacgcattaggacaaaatatttttggagctggctgaccttctgtgtgagcaggaggtcaatacatgttggcttcatatatgcaattttcaactacggtctgccttccacccccactgacaaaaatcccatgtgctaaatattagaggaataatattttcagcttgatcaacttcatcataatttagctttgtcatgttggacaggtaagatgaaagaaaggaaagaaagaaaaagagtattaaaaacaatgacattctttactaaaaagaggcagcataactcaaatttcaaaagaagtaatctgcttagtaacaccaaaatatatggtaaattgaagcgatatggtaaatctcatcaaaaaaaaaaggctggactaaatccatacatattgtgaatctgttgatactctggctaacaaacgc

SEQ ID NO: 163814 - DNA, 299 bp, Homo sapiens
ctgagggcatcaaacacgccgtcaagcagggaggcaacaaatctgagttgttccacagatactttgagtgcagtacaagttggtaatgggtaacaggctaaaccatgtggcaccccttccctcttatcagcttcttgctaccatgcagaaaagtgctgaaggtggcctgccctaaggcagtagcactagagcagggatggggaggacttggtggccagatgcatgtggacatgatggaaagggaagagaagaactgtcaagattttcactatcagtggtataagccccgtagtaatatg

SEQ ID NO: 163815 - DNA, 341 bp, Homo sapiens
aatcagctcggccttatttgtgtgcacttggtttgggctagaagctatgtcaggctggaggacacaaagacaacagggagagatgatcacatccagccaggggagtcaggtgggtagacacagttataatacaatgccatgaatgctataacagatgcatgcacagagtaccatggaaaaacaaagtgactgtaactttagctgggattctgagaaggctaatacaaaggaagaacatgtaagctgaatctcaaagagtaagttcacaaagcctggaaggtgggaacgagtattccaggcaggagagctgtgtgtgtgtgtgtgtgtgtgtgtgtgtgtgt

SEQ ID NO: 163816 - DNA, 145 bp, Homo sapiens
acttagaaagctttcagtatttaaaactgctttttcttttcttttatcctcaaagtacctttgtgtgaaacttgcatcagaatccatgttgcatcctgatcaccttggtgtgttgaaaatcaagtcttatctattatatctttag

SEQ ID NO: 163817 - DNA, 185 bp, Homo sapiens
cccatactcaataatcatgccatcctgcctttccatggaataactgatggatggttagaaatgttaaaaacaaagcaaatgcaaacatctctgcttctgctcctctactaagcccagttaacttttgattttatatgtactaagtatacatttttattaatttatgtgagctgagtgtttttatt

SEQ ID NO: 163818 - DNA, 369 bp, Homo sapiens
ctgtccgactgactccttatctagatttatatccccctacttgtctttcagtgctcaatgtgggcactacctctccaaaaagactggagagcacagactataaaatttctgtaattgtaagcccagagcccaatatagcacctaacgcccaatgggatattctgcaaatgtttctgcataaacaaaccaccttcagagcctatttgtaagtcatttttaaaaaaaagaaacaatttattcatagttatcttcccgtctttttttgtggagatggggtctcactacattgctcaggctggtcttgaactcctgacatcaagtgatcatcccaccttagcatcccaaactgctaggattacagacatgagc

SEQ ID NO: 163819 - DNA, 126 bp, Homo sapiens
ctctgggagagacatcagtgcaacttttccaacagtgcctgagtccccacatgaatcagaggcaacagcctcatgggttactcatcctgcagtcaccagcacaacagttcccaggacaacccctaa

SEQ ID NO: 163820 - DNA, 111 bp, Homo sapiens
gttgttgctctatgaagataagctaattttcttcctggaatctcataggattattactaagggccagggagatccacttcgttcatttagtcactcaggaagcattgctaa

SEQ ID NO: 163821 - DNA, 581 bp, Homo sapiens
taatcccagcactttgggaggctgaggcgggcagatcacgaggtcaagagatcgagaccaccctggccaacatggtgaaatcccgtttctactaaaaaatacaaaaaattagccaggcatggtggcatgcacctgtagtcccagctactccggaaggctgaggcaggggaatcgcttgaacccgggagctgagattgcgccactgcactccagcctggcgacagagcatctgaaaaaaacaaaaacaaaaacaaaaagccacacacaaaatctgtctgaaattatgttcaacgagctaaaacaagaaaacagagaacaaatggaaatctagaccctctactcccacctcataactgtctagaaaagttaacttaaaatagatcacatatctaaatgtaaaaagtaacacataaaacttttggaagaaaacacaggagaaaatcttcataaacttgacataggcaaaaattttttaggtataaaaagcatgaattataatagaaaaaaatgcatgaattataacagaacaaaatgacaaatcaggaaaatttttaaatttaaagtaaaaatttaaaacatat

SEQ ID NO: 163822 - DNA, 214 bp, Homo sapiens
cctaatcaccatctgacgtcatttgtcaggtcccaaccaaaagtatatacatgcacgtttctttatggtaatttttttttcagataaccttcagattatgcatgtatcctggtcatttttcttttgctcattagcaataactacaagatcttaaacattaaaactcagacataaaattaaaggtttctttccgtcctgcttcctcacgtggaca

SEQ ID NO: 163823 - DNA, 504 bp, Homo sapiens
cctggcatcactcctatattaacctacaatgtataagttttcctagctaattagaacaaccattcactttcttttataatccccttccttaaaattagacgttaaggaaatccttaatttttttgcctgaataaccctgctaccactgaaaactcatagggaaatagagtttcaaatgataaaataattcaagtcaaagcttgcgtttcttgaagataactagctggtcatttctgagtaataattggtatttgcacctcaacaatttgtagtgccttaggcaataccaattcaagaaaaataagaacaatggacaaatgagaaattaccctgcacaatgaataatcacacaaaatttagataaattaacccggaataaagcaattttctacagagaaatatgtttttcctgctttcatctataaagataaggtccaagatacacatatataaccacataaaattcaccactaaatgctaagaaaatgggctcccagtttttct

SEQ ID NO: 163824 - DNA, 315 bp, Homo sapiens
atcttcaattttccagtcaaatattaatcaaatctaaacaatgaactttttaaggcacaaccaagtacttttataaaaaaccaagttcacatgaaaaatcaaagggcaaaaatgtgtgcccacagatcacattaggaaattaacatttactgagttcatactatgtgcaaaagaaagtcactcgctcattcaattctcgtaaaagttccactagaaaaaaaaaaatggagaagtgttttgaggcagagccacttagggatacagcagaggcagaagctgcaaccaggagcaggtctttctgctattcatataact

SEQ ID NO: 163825 - DNA, 368 bp, Homo sapiens
gcagtgggtacttagtagaagggacagccgccagcccaccagcgccaggccctgcgggctgccacacaaaggccaggctcctgcttcccttgggaggggctgctttcagcaacggggaggaaagcaggggaaacttgtgagactgagcaaagcggtggggtcaggcgaagggttttccctttttgtcaagaatctgacttgggtgaccacagtctggggcactcctgggtgaggtttcaatctcagccggcccaggatgcctgctgtggggaaaacttaacagtttttaaagtgaatcccacctgccttcactcaatgtatgcttttcttcttaaatggaagaaatacagaaataactagaactcaga

SEQ ID NO: 163826 - DNA, 178 bp, Homo sapiens
gagtgtagaccaaccacccagccctgtgctggcttccggggcctatgagggggctgctgctgttcagggggattggaggagggtttagagaaggggaggagctattgtcatgtgagtggaatactgccaccatgatgagacaggtaaaaataaatctgtaggttggagtccgggtcac

SEQ ID NO: 163827 - DNA, 338 bp, Homo sapiens
agccaattaaaattatctattaaaggaatgttttaaaaaagatatataaaattttgacattaccccttgcaaaatagtttataaaggttgttagtttaacctgtatttgtcaagaaacacttgtatagattagagaaattgactcctaagagggaaccaactcagttttcttctgaaatgccctcaaatcacatgtaatatgaaccacatggtaatcaccattgtggagtgcagtcagagaaaagagcatggtcaccagaaccaggcagatggaggggccaatcctgtctctgccacttcttaaaaagtgacaatctttcctagcctcagtttctcat

SEQ ID NO: 163828 - DNA, 416 bp, Homo sapiens
ggtactggggatgggacctatgtctaaacatgaaattcatttatgtttcatgtacacctcatatacatagattgaaagtaattttatttttctcttgggaatgctgaataaactgtacctgcattttgactatggcctgtcacatgaggtcaggtgtggaattttccacttgtagcatcatgttggcactcaaatatttcagattttggagcatattggattttagattttcagatttggtatgctcaacctatatggcctttcctgcattaccaaaccaaagcataggctagagtacattccaaagcatctaggacttctgaaaacacacctagcctactctgtgtactacagggctgctggtgtgagcagagtattggctttctagctaaagaaccacctgagttccagcccca

SEQ ID NO: 163829 - DNA, 542 bp, Homo sapiens
acactgagtttgagaacctctggtttcctaagatcttttcctctgaagagccagagaataaatatttcaggcttgtggccacacagtttctgtagcaaccactctgttctgctgttgcagtgtgaaagcagctatagatgataataaataagtgaatgggtttatttatggagactgagatttgaatttcacctaatttttatgtgttaggagatattattacacttttgatcttttctaactacttaaaaatgtaaaagccatttccagctcctgagccgtacaaaagcaggtggtgggccgggtttaggcaatggtttgccagccctccatcagactgctcaagattcatcccctgaaactggggagagtctaatagtcttaaaacacagagagccccagattctttagaaaattggaatttgggctgggtgtggtggctcacatctgtaatcccagcactttgggaggctgaggtgggaggatggcttgagcccaggaatttgaggccagcctgggcaacataatgagaccccatcttt

SEQ ID NO: 163830 - DNA, 312 bp, Homo sapiens
gggatttctatacattgacctcttgttggttatcaaaaacaggagtccaacgacgtgtcacacaatgacgctggctgatgggaggtcttgcgtccatcagtgtcatctgtcatcatgtcagaatgctacctagctctgttatgacctgtcttacccatacaagtagtcagatgcactttgggtcaaataaattaatattgcagcagtctgatttgatgttgatagtgttgtctgtcgtcagcaccaggaaaggactactctgtagcatacgtatgtgaacttcaaaaagaagtttcagttttaatattttaa

SEQ ID NO: 163831 - DNA, 360 bp, Homo sapiens
tgctgcactgcctactggatgaagcccaaatttgttcttagagggaaaagtatcaaataaaagtttcaaaagatgtaaataagaaaagcttactctaatgttgctgtttctctttctgtctttggagaaatggaccagagaatgagaatgggccaccatgattccacttctgctaccactgtcatcaaattattttaaaaatcatttagaaaagatctatttaattttctacttcatttagtccacacctgctcttttccgaggaactctgcaattgagtggcacccaattattcatccattaaacatgtgagacaggaaactcaggctgaggagaggaggctcccattgagggggagag

SEQ ID NO: 163832 - DNA, 481 bp, Homo sapiens
cagtttttgggttatgtttaccgtcctgataacatatgaattttaaataggaaatagctgaataaggttatagtttaaaatatatgaagttatattacaaaattatttataacaatttctaaagtagggctgattattttggacattatttgctttgcttacaatcatctataacaaaatattacaagctaaaatgtagtaaaaggttaatatctgcaaataccagatgggtagagtaaaggaaattctagaactgaaatatttgggattgtttttatacctattcaatttttaagcaattgcattggtacttttggtggccacctgagaaaatgccaaaggttctgacatttattagtgtgccagaggatttaacacataaagtgtatcagtttgggttcacggattatgagcaatatcatctgaataacctgaacaaatagaaaagttattaaaaaatataatgaagaaccatgataga

SEQ ID NO: 163833 - DNA, 196 bp, Homo sapiens
gggaacagcgagtgactgcttgatgggtacggggtttggtctcctttgatgtgaagaaaatattttagaactacaggtgatgtttgtcacaaccttgtgaagatactaaatgcctctgaaatgtgtgttttaaattggctcattttatattatgtgaatttcacctcaattttttgcaacagagactccttcaggg

SEQ ID NO: 163834 - DNA, 477 bp, Homo sapiens
gggagaaaaaggctccacacaatctttctctgatgcaaggaggagaaatgctgtgaacacattccatggagaagtttctctcagggcagtcctcccaggcaccaagcctcatgacacagccagcacctgtgctactgcgaccccctaaaaaattgccggcaagtcacgctcatcatatcccacccttcgaatcaagacaggaagtccaagacaggagacactgcagcttttcccgtcctctgtggttcctaaagaagctactgcttgcctactctccaccccagaaagtgatacagaaatattttagtcaccctctctattcagtattttcctttacatcagtagattttttaaaaaacagatcccagcttagaaataatgctacaagtttgtctgtttttctaatctagcaaatgacccaacaaaagacattctggacaacagctcagtggaaatacatttccagaaatgctcaag

SEQ ID NO: 163835 - DNA, 330 bp, Homo sapiens
ttgcctaccctagagtcttttatacatgttttgaggtgctataatcttgtgtgtgaggtcagtctctcaggttcattagatggacagtgtaaaaggtattatgaggttttacatattatttatctattaagtaaaagaaatatatggaaattgaagagtagcttttatctattaaagaaaagaatgtatggaaattgaagggtactttctatttgtggaaagtcttaacattttaatttccttattgatcttgtcacagaagttggaatttaagttttgcctgtcactcaaagagaagctttttagacatttgattgagggattctagta

SEQ ID NO: 163836 - DNA, 339 bp, Homo sapiens
catccactcatggcggaaggtgaaggggagccagtgtgtgcagagataacatatcaagtgaggaagcaagagagatagaggcatggtgccagactctttttaacctccagctattgcaggaactaacggagtgaattcacttcttccctagagaaaagtattaatctattcatgagaaatctgcctccatgtcccaaacacttcccgttacgccccaccttcaatattgtgcatcagatttcaacatgaggtttggaggaacaaacatcccaatgatagcaccatcagactaatagtaagtttttcagccaaaactttacaggccaggagagaatggga

SEQ ID NO: 163837 - DNA, 409 bp, Homo sapiens
agagcccggagtggaggctctgggctcagccctcccaggcctaggccaccgtgccctgagtccctccccaagacttctcggactaagtgggccagactcttgtcaggggagggatcaccaggacctcagattgctgggggcggaggggtggacgctcgtgagtgcgaagttcgggtgtcacttgggtgtgtccagtgtctacaagtgggaatcctacggtttcaaaagtcaggcagggatggggttgcctacactcggtggggtcaatcgctagtctcaccagaggcgggagcgggcctgggggccctctgagctcgcggaggcggcgggttcggggcccgtgcgggcggggtcgcccaggggagcccgggccccgcgcgtcaggaggcctccgccggccgagcggccg

SEQ ID NO: 163838 - DNA, 115 bp, Homo sapiens
gtataccaagtgatactggttttccatttataatggcaatgtagcttcccttgagtttgttttaaattttaattcaatttcagacatacggaaaagttgcgagcatagtagagtt

SEQ ID NO: 163839 - DNA, 403 bp, Homo sapiens
gtttttctctcccttctttggaaagcacgtggttgctactgccattgggaagagtgatacctgattagccaggtagccttctgaaaattgaaacaagtggcctgaggatgacttggatggctgttgggtagcagagagccctggaggcagggtttcataactgcgaacagcagttttcattgtaattgacacagcagttttcattgtaattgacaagcttcccttatgcagaaacatttaacgatacctttttaaataatgtttactagtcatctgattagattttattaaaaatttagatgattcgtcctacataatgtcaaagcatttgtttaaaaacttggaagcttttgggggtggggaaggtggtcatagaaatatgatcatcttcaggatttggcag

SEQ ID NO: 163840 - DNA, 140 bp, Homo sapiens
taagtgctataactaaggtacctatgagatgctgtgaagagtctcagaggaggctgacctccttcagataggaggagaggctttgggcaggtcttggagaaaaaggaaactgacattatcagcacccactagggcccagg

SEQ ID NO: 163841 - DNA, 360 bp, Homo sapiens
cagaagcttattcctcctggccagcagctttgttatttagggcacaatatcaaggatctggtatcagcccaccttcccttgggacctggtttttatcaggactttgcaaagcaaaatagcaaaggcagaagaaataaaacatgtagccaatgtcttctggatttggtgggcctctagtcaactggaggaaggtgctgaaaatctgaatgcaaaacttgtacttgcctctatatcagtcaagtaaataaacaaggcccacatcattatgtttattagtcacattatcacatggagaaggcagactcctttaaaaagaaaagatgtaggctggtaatatttacatataggctcttaagatgt

SEQ ID NO: 163842 - DNA, 418 bp, Homo sapiens
tcccccaaacctcccttttgtgccccagtttgatgattaatggaccagcatttcccttctacgcgggaaggccacccctcacagttgccatggcaatgcagaccgctcccccgtcaattaaaaaaaaaatccctactacttctctcctccttctactgtagcaggagaaaagctacctcagaatgcatctcctgggctctcttctcagctcctttagctgtgtttgctgtgtgtcctagaacacagtccttcctctctttctggggattgcctgagtttcttcactctgagcaaattgtgccccttctggagccagcagcccctggaacacttatatcaagaaacagagaaaatttctgtttatttattcatccccggtgcaaattaaaaactagagagagctccttttgggtaaaaa

SEQ ID NO: 163843 - DNA, 701 bp, Homo sapiens
gtaggtggagataatgttaagatatttaaagagtccaagattatataggtaagaagtttttatggatcaaacctgaatgaggcacatatgacatcaaaacatattccactggtcagaaatcaggtattcatacctgactttgaggagactgggaaattttgtctagctagatgcccagtaggaaagaaaaaagaatttggtgagcaaatttccgtctgtgatctaggcaagttgaaataaaatgtagatagctaggtttgaaatacattaataatttatgagttgtaaatatacatagtggttgtttaaatcatggaaatgaaggaaatatccaagcatgatcaagtatattgaaaaaactcaagaatttcagcattttatgaatacataaaagagaagcatgaaaaatagactgaacatacttggcagagaagcagaaagaagacgacgagagagaatgtcaaaaatacaaagggagaaagacatgtcaagaggcaggcagaggccaaaagcattataagctccaaggtagttaagataggaaccattggccacattctaaaattttaactacttcagtttcatataaattcattatgccattttgatggttgaatgacctacagaaaggggtccatgattgtatctagagtaataaattgccttcatttatgtctcaacttgttttaaaatgtaatatg

SEQ ID NO: 163844 - DNA, 312 bp, Homo sapiens
ccaacccagggtttttctgcactgcaatccaaccagcatcactcccctgcttaccagcctgcagtagctcccgcatcccttcaggttaagattcagacttcttagcaaggcactgcttatttctccagcctctgtgacagcctcaaaccctgcaatcgagctctgctgatcctggagaagctccctctgagcctttgcacacctgtccctgctacttgagggtgatttccacctggttacctgctggcatcacctcccacctggaagccttcctcatctctggggtgggtcagatgtagccgtttttgccct

SEQ ID NO: 163845 - DNA, 342 bp, Homo sapiens
tatgtacgaaatatcattggatatagacggattccatgtgtgatactagcttatactcgtctatttcttaaattatttcagctttggccattggctattgagctcttttagttacatgccatgtccctttatcttatccccagattgtggtgctttttggattttggggatgtgtttttggtgtgtgtgtgtgtgtgtgtgtgtgtgtgtgtgtgtgtgtgtagttctcttgtttgttttgttttctgtttcagcggggaagagggttaggagggtttcattgtgtgtgaatgtgagatcttccttttacttttcttctattgtctctgagacagtatatca

SEQ ID NO: 163846 - DNA, 358 bp, Homo sapiens
ctggaaacagacgaggagttcatcagtgcaacctctgcacatcctcctactgcccctccacacaccaggcaggctccctcccacctcagggcctttgcacctgctcttccttctgtctatcccagaaaacacatcacccaacgtacacaaggctgaccacacacacacacacacacacccattacctcctaaaagtccctccctaaatggcactttatcagcaagaccttcctagccatactattcaaaattgcaagctccacccaccccaacactccttagccccttttctttttcttttcttttcttttttttttttttttctttttttttttttattcatattttttttttttct

SEQ ID NO: 163847 - DNA, 427 bp, Homo sapiens
caccaaaaaatacccctcacgtcctctctcggagtttgctatacaaacagtctttttcttaattgataaagagaagtacaaataagctgtgaaacagtggtttttataagtgggagctaaatgatgggaacacacggacacatagaggggaacaacacacactggggcccatcagagggtgggaggagggagaggatcaggaaaaataactaatgggtaatagatttaatacctggatgatgaaataatctgtacaaccagcccctgtgacacctgagtttacctacataacaaacctgcacatgtacccctgaacttaaaattaaagttaaaattaaaaacaatagtcaggtcaggcacagtggctcatgcctgtaatctcagcactttgggagaccaaggtgggcagatcacgtgaggccaggag

SEQ ID NO: 163848 - DNA, 388 bp, Homo sapiens
aagaatgcaaaaaaatgatctaggaccagaatgagacacagattttaaaattcagagttacaagggactttagagagtatcctctaaatacacagagaagcatgtcttctctataatatctgattaattctgttcaattttatttagtaaaactgtatttttattctagaagtccataaaacagtatactcttaataaatatgcattttattaaagcttaagtcatccaaaagcattaaagaaaaatactggcataaaaattccacctctctgccagtttaggttggtttacttgttgtgtgagaaaatatcaggggtatagatttaagaagacggaggcacgctgaaatttagaggagtctctaaaagtctgttgtttgttgcaact

SEQ ID NO: 163849 - DNA, 222 bp, Homo sapiens
acttaaggaatgcgtagaggcttagaaatattcgctaaaacagaacaatcagcagcagtgtgctcaagctcagggtctggggagggcaatgtggcagtgaagtgaccaagtctgcagctccctacagcatcatggttgacacagaaactggactgatggatgtctggctccaccactttaaaacaggcatgcagtaagcaatagaaaaaaattaaggaagat

SEQ ID NO: 163850 - DNA, 143 bp, Homo sapiens
aagggtcggcggcaaatatgcaggatcttttgagaccatctccaagactggctctgagactcctcaggccttgccaaagcaggaagggatggagtgacagcagcagcagccagggaagaggagacttcagaaagggaaactga

SEQ ID NO: 163851 - DNA, 755 bp, Homo sapiens
actaaaaaaaaagttaggggaatttatattcattaacttgatacctcagtttcacattacgaccaggaaatagattaaaaattacaaggacaaagaagggatccagaagagcacagacaataaagagaaaaggacaggggggtgatcttagtaaaaggtaagtggtctcctagttccatctctaacactgtcatttacccttttcacttacacttggaaatgtgtcttcccctactgattccatgctgccaaatgcctgtgccctactgattccatattcatcattatgaccctccaatgctacctaatactatctcctcaagcaatcattgccccttatcctcactattcttattggagcactcatcctcgtctcaaatgtaaatgattccaaacaccttccttaagaattttttggcctccaccttcccagtttcaaaaaaatgcatatacttctttcaggtaaaatagtggcatactttgccagtggctttaaaactcccaaatgactaaaggataaagtctaatgtgcttacatggttaatttgggcactataagacagtgctcttcccagaaatctaattcaattgaatttttaaatctgacatagctacctacctcttattcaactcaatatgtgactggcacacattgcaaggtaccatgaatggcacattatgcagcactaaagggcacagatatagtctctgcactaaagggcacagatatagtctctggggttaactaggagtta

SEQ ID NO: 163852 - DNA, 568 bp, Homo sapiens
tgacagtgtatcgctcattcctgccctctgaagcctttccattagaaatgctgcaatttaatctcacatgtcacaaatcaaaccccaacttgaaaactgcttcccctgaaaaggtgaacacattccatgccttgtggaaggaactccagtgcccctcagaggaagtgctgtgtccccgatagcagctggtaatatcagctccacatttgaaaggaccccaggcatcagtattcagagactgcgattgttacattagcgtgactttttgcaacttatgtgactttgggtgagttgttgaaattccacttgactcagtttctttattcactaattgagcataatctccaccattcagggtggttgtggggattaaaggagagttaaaaaaaaaaaaaatactcagccggggagctaagtacttgataaatagaagctgtaacttattattgcttactgttacttccagactctgagctaagggctttatattgtttacttccttaattcccacagaattagatagatattataaaaagccattttgcaaagaaggaaactgagtcttaga

SEQ ID NO: 163853 - DNA, 517 bp, Homo sapiens
ttcctgtccctgctcgtgtgtaaggctgccatcccctcaacttgtgccttagatcccatcccttcttccctgatcagcacttcccctcaatacagaattatccccagcattgcctagcatgttgcaacatcctccttgtgaacgaaaagaaagaaaaaatgagcagaccttctttgagcccatatttgtcttcagctactttgccttctctctgcccctttctataaaaactccttgaaagaaatggctgttctgtaggctccacagccctacctcctgttctcactttcactcatcccacgtgggaaacatacgtcttcattgctttactgaaaggctcttcgtttgatctccgtcttgccaaatccaatggccagttttgttcttatctgattttttcgatagcgttgacactccctccctcttgaaaccccctcttccttagttttggtcacgcctggcctattgttccctctctcgctgaagtagttttatcctcaggagtcagctatggcat

SEQ ID NO: 163854 - DNA, 472 bp, Homo sapiens
ttcctgtccctgctcgtgtgtaaggctgccatcccctcaacttgtgccttagatcccatcccttcttccctgatcagcacttcccctcaatacagaattatccccagcattgcctagcatgttgcaacatcctccttgtgaacgaaaagaaagaaaaaatgagcagaccttctttgagcccatatttgtcttcagctactttgccttctctctgcccctttctataaaaactccttgaaagaaatggctgttctgtaggctccacagccctacctcctgttctcactttcactcatcccacgtgggaaacatacgtcttcattgctttactgaaaggctcttcgtttgatctccgtcttgccaaatccaatggccagttttgttcttatctgattttttcgatagcgttgacactccctccctcttgaaaccccctcttccttagttttggttccttctgccttgctgtccc

SEQ ID NO: 163855 - DNA, 513 bp, Homo sapiens
ctgcgcccagcctgttatgttttatttttaaaaagatacctaataaccacaggggaggtctgtggggagggggagggggaagatacctgaaacaaaatgtcagcattgatgaaatgtgggtagtgtgtccatccatggtgttggttgtatagcttctggatatttaaagcatttaaaatactttatacttaaacaaaaaatgagcagaccttctttgagcccatatttgtcttcagctactttgccttctctctgcccctttctataaaaactccttgaaagaaatggctgttctgtaggctccacagccctacctcctgttctcactttcactcatcccacgtgggaaacatacgtcttcattgctttactgaaaggctcttcgtttgatctccgtcttgccaaatccaatggccagttttgttcttatctgattttttcgatagcgttgacactccctccctcttgaaaccccctcttccttagttttggttccttctgccttgctgtccc

SEQ ID NO: 163856 - DNA, 472 bp, Homo sapiens
acaattttaggaaggtccacagacctcttgaggtgtatccatgaactctcatgatgtacagattaagagtccctgattttagagaaagaataaatgaggcataaagatggaatgctagaaaacactggcacttaagaaatgggtaaaggagaagttcatgaaaaaaaactgagaaagataaacccaagagttagggggtatcacagaaggcaagggaagagagagtttcaagaaagtaggaataattagcagagtttagtgctgcagagagaacgaataagataaggactgaaaagtgatcattggctttagcaacaaagagtctcagtgacctttgaaagggttgttgtaaaatactgtggacagaattcagaatgcattgattaaggagtggatgagaggagaggaagtggaagagcaaatgcaggccacattcttccaagggggtagagtagctgagtggggtgccttt

SEQ ID NO: 163857 - DNA, 691 bp, Homo sapiens
gagaagagaccaccagcttgaagaattcttcctgagaaataataggaggtaaaattgggttgttagggtggggccaaattatagagggcctgcacaggaaggcagaggaatttggatttgatgtgggagtcagtgaggctttctaaattattgagtagtggtttaagaggttaccctgctgcgtgatacaggagaaatgaaagaatctaagagcagccagcaatccagacgggtaaggggtcacagggtggaggcagtaggagtcacaggccaaatctgagagttgcagcggaggagtcccttgtgagtcttctgatgcctgaggatgagagaggaagaagaaggcaagagaggtgactccatcaattatagttgtgcctttaattttaaaaaggacaaatgagcaaatctgggtcttggtagtaatgtttgagtttggctttagacatggtgaattacctgcaaatgatgaactaaggggtagtattctgaagatctaaaataggcattggggagtccctctgagccttttctggctcaggaggttgccgataaaattttaaaaaataaaataggcatcggaatccatgaaacgtatggtttctctaagggaggcaagttagaaatgagcagaaacagaggcaggggctagggctaagggcctggcttgtggagtctgaagatgagtcag

SEQ ID NO: 163858 - DNA, 270 bp, Homo sapiens
ccaagaatgtcatctctgagctactcacaatgaaaggtgatgtctgggacccaggtgtgttgaggtccccatgtctgggctatgggtgctgagtgggacttacttatccatccattttctatattctggcactgggaaacttgggtttatccatcttgataaaaggtcatttaaattccacttggcaagaaccacaaatggaagaaaggtcacgaaatcacaggctagcccttgttctcaagggaatcttcagcttaggtggctctgtaa

SEQ ID NO: 163859 - DNA, 255 bp, Homo sapiens
tctgcaatgtctgtaaaatccctgtatataatacaaaccctcaggagagggtgatatttactgaggctctacttctcaataaatatgctttatttactcattcaatagttatttatcctatttagggaacacttatacactgttgatggaactgttaagttagttcagcctctgaactaacagagttcacagatttttcaaagaactaaaaacagaattaccatttgactcagcaatcccattactgggtatata

SEQ ID NO: 163860 - DNA, 345 bp, Homo sapiens
acagcttatattaataacttccctataggcttcccacacttctgccaagttagatcctttctgtgccttgaaaacacctcaggctttcttaaatgtgctccacctatttggagtgcccttctcccctacagaaatatctgaactatacctactcgtcaatgtttgaaatgccattgctttttctgattctccttcaaaatcaggttctgactctaagtaaactgtctcctagttaatactcctttatatctttcctaggatactttttattgaattttatgtgcacttgtctcctttccccctactgaacagcaggtcttataatacatatgaaagtccaacatg

SEQ ID NO: 163861 - DNA, 267 bp, Homo sapiens
ctataaactgaagatgacataagcaatgtaacataagaaacaggtcaccaaaagtggtagaacatattgtttaagcctacataaatcctttttcagaacactggctaaaaataaatcttcatctagttcaagcactagaaaagtttatactttctataaaatttgacatctgggccgggtgcggtggctcacgcccgtaatcccagcaccttgggaggccaaggcgggcagatcacctgaggtcaggagttcgagggcagcctgacc

SEQ ID NO: 163862 - DNA, 691 bp, Homo sapiens
agcaatttgaggctctgtcatcagtttctgctacgtttcaaagatcctggagaagcctagtgttgtgtcaagacgccgatggacccatcacagtttaatccaacctacatcccagggtctccacaaatgctcaccgaagaaaattcccgggacgattcaggggcctctcaaatctcctccgagacgttgataaagaaccttagtaacttgactatcaacgctagtagcgaatctgtttcccctctatcggaagctttactccgtcgagagtctgtaggagcagcagtcctcagggaaatcgaagatgagtggctttacagcaggagaggagtaagaacattgctgtctgtgcagagagaaaagatggcaagattgagatacatgttactcggcggagttcgtacgcctgaaaagaggaccaaccaaacaaggagcctaagggagttaagaaggaattaagaccattcaatggcccctgcagttctgcgtggctaagggaaggggaccttttgggaaggctgaattgggaataaagaccccagacccttttagccataaattttatttttggcccttttttttttggttggaaattttattaacagggttgaggaaactacttcttagctgtgtaagactttcccccaataattttgataaggagttcaaggaagtatttttcctgggatct

SEQ ID NO: 163863 - DNA, 168 bp, Homo sapiens
ctagcctcgtcagggccaagaactgccttccaattcccactggagtaattttccagagagaagtgaagctgtctctgcctctgtacaaggagagtccatatgaagaatggggagtagcagcttggtagtaagccccatccagctcccacacacttggcaaggcaggtc

SEQ ID NO: 163864 - DNA, 202 bp, Homo sapiens
gccagagttgctgctgtgacagcccctgcagcaggggactgaggcttaaatatgggtgtgggaggaagcagtcaagggacattaagctgactcaggagtaccccaacccaaccacgagactgaccaggaataccccaacccaaccacgagactgaccaggaataccccaacccggccgcgagactgaccaggaataccccaa

SEQ ID NO: 163865 - DNA, 837 bp, Homo sapiens
ccctgtgatgctctggcctttcgagttcgtgtgaaaaatctgggacactcagtctgtcaaatgcgggggtgggaaggggacgcaccagtaccaaggcatggagaactggaaggaaaatatctagaaaatctgtgacatatggctgctgtagatataggcacttgcaaatgagactgtaatgctaaacagagcctttccaaccaaataggcaaagcacatttctgaataattggactggggagaagagtaaagtttcgccatctgaggcaacatggcgcagtggaaaagaatggatggggtttagagagcgcgccagggatgaacactacctattctatttactggttgtgtccctttgagcaagccacttcatctctttggacttcagttgtactcatctgtaaaatgggttcttgagtgtaaagtacttgtacatgtagcggaggggcagtgaacagcttccatgagaaccataacaattcaagacggcagctttgccagtggaattgattggtttaaaaaagagagagagaaaattaagattttgtttgaaaattttatctgaaagtcctccatggtctacaaattggctcattatctttcctcttgttttacaaatgagtaggagagaacctggaacaaaatctagtctggaacagtgcctttgtaaagaagcctctatggggaccaatccgcctgcaggcagtagaggaggaatcaggtttagccacagcaagagagaaactgagttccttaccctctgccatatcaggatgctccttggtttggggtctaatgaacctgctatccaagattactcagtcggggatctctaga

SEQ ID NO: 163866 - DNA, 335 bp, Homo sapiens
aaaaaaagcaggggggagtctggacagagcaagacgctgtctcaaaaaaaaagaaaaaaaagaaagaaagaaatggggttttgccacgttgcccaggctggttttgaactcctaggctcaaactgtcctcctgccttggcctcccaaagtgctgggattacaggcatgagccaccacgtctggcctgttctgcttttttcactcggtgtaatatcgtgagcatcttccctgtccctaagcagcccaggagctcgtgagcagtcatgctgagttttcagcagctgcacagtatctgtcccatggctgttctgtcatttgtcttggagcccgccttt

SEQ ID NO: 163867 - DNA, 326 bp, Homo sapiens
ctcttttctgtctccatgtgccaagatgtctggattgggtcattctcgtttcaccaaggttttatctaagtgctcagcagagggctaagtggctcagatgagatttcagctgcaggagccaacacagcctggcttccaacccagctcccaaactcactagccaagtagcctcaggcaggttttacaacctctttcaaaaccaagtttctccactgtaaaatagagataaaaataacacctaccacatagtgctgttataagaatacacttttataacacttagcctggcacccagcacataggaagtgttcagtaaatggaatcta

SEQ ID NO: 163868 - DNA, 473 bp, Homo sapiens
tagcctcaatttgtgaccatttggacaggcagtgacagtgacaagatgtgaattcaagggctttcactcccagttgtgtgaccttgggcaagataaatccttctgaaagcctcagtttcttcattgatcacaaatatgggggcaattataatactatcaaagtcaattaaacaaagagttactgagcactgtgatgaaacagtgaaaaatatatcgaaaagctataatccttgtggaacttgcagtctagagttagatgcagagaagcaaagacagttaatattatgcattaaagtctatgataggaacaatatccatcttacctcataaagttactgtgaggatcaaatgaggtctaataaatgtatttaagctctacataaactgtgaaatgccctacaaatgctcattactgccataaagcaaacaggccctgatgtcatctgagtgccactacatccctgccactactc

SEQ ID NO: 163869 - DNA, 416 bp, Homo sapiens
tgggtgttatattgtagggattctcaatcttgttatctttctttaaagaagttttcattttgttttgacaagtagttaggttactgtagttacttaaattactgtaagtgactggtcgttaagttagtttgaccctgccaggtttggttttatgctttgttagtatgggtttatccttggtccagacacccggcccttagaatagagggtactctttagacttaatgcttggcctttttggggtcgaaacaaaataacagaggtgctcagcaaagtctctccaccctggatgaactggtacttgaatgtcttccagcactgtgaaacctctgtgtctgtgcagttctcagcctcacagccaccgctgtctgctaaactgcatagaatctggaagccatggacccacaggatgcctc

SEQ ID NO: 163870 - DNA, 253 bp, Homo sapiens
ggccagggccctcctgcctggtgttgccgagagtgctgagtgctgagctgcccgccatctcccagcccagggtctcagcctgagagactgcttgatttgctcagttacacctggacgagccttgtcccctgtcttctgggcctccaccactgtgcctgtccttcctggaaaagctctgtacactctggtcagaggcttccttcagtgagcaaacatgtcctagagctcagcttcctttttctctccactccct

SEQ ID NO: 163871 - DNA, 554 bp, Homo sapiens
tcttgttgcccaggctggagtgcaatggcgtgatcttggctcaccgcaacccctgcctcccaggttcaaacaattctcctgcctcagcctcccgagtagctgggattacaggcatgcaccaccacgcccggcaaattttgtatttttagtagagacagggtttctccatgttgaggttggtcttgaactcctgaccttaggtgatccgcctgcctcagcctcccaaattgctgggattacaggcgtgagccaccatgcccggccttatttttaactttcatgttgtttcatgtgaaattgagaaaataaccactctatttttagacacctggttatttccaaatgttttgccattactggagataacagaatatcacaataattggagattatagtgaatacttttgtatgaaaaactttttactccttttccattattcccttaggattaattaataggagtcaaaagatgtaagtttccatggcaaagataaaaatatattggatatagaatatttcattctctacaccagtactgtccagtagaatttctg

SEQ ID NO: 163872 - DNA, 400 bp, Homo sapiens
atcataaacctaaatataaaatgcaaaattatataactcatagaagataacaggaaaaaacttatggatatggcaatgtgtttttaaacataacaccaaaggcatgatttataaaagaaagaattgataagccagatttcatttaaattttaaacttcttctttgcaaaatataatgtcaaaagaatgagaaaacaaactacaaactcggaaaaaaaattttcaaacatatctgaaaggactgtcattaaaatatacaaataattcttaacgctcaacaatgagaaaacaaataactcttaaaactcaacaacaagaaaacaaacagccagattacaaaatgggtcaaagatcttaacagacaccgcaccaaagaagacatataaatgatagaaagcatg

SEQ ID NO: 163873 - DNA, 354 bp, Homo sapiens
acatgtatttgttcaataaacaaattaactggaaaaacacagaatatttacatttgaaaggaggccaaacataccataattaaaaatgacaattgatcgagagcttctgatgtttcaacagttaggtttacagtgccttctttttgggagtctgagatgggaggtgtcaatggagagatgtgtaaagcttatgtagggaaatgtgctttgtcattcaaattttgatttaaggcaatttaaaaagtcttgtgattagtattttagtcgacagagattataagtcttaaatattaattgcagagttgagattttaaatatttcattaattcttcatattaggtcaaacaataaata

SEQ ID NO: 163874 - DNA, 544 bp, Homo sapiens
tgctcacaatgactccttgtgtgtgcctacatgcttcgcagtttacaaaggggctttgacataagcgctctagcctcacaacaaccatgtgagttaagaaaatgcaaatattcttcctctccttaaaaaaaaaaaagcgggggggtgctcaacgaagatacgttaggtgcccaaaataactggtcatttatacatacctctccaagactaatgagaagtcctcggaccccaaagcccacagttctctttctctatgccagtggttctcaaacttcacagtgcaatagaatcacatggagagatagagtttgttaatacacatactgctgtgtcctttgcaggaatgtccattgctgattcattccacgtagagtggtgcctgagaatttgcaatgttaacattttaccaggagatgctgatgctgtttttctagggacaaactttgagaaccacaggcctctgtcagactgatatgctacgaaggtgtggtctaacatgaactacgaaatctatccacagtgtcacacgatgtgagagctacat

SEQ ID NO: 163875 - DNA, 185 bp, Homo sapiens
ggaatgctaaagctgcagtgagccataatcacaccactgcattccagcctgggcaacagagcaagactctgtctcaaaaaaataaaaattaaaataaaaaaggtcacgcttcagaggaaaactttgtatcataatgcaatatttatgggattttttaagtaaaaacagaaaaaagaatatctgtg

SEQ ID NO: 163876 - DNA, 341 bp, Homo sapiens
cctgctttgcaattgggtcaggtacatatgtggggaggagagagtgggcttggaagaaaaaaaattggtttgttacctccacaaaagcagacattctgattttcccccagaagttccattaagaagaaagcaagtttttaagggtttaattgctaattcagggttgctttcagccattagggcatctgtatcaaggcgcctagtttgggaggtggaacagaagtttgacgtgctaacatttgggaactttctcagacaggatgtctttgttatctaatttctttccatttttcagtacctgctttcagatttctactttttctcttctgcttcctttggtt

SEQ ID NO: 163877 - DNA, 159 bp, Homo sapiens
tgctgggattataggtgtgagccactgcacctgaccagaaccaatcagcttgtgatttgaagtacagtacacctttaagaataaggccacaatctgctttgggattgagttcagggattaaggcaaataaaaataagtttatatcactgaagaagagac

SEQ ID NO: 163878 - DNA, 265 bp, Homo sapiens
atttaggaagacaaaagaaacaaagcaagcaaaccaccatggacgtatttctgaaaggagtgacgcctctagaagaggctcaggcaggtccttcaggaggcgtctgggagaaaccattgttaccataggaggactttctggtgggagaagatgtggcactggaagacagtgacactgatggtcctgaccctgtgcaggcctaggctgatgtgtgtgtttgtgtcttagttgttgacaaaaatgtttaaaaaggttaaaaaaaaat

SEQ ID NO: 163879 - DNA, 488 bp, Homo sapiens
ataaagccccatcccaaggtttcaggtagatgtgaatttttcaaggacactgttcaacccactgcaatccatcctctcacttcctcagaagacttgcagcggagggttcccctggctgggctagtggctcttccttggtgtccccacggtccctggagcatgatatgcagtgtcaggtaacagcctggtcctttctctgtattcatcaccatgaatatgagctccatgagggcaaatactttggtttggttagttctgcagcacaagtgcctaccttactgtgaggcacctcctagacagtcaacaaatatgcgcttttcttgaacactgtgcactgcagtaagttatgaaaaatctgtttccagatgtttcctgagactgtgctgttccattttggcccagcacattcgctaatcagagcaacactcgctggtccccaaatgtgtgtggactccatccttcccccttttatcaatatcaaatggccc

SEQ ID NO: 163880 - DNA, 274 bp, Homo sapiens
gggctcctaaagtagctcctattaaatggagcctgactgtgtgagatcgtctcagggagattgtccagctgcactcagtatgaactttgtgattgtatattcacttagtgaagggatatcccttaggcgtgtttggtgtaagcaggccggccatatttcttcagatgacaggtgcttcctagaaaacatctgaagatgggagaagttccagcttctttgtctgctgcagagatgatctagatgatctagttgagaggagaagcactgatgattc

SEQ ID NO: 163881 - DNA, 463 bp, Homo sapiens
gctgccctgctactcactagccaccacctcccttctttaatttttgcctcctgatgaagccacatttcgtggctagcccagcagtaggctgggcttttggaagggagggcaccttttcttgcctttaggggaaggtcatttctgcctttgtgggaaaccacctgagcaagtaatgacagggcacatcatgtaaacaatatctaaggggtcaaatggattttatttttgatatgcattaatggcaaggtcactatgtaatttttttggccaaactagcacattttttagagtaaaaaggggcacgaatgtaatgaaaattatatatttggaatatctattggcttacaaatatattagtgaacttatagaatagtttcagaccattttcaaaattaacattttaaaagataatttatatccttatgtgttaaaataaaaatttatattacatgaacattcagca

SEQ ID NO: 163882 - DNA, 471 bp, Homo sapiens
tcatgtacccctaaaattattcttcatgtgggttacagtccacggacctacctaatcctgtgatcattctatttcaggctggtcttaccagctcataaatgtggtaagttcccccctggttgggcttcaaacgccctgaggtatcttgatttacaattacgtgtttgggctattagaatatgacatagtaacttgttagatgtcttgtcagtgcccctttgcccttagggggaaaaataacttaaacctttatttggcttatgttcgtggtcaaaattcaaaatgatcaaaaaaggacacactgaaaaaaatctcccacccttttcccttcccaccaaattattttttctccaaggcaaccactgttaccagtttcttatgtgtccatccggagagattctctgcatatacaatcattaacagttcacagactatctccccttcaactgatttcctactttatctataagc

SEQ ID NO: 163883 - DNA, 245 bp, Homo sapiens
ggcccaaagaagttaatcactttcctaaggtcacacagctggcatgtgatagcagcgggaggtaatccccagccatctaatgcccttatccccttccccgctgcctggcacagtgctctaagtctctatctgccaaggcttttagaagtcatttgatgcacggagtgatgtatctcagggccccgacattcgccattaaacccgaggtcaggagacaggagactgcagttgtcctgcttaatccc

SEQ ID NO: 163884 - DNA, 234 bp, Homo sapiens
ctttatctcctggcctcaagcgttcctcctgcctccccctcccaaagtactgggattataggtgtgaattgccccacccagccagaaaaagtgcttttgatgccatgctgctttctaaaaataagataaaatattggtttcatttaggaaaaagaaaatttgaaaggaagcgtcattataaggacattttatatgaactaagagaagtagatcaagtagcatagaaaatatctg

SEQ ID NO: 163885 - DNA, 248 bp, Homo sapiens
cagcctgagttacttttataaccctcctgtttccttttcaaaaaataaaacccgatggctgctttttcagtgctaggtggggggtcatcaaatggagccgtcctgatttggagtcggaaagtaaaattcctcttcctccaaagaggcggtgtcttcacatctcacgaggtctagctcctgccatgggcatctggacaggcggctctggagtcttctgattggttcccatctgtaaactcagttcaaaa

SEQ ID NO: 163886 - DNA, 1085 bp, Homo sapiens
ggcacgaggtggagctgcgcgtggaggagtccaggctgcagccgagggagctgagtagggcaaagttaggagtcgctgtttggatggcaagttcagaagttggaacttgtctcagtttccccgctccagaaatggggttgtgatataaagacagggatatgagtgaagaaaacacagagccaccctggaaaggcaccctcttacgcacagtcggatggtctatggagactcacaatcatgtgcaatctggaagcaaagaatgagtggggagatctgagaatcgatactgaacagcttcagtactacgatgtcataatggggctgtgagctcagccgaaagccccccgcccagttttttttggaagtggtcatagaatctctctggagaaacaacatggaaatggagaccaaaagagggaaggagggatgccaccagatgacactgggatcccggaagacggaacactgtgtgcaacgggcaaagaacttttcaaaagggatttcaacctctgaccacctggagacaggcgactggcgctcattgtaaatgcaccgacatgacagggaacagctgctggggaggtggagacgggtgccgggagagacaggaaaccccagaggcttggaaatccaggagccacaggaagcagtgagctttctgcggagccggatccggtggagccaattcaccagcaggtcccggcagcaactcttctacaacagattcctgcccgtccctgtgccccatcgcccccctgccgtcaatctccacctcaagggagccagaccaagcctttctgtgtgtagcgcacatctctcctgcgtagagctcacctagtggcttccatagcttttttttttttttttggagacggggtcttgccctgtcacccaggctggggtacggtggcatgatcatggctcactgcagctccctcctgggctcaggtgatcctcctgcctcaaccagctactcaggaggctgaggcaggagaatggcgtgagcccgggaggcggagcttacagtgagctgagatcacacgccactgcactccagcctgggtgacagaacgagactccgtctc

SEQ ID NO: 163887 - DNA, 689 bp, Homo sapiens
gaggggtcctcttacaggacgaatctgccctatcatcctgaccacacatcacctgatgccacctcactcctccaggtgccaccacttccttcaacagatctggaaattgaggctcagagaggcacacaagtcacccagggtcacacgtggagtcagtgggatactaagttccgttttcttgcctcctcccctccccctgccactcgctggcgagctggtgatggtggcaatttaaacagaaaacctttcgtcccttgctctcacctatcgcgctggctggactccaccttctccggccaacgttgggggtgggacggggtgtgggccctttaagagcgcccgggagggatgggcaggcgcagtggtgctgggcacgaggtggagctgcgcgtggaggagtccaggctgcagccgagggagctgagtagggcaaagttaggagtcgctgtttggatggcaagttcagaagttggaacttgtctcagtttccccgctccagaaatggggttgtgatataaagacagggatatgagtgaagaaaacacagagccaccctggaaaggtgagtgtctactaacatagcttcctctatccaaatctgcgcctgagcccccgtggccttctggggcagctctgatctctctgtaaggtcacctgtctctgacctggggtgatcttctaatggtcac

SEQ ID NO: 163888 - DNA, 1024 bp, Homo sapiens
ggcacgaggtggagctgcgcgtggaggagtccaggctgcagccgagggagctgagtagggcaaagttaggagtcgctgtttggatggcaagttcagaagttggaacttgtctcagtttccccgctccagaaatggggttgtgatataaagacagggatatgagtgaagaaaacacagagccaccctggaaagcaaagaatgagtggggagatctgagaatcgatactgaacagcttcagtactacgatgtcataatggggctgtgagctcagccgaaagccccccgcccagttttttttggaagtggtcatagaatctctctggagaaacaacatggaaatggagaccaaaagagggaaggagggatgccaccagatgacactgggatcccggaagacggaacactgtgtgcaacgggcaaagaacttttcaaaagggatttcaacctctgaccacctggagacaggcgactggcgctcattgtaaatgcaccgacatgacagggaacagctgctggggaggtggagacgggtgccgggagagacaggaaaccccagaggcttggaaatccaggagccacaggaagcagtgagctttctgcggagccggatccggtggagccaattcaccagcaggtcccggcagcaactcttctacaacagattcctgcccgtccctgtgccccatcgcccccctgccgtcaatctccacctcaagggagccagaccaagcctttctgtgtgtagcgcacatctctcctgcgtagagctcacctagtggcttccatagcttttttttttttttttggagacggggtcttgccctgtcacccaggctggggtacggtggcatgatcatggctcactgcagctccctcctgggctcaggtgatcctcctgcctcaaccagctactcaggaggctgaggcaggagaatggcgtgagcccgggaggcggagcttacagtgagctgagatcacacgccactgcactccagcctgggtgacagaacgagactccgtctc

SEQ ID NO: 163889 - DNA, 524 bp, Homo sapiens
tggggctggatgggatcctggcacacaggccaggcttggggatgcaggagttagtgactgccttggacggtgacctgcagctctgcccacctgtcagctgcctggtgtctgcaagttctgtgtctcacgccagctcctgagataactgagccctggccagagggacattcaaggtcaaagatgccctgaaacatcgacagcaggttgctttcatggctgtgtagtttgataaggagattctgtgcagggagagggcagcagccacagggaggtgagcaaagacatttggtatcagtgttgcggtttgctgcaacttagcgctgatcacgatactcccggtcatcagaaccgcactttatactttgctaaaaatgctcttgcagctgctttttcttttgatcatgtatgaagtattccaggggaagaaaatatggtccttgagatcctggagaagaatcctctctccaataaagagtgatttttttaaagctagttttcttataaagcccaaatcagaatgacct

SEQ ID NO: 163890 - DNA, 191 bp, Homo sapiens
aaatatctgttcaaatcactgccttcaattctttttggtgtatgtccagaaatggaattggtagatcaaatgttaattcttttttttgtttgtttgtttgtttgtttgtttgttttttgagatggagtctcgctctgtcgaccagctgagatcgcaccactgcactccagccagggtgacagagcgagact

SEQ ID NO: 163891 - DNA, 295 bp, Homo sapiens
cctctgaactctcactatccaaacttaggaactgatgtgaacctttggataaatcccttactaaccaaagctttactatttactgtcagaaacttaagaactgaatatatgcagatatgttgatatccttatctggtctacctggacatacgagccaaaggatctggacagtgcatgtgtgaaaggacacaggtgcatgccaccacacccagctcatttttttgtatttttacattttttgtagagatggggttttgccatattgcccaggttggtctcaagctcctggtcttga

SEQ ID NO: 163892 - DNA, 325 bp, Homo sapiens
acttcattaggatgttgcaaagattaaatgagttcgttatagttaagcacttaactgtcatcatcatcatcccacagatgtagacaccgatgtccaggtaggcgatgtgatttgtccaaatcataaaactagcattaagcacgcagaagaacccaaatctcttgacaactagccctgagttccttccactgtgccatgctgcctgtattgttctatactacgccatactttctgatgcataaagtccttatcaggtacataacttatgaaggaaagaactcagaaagaagaaggcctaatgatgccattgcaacacggtctctca

SEQ ID NO: 163893 - DNA, 372 bp, Homo sapiens
cagcacacacaccccaacacggcacacacagaggctgctgctccaagcagcacaacagctcatgggacattcaggtgctgcctccccttccctgggctcagggccaaacctaaactacctctaaggaacaggtatctaagccaacacatgcacccccagcccctttacaacaagtttcacagaaccttaggtacagagaggtgagaaatttcatccaaatgtaagaaaacagccttctactctcataattgaaggaagtgtgctcaaatgccaaagtgtagtactaagtttctggaaaacttacttccctggctgagggtggtggagggaaggacactgattcatcaagaagaggaaaatattccaagtaca

SEQ ID NO: 163894 - DNA, 207 bp, Homo sapiens
ggtgaaaccaactatctccctaattgaaaacaaaatactcaaatgggcacacattatggagatgttcacacggtgtatggagggggcacacagaaagtactaaataagtattatgtaaaagaatgaatgagaaaaaatgaaccaagtaggctttctagattcacaaaaaacgtacttctaaatacctgtatctttaacaataatggg

SEQ ID NO: 163895 - DNA, 204 bp, Homo sapiens
taatacgaagaggaggaaacaacacccaagtccagccaacttccctttcaactctcctggaattcaggtccctggcgttggagaggaaaaaggagctcttgtaattttgtatcatcagtataacgatggtgttgctgggttttttaactttatggttgatggggtattgattgtcaatattgtgcgcgtgatcagtttaatgag

SEQ ID NO: 163896 - DNA, 291 bp, Homo sapiens
catttctagaaatatataggtctacaataaattaactacaaagatgtttattttgacattatttacatcagtggtagtctagtgaaaatctagctttccatcagcgtagctaggttacataaattatgcaatatccatatttttcacctttactttaaactcttctatactgtgttaagttcttatgagcgtaccttcttttataccttaagatgcttgtctcgtttgattttaataataagatcctatatacgagggtatgtaacagtgactgtcatatggtagattctt

SEQ ID NO: 163897 - DNA, 441 bp, Homo sapiens
gaaaacccccccctacaattagttaaagcttccattgagccgagatcacgccactgcactccagcctgggaaacaaagcgagactccgtctcaaaaaataaataaaagataaaaatagataaatataattttggaggtaaagtttagcagttttctttaatgtggaactttcaaagcttttcacattaaaattcattttgaatgtttattggggtggtaatactgataatatccaactgataattaccagtaaatctttagaaaacctattttgacaacacaggttggacaattctgtaatgagataatttttaaaatacgatactataagacaaatgtatacttttaaaatacttttgattagctgtgtttaattttatgattcctgggaagattttatttgaacaaaaagtgtttactgctaaaaagtttaactgtcac

SEQ ID NO: 163898 - DNA, 367 bp, Homo sapiens
acacacacacacacacacacacacacacacacacacaccaaacagcttcgtaggactacttccgcctgcaggtcctctgaacagccatatctcaaaatatgtgaaagaagtatattttggggtaaaattttttggtttccttcactacacatctcaccttgggtgttattcttgccactggtttcatgttctcagactcacgaagctgaaaaacagttggggatgcagaatttgatgtgcttcatcctttgtgggcttgaagagtctcttgttcccaaaattattccctggggccctctgcttcacaggcaaataaaagcaaaaagaagcttgctcagccttaagtgaggaaatgactcacaggttt

SEQ ID NO: 163899 - DNA, 328 bp, Homo sapiens
gggaccctcccttcacattcgtgcctccctgccaggcgggtctgtcctccagaactcccaccctactcccttctgcggaagcggagcctgcgcaccttgctggaataacacagagccttagcatagcaattgcgctggccgctctataccaagatttctacaaagaatataaagtacttttaacaaagtatccaaaaaggtgcttaagaagactccatacagctctagagaaaaggaggtttataataatccatgaaaacagaaaaacagacaaaacaggccctgattaaatctacataaaaatgtgtatacctcaagaagggaaaag

SEQ ID NO: 163900 - DNA, 328 bp, Homo sapiens
gctcctattttatgggtaggaaaaagttgaagagaatttctgcatgatctacaggatggacagtgctggtgcagaagcatacgttgcagtgttttagagctggacgggagcttggcaatcatcctgtcccaacctggcattgttttcaagaagactcagaaagatttagacaaaaaagggatctgtccaaggtcacacagcttgctgatggcaaaagtatgcagagaaatccaggtcttctgacctccagccccgggctttattaacaaatgcttcagaaactttaaaccctaatattcatcacactctgggaagaggcaaataagta

SEQ ID NO: 163901 - DNA, 475 bp, Homo sapiens
gtgtaaaaggggcagtgtggggaggaagaaagagcagtagacagaaagacaaatgtgcaagaaagttctccaaaagaagatcatgggggagcctgcccctgaactagggcaggaatagacaagcagatcaatgcagtacactagtcctgcaactcacccatctgtcagggaaattaattggtagtaaagcagttctatcaactcacagggaaaggaccatttaaacacagacatgcagcaatgggctactgatttggggaaaataaactaccataactcctcaattctacgatgcaccttcccatattttaatgttttaaaaatcataatgtgccttacaatgaaagtcgtcagagaagggaatcttacctgctactcaacacaattgcctgtacatgtgtgaatgcagccatgtgtacaggtatccattcattcaagtgtcacctcagctgaccacagcaatccatacagaatt

SEQ ID NO: 163902 - DNA, 384 bp, Homo sapiens
gcccaactcctggagcttacagtttgaccacaggagagctgctgcttggcagttttccccgtgcgttcaccccagctgagcagtgtgaccacaaccgtcacttctgtgcaggcagacctgccacgtttttatagcttggtgttcatgctctcatgctgtcattttatgtggttgacaaaggtgcgcctagaatgttcaagaagccaggcatggcttctgtggcaggcctgtgtctcatagccacacgacccggcattctaactgtggtgctgcttgggccttgtgtgtatccatgtaacacttttgggcttgagtgtggatagctctgaaagttaaaatggagagcttcctgaattggtggattgtggagaggctaaatgaaca

SEQ ID NO: 163903 - DNA, 394 bp, Homo sapiens
tacaggtgtgagctaccacgcctggccttccttcctttaattctaaatgcactgacaggcattatgtatcaaaattaaaacgtccatgccttgaacccagcaattgcgcactgagatgtttatcacacagataaatttccacgtgtgcaaaatgtcttaataatgactgcagcagttgttcgtaagaggagagatttgaggatagcctaaactgattaagcaaattatgacatatccatgcagggaaatattttgcagctgttaaaaaatgaggcgggccaattttaagggagatggaactgtaagatgtgcttttaatgcataaagcaagatgtagggagttagtactgccaagtgtggagagagccagtgtgtggagccagtgtggagagag

SEQ ID NO: 163904 - DNA, 918 bp, Homo sapiens
acccacatgaccccattattatgctgcagataaactaaaaggaccttacaatggaataagaatgtttaatagaataatatgtgtagtgaatataaaaactcaaatttgtaactcctcttgcaaatgtaagacatcatcagtttttttccattttaagctacgttttataattctttgcattatctgaattcacatttacttcaaatttcattttattccaaaaatttcaacttttcattacaaactaaaacaacaaaactgtgcatttattgaattagatccactagattacttttctgaatactttcaactacccctgtttcccaaggacaaaaaggatccccacaaccgtgactaataagcaattttaggcacatttcattcaacacattcattctaaaattagcggtgatgagacaggcttgtaaaagtgtctggaattctcttttcagattagcaacacagcaacatttgttaatctgaggaaccacccgacacatgtgtctataaaccattacatcaccattgcaataacaacaaaaactgaacttaaatttaggtggaaggataggagaaaagggaagtaaaaccttttaaggaagtaaggtaaagaagagctgacagttaacaaatgccataaaatgagaaatctttaagctactgcatgaatcaaagcaagcagtattaggcaatgcattttaattagcacaaccatggcagaaaccatctggcagatagttcagacaaagcaaaacaggattgcaatcaacaaatacttgttgctccaatattaaattttaagtcataatttagaaatatgaatgtaagaaaaatcaacctcctattacttcaaatgaaaattactgggtgtgttctcagtaaatttgaattgattctgaagttttttgcaactgaata

SEQ ID NO: 163905 - DNA, 414 bp, Homo sapiens
ctctcacgagtaaacacaataaaggcacaaaagctatgggtattgtatgtgcagctcgaatcacacacacacacgccccacacacacactcccaaaggcaattaatgaccgcaagcaccgtccaccggactggccaacacaaaatacgggagaagggctgccaaggctcaaacgaattcccgtcacaaaaacttttctagccaaggccggttaataaaatagcccagtcgcgggcaccagcagcccagaagctcgagctctagccaatctctgccctggactgcgcagagaagggaaagtagggagacaagctcgggggccccggcgacaggtgagtggggctcaagcctcaccacgcggccgttcttcggtgtacaagtcgatgacgacgtcgcctaaagtggtctccagtag

SEQ ID NO: 163906 - DNA, 162 bp, Homo sapiens
cagccacagctctgagccagcaggcgggcgtgtcacctgatgttcctcatggcagccgctgagccagcaggcctacactaccttcccttgataaatcagaccagctccttcccttgacaaagcccctgggcacagctgtgttctcaacactcctccccacca

SEQ ID NO: 163907 - DNA, 112 bp, Homo sapiens
acaggattgaaatgagtatgtaattttaaccactaacggagataaatttgtgttagctgattctaaattctctactgtagtgctctcaaactttaatgtaaatatgaatcaa

SEQ ID NO: 163908 - DNA, 246 bp, Homo sapiens
tgggtgatctagaggatcccattaggcgcgtctgcgttccacatatatggtcatttgtaaattgacagagtataccaggtgccaggatcataatatggaaggtagtgtaacatggcagttaagaatgtggactttgaagtcagatgactcaggttgggatcctggcttgtcacatacttgaacaacacctaacaataagacttcttttttggctgggcatggtggctcaagactgtaatcccagca

SEQ ID NO: 163909 - DNA, 249 bp, Homo sapiens
ccttgttctgcacagcagccttactgtttttgcgaagattatttatatgggatggctcttaggggtttcctagaaagtgatgggggtcctaaggctcctaaggctggcccctcgctcgcttttggtgcaacaactttatgtctgttataaataaggtgaccatataaactttagcattcaagttggggcacttttgagaataaaaagtgatgccaataattagtttcaaacagtcccaggtaaactggg

SEQ ID NO: 163910 - DNA, 229 bp, Homo sapiens
cacacaatccaccttcacgtttctgaactcggtgtcttttacatcatctaagactcatattgtggtacccagtgccctgaaaaccctggtatccctcaagatggccttgtcttttctactgacttcctgttcaagctctttggtttctttcgcagagtgagatcagcaaggcagggtctgggatttgcaggttatatcctggatggtggcacgacagcgcctggaacac

SEQ ID NO: 163911 - DNA, 352 bp, Homo sapiens
agtgaatgcagtagtagagcagtgtctatattcaacaaagaagggtgtttggagattgtgttaaagtatttaagtaggtttcctaccaatgttgacctggctatttcagtagcatattgtttgcagacagtgactgaggataacccagagctgctgaagtctttcagtgctacagcattgaacatgctggaatcagcactgctttctcctgtcagttccatggaatctcttctattgaagacattggtagcaggtaaaatttggaatctaaaggacattattccatgcaagagtcaagcagaaattataaatgccttactaaagatcttatctgaagttttgggaatggatg

SEQ ID NO: 163912 - DNA, 435 bp, Homo sapiens
tcttcacaggatgctggtgagtagatatgtgaggcatgcgggcattcaggtgctcatcaccaactggaccacagcccaggagcacgacagcacccagaaactcttttaacctcacaggctcaaatccatgaaacatttcccaactttaccccagatcatcacctaatggtagagctatgtagaccacacagtggctccacctctaattacagcttacttcacctgttttatctgaggatcagaagctggatcgggggcacagccagtgcaaacagaggtggaagatgggccctggagccttgaccaagaccctctgcttgtaggtctcagggttcctaccatgttccttctaacactaacttgcagtcagaagaacacacttcagtctacaggttggcctgctttctctcctttccatggctttttccataagat

SEQ ID NO: 163913 - DNA, 446 bp, Homo sapiens
acagctgaccagccctcagctgctcccagagtctggctgcctaaacttttcccagaggatggtccagcagtgctggtccagggtgggcttgggagagcagagctataggcaagagaggtgtgaatccatgtggtccccctggttctgggtaaaggccagggctggggcagaatcacagtcagaaccagggtcaggtcgtcagtgtcaagggcaaatatctttttctttaaaccacaagtgcacctctggtaccatgctcagaatcccttgtagagagtggcatccgtttgctgcatgagatgggagaaaaattagcggccctggctcgagtcttcattgccccttggctgcctgccgtgtcctatttctcatcaggccagtgtccccagtgcctgtcctgatccagaattaccacttaaccctagtggagcaggactctcagactg

SEQ ID NO: 163914 - DNA, 779 bp, Homo sapiens
aggaggcccaatacaagaaagaagtgaacagaatcctcagggatgatggtgataacgacttgttctagaactaaaatccccaaagataaaactattggtacacttgatgcttcagtgtattaagaggagatttagacaaacaggggagagtttcaggatcaagttctatgtactaaatacatagaaaacaaaacaaaacaaaaaaacagaaaacaagcattaacacggagtacagtaatctcctcttatctgaggtttcagttacccacagtcaactgcagtccaaaaatactatattgaatggaaaattccagaaatagacaatttatgccttaaattgcacggtgttgtgagtggcatgatgaaacctagtgccatcctgttcagtcccaccaaaatgtgaatgatccttttgtccactgtttccacactgatatgccacctattcatttgtcacttagtagctgtctcagttatcagaacgattgtccctgtattgcagttcttgtgttcaaaataacctttgttttacttaattctccaattttattgttagctatttattgctgttaatctcttactgtgcttaatttacaaattaaaatttatcattgatatgtatgtataagacaaaacattgtatatactgtatagggtttggtactatcagtgatttcatgcatccactggtattttgcaatgtatccactgtggataaggggggactattgtacaataaagaaattattgaataacacaatactattttcagctacaaa

SEQ ID NO: 163915 - DNA, 367 bp, Homo sapiens
gttttagggtttactggcccatcttttccctctccccacaaaaccaccactcaaatttaacatgcatttgattaatctgattcagaatcagccttatattaaaagtcaggccataacagaaaaatagggggacagacagtaagactcattaagaaggactagactagttgggaagacgggatgactcaggtattagacattactatgttgaatcttcctcttctataaatgattgggtgccctggacagtgagttaagtgcatagatatagactgctgactgacccagtctaagaattttctgaagggtggatggcaaataaatgaacagctctgaggccttaacttggctttctagcaaggattcc

SEQ ID NO: 163916 - DNA, 543 bp, Homo sapiens
tgtctttaaaattaaattttacatatattttcaagatatatgagaagacatacaccacctacctcactatggaatgtggtaaaacaaacataatttatatctgtgtcatggcagccaaatggcataaattctttagatgttgaactttgctaaaatagcaacagcaaatttcatgaacaaagtgaagtggaagagaaaagagaagaacaatccaatacaaaaactgtctaattctttctggttgccttatagcctaaaagaaaattttaaactctccttaagccataactgcaaaaaatttaaaaagaaaatccatctgttaaaacaaattacgcaaatggtattgaggctacttgaatttatgtcacagtgcccttagtattaaccacaccaactgtgggccacacacgtttgactaaatgtgcttagtggttgattccagaaatgtcataattcaagaaatgtacaaggaaaaaaactagtggaaaagcaaaagtaacaagtggaatattttacaaaattgaaaataataccacacaggtc

SEQ ID NO: 163917 - DNA, 203 bp, Homo sapiens
tccagagaatgagtccctcgtcctctccccgtggtcacaggattcttgcccgcagcacaaacttgaaatgttcctcaggccaggtaccactgtcccacagaaagacaggaaatgccacagacatcattttaaatttctagcatctacatttaaaaagtaaaaataggccaggcacagtggctcacacctataatcccaacact

SEQ ID NO: 163918 - DNA, 171 bp, Homo sapiens
atgtcgcttgggggtgatctcagaggatttcgttcgacggaagcattcgaccagaagcaatgaccacagatgactgtctctaaatactctatctcatcaaagtagccagggcatctccagtcaggttctacagaagcacaccgtgaggtgagacgggcttccagacgggaa

SEQ ID NO: 163919 - DNA, 196 bp, Homo sapiens
ccagcctgggcaacagagcgagactccatctcaaaaaaaaaaaggaaaaacccatcctaaaattcatatggaatctcaaagagccgcataatagtcaaaactatcttgaaaaagaataaagttggagaactcacactttcttatttgaaaacttactacaaagctacagtaatcaaaacaatgtggtactagcata

SEQ ID NO: 163920 - DNA, 582 bp, Homo sapiens
agcctttccggcgggagtgattttttggtaagtttaccaagttatgcagccatcaccataaatgtcttagaacattttctaacaactttattgagatgtaattcaaataccatgtatttcacccagagtttacaattcagtgtttttttaagtatattcacagataactgcagcccatcaccaattttagaacattgtcatcccctcaaaagaagaaccttacactctagctgttgcccccttagttttagaacacattgctcaccccaaaaagaacctcagtgtctaaatacaattaatctccattctcaccccccgccagcctttccggcggggggccactgcactccagcctgggtgacagagccagacgctgtcccaaaaaaaaaaaaaaagaaaaaagaaaaaaagaattccatacaaccctcatgttccatgattccaacatcttcagttccatgtttcaggctaaacattttgttgatagtcatagagctgcttgttagttcctgaagcaagcttagatggagagatagagtgctttatcctcttagtggaagccaaattacatcgagcatttgc

SEQ ID NO: 163921 - DNA, 237 bp, Homo sapiens
acgtgcgtacatcttattctgcctggatacctattctgacctgtagagctttactacggtcgtccttttccctaccttccatgaaatgaatgagtagattcgtttcctgtttcctaattcttataatgacactgtcatttttccactcacctagtcttatatttccttaaagttatatttgacttctccattttccgtcgtcccctgtggtcagctatttgccaggtccccttgatt

SEQ ID NO: 163922 - DNA, 106 bp, Homo sapiens
tagaatttttttaaaattgtaaagtacagcattttaaagaataaataattgggcatttgttttgtctcttcaaaatcccagttagaggtcccctctcttacccttg

SEQ ID NO: 163923 - DNA, 698 bp, Homo sapiens
ttgtctaaatctccttaagacattcagactcattggagatcctgttggtttcatctccttatagaactttcttcttgatcctcttaactgcagtctaggcttattgccttttgtacctagtatgtaacttcattttgagatcttctttcttcatcagcctggggtgtcttttctctcttgttgtgattggatatcattattatcttcttgagtaaagtgcatgggagataaaatgttttgaggctgatgcaggagaattgcttaaacccaggaggtggaagttgcagtgaactgagatcacaccactgcactccagccggggcgacagagtgagactccatctcaaaaaaaaaaaaaaatgataacccgttgcatgttaacataaataacatttttaaaaatgagaaatcattgtattttccaaaaagagacaaaacaaaaaaaaaaacaacaccatctttgggcgggcgggctgggccccaggaaagaagtttactaaaccccactcgtgggggccgcggggggcccccaggagagttacagcgaacagtggccaaagcggggcccacaaaagaagacgggccatgagacgaggtggggtctcaccacaaaaaaacggccgggggacccggcgctttgcaacacccgaggggggttggaggcaacggggcaacacagggccaggagcgataaaacag

SEQ ID NO: 163924 - DNA, 316 bp, Homo sapiens
gcagagtcccatgccctgttggacttggtggatttgggtaaaagctcagctctttctgaatcagtcccgttctcagcctctccttgggtctcctgggccgaagctgtgtgatcctctgcctccttccctgggggaggacgctcagtgggatcatctgtcacaagtctgcctgtcgtcttggtggtttgtgttctgtttggctgacgtcactgaagaaggaaccaccacacacagtgggttttccaggcaccggaaatcccttcccctttgcacggacccagcacctgtgaggtgggagaatctgtactgcaccgtg

SEQ ID NO: 163925 - DNA, 1587 bp, Homo sapiens
  misc_feature (980)..(980): n is a, c, g, or t
  misc_feature (1244)..(1244): n is a, c, g, or t
tgcctcatggagtttctgggaaagtaaagaagttaatatatgtaatatttcttagctaatagcagtgactacaacctgaagcaccctcctctgttcctttagtttatttcagtcatagttgtcttgcaagtcccagcacaaaatccctcttccagaaagcatttccattgatctctcttgtatttgcacttttattgaatctacttacaatcactacccacccaatttagcacttaattgagcttaaattttatcatgtggattaattctcttctcagtttgatttcaaacacattcatttttagtcacaaaatggtgtgagttatgagggatgaaggtaggcaagaatctgacttgaaggagccccacagtttacttggagagtgatcctaatattgaattttcaataagaatgtctatggggggtactatttatgaatgcttttatgtgcttgggcacttatattatctgacaccctagtaatcttgtggtgatcattgccactttaccaatgaggacagctgtaattaataatggttaaggaacttgagggtcacccagcttctcagtgtcagaatcagctacgtttaacgttgctttttttgtgatacaaagtggcaacttaaatgccaaaagcatgttaggtaagacagtcatgggaaatcattgatttttgcaggtcttgaagaattattctcattattttatcatgtttaatgaaaaatgcatattgaaataatgccatctattgattagtagatagaaactgatttggttaatttaggcttgcatttccttagtgttggaaatgtacttcctctgacttattcagtgtttgtggtataaagaaaaatagcaacaagtactgctttccatttgtatataccccttgcataattgagagcacttacttgtgtgttattatttggtattttctcaattcattgagaagatggaatagagtattgtggtcaccatntatcacatgaaaacataatgatcacttgcttaaatctcagagataattgtaaccattgtgagattatcgcctagaacttctaacacttaacctttagctaaagggtttaactgcctgcatatttcaagtgcctgtatatagtttacggttttcagtaaaaactgtggatggacaagatccccagaaatcatcgtggacttaagagatagatgttggccaggtgtggtggctcacgcctgtaatcccagcattgtgggaggctgnggcaggcagatcatgaggtcaagagatcaagaccatcctggccaacatgggggaaccccgtctctactaaaaatacaaaaattagctgggtgtggtggtgtgtgcctgtaatctcagctactcaagaggctgaggcaggagaatcacttgaacccgggaggcggaggttgcagtgagccgagatcatgccactgcactccagcctggtgacagagtgagactctgtctgaaaaaaaaaaaagagatcccagcactttgggaggccgaggcaggcggatcacgaggtcaggagatcaagaccatcctggctaaaacggtgaaaccctgtctttactaaaaatac

SEQ ID NO: 163926 - DNA, 318 bp, Homo sapiens
aagccgctacccctcacggatactcaagtgatcttcctgcctcggcctcctaaagtgctgggattgtaggtgtgagccaccgtgcctggcccaaagacatttattaaacaaataattattactgttgctgtaaatgctgtggagacagctaatggttagcccatcccaggttgattgagaggaagggcagtcagagaaggtctctgaggaattgacttttaagggtgaaacctaagaatgaagggaggacaaaagactgacctaggtagaggagatggcacaggtgaatgtcctgaggagggaaagaatgtttgtatt

SEQ ID NO: 163927 - DNA, 213 bp, Homo sapiens
atccctccgtgcaaggctggaatcagtccattgttcaactgtgccctttggggctgtggttcatttggctctgatttttcctatatgttctctcctccaacgcctccggccattcaacgcctccgggccattcaacgcctccgggccattcaacgcctccgggcccattcaacgcctccgggccattcaacgcctccgggccattcaacgcct

SEQ ID NO: 163928 - DNA, 366 bp, Homo sapiens
gtcaatgggctcggtcacgtgtgagattttatttatgtatttattttgtagagacactttctcaccatgttgtgcaggctggtcttgaacccctggacaacatagtgagatcgtctctataaaaagtttttttaaaaataaaatactgttacatgttatattattaaaattataaatgcatgcaaaactgtactgtatgtttatagatacacacatagacacaaaggctatcctaatatgtatggggttataatcctaatccaggatagtggttacctctagacaggagaaatggatgaaagtgttcacaggtcaatgggctcggtcacgtgtgagattttatttatgtatttattttgtagagac

SEQ ID NO: 163929 - DNA, 326 bp, Homo sapiens
cgaaagtgctaggattataggcatgaaacaccatgcctggcctgatatggaaaatgtatcagacgcagagagacataaacatgagactctaatcatgtcctctgcagccatacctgggggcaagtttttaaaggcattttgattttttttccctttcttctagtttccaggctagctgataaattacctaaaatgttaccacaagttgcacaatgtaactctcatccataatcttcatgttcatggaatttgtgatacaaagaaaaatgtatagccaaccaatcacttttgttattttaataaagcaaagtaaattattggtaaac

SEQ ID NO: 163930 - DNA, 421 bp, Homo sapiens
cacataatctttaatgtgaccttgtaactccccatcaaaagatggggtcttccagagcccaaggtgggagaatcgcttgaacccgggaggtggagtttgcagtgagccgagatcctgccactgcacgccagcctgcgcaacagagtagtctcaaaaacaacaacaacaacaaaaaacaaaattaaaatttattttattttattcttggacttgactctgattcctcttttccatgcatttttactctgcacacatgtgtgcatgaatgcatatatgtatttatatagaatataaagccttctgggcagggacctcattttaatacctctttatggcacccttagagtcctctaacagcccttactttttatttgcttaaaataaagtatgtgtgtgtgtgttcacgcatgtataaatgcca

SEQ ID NO: 163931 - DNA, 329 bp, Homo sapiens
cacataatctttaatgtgaccttgtaactccccatcaaaagatggggtcttccagagcccaaggtgggagaatcgcttgaacccgggaggtggagtttgcagtgagccgagatcctgccactgcacgccagcctgcgcaacagagtgagaacctgtcactaaataaataaataaacgaataaatatcgggtctataactgggtgcagtggctcatgatccagtctctttaataattattagcatatttggaatctctattcttgagtcaattttaagaattttgttgtctcttttgaaatttcctatcataaaacttttcacagtagcc

SEQ ID NO: 163932 - DNA, 199 bp, Homo sapiens
gatgtgattattatggactgtatgcctgtatcaaaatatctcatgtaccccatgaatatatacacctagtatgtactcacaaaaattaaaatgaaaaaaggaaaacatagacaaattggacgtcataaaaatttaaaacttgcacatcaatgagcactctcaacagagattagaaaaagtaaacacataggtggggtgc

SEQ ID NO: 163933 - DNA, 156 bp, Homo sapiens
tttattgcattatatcggaagagagatatttagcacatattgtcattatttttgtatccaataatattgcaattagacagaaacacatgaaattattaaaaacccatggtgggctgggcatggtggctcaaacttataatctcagcatttgaggga

SEQ ID NO: 163934 - DNA, 184 bp, Homo sapiens
gttagcaggagaattggggagatagactattagtcacatctgggataagctactcattaaaataacgttgggcaaggttacctacatttgatccttcaagaggatgggaaaagtgtttgcagagtactcactgcaataacagagcccccataatagcctcatgcactggcaagtttttccaaga

SEQ ID NO: 163935 - DNA, 430 bp, Homo sapiens
  misc_feature (329)..(329): n is a, c, g, or t
  misc_feature (338)..(339): n is a, c, g, or t
  misc_feature (363)..(363): n is a, c, g, or t
  misc_feature (365)..(365): n is a, c, g, or t
  misc_feature (368)..(368): n is a, c, g, or t
  misc_feature (372)..(372): n is a, c, g, or t
  misc_feature (383)..(383): n is a, c, g, or t
ccctaacattacaaaagagaaaaagaaaattttagattcaatatggaagtaacatatgcttatttctaaataatgggcagagatggccaaaagaccctaacttcactgtaaatacacattcgattcactgttaatcatattgtgacctgagcatataaaagaaatcggtgagattcactttgaaagtcatcttctcagacttttatcctcctgccaaattctcaaattctcatccaaagggtgaatgtgtgtgaagagggcattgtgtgtgtgtgtgtgtgtgtgtgtgtgtgtaaacttaccaaaatagcacactatatatgtgcagntattgtatnncagttatacctcaatgaagctgtntnaanatanatacgtttatncaattaacaaatatttgagtgccaactatggtctagtgttagagata

SEQ ID NO: 163936 - DNA, 520 bp, Homo sapiens
gggaggaggccctcgctgtgccaagtcattttcctgccgcaccctaccctgagcatcaccggcacccactcgccaggggcccagctctgcccggatgcagcaccctgccagctgacatgagcagatgagccacgtgactttcagtgacgcctagggcagcggccagcctgcctcaggcccacgagccaattcagccacgccttatgtgtggcatctcaccacatcagaaaggaaatatgaaggcccttgcacacggcttagcggcttgtggattccattaaaagaggaaagaaaaaaaatcacacagtagtgtttaaacacctcattagggttatgttcacaaaactcaagataatcatcagctattaccatgtctgaaatacttagactgatgataatgaagtttctgggttaggacaattgtcggaaattcaaaaatcgatcttgagttgtgagaaggtaatgggagaggcatcctcacaggaatgtgaacagattttaaagcacaaagctttccagg

SEQ ID NO: 163937 - DNA, 598 bp, Homo sapiens
ccgagagctcaggaactttatttccaagaacaaaggatacagggactgttattaaattataccaccagtgcctgctcaagcacacacaccagacgcacacacacaccagacacacacacagggccacaagtgaaactggccaggtctggctgggtgtggtggctcacgccggtaatcccaacactttgggaggccaaggtgggaggatcacttgagcccaggagtttgaggccagcctgggcaacatggtgaaactccatctctacaaaaaataaaaaaaattagccgtgcgtggtggtgtgcacctgtggtcccagctacttgggaggttgagtcaagaggattgcttgagcccaggaagtcaaggctgcagtgggtgagccatgtttgtaccagtgctctccagcctgagtgacagagcaagaccctgtctcagggaaaaaaaaaaaggaaaaagaaagaaagagagggaggaaggaaggacagagagagaaaggagggagggatggagggaggaaggaaggaaggaatgaaagaaaaaagacaagaaggaaagaaagaaaagacaaagaaagaaggaaggaaggaaagaaagaaa

SEQ ID NO: 163938 - DNA, 523 bp, Homo sapiens
atccaagagggtccttatcatcccaggcctcctggcactgcagacccagggattttgaaccggtagctcagtggttttcagagtgaagtcccaagactagcagtatctgcatcacctgggaactctctagaaatgccagtcttcagtttcacaaactctgaggtggcaggatgagagcagcaaactattttaacataccctccgggtgactgtgatgcaccccagcgtttgagaaccactgcagtagtgtgaagaaaggggaaagaacaataaacatctattgagtgcctactgttttccatctactttattttcattattttctttaggctgcacagtgtccctgggttttatatctccattgtatgaacacgagtctgactctcagattaaccttctcatgcatccaagctggaattcaaacccagagtctgctgcctccttctgtaaccatttcaccttcttactgggtttctcatagcctgagatcaagcatggatgactaaacgtgtccatagctttc

SEQ ID NO: 163939 - DNA, 133 bp, Homo sapiens
tgttgtatatcttaaatatacatagtaacatttattttaaattaattgcttactattgtacaatgacatggtaagtactcaaaaaattttcttcctttacttcaagtctggagggcctgggatcaacatctgg

SEQ ID NO: 163940 - DNA, 155 bp, Homo sapiens
gtgttagaaagacaatttggattgtaccagggatggggtaggacagaaaaacaagcagagcaggctcccttgcttttgttgtctccatagaacagtagaaaaggtgaattagaccattttgtggttgacattaccaattaattttaaattcaatg

SEQ ID NO: 163941 - DNA, 539 bp, Homo sapiens
ggactgggcaaagcggcctccccaagcccagcaatgcttctccttcccccagctccgtccttgtatgatattacatgtctgcgtttgcccaggtctttcctgggactgcctgagatagtgtatgattcagtagcggaaacactgcctttaaaacaaattataatttgcatgcagaactttgtaggagatgacctacacaagtggcatttggtgagtgctgcctttggaagttattctgtggggagctgattctgatgacttctgcctctttgtgatctaggcgtagtagacactgtaccagctgtgattctggtccagaagtgttagaagctaaataagactccaaagtacacagaaggcaggagcggacttggtcatgaggttgtgggagaagaaggggaggaatggatgagaggagagctttggtctacgcaggtggcagttcgagaaattgtcataagaacaactcaggtgaatttagtatcagggaggcgggtgggggcgggggacgtgaatcaatgtggatggtcgacagttcc

SEQ ID NO: 163942 - DNA, 361 bp, Homo sapiens
tgtcctaacacaaacacaggtgggagtggctctaagccctgttatttacccttcactttctaacattttatcaaagtcagtctccagtatagatgagtagctatgggaaaatactaggaataatcctcccaggccctcttatttttttcctggtttcttatttcttaactggattgtctcctcctctatgctattatattccactgctggattagtcttactgacagctcttaccttgctattctgctttccaagagtttcagtgattcctcagcacccgcagaggaggtgtaaatacactttatctggagctaccaagacctctagcatctttccaaagtgacgtttccaaacttttcca

SEQ ID NO: 163943 - DNA, 345 bp, Homo sapiens
aatgagctgagaccgggccactgcactccagcctgggtgaaagagtgagaccctgtctcaaaaaacaaacaaacaaaaaaagagacaaagaaaacccttttgtagtcattgcattctcttcaaaagatgttccttagtccgccctccttgcacacgcttcatgcaccatcctacactgcaaggatcttcttccccactcacctgcttatctacactctagtccacccttcttgcacaatcatcacatttctcacactaacctatgctgcttgagatttctccacacccatctcatgttcatctagccctcttggcacactcataacgcgttccacacatctctcc

SEQ ID NO: 163944 - DNA, 254 bp, Homo sapiens
agaaaaatcaggacaggagtagagcacaagcattccctccctgctccctcctggtcagcgtaatgcgtgagttacacttcaccagccagtctcggcacctttccagctaaggctttattccgcttgcctcagtctcccctcctgccccctttctgtcccaggatcccgtccagggccccacgtggcacttggccgtcacgtctccttaggtccctctcactgtggcaggtctctcagacttgcctcattttcaa

SEQ ID NO: 163945 - DNA, 333 bp, Homo sapiens
acccccacacgaacacacacacacgaacacaaacacccacacaaacacgaacacacacacacacacacacacacacacacacgaagctggtggctcaacctgccccaaggacagatctccaagaattcaggagggaaaagcgatccctcttctttccagcccccttgggggtattcccctgggggtcttgaaagggagaggggtacctcagatgttggggataaggctctttgggagttagcaaaggaactgggggtctccttggcggtcccagataaagaggaagtgcccccctcggatcggggatggaaaaaaggttccccccagagatgc

SEQ ID NO: 163946 - DNA, 226 bp, Homo sapiens
gcaggcgggatattccaggaactgccatgaaacactctcttaccaagcaattggtaaaacttacaggttgccaagtgttgctaggggaacttcaccaagaacctatggcttaaatcactaggcaaaggatgcagataattttaaacaggtcagtgatgggggcaatgatgctgcgctccccaaatgagtaaagaatgggcccgccctgagtgttgtgtctgcctgg

SEQ ID NO: 163947 - DNA, 248 bp, Homo sapiens
tggagaggtgattgctggactgcctgcttggtttacctgcaagccacaccctcactcctgcacaccagcccagctcactggagcacctggcagaaatcagaagcacatgccatttctgttgccgtggccagatggacatgatccactgatgaaaacccacatgtgtgtgcacacatcttccacactcacacacccctgcatttgaggcagagataccatgcagggctcttcccaggaaaccagcagct

SEQ ID NO: 163948 - DNA, 242 bp, Homo sapiens
taacttcccgaagttacaggaatacatttctgagcttctgattatttaaattttaatggaaaatagtctatagaaaaccatactttccgtccctcccctcagtattcccatttatctgcagaaataagaatttatcttttaaaaagaggctgaaatgaaacacaggcttttaattgtttttcttatataaattaagctgaaaaagaaaaacaagagctttactaactaaagttccgttgaag

SEQ ID NO: 163949 - DNA, 302 bp, Homo sapiens
cctctgacccacccaggattgcaaactggtattaccctacacaaaccagaattcacggagggccctgacagctctgtcctggcttcattttcatccagtgtgatcctaacgccaagggctggggcataagacccatggagaaataacacctgcccaggagtcgtagcttttctctttcaactgctctgaacaaacacaacttctagaatctggtttttatcttcctcagaaggcatgccctaggtaatgatcccaggaagagggtctgattatttccaggctgatggtgggcaggaggtttc

SEQ ID NO: 163950 - DNA, 359 bp, Homo sapiens
  misc_feature (33)..(33): n is a, c, g, or t
  misc_feature (35)..(36): n is a, c, g, or t
atggctgactctagaggaaccccccctccccgntnngagaagagagacgcacggccaagcatttggtagagcatgtagcacgttggggttccggggctgtgcagctatgtgaccttgaggcagtggaggcctagagttggaactgccccaggacaccttcaaaggaagaaaggagacccacaggagaggtctcgccgacagcggctcaggagacaggggcactgttgctggtggtagtggtcggggctggacggatagaacagagccatgtccacatggaggcagcacgcactgcagcctgagccaccaggtcagggacccctgtcgaggcagcagctgtaccggagggagtcaggccg

SEQ ID NO: 163951 - DNA, 255 bp, Homo sapiens
gtctacactcttgggcgtaccatcaaaccactgtaaaattaggacgtatcatcaaaccactggtaaaaattagcttaaaattagtttaagctaacgtcagagaataaacataagggaacaagccaccataagcagaggttgtccataaagagacagattgtaaacatttgagcataaaggccgcatatggtttctgttattaactcgccattgtaacgtgaaagcagccatagagaatatgtaaatgaatgagca

SEQ ID NO: 163952 - DNA, 154 bp, Homo sapiens
ttaatataactttctagttttttttccccatgcatgtatgttttgtgtagaaaataaatacccattttctggctaaaattaattaaattattgaacacatatttgttgagcactgactatgcactattgtgcttgacactggattcttatgtaa

SEQ ID NO: 163953 - DNA, 248 bp, Homo sapiens
aggcttccttgtgtacccaaacccagcagaggacaaacacttaggtttttttttggtgctggatacagcactgggctaagtgagctgaaggaaaggggtaacaaagggaaggaggagggggtccgggagttcagtgtctggtgcagtgtagggcagtcaccagactgggtgaggaaaggcctcagatcccaccgtcatggcagagactagaccctcatccttggtttgagacgaattgagatgggctt

SEQ ID NO: 163954 - DNA, 224 bp, Homo sapiens
aacctaaactagggtgaaattcaaagagaaaacaaagcatttcaagtctgaactaaagaaaaatgatacacttccctccttccctagtaaaactttattcatccatttatttctacttttcctatccctggaagcttttggagaaaaaaaaaatctagttttgttatttgattaagcattgatatagcacttaaggtgggctaagcattatggtaaatacatgt

SEQ ID NO: 163955 - DNA, 539 bp, Homo sapiens
gagtggccctgagttgggtgcacttatgccatgttcagatgcatgcagatgttgcaggagagacttagggttaagctgatcataacagtaaaactaaaatatattgagtacttagcacgtgccaactactcttgttattttcttagtggcttatgtgaatcacatcatttaatcctcaccacggccatttcagatagttttttttttactagctccatgttaaacaggagacagctgaagttcagaaacattaaataacttatctgggatcacatggtcagtaaatggcagagctgggatttagccaaattaactagtactgccaggagtagctctggagccatggcagtactagttaatatgttggtcatctccaaaaaaaaaaaaaaaaaaccgaagggcgggcagggacggggggctcacaccggaaatcccagcactggggaaggccgacaaggagggtccacctgaggtggggagttcgagaccagcctcaccaggagggagaaacccggtctctactaaaattggaaaattag

SEQ ID NO: 163956 - DNA, 670 bp, Homo sapiens
gtgtgactgtcccccaatttttcctaccttgatagcattcctaacttctgcttatattttgggctgttggttcctctggtctccctttttctatctagccaaccactctgctttatatcttttagaaatatctaaaaagtttatgccctgctccacccatatcacccttccttgttttccattgcttttatgaaagcattccctctgtattgtctcaaaggaattctgttaggaggaagtagatgtgggtaacctgcctgccattttaacacaattgcccccattcttcagctacttcttgttactgttctttatagtccttccttttgtctagtgctatatcaaagcataacttaaattatgtcactccccagatcaaagccttcaaagactcccaaaagtctcccaatggcagcaggtacaaatttcttatcctgacatttaagatcattcattatccagctcatataactctttctggaaaactgaccatttgccttcttgaacctaattcttcattctaaagtgcccatttgctgctcttctccaaagagtcgccacatgtaagcgttttctactataactttgctgatctctttcctctgccttactgcttatgccaattccaaccccaacaaccattaatcctactgactctcaaacattcaga

SEQ ID NO: 163957 - DNA, 443 bp, Homo sapiens
caacaggactgagaagagggtgatattttgccatttgtgttctattgctgggatgctctatgacagggtattgaaaaatgatgctgggaaggaagggtggaccatgagctccaagatgtcaaaaactggtggcgggacatggggcttccactggtgctgatgggcttaaagatcactgcagtacccaaggcccataataccctagtcctgttggactaagaaggtatcttcattgagggataacttcatcctatagttatctcagaatctctagaacctaatctatgcctggttcatcgttggcactcaataaatgtttgctacagggagggagagagcaagagaagcttctctttggtccagggaacatccccatagcataattagtatggcgtaattcagtgcaacttatggttcccaagagtctcaaacaagagctctcc

SEQ ID NO: 163958 - DNA, 514 bp, Homo sapiens
tagcaactgtacctattagctgtgtcattacagtaaaaataaaatattaaaatcttatgggcctactgtcatacatgtggtctgtccttgactaaaatgtcatttttagtgcatgaccatacttggcttgaaagcttcaggaaaccaactctcttctcttaaaatgtaagagttccaataaactcctcttagtttctttgaatttaggaacaggtagtcttatgaacaacctttgagaacataactaattcataggcaggggtgattttacatgcagaaggtccatgttactagtagtcggtccagtagtaacaaaggtataaataattcatttagggctgggcacggtggctcatgcctataatctcagcacttcgggaggcagaggcaggtagatcacaggaggtcagcagttctagaccagcctggccaacatggtgaaaccctgtctttactaaaaatacaaaaattagccgagcgtggtggcaggcgcctgtaatgacactactcggtt

SEQ ID NO: 163959 - DNA, 345 bp, Homo sapiens
ctatcaccatgaaaatacaaaagtataaaacttactggtaaagcaaatacaaataaggaacaaaaaggattcaaatgttaccactacaaaaaaaaacaaaacaaaaaaaaaaccaacaaaccacaataaactagaaagaaacatgagacatacaaaataaccagaaaacaattttttttttttgagagtcttgctctgtcgccaggttggagtgcagtggcacaatgatgttgatgatatcagctcactgcaacttctgcctcttgggttcaagtgattctcctgcctcagcctcctgagtagctgggactacaggcgcgcgccaccacacccagctaatttttg

SEQ ID NO: 163960 - DNA, 393 bp, Homo sapiens
cgtaggtgggtagggctggggggctgctgttggggctgacccacctgctacacagggccaggagaggtctcctcaaaacctgccagcccctaggctccctggatctccgggaggacaccccaccaggatcaccctggccttgtgggggccccgcccatccttcttagtggccgcccaacccctctaccaccctccccggcagggcctaagtggaccaagcctggtctgggtccccccacgtttcccacttgctggcttctcccaaagccattctggggctcgttcaacaaaacacgaaccagcgcatctgcaaataacacgcgggtgacacgggggccgtgtatctgtgggtgacacgcgggtgacacgggggccgtgtatctgtgggtgaca

SEQ ID NO: 163961 - DNA, 199 bp, Homo sapiens
tcgtccagctcagagcaattaaaacagattccttatttgtaataatacttggcttttatctggtgtttttgcaggggaacatgcctccctgctcctgagacttatgggaagaaggcatgatatatatttgccaagtcattacatctctctctctctttttttttttttttttttttttttgggggagggcggagagggg

SEQ ID NO: 163962 - DNA, 294 bp, Homo sapiens
gaaagatgggggtcatttggaatttttagatgacactcttttgttatacttttcttgtattgtgtattatgtcctacaaatcgtgcatttgttacagtaagccacagtgtgtatgtgtgtttgccaagtgctgcttggccaaaacagtgttaaataaaattgtaagaaatgctaccagggccttgcatgggttatttaattctatcaatgataaacaacgttaatgtgtagcatctcagttggcacagtatcatgtttcatttatatatgctgagatatatttaagcatgaaag

SEQ ID NO: 163963 - DNA, 674 bp, Homo sapiens
gtgacttggacccatccaacagagacgaagacaactaaatggattcaggatatattctagagataacgagtcctaactctttgccaaggatatggcaaagactctgatggaaaaggcagtaatgtgtacacaaaggtgaacataaataaatgtgtgtatgataaacactgggaatggacatagaaaaacgggtatgcaattggacagagacgacgggagacagaaggaaagatacttgctcagctgtatctaagtaagttcataggagtttcatggtctgaaaaatctgtgacagtggaatttctactaagaagcttaaaaaagtttcaccttctccttggacacttcagaataaggccttcttagaatataatgcattataccacaaatatacttttatataaaatatttgggaccaaaacaagagtaaagaaccaggatccgaaagggtgaatgcctactaaatatctttgattatctaaagctgtttaaaagctattagattggcacctggaaccccaaaatatccacttttcactgggaaggagtggctgtgcctcttcaatcatcccctaaatgcaaagaagtttgacccccacgcaatggataaaagtcacccaaaaaatgaacaaaagaggtgtttggaaaaaccagaacaccattcatcccagcta

SEQ ID NO: 163964 - DNA, 273 bp, Homo sapiens
cctcaaaaaattatattctaggagacatagaattaaacacaaataactctaccctggggtagcacatagatgctatataaatatcccaatagttaaaattaataggtgttgggagttgaaaaggccaaagggattgtgaccaactcagcattccactggaggctatatgatcaaacagcaaactgtttatcatgaatgcaggatgtgggcaaactcacgactgtgcctaccgccaggtttgctgagggcaatcactccctggcaccgtgctca

SEQ ID NO: 163965 - DNA, 806 bp, Homo sapiens
ggtttggcctttctactgtgatttcatgtcatcgactgaactcgacaagtgtcaggctgcattcaaatggcagaattgattgttgaaagtgatttaagccacctgcttctcctaggaaactggttgcttgttcaaattttgtcctgtcctttcaaactgatgtgaaataccattcattgtgtaggcactaagttaaaaatgctggtattgaaagggacagttgtatgtcatgcaagttctactttcttatgttaatgtccatgttgcacaacttctatatattctctttggtaacatacctttctaagtttatatcctacacaaaggtataacgatgcaggtggaggaccttagaaagtataagtgtgtgtgtttgtgcatgtgtgtgtgtgtgaaaaagagaaagagaaacagagagagagattgaatgtgtttatggtggaacagttacccaattggctaggttggtaataactggaaaaactgagcttcagaatattggaagaagtgaattttgatttctaaaataacctctgaaaatgtaagtcttcaagggatgggcaacgtctacttggaatgcctttatatacttaaaattcaacctcttcagcttgtatttctgcacggtgtggattaattgatgggaatagataccgaggctggctgttatagaaaatctgccaatctgaatccatggggcccactgaaatccatgtgaatggcagcatcaggataccattttacagctctcttcatcctcctccaactggactatccacactgtccctgtgttgactcaagtaccc

SEQ ID NO: 163966 - DNA, 413 bp, Homo sapiens
tgagcccagaagtttgacactgcagtgagcgataattatgccactgcactccagcctggcgacagagtgagagcctgtctttgaatgaatgaatcaatgaatgaataggattggttctggctttcagagtcaactgcacttgaccaaggcctggaaacacatgtaaagtatcctaattctcaaggagtatttttctaagacagtaagtatattttagtatgcaaaactattgcttcggacttaaacaaaaataagtgagagaaaatgctagtgttatattatcttccagcaattcccattttttaagaaaaagaaattactgtcaagctttactgaaaatttgcgtaactagatagaatggttacattttttgtctttatttatattttatgtaccaaagagttttcagaaaa

SEQ ID NO: 163967 - DNA, 347 bp, Homo sapiens
ctgtggtgacttattaaaatgaatagcgactccatctccatttcctactctgtggtctttctcatatttggatgctgtgcttttctggtttgaaggaccgttgcatatttttttgagtaaaggggagggggtttcatcttgatgagacacttactccttgtttggtaggctgaatagagctttagtggctcaagttccctctctctgtgctcatggccaccaggggacattgttgagctgtttaatgttcattgagatgcctattttccaactctacccactttaaaggactcgtaattttaaagaagcataaaaaaatcaagttgctttgatcttatgaaagagtt

SEQ ID NO: 163968 - DNA, 565 bp, Homo sapiens
gcagaactctttacctgcagtcttcccagcatcttagtgtgttctacaaacgtaagcctagacccgctgctagtgtttgtgtttgaactcctgggaaacatgcaaattgaattatactttgcctcttctctggtttgttttactttctttaaaagtaggtggatttttgctaaaactgttgctgaagcctgtgaaggaaaattttattattttgaattactatattcagatattgagttgcctagataaaaacattgaattgtcaccttatacaagtaatttttcttaaaatatcttctcttctgtttgcttccttcatgtctttcttctctgaataaagtcaggttaatttttggatgaaatacatcatctccattgcatctgtttgtatgtagatgcccttctctgcccagcctaatacttataatatggactggaaactgaaaatgagcttacaagctgtgttttttttcctcatgcttttgttttgtttcatctgtgtgataatctacagatatctactcataaactctgagaaataaagtaatatgttagaagaatgaag

SEQ ID NO: 163969 - DNA, 460 bp, Homo sapiens
gcaggggttggagagagagaggtagggggaatgagagcaggaacacagggaaggaggaaagtcggggaggcagtgggagatgccaaaaaaaaaaaatctctgcactatcttcgtgactttctccttcctttttcatgttcaaatcaaattatccaccccccatcatgcaaccatttcactgagattttgaaataattgagatgtgttgcaaacacatcctcgcacgtcaagtgagcaagtgacttcaagtctgaacacctctccagagcaatatttcactttgacgttaatgatggccaagagtctagcttgagatgaaggcaaaagggccaaacacatagacaaggtccttggaggaaaggaagggggaaaaattctgactaaaaccccactgggctagagagggtggagaagcacagcagccagtggattttcatttctttggctttatggaactgaa

SEQ ID NO: 163970 - DNA, 461 bp, Homo sapiens
atgggccagagaagaaacggctcagagagggcaggtgtgtggcctggggtcatacaacgctctttgattactagccacattgtgctgtccccacgggtaccatctgctagtcaaaatctttttatctaacaactagattcacacaggaagttaatgctctttccaagtctctgtcaaaccctccaattaaaccaaagagaaagtttcattagttactactagctctaacacattctacacttcctcatttaatttcataacactgctttcatctcccttgtattcatttttgtggcaaaggacactggttttccgtttactttaaggatatacgttttcctttcaaacgaaaccattttaaaatccacttgctgtttatgattatgttgtgatgtttatgtccatgagcaggaatcagtttaagggaggagaaagactggcacagatgttaagagtaacag

SEQ ID NO: 163971 - DNA, 296 bp, Homo sapiens
actccccacacatacacatgcacactttgctccagccatacagaatctctgtctttggctatactattccctctctggctagatgcccagccccacgtttgttttcaggtccatttttatgtatttgtaaagactgggcagcgatttcatttctctgaagccttgccatatccccctaggaaaaactgtcactccttgccagcctcaagctcccacggcatgctgctcattcctctattacagcatttatcacacttgagggtaattatctgcaggctattatgtttctcccttgc

SEQ ID NO: 163972 - DNA, 419 bp, Homo sapiens
ctaaatgagcttattttggatcttttctcttcttttcttggttaatcttgctaatggtctatcaattttatttatcttttcaaagactcagctttttgttttatttatctttcgtatttttttttcaatttcatttagttctgctctgatcttggttatttcttttcttctgctgggtttggttttggtctatttttgtttctctagttctttgaggtgtgacttgagattttctgtgctctttcagacttcttgaggtaggcatttaaggctatgaactttcctcttaatactaccttttctgtattccagaggttttaatagcttgtgtcactattactgtccagttgtaggaattaatttccatctagatttcattgttgacccaaagttcattcaggagcaggtttcttaatttc

SEQ ID NO: 163973 - DNA, 442 bp, Homo sapiens
aatgcaggtttcactatttcaaaaacaacaaaactaagaaactagagaatacaaataatccttaccagataagtatcatcattagattttaaaaggaaagtacaaaataaagcaccactatatgaaaccttagggttttctcttcaatatactaaatcttcgttttaggctagaaatctttatcattcctattttccacaaatttttacatgcaattcctttaagtctatcataattatggattcaaaacccttcataccacatgtagtgtatatattaccagctatttaacaaaattgcagttgctggatggcccataatcagagtggcaacttcaaactgccggtcaccttcgaatgggtaaggtccaggttttgtgttgaccacacactgtcgagactcaggtatagggcatatagaatacgagtggtggactggtttg

SEQ ID NO: 163974 - DNA, 284 bp, Homo sapiens
atgtggataacatctcccagttaagagtgtataggttgaaagaatatttgaaggacagaagtgggagatggagaaggaagggaagaagatcagtcacttggcctctggagattcagaacataggttaagcaatttgagacgcataggaagagaacttggagaataccaatattttacagaataggcatagagagggaaaaatcattaaggaaactaataaaaactactctacaaggtaagaaacaaattatagaaaaagaatgtagtatcatagaaggcattag

SEQ ID NO: 163975 - DNA, 206 bp, Homo sapiens
attcctttctttataaattacccaggtattctaagcaacagaaaatggactaagagtataatatactgagtaaaataagtgtctgcggatatcaatacatgaataaataagtgggaaggaggggaaaatcttccatagagtagaatgccaactgataaatgtagaaggaagaatggaattagaaatttaccatccagcaactatta

SEQ ID NO: 163976 - DNA, 315 bp, Homo sapiens
catgtttcccctctgcgtgtgcggctagaaagccaaacactgcactaatagcaaacccttaacagggacttcatggtatgtatttagtgctttatttctggcttgacttgtctgccagcattctttgttttctctttgcctcctttttaacttatctgattccacaaaatctaccaattatgtgacagactttgctctaggacctgggctgatgactgagacatacctcttcctgccgtcatagaggtcccggtctcaaggaagacaccagtcagtaataggcaagcacaatacaacatgataagcgccatggta

SEQ ID NO: 163977 - DNA, 357 bp, Homo sapiens
accttatccgctatcactttctgctcatccttgctactgcccagtattctcctgctttaaggtagaagattatcccacttcattcacatgattgttcacaaggataggagtctttgttttacttgcacatctcaagcatcaaaaagtacctgggaagaagggactttctttcttaccaaccttaccaaaaccttaccaacactggaaagaagggaagaaagaatgaaagaaaaacgaagtaagaggtccacaaattggcaagaaaaggtctctgcacctttcatttgtaaaagataaattatagtgatgtcttctttgaaatgctactcccctaagaatttcgtatttggagagact

SEQ ID NO: 163978 - DNA, 249 bp, Homo sapiens
tctctcctaaccaggacaggtcctcctaattctcatagcactatgaagccctcctttatagaactcaacatagctataattgaacattcatttatgtagttgtctaattaacatatgtctatcttatcaaactgtaagtccacgtaagaatttttgtttttatccaccactgtatcctagtctcaataatttgttgaaaaaaatcaatgagtaatattcagcttgtctccctaactgtactgtgagaac

SEQ ID NO: 163979 - DNA, 251 bp, Homo sapiens
tggatgttcaggatgaagaagtggagaagtggaaaaggacaggtaaaggtaagccagagccaaagactccttggtcttaaaaatagtccaccacatgcattgttagcttgactgcaaagctcttttcagtgagaaaagaatgaacaaagtgaggccgacacatttcagaaagcatatctgcaaactgcctataaggcaaaagcgaacttttcattttctgtctcgtaagttctgtctttgcctgccacaga

SEQ ID NO: 163980 - DNA, 533 bp, Homo sapiens
gattattttgtaaatttcttacatcagcttccccactaaatccacctttttttcctttggacacaaaccataaagtaattattagctaaaccacaaggaatctgtaaagtttaaattactgtttcaaagtgtgcagatcattgccagtaaagccacaactgcaaacttatttgcattcatgagatgaaaagaatgattgatgttcataatgcaccaggaatagatggctgtgtttctatatccacgttattaaagtctgcagtttgttgtacactgtatgcatgaaaatgtcttcagtgtcagtaatgcctcagatcatctggaagctacagaataattatcaaaggaataaattaaatggataaagtatgtaagttacaggattattcttaaagtaactgtttacttttcaaattcaactacaactataggaactctttttaaaatataaaatgaaatactaagttcttactaatatagttttttttaaaaggttaacaatttttatttattctttttgagatagggtctca

SEQ ID NO: 163981 - DNA, 604 bp, Homo sapiens
atgaaaccagacccctgcctatcaccacatacaaaaatcaactcataatggattaaagatgtaaatgtaagacctcaaactataaggatcctcgaagaaaacctaggaaatacaatattcacaaagttgtgcaactatcaacacaattcatgtttagaatattctcatcagctcccaaaagaaaccctcatccatgcacagccactcctaatttcctcttgttcccaacccccagctctaggcagcccctaatctactttgatgtctgtaggccttttctggacatttcatgtaaatgcagtcagaccacttggggccttctgtgactggtttcttttcacttagcataatgttttgtttgtttgttttttggagatggaatctcgctctatcgcccaggctggagtacagtggggcgatcttggctcactgcaaccactgcctcgcaggttcaagggattctcctgcctcagcctcccgcgtagctggaattacaggcatgagccaccacgcctggctaatttttctatttttagtagagatggagtttcaccatgttggccaggctggtctcaaactcctgaccttgagtgatccacgccca

SEQ ID NO: 163982 - DNA, 695 bp, Homo sapiens
ttttgtatttttagtagagacggagtttcaccatgttggccaggctggttttgaactcctgacctcaaggaatccaccacccttggcctcccaaagtgtatgttaattattaatcctcattataataattacatgatcacatattataaatgtggatattgccacttttaggatgaggagatgggatgtgctcactcctttaacttacgtgctttgggggaagagtgatctgtgttgcacaaaaaccctttgagagcagacactcctgcttcttttgtcacgtgtggcttcagcttttatcaagaacactgggctcctgtccaggggagagggtaggccaggagcagagcctcagaggagaatgggagtgctgtcctcacaggcggcctggaaatgcaggaggcagcacgcccagtgcttggctgcaggatccccgagggagggacaggatggatggccacaggcatgccactccttccctccgtctggattttttccctgtgaaacgggagtgtaaacaccttcctggagtggcctctccatgaaaggttgctgtcaccctgggtggcttaaggtcaccaaggccggccctgtccgaggggtcagccttcaggaggattgactcaggtccctggggccctcccgagggtctggttcagtcgacaggtgtgtggggtggggcccacagcaggaca

SEQ ID NO: 163983 - DNA, 443 bp, Homo sapiens
atgagcatttctggtcctgctgcatgagtgaggaagaaggtactgtgaagaatgtgaaaaatagggctactattttgacactgtgacgcctgctgagtttggaatgtgaccttcccggctgtctggtgttgcacagtgaagagcacagactggagttagagctgtaaccttggacaagtttacttagcagtcactaagtatttattgattatgtattagtctctagagatataggagtaaactcatggcatttattttctattagatggtgtagaaaataaaaaaccaagcaaatacagttgacccttgcacaacacagggttaggggtgcctgtcccctgcacagtcaaaaatctggatataacctttgactttctaaaaacttaactactagtagcctactgttgactgggagtcttctgttaatacaaacagtttattaa

SEQ ID NO: 163984 - DNA, 191 bp, Homo sapiens
ggaaaggaggaattatgcaactgaaagggatggaggacttctaggtagaggaaacagcatcaagagagcagaaaatgtttactggatttctgatagcttggtatgatgacatagtgtagaatacacgggaaagaggaaggatggttaaggtgaggttatgaaggatctggcaggtttttctttctttgttt

SEQ ID NO: 163985 - DNA, 447 bp, Homo sapiens
atcaaatttacttctagtttgtcactgcttgagctgaaaacatattgcaggagattgccaagggacagtctaagagtacctatcacttgggggaagcacacaacagacagatgtattgctgttaattaagggtagaatagaatgtctgtcaagagccctctgaggaccccctatttaccaaaccatggcaaataatgttgcagatcatattttgtagtcatccgtgaggaagggaaaagctgagaggtactctgactgcaagcaagaaataaacaaaggaaaaaaacaaaacatggtgattatttagccatctttgtcatcaaagcacaatgcaatgagagagaaagggagatatgtgcaaataaagatagggcaggcgcagtggcttccacctgtaacttccagcactttgggaggccaagggaggcggatcacttgaggtcagga

SEQ ID NO: 163986 - DNA, 407 bp, Homo sapiens
cgttaacttacttgttaaattcgcagcttactacaggatgcttgtgtctaagtgatttcaacttctgaaggggaattacacattttttagtcttaacataggaaggatgcttctccctaaccacgactccatgctgagtctcaggctgggctctgtccagatagaatcatctttaatatttacaactctgtgatctggttggtaccctgctttaaagatgaatacattgagactcaggggaaggggctaagctacagacatcagccatggctccgtcccaggttagctccagacctcctgctcttctcatcagttctgtcctttgagttacttaagcgtatagatggtagttgatacagttctgcataacagactgataggttcctgaccaacagtctgctcctacc

SEQ ID NO: 163987 - DNA, 638 bp, Homo sapiens
agtttattcctgtgttcatgtttttaacgttgttactaatggcatgtgttgtattaatttttatctttctcatattgcattggcaagaatgttgatgcaatattgaatttcagtggttagactggatatctctactttgttctagaacttagaaggaaataattcgttttgttcatgtagggccagcttcatgcactgtaccttgtacagtcatacaagatttcatgctcagaagtgccctgtttttgatttaacactctcttattactgccttaaatttttaaataattttacctctgtgttttaaaagtgcagtatgatgggacacttgagtacaagtgtgagcagagatgtctgtgatatacatgttcagtttcttactgttctattcacatacagcgttggtgatgccacgtgaacgcagaattcttgtggacccacagtgcttgaaagttcagcaagactctgagtacaagataagcattttatgtctataaatgagtgagcaaggttgacaactccaagaggctacactttccattcaaaaccagaactcaattcaattgcaaacaagcagtgactttccaataaacacaaacaaccatggaaccctattacataataaattttctctgtta

SEQ ID NO: 163988 - DNA, 159 bp, Homo sapiens
ccctcctcccctcaagatgtagcacaatattgggctaacctgcttgtgttcatggctacactgttgatcatcctgctgctgatggtatgtgatgagtggggcatccatcgtattttgtatggcatctttttaaaatctaaattcaagtttctgcaagaa

SEQ ID NO: 163989 - DNA, 203 bp, Homo sapiens
gtcccacactcctatagatcagtctcaagcctgctctgactccaaaggggggggctgtcatcactgtgggagtgggtgcctgcaggaagccagtttatccttttgcaggcagtggacttctctaaggctgcgggcatgtgtgttggcatcttggagtcccaggtgttttggcgtgagtaatactgtatagatgtaagtgtgtg

SEQ ID NO: 163990 - DNA, 360 bp, Homo sapiens
ctaaatttgaatatttctccatgagtagaaacttacagaaaatctttatttatctaccccctcaaccaagactttagttattcctttggagatgagttaaaaaatgaatcctaagcacagacatatacttagaggcactgtcactttgtctctttttcctttttttgttttcaactactgagtgaagagtggaggttttctacagaatttctacactaaagaagtgacttcccccccttcttgctgtatgcaattaaaaatgataaatgagaactctactttttctgagactttcttgtcttctagctaactgtcttttaaaatatatatcctaattttcaatagttaatactagatagt

SEQ ID NO: 163991 - DNA, 501 bp, Homo sapiens
tttaaaaagcagggagaaaatattagaaagcagcctttctagtaaggttaagtgctgtcctgtgacctgttggtctcaagttgtgtatgtgtgcaaggaccgtgtgtttagaacatgtttatacagtgggtcagagtcagaaaagtatgaaaaccaatgatgtaaatgaatactgaaggatatggcatagggtttatccagttaacatttaccaagcagtttatggaacctaatgcatgttatgattccattttataaaaataactcacatacatggaaagatgctatggacagtgactgtctctagattccaggattttattatttatttattcgtttatttgagacagagtctcattctgttgctcaggccagagtgaagtggcatgatcttggctcactgcaacctccacctcccaggttaaagcgattctcatgcctcagcctccccagtagctgggattacaggtgtgtgccaccatgcctggctaactttttgta

SEQ ID NO: 163992 - DNA, 338 bp, Homo sapiens
agagttatgcttatataaatgcttcaaatcctccctaattttgtttccttggtgttttcattattcatagttttccaaacaatattattgaatatctatgttttatcctattgatttgaaatgctatctttattatacggtatatgaattgtgatgtagcagggagaacagacaatcttgacaatcttgacttgtaaagaacatgactctagtgtttgcgtttcaagtatgatgctaagtgctttgtcagatatatttttattacatgtataaactactcttctagccctattttacttataatttactttaatcatgaatagatagccatacgtttt

SEQ ID NO: 163993 - DNA, 346 bp, Homo sapiens
gatttcaatcaatatatatgttttactttcttttgaacttcacatgaatggaatcatagggagtgtactctattctgtctggcttcattcactcaaaataatatttttgcaattcaacaatcaaaagttcattaaggagaaaatctactcagcaataactaatggactattgatacaagttgtgataaacatttttgtacaattctttttgtgcaccatatgtattccttttttcccagataaatgtcaaaatgtgaaatttctggctcacagtctacatgtatgtttatcttgagaaacggataaagaattgtccagagtggttggtctattttatattaccacc

SEQ ID NO: 163994 - DNA, 342 bp, Homo sapiens
gaccaattaatagaagtaccttgactcaaaggtgtctcctccaagatactagatcatcgaaaccgcaaacatctcatacacaaacgcctgagcactatctattactctcatcgctacctccctgacaagcgcctatagcactcgaataattcttctcaccctaacatgtcaacactccagacctatgtctaatgctgctttggaaacacaaaaagggaacctaaaaatgtcatttaagaacataagcgactcaactactgtttgagatggaatgcataatctaaaatatcaccatgaccttataacctgtacaatgcaaactgggatgcaagtagggaaaag

SEQ ID NO: 163995 - DNA, 491 bp, Homo sapiens
gctctccatgcctcattctcaccccagctcggcctgtgtgtctgcccacctgggcctcccatccactctgtcaagttggtgactgtgtccctgccttgtggagtcctctcaaggtcttgtggggaccttgtccaagaggtttttaataaatatttgtggggagaccaaaccaagaagaaatgagtggattaatcacagggctctaggccgggcacggtggctcatgcctgtaatcccagcactttgggaggccgaggcgggcagatcacgaggtcaggagattgagaccgtcctggccaacatggtgaaaccttgtctctactaaaaatacaaaaattagctaggcgtggtggcatgcgcctgtagtcccagctacttgggaggctgaggcaggagacctgcttgaacctgggaggtggaagttgcggtgagccaagatcatgccactgcactccagcctggcgacagagcaaggctctgtctcaaaaaaa

SEQ ID NO: 163996 - DNA, 165 bp, Homo sapiens
cttcctgtctctttattccccaggtagctcgccatagattagtaaaggaaggaagggacagcgtagacagatgggtgaagagatttgaatatgcgctgcctgctctagcttcactctaccatcctagtcagtaagacaggggttgaggcccaaatgtagtcacat

SEQ ID NO: 163997 - DNA, 543 bp, Homo sapiens
cagtgctcttgtgaaagggtgggaggagagcaaaaactcgcatgtactctatcctctcccatgaggaggaatgcctacaaaaacgttctatcgtgggctggtggggatggtgcaggtcaggagcaggattccgggctgtgctgctggctggtgttgccagctgggactgtatttccaatgcctgcaggagaaagaaaggagctgctcattctgagcttgtaagaggctccattcttcaagaacttccaaaggtcaaaatttcctctgactttactaatggcctatgaatagtgaaccacttttttgaccatagatgctggggccctgaagaaagcaggaaagacagcaaaagagtttctttggatgtctgtaaagcctgaatttgacctcagctatctgctgcctccagttcctttgctttctcaaggacccattcagacccagcgattccgcacagctttgtgccagtgcatcccagccctctgggcacatgatctccaaacacctaatctttcaaaccatgcagactggcagtcacttgca

SEQ ID NO: 163998 - DNA, 573 bp, Homo sapiens
tcacggcttctcttcacctctctggcttctgcaatgtccctgtgtctttgagcttcctgtttttatgagattttcactcatgtttttaatttcaagctctcctagttcttgggggctcctttctgtggcgccggctctgcttctggttaggggctgcttcaggcccctccaggatgccaggacggttcccaacactctcgtctcttccaagaatccagctgcatcccctggggcagttttctgtgtatttatgttgtcctttctctgccctgggctgtgcagcctgggtggggagcaggaagtctgtctcatgccagggcccacgccggccccaccccaaccactgatctgcattttatatgaacctgtcaaggcagtttgggattactgcaattttagaaaaacatctgttttgccttagctttccaatttgttggcaaaactgtttgagtattgtttacgacaccaaaagttttctacgagcctcttttttattcttacgtgtgcatctttaatacaaatccagcttcccaatgagaaaaccgtacctaacaaagggcactgtccaaaccg

SEQ ID NO: 163999 - DNA, 697 bp, Homo sapiens
cttagcagattccacagggagagggaggtgtcgttagtcatctccacagcaatattccaggaccattaagtttttagaagaaataaagtgtgacccaacaatattatatacagccaagatacagttcaaaaattaaggcaaaaggaaatgttctccattatgaaagaaatcagagaacacaagtcctaagaacttattattgaaaaaagtgaataaaattcagccaatttaagaggaacaatgaacttactggaatagctgtggtaaaaagactaatagtgagcagctaacgaatttaaatacaaaacaaatgcctacacaactatgaggattatgtttacataagagaatgtcactacctgaaaaaatagaaatgtcttcaaaaacaaacaaccctgtcagggcgcggtggctcacacctgtaaccccagcactttggaattttctagctgttctcctcattcttaagaggtattcccttcctgcctttagatgctcaagtgttagaccatgatcctcagaacaactgcagtgtcctggcaaccatgactgcaaaagccaaaaaaatcacatgaaagtcaacaatgctctgccacagctgaattggctactgttaaattaaccaatcttagaaaagcctagcatctgatcttacatgaagtaataaatttccaattgcttcagccactctgatttg

SEQ ID NO: 164000 - DNA, 344 bp, Homo sapiens
gggagatttatcttcaaggtcacaaaagtatgctagctttgggggaagctgtgtcatagtgtcaagtggaacatgcttgtttatttggtactcacgcagtgttgtttatactgaaatacttgaatgtatgtgctcacctgctgtttttcttctgccttttaaaagtcttggagtacatcattataacaaagcaatttttttttgattttgcattgcaagtttttgtttctctctaataatgcagtttacttctaagtgtggctttgataggaagatgtcagaccttcgagtggatcactaaataataatcacttgtctatcagtgagcttgttataaggtgtgt

SEQ ID NO: 164001 - DNA, 485 bp, Homo sapiens
cacatcaccccaaacacaaatatgatctgtcccattccccactgaaaacacttcagtgacttcctgcatccttaggataaattgcaagctccttacaagaccccatcacccggctcccaccagttcatgttctgatcataatgaattttatgtcatgctctctcctgttaaactggatgctctgtttaggacacattttcctcctctctgtccagactcctctaagtcctcttcagttctcaacttagacatcatttcctcagggagctggtccctggccccattctgagttcagtccctctgttgaagacgacactgtaattccgctatcatagccccgacctgcttcatgttgggacatgaagtcagagactgcacatccatctggttggccactctgcacccagcaccttgcctgctgcctggcacacaccagggcacagtgaatacaaaagtgaacaagggacaagtccagggagactgag

SEQ ID NO: 164002 - DNA, 191 bp, Homo sapiens
gaactacgatggggatcgaggtaaaatcagtgctaactcaacaatattgcaatacatcttgttagagggtagagtgaactaaagaaggatgttgtaaatctcaatctgatccataatctcaaaactggagatgatttttaaatggccgataattaaataatcagtaatgattagagctgctaatacaattt

SEQ ID NO: 164003 - DNA, 531 bp, Homo sapiens
gagtcagacttctgttgataggagtctcagaactgtctactgtggtctcacaaagctgagccaaagttttaaaacagtgagagaggacacccattttaaatcagtctgagtgagttatggttttcagtgaatggatcacctctgtagatttgaacatcaaacctttatttctaatcagtggctgagctccttcacagaattcgatgggaggctgttttcgaaagtaaggaagtcattcaggggttttgtttctgtcctaaaacagggacccctctaggggaccagcagcagacgccttcagcccctgctgcttttggctcctttggcctccaacggggtaacactgggtgacaggcctgaggacatcccaggaaggactttgggagctgagatttcactctttgttgtactgggttttatctctgggatcctaaatttttgtagtaatgaatctttctcctgtttacagttcttcacctcccagccactacctcccacgccaagcaaaaaaaataaataaataataaatca

SEQ ID NO: 164004 - DNA, 320 bp, Homo sapiens
ttgagttttccaggccctctgtgggtgtcgccgttgccgtgatagttcacacacgcaggggtgtggatctcgttcgttttcatgtagaaaacgagagcgaaactgcagagaaaagaaacgtcgggtgcatcacggcctgaccacggattcctgtttcctgcaacaaggggagtctccactgtggccggtctggaaaccggaaaggagagcgaagtcacgatgctgcttttccacgcttcgctggaggtttctgtgtccccgcagagctcgggaaacagccaacgtggtcgcgctttcgggggcgggagacacgcgagcaa

SEQ ID NO: 164005 - DNA, 131 bp, Homo sapiens
atatcgagcagttctgaacgccttggaatgatggaaagataaacaagtgaagatatccaatagggatgtggaacaagaaaactgtcacaaaggttcttttaaggaccaaaacgtagtcttgcaagtctttg

SEQ ID NO: 164006 - DNA, 639 bp, Homo sapiens
tgtgtgtataccttattgagtggtcaggaccttgcatcaaaatctgcactatcattcctgcagcagtgtacttattcacttggacgtaacacttgctgatgcttccaattctttatccaaatgttaaaataaatatgccagtatttatacattcaaatcagtatttctccccttcaaaagcctgctcttggcaagctgtgtactaattctagtgatgctgtcactactgagaataattttggagctcctgctttggagttgccttccgagtttgcaacacatttcctgattgcctcagtggtggcaaaccttcctcagctgggaaacagccaggcactgtgcggggccaacttgggcttccgaggtggggaatcgaggttgtcaataagtatgctcattaaagtaatgaaaattctcttgaaagactggcagttctaaaaggggcatttagtaatggcatggagtatgtatttaggattggaaggaattacagttggtccctgaataacaccggggttaggggctcccatcatctccacagtggaaattttgagtacaacatttaactcctcaaaaacttaactactttgaagcacaaccttcattttggtgtttatgctctggtatgtatgtaaagta

SEQ ID NO: 164007 - DNA, 621 bp, Homo sapiens
agcgccgcgccgcgccgccgccgctgccggcgctcggcttggctcgcgctctgcgctctctttcccctttccttttcgcctctcctcgttctctccctcgcctttcctttcctttctcttcctctcttcctcgctcctcggtctcggcgctctcccagcttttcttctcctggctcctggttccccgctacgccaccagtccactcacctctctccttgccctactccctccgctactccctgacgccccctgcagcccccagcccccctgcaggccccagccccagtaagtttggagaggggaacaaatgctgagcctaggtagggaccaccttggggaggaagccaaaatcacactgctcacccgagagcccctgccccgcgctggcacgcccccgcctggagtgcactcgtggccccgggcgctgtcaggtacccgaattggggtaagcgagttggtaactggacctccaaagccttcccctggggttgactttggaattgttcctacagcccggggactggtggttggggtgggaagaggaccaccaccaccaagggtgactttgagggagactagagcgcggccccccgacagctgtgggggagcgggggtgtgga

SEQ ID NO: 164008 - DNA, 186 bp, Homo sapiens
ccatacttaatgattaactcattaagtgaggccatccctagccctttgccctcgcggtgctctgctaccaatcacctgaagagaatcgacgttaaaatctcaacaagcacaaagaaagcccatgcagtcaggcaagtgaagacacaggcgactggcctagttgggcaagaacgctaaactaaatgg

SEQ ID NO: 164009 - DNA, 514 bp, Homo sapiens
caggcataacagaagtcttgccacacccataacaacacgaggttgtgacggatggtaatactgtgaagtcaaattcagctcagcaggggtctccctatagacccatgcaggttttccggagttggtgagtccagctgatggatgttaaagagagggagcagtctagcagggaagcaggtcgcggcagttctgcaaatgcccagtcctgggctggtaactaactaaaggtaaatttcacttgtttttctagaagcagcaaaaatccaaatgaactgtaaagccagggctggttatataatttgccccacccagtgcaaaatgaaaatgcaggagcttttgttaaaaaattattcagaattgcaaaatggtgtcaatggagcattaaatcacgtgtggggtccttctaagtgcctggccctgtgtgacagcacaggtcatatgcccatgaaactggccctgtatggggttgcaatcctagtctctgataaaacagactttaaaccaacaaagatca

SEQ ID NO: 164010 - DNA, 400 bp, Homo sapiens
tccgtgtttagtccaatatacatagtccagtgtatagtaattattacaagtataccaaaatataaatggcttcaaggtatatataacctaaggttaaaacaaattataaatcagattatgataattaacatggcacagagttaaagtatttattgttaataactcacttagcataataggcatgtttagcctaagtaactggtgtcacaatatttttatgcctaggaggaattctttttatatagctctcaaaagagataagattctctccacgtggtttgggcttactcctttgactgagagcatgccactttttactagaggttgatgtatgactcaacttagagttgaggatgaaaagtggggatcatagcacctgcctataccctggtacagatca

SEQ ID NO: 164011 - DNA, 471 bp, Homo sapiens
acgtgacatcccaagaaccttcacatactttgccatactgttttctagaaagaccatcaatttgtacttgttctagcagtgtataagtgcctgtctcactgcttcctgcagttgttaaatgctcactggtattctgactgacaatgaaaagctggttttaaaagtcaaagattaaatccctaaatccctaaaagcttctttgggatttgtaaatactggagctttaataatgtatctttgttaatatgcctttccctaaatcctttccaattccaaagaaaattcatctctttaccccctgatcattttctgattttagaactgaggtagctaacttgttgattaattagcaatctggaggtgtgctacttctcaagaagaaagtcaggggtctaatctgggaagccaggtgatccagtctcatagccaaaatctgtactcagcttcatgtgagaaattgtgcagccacag

SEQ ID NO: 164012 - DNA, 511 bp, Homo sapiens
tgtgtctcattggttctgaatgagtcacgtactcacttctgaaccaatcactgtgactagggaaatatgacctgctgattggctgaggcctagaccacacactccactcctagagggagggatgacactctagccagattccagagtcagagtgtaggggagggtgagtccccaaagaaaaatggaatgtgggggaactatgctagggagacagcaacaaaatatccttgataatagtgttaaatgtccccacacttgtttcctcctagaaccctatttgctgagttacttgtgcagagcacatattgagagatgttggaccttagaaatacaagacatgcataatatctctgtaattacaccttctgcttattctttacaaataggccattcgagttaggaatgttagcaaagagaaaatctcctattaattaattaatttatttatttatctgagactgagtcttgctttgtcacccagcctggagtacagtggtgtgatcttggctca

SEQ ID NO: 164013 - DNA, 366 bp, Homo sapiens
attttcaagggtgaatgactgctgggtcacgtgtagattatggcattctggaattcagggcatggggtgacaccgagtgtctccaatttcaagaagggctcaataccctcaggctcttgaccatatgctccccaaacctatcagtgttcctcctggactcttttcaaattcagcaaatgcatcctttccattgaagtcattgggatggatgacgatcttcacaggtcacctaatccgtgcacctgccttcaggcagggctgctcctaaaaccagcccagacagatggttctttgctgttctcaaaattccccagggaaggaggttccacaggctgttacaataatccattcccatgtctcccaaag

SEQ ID NO: 164014 - DNA, 750 bp, Homo sapiens
  misc_feature (59)..(59): n is a, c, g, or t
ctggttgtctggtccctgctctggggacacaggggcttacacagagtccagtcagggcnagaatccccaacgcagggtggctgagtttgtctacctttctgttcataccctgctacttgcccccctgcacctcccccctcacttactgcctctataccctttccctgaagcctcttctgcctctgcctggcacacactgtccctcctcctctctgtgcccttctctctctgacccagggctctacattctgcagcatctctggtgctattttaggtgggattgtttgtgccatgattccttgtctcttgtcccctccttttctggcacccaacactagtacattctgatgccttcccttttatgtcttgcattggtgtttgtgaaaagcaagtctttatagtgtacctttagagcaatatccattaaaaaccaggatcacacaacaagcatgtagttgaacatctgtgtgccttgcactctcctagacattgggaatgccatggggactcctgccctacctctagttctagaagagggataggggaaacaaatggataggcaatcacagtgtcagcttcttactgcatctggagaggcaggatcttgcttccttcagctcccaagcctggaggtgagctctctttgcactgtgtgttgggtggggttgtttgtggggctctgttaaaagcgtttcagtggaagatccctgagtttgcagacatcgcctggacccccacgagagagcgttg

SEQ ID NO: 164015 - DNA, 362 bp, Homo sapiens
cccttaatgaatatatatttgctttggctcctctgctctattttacatcaattcttgtgattttccaagtcataaaatgccccagatgcctttcactaaggcattttcacctggataaaaagatgtaaacagattagaccatttctaggtgagttatccaggaaacaggggtgatacaagtggattatctattttccgatctggaaaagtaggagtgatatagaagagaatcaatagttctctacaatgaaatcttagccttggagaagtgtttggtgaggggggtgaagatgggggaagtggcattgcgagagatgcagttactcactgatgccttgcatggtatcacatgatgtcacatg

SEQ ID NO: 164016 - DNA, 124 bp, Homo sapiens
ttaaagtaattagattcatccatggctttgacttttttaatttaaaatcactgattaaaagtataataaactcaatcacatagttcttttgtttaaagaatggccttggaccagaaaaaaagaa

SEQ ID NO: 164017 - DNA, 723 bp, Homo sapiens
gtgctacggctccgaatcgtaatcatgaccatacctggatccatgggtcaaatagtaatagcgcaaggaagactgaggataggagaaagaatatctctacctgtgaaacattgttagactgcctggctaggagttcattgttgttttctgaaggacgtaaccaaccactccaaaacttacaggcttaaaacaacaaacatgtatcatttcttatgattctgtgggttggctgggtggttcttctggctgaggcaggatggtctaggatagctacatccacatgtctggggtcccagctgagatgactggggctgttgaggcctttctccctgtggtgtcatcctccagaaggctgcccagatttgtccatatggtagcaggagtttcctcgaagcaagagagggcaagatccaacacagaagcacttttcaagctctgtttccatcacatttgccaatgtctcactgatgaacacaagttccatggccaagtccagttttaagaaatggagaaatagggcttggctcagtggctcatgtctgtaatcccagcactttgggaggccaaggcatgcggatcatttgaggtcaggagttccagaccagcctggccaacatggtgaaaacccatctctactaaaaatacaaaaattagctgggtgtggtggcgggcatctgtaatcccagctatttgggaggctgaagcacaagaattgcttgaacc

SEQ ID NO: 164018 - DNA, 247 bp, Homo sapiens
aggaaagtgtgcagtgtcttgccagatcagactcatggatagatttacactgaaaataaagactaagagaaaaaaaaagcggaacaagtagaatgtaaaagccctctcatcttactgtaattttttggtgtgctcacacgattaaacccttaggaagccaatttgatatcattagctcagaccattacctattttttccaaattggtctcttttttcccacacgttcatgggttaccgagcctcgaa

SEQ ID NO: 164019 - DNA, 558 bp, Homo sapiens
atcgcggtatcataagttaaaggaatgcagaaatacaggaccaagaccctatttttggggaacactgaaaccaaataatatcaaatttgtgaaaatgttgggcacctctctctaagtctaaaatcttaggtgctgtatagtatataaaaataccagtgtcagaattcatgatgtagacaataatttcttttctaggctatagacagccaagatgaatgtgagcttctaaggttttttagagaagcaagcctaggtttcagatggagagacagtgtaactggagtaaggctttggggttaataatgatgcggcttcataacaataaaaacctccttgtgtggaatagggtctcatatcataggtgagataatattggatagttggagaaggggaaagttgtgactggataatcatgaatgtaagtttgctttggggtgaaagcataagtcttttggtagctcagtaaacctctacagagagtgtccagagcaaatttattttttatatattttgggtaataagaataggattactgaggaagaagccattagcagtagg

SEQ ID NO: 164020 - DNA, 136 bp, Homo sapiens
acctcccaacaggctgggattataggcccgaccttggcatgttcttaataaatgttgattgttactactgctgttgttctgattgagcccacagtttatttaataaatcctctgttgtgggcatgtattgtgtcta

SEQ ID NO: 164021 - DNA, 587 bp, Homo sapiens
gcagtcgcgttccaaaactatgaccaagcatctctaatattgggtcactggggatcagtgacaccacttcgtcgtgtacgtcctatttcattcactggcttggtcttgtacagcttcccatataacctaggcagcattccttggtactctgtccctctatagatctctctctctccctccctctctctctctctcctgacaacctcatactctctcaaaacttcagttacattcaacatgataattagcatcttttatgcttatatgctgctttaaaatttacaaagcattttttcatatattgtctcacttaattgtcataacaaccctgcaagtgagtagagcaggcattcactaatatgacccttgtcttacagatgaggaatcaagatcagagagttcagaagttcaaggtctcataactagaaagtgtcagaaccagaataagggccgggcatggtggctcatcctagcactttgggaggctgaggcaggaggattgcttgagctcaagagttcgagaccaatctgagcaacataggaagaccttgtctctacagaatattaaaaaattagccgggcatggt

SEQ ID NO: 164022 - DNA, 164 bp, Homo sapiens
accgcgcctggcctggaggggttttttatttccttattttggatgttaatctattgtcactgtgcactgctcccagtctaaggcttatctttttactttgtgtcttgtgtcttacaaaggatccctttgggatccctagggatactacaaagtatccaagtttt

SEQ ID NO: 164023 - DNA, 153 bp, Homo sapiens
agctgagatggcaccactacactccaggctgggtgacagagcaagactctgaaaacaaaaacaaaaacaactgaggatgacaagcaggtgccctagagattacagggcttatgggcagagggatgggaaaacaagctgcaggaagcctctctg

SEQ ID NO: 164024 - DNA, 396 bp, Homo sapiens
aaataagttctccctgggcatttaaactgaaggttccatagatgtcagacttctagggtcatgggcttgccgcttgtagaaaaaacaaaatgcaaacctgtttatttcaatctgtctgacaaaaaaagggaaatttctgaaaattcactatctgccctccaaggtagccaacaaagaagcaagtgagccaggtaccagcaaagacagaaattgagtgcaaggtagtgggcacacatgaacaggcaccaagagcagcaaggcacaaataggaaacgccaagtgctgggcctactctggcctctgatttcagccctgcagtagccattacctgttagcagtggcacggtaaagcactagatggaaatgctggtggatgaggaagagtccaggagggca

SEQ ID NO: 164025 - DNA, 239 bp, Homo sapiens
tccaccctagactgactcaatatcactatctccatttagaaatatcacaggcatcttaaaatgagtatattcaaaacaaaactcctgatgtgtgcctctattcccaaatctccatcatagtaaatgtcaaccatccagaaagccaaaaagctgagaatcattcttgatttccccccatttcacacccaacccatcagttaaatcccaccaattaggccaggcatggtggctcacacttg

SEQ ID NO: 164026 - DNA, 504 bp, Homo sapiens
tcagagtcagaagtctgggtggaaggtcagcgccccatctcagggggctgcccccaacaaggagtgatttatggtactgaggagccgcgcccgggagagcctggcccgcccctccacaccgcctggcctcagctccggcagtggccccgcgccgctggtctcgtccccagacagggcagtggacatggacttcgcaacggggcgaggtcgcggggtttgcccttgaattcccttgtacacacccacatgctctgccttcctcagggcgctgctccccgggggccggcggtcctccctgtggaggagtcatctcccagtccccgtggaaaagcaggctcggctggagggacgggattcctcggccctggtgcgctcatctgcaggcccagcctggcatagggtgagcccttcctccttggctgtcgatgccccgcaggcccagacacctcagccatctccttccacgcatatttcttgtgttttgttttttgaaattgtggtaaa

SEQ ID NO: 164027 - DNA, 251 bp, Homo sapiens
tcagctgtgccgacatcacacaaacctaggatgtgaagcatccctctcctcgctaatgtctatttgatacaaaagttttcatatccattcccctgcattccatgagtaaaaaacacatttattctgagatttgccatcccctgagagggctcctgggcatcgcgtcagcaaaaaggcagttgtatgtgctaactccaggccaaaatgtggaggagtgtcacttatacgcagggggtaggtatgatgaagga

SEQ ID NO: 164028 - DNA, 272 bp, Homo sapiens
ttaaaccttactgcatctaaagtttaataaatcaaatcggggtgttcaaaagacactgtcatctagaaaacaggctacattaatgggtatgtgtatataaacttcaagtcatttataagaatctttaagcaattcatcatgtttctgtctttttactcattacataaaatgagtatcttatctcctgtgcatctgaagtgataccggctacgtactatccttgggagaactgaagaggttcactcagttttctgtagaggttatctgtggaa

SEQ ID NO: 164029 - DNA, 412 bp, Homo sapiens
agagaatgacctattgcagctcaagagatgaattaatcagaatgagcaggtgaagtcagcatctgtgtgaaagaggtgtctggaaagggggtgggtttagagaggcccgttttagttctcaagcacaaggagcttttccctgagctaggatctgctcacatgctgagcctgaagtccacaggtatttctacccctcttctctcatggctggcaggcttctcattcttgaggccttggcttaaatgtgacctctgcagacctacactatctaagataggctccacctgccactctgtctcacagcactccgattgttttcttcatagcttttcgatgtttataaggattgactgtttattcttttttttttttttttttgaaacagagtcttgctctgttgccaggctggagt

SEQ ID NO: 164030 - DNA, 969 bp, Homo sapiens
cctctcaaataacattcaaaaccctttcttgaaaatggtctatcttgagagttgcagcagtagggaactcattaaatatgaacaggtaattttaatgcctaatggtttttaaaaaactgaagaaagttcatctcaacatagctgggaaagaaactctttaatgttcttttagaaatttactgacaaataaatggggagaagctttttcaaaaaaagataaaaaataatcagtacagaaagatgcactttagtgtagccatgaaagaaatttattcaatgaagaaaactattatacaactaagattgtggttgaaattcagtcacttgttggaaattgcgcaatggagacttaagatttagtgggacaaagtatatgcataacacacacgcacacacacacacagtgaatatatttggaataaaaaatttggattattgacaggtgtggtggctcacgcctgtaatccgagcactttgggaggccgaggcaggtggatcacttgaggtcaggagtttgagaccagcctggccaacatggtaaaactccatctctactaaaagacacaaaaattagccgagcatggtggcacacgcctgttaattctggctactcaggaggctgaggcaggagggagaatcgcctgaacccgggaggcgagggttgcattgaggcgagattgtcactgcactctagcctaagtgacagagcgagactctgtctaaaacaaaacaaaacaaaaatttggattatcaaggaaattgataagggaaatggaaaagattcttaaatcaccttcagaaagcttttatcaactgaccaaatagttttggttctgtgataagcaactccaaagaaaattacatactacgctttagctcatccaaatgtctgatatcaaagttatccttgctgaaagttctggagtaaatgtcaatggatataaaacatctaccatttccagcttccaa

SEQ ID NO: 164031 - DNA, 122 bp, Homo sapiens
accaatatcttacatatgtgactaattctataaatgcaacccattgtgtgttcactttggaaaggctgatgataggataccagtctcttcagcccttatcgcacaggcgcccacgtatgcac

SEQ ID NO: 164032 - DNA, 248 bp, Homo sapiens
gagatggagtctcactctgtcgcccaggctggagtgtagtggtgtgatctcggctcgctgcaagctctgcctcccgggttcacgccattctcctgcctcagccccccgagtagctgggactacagcttagctgacatatagtttcctgtgcaaaagtattattttaataaaaatattctcattctggaattctacaagaacgtgacaaacttgtgaacatatgtataaaatttagtaaaatgtggtca

SEQ ID NO: 164033 - DNA, 307 bp, Homo sapiens
cagatgttaccattttagaaaaatctcagaagaaaggccaaaatctctcttgaggggtatattctcaatccaggtcacataggtttctcacagacaaaaccgtaagacacatgaagctgtcaggtaagcaagaaccactggacacaactaatagcaggattagattttcaacaacttcagttaagatatgtgatagtctacaaaattaaaagttatttaagacatagaagaaggaataagaatataaaagcgtgagccactgcaaccggacatataacaagataccagattaggcgtaaaatgccaa

SEQ ID NO: 164034 - DNA, 511 bp, Homo sapiens
ctttcttttcggagactctcatctcacccaacgagaaacacccacaggtgtgaggggcaggccaccccttcatcagaaccatttttcttggttaataattttcaaaaatcaaattggtttctaccattttaaaaagggaatttgacataatatccccaaattctagtttatcctaaaaaaattcaaagatctggcagctccaggtccatatttattctggcagacagttaggtaaagcaattcactctccaggtgctcacaacctcacccagccccgccgctcgttacagtactcacctagcgcaggagaaggttgagtttgacaacttgtactgcagcaacaatatctaagctggaactgtgcttcccagaattctttctgctttatgtttccaggccaaggttggccacaaaagaaacctgtagtgaactggaaggcagaagtgaaggcacatccagtaggctcagaagggctgggcgatgttgaagcacctgctcggtgttgctgatt

SEQ ID NO: 164035 - DNA, 645 bp, Homo sapiens
tgtttggcagctgctcgttgagaaccttgaaagtcgaggctcccagtcagaattttaggtacctgcctgttgacctctggctctaggatgtgtgttttagaaacctgtatctagtgtgcgtgcgtgtgtgctcactggagcgagtactaggaggttgtagggaggaataccaggtattacagaagggatcacttagagcttggtgagtgggtggataagtaggtgcctgagagaggtcaggagtaggaggaaggaagcctggttaatgattgtgtattttaagataacctacatacttggccatacatagttcctagtctctctggccccagagagaggttctccacacctgagcctcatgacactaacccagccagctgagcttcagccaagggtttgtttggtgcttgactgagagagaatgtaaatgggacctgagaaatagacctttaccaaattccatttagtggtattttgctttctgaatatttaaatgaaactttaggttatagcataagtaaatttttttttttttcgagactgagtctctgtcactcaggctggagtgcagtggcatgatctccgctcgctgcaacctccacctcacgggtttaagcgattctcatgcctcagcctcctgagtag

SEQ ID NO: 164036 - DNA, 264 bp, Homo sapiens
ccggctttcctgacagtgcatgccatgaacgttgttgtgtctctggctgcgtgcacacacgtttctcaaggggaagtcaacaggcggctcctgggtcagcaggaacgcacatcttcgcctttgccagaaaacgccaggctgctctccagactgtgctgctgcctggtgccgcagcaggagatgaggacccccgcccgtcccatgcaaggatccgaatccgacctggccatctttaccacgctgtggggcacagaattggatctg

SEQ ID NO: 164037 - DNA, 476 bp, Homo sapiens
tgagagccagcaagatgctttgttgcaaggcatggtggaactggtgaagattgggaaggaaaagcttgctcatggccacttaaaacaaaccaaaagtaaagtggcgttacaggctcaaatagaaaatcacaaggtttttttccagaagcttgttgctgacatgttgttgatccaagcatactctgccaaaatacttccttctttattgcaaaacagagagacattttgggcagaacaagtaacagaagttaaaatactagaagaaaagtcacgccaatgtggtatgaagctgcagagtttgttgcagaaatgggaagaatttgatgaaaactatgcatctcttgaaaaggacctggaaattcttatatctacattgccctctgtgagtttggtggaagaaacagaggaaagattagtggaaaggatttcattttaccagcaaataaaaagaaacattggtggaaaacacgcccggc

SEQ ID NO: 164038 - DNA, 229 bp, Homo sapiens
ttcttcagggtgcctttctgcatgttgatccccttgtacctccatattatgtcctgccctgaatctaccatctctatccccaaggcactggctcccagatgcccccaaatgttctgtgcccatgctgctgaaccccctggtatccagtcccccaagtccctgtctgaggccaggccatgacgacagacaaacttatccctcattctctcatctatcccccccaaccccc

SEQ ID NO: 164039 - DNA, 397 bp, Homo sapiens
gggagagcttgtgtcatttatcaacactggaggtagagtgggctactgttagtgtggtacgttacgtggagaggttttctttcaagagtgcccccacccccaacaaaagggaacagtttattggcatatggactttgtaggaacagggggaatgggattctattccacaagtaactgcagtgacatgcactttgatgatatgaaagagcccattttctaggctcatgtttctgaaaaggagctaaaagaagaggagagggagtttaagaatgtgatcatttccttcctgtctgtgtgattttgtttgaggttagtgaggagaagtgagtcaggcaccaggttccctcaagaaatgcttgagattcaagtaatttggggacaatagattgtcaagggc

SEQ ID NO: 164040 - DNA, 461 bp, Homo sapiens
atataggagttaggcaaactcagatgagaccattaaaaaaagaatattcaaaataggtatcaaagtggggaggggaataagctcagagtatttttctctaacccttttctgaacagtttaactctgaaacacagccactgttcagcaaaactataagacaaacaaactgatatgaatttggtgcccttctacctctttttgtgcctccctcctttctcctcttccattgtaattcatactcccatggtgtgtagcactgcctttcattgcattctgtagatttgggcagcacccagggcatcaaaatgacacttcctacctcccctcacatcaaaatcctatttctgtagtactgcgctctgaggcattagctctggaataaagtaattcctcgctaacttgctaatgattagtgatgactctatatgggcctctacagagagcaactctgtaggaactgt

SEQ ID NO: 164041 - DNA, 530 bp, Homo sapiens
aagagaagtactgcctggaagaagacaaagacagctcacagtattgagaaggatgaagagcctggcctcagaagggacagaatgggacaggtagagaggtgtgttagcagaagggccaccactggggtgtatctggcccacactgtacatgttaagattccctgaagataggctgatgggcccagtgaggtcacaggcccactggaaagtggaataattccccaaaagaaatctaggtattgccgccaaagaggcagtgaaggtataggcagaaaagacgatgatgctcactgataggacagcacccagccctctctgacattctctggagcagctcaacccaccctccagattgggttaactgagactggggaaggaacactgttcagtgctgccatcccccacagaaggcagaggtggtccatgggggccctacctgcccatccagaacaatcttttgagagctgtgttcaaatggccatctaatcaatttcttttttttctttttctttttttcctttttttttttt

SEQ ID NO: 164042 - DNA, 269 bp, Homo sapiens
ctcttttcctcttccaaatgattaaactggtaaaatttttgtattagaggaattaaggtgagaggtgctgagcaaaatatgaatcttccaaggtttattcttgtaccttgttagggatatgcgtgggtgtttgtgtgattgtgagagaaacagaatgtgtgtatgtgtcactgattttttaaaagtatagatgttgctttattatttgccttaaatatatagcaaaatcaacctgtagacaatgcacctgaagagaaaatgtaactgtg

SEQ ID NO: 164043 - DNA, 678 bp, Homo sapiens
ccccaggtgaggtaacaagagtcagggtctggctgaaatctcctctccccgttcgcactcctgggctgagtgccactcggcaaggcgtgagccattttgcatgatgaagtccacattacagatttcttctgacacctgatgactaacaaggtctgaaaacaacaagacacctctaggcgctgcatcctcctcctcctcttcagtgtttatggaacacctcctaggtattgggtgggtgttttgtgccaaggatgcaagcaaaacattagagacaaaaggaggaatagaatatgccaaaggccaaggagggtatgaactagtggttcccagagtttgagcttttatgagcagctaaaagtgagagctttattaactaggatcagacattgataattaggtcaaaggataaaagaggttcagcctaacagtggcctaaacaagacagaaaataaaagtttatctctatcatgagagtccacagtccagagtctcactgagtaagggaaaggtgagggtgagcgctttgctgcccttcctgtgatattctcaaaggaaagacgggggagaaagaggagactcacacaatccattctccaccccgcagctgcagcctgcgtactctttgaaatatgtcattcagatcgttatcctgcttctcatcttcctgtggctttccat

SEQ ID NO: 164044 - DNA, 187 bp, Homo sapiens
gttaacacggaagcaaaaatgagccacgagccatggaaacacacagcaccaactcccccctcgaattccactcagaatcaaacacatgcttgacttaaattacatatgttgctgggttgagaagcaggagaaaataaattcatttatgactagcactaaaaaggaaaaccttctagtcactgcttca

SEQ ID NO: 164045 - DNA, 156 bp, Homo sapiens
ttcatagttgagaaagatgaggcagagacggtagtgaccggcttgagcctagactgcgccaagcttgccagagcagagccgggtggaaactgtcttcctgcaaagccaggttttccttcacggcccctcctaatgatgtttcttttcctatcattg

SEQ ID NO: 164046 - DNA, 631 bp, Homo sapiens
ctatgttacaggagtttgtaaacttataagaaggaaaagacaagtagatgactgactatcacagatgctgaatttgattcacttggaagaaaagaccaaagcaaaatgatactgaagtgaggagagaagcatcttcttaggaggagaaatggtttccttgggaggagtcttgaagagctcttcataaggactttgaaggatggacagaactttaattggtgacataaagggagaatattctaggaggtgggaagaccaggagcaaaagcccagaggaggtaaagcagaaataaattcaagcaaacctgcttagagagaggaagcaggaaacagaactggagctgtaagttggggcaatagaggagggcctctgtgtgccaagtcaaggcagtttacttaatttgtgagattctgtcactgtggttggttttgaaaagataaggtacagctgcattttaggaagttccacctgccaatggtgtttgggatgaatggaaaagtagaagactggctgggcacggtggctcatgcctgcaatcctagcacttcgggaggctgaggtgggcagatcacttgaggtcaggagtttgggaccagcctgatcaatatggtgaaaccttgtctctactaa

SEQ ID NO: 164047 - DNA, 163 bp, Homo sapiens
tgctgatctatgattttaggacccagataataatattgccaaccccaatccccggtcgaccaagtccaggttctgtggacatgcctggatctgtggaagttagggctctcacacaccacagcccgcacatccctgcgagattgctcgcctacatgtctcaggc

SEQ ID NO: 164048 - DNA, 252 bp, Homo sapiens
gctttgtccttgataaggtttgtctgtctctagaaaatgacaataaaatttcccttcatttaccagaggttagaatggggttatactctcacctcagcaaaggggcatgggattgcaataacttgtttaggttggttatggttcatccctttgagactggagaaagggcctgccttctctaagacaaaaggatacctgccttttaaacttctaagtaggggcagtgattgctttgaaggcaataaagtgtgc

SEQ ID NO: 164049 - DNA, 1048 bp, Homo sapiens
ttttaggggtgggaagaggagatcttgctgagaactgaggatgctggagtcagggaagcagagaaggttggcgggggtgacagataatgcctggcacaatgataccttgggatttgagatgatcaagctgagatccagctccctcttgtgtgtggactcctgcgagagcagagcaactgcccccacccctgcccccacctgtctgccttgctccttggacctgtgtctaagaccagaggcatctcacccagcccagtttcagaaggaggatgctaatacatctcatggtcatcttttccatcctttcttattatctaacttccctccttcagtttgtaacataaaaccttttttctctctacttttgaaaattttaaaggggaatccttttcatttggatggggtcgggggatggggataaggggggagaaaagcataattttattttcactcaccctaactgaaatttagtgttttctgtgattatgaatgttggcaacaattcatgatagtattagcaaaaagtttcctactacactacagttatttctggtaccttgaaaatctattggccgggcacggtggctcatgcctgtaattccagcactttgggaggccgagatgggaggatcaactgaggtcaggagttggagaccgttctggctaacatggtgaaatcccgtttctgttaaaaatacaaaaaattagccgggcatagtgatgcacgcttgtaagcatctcaaaaaaaaaggaaataattcatctgtattttggcattaagctaataattagatttaccactagatcttactatttaatgtattaataaagaatgacatattactaatattgcacacttggttttaaattttgataactttcaatataatttcttatgtatttattttatgaatttataagtattcttggccagactaatgcctgtaattccagcaatttgagaggctgaggcagatggatcactcgaggccaggagtttgagaccagcttgggcaatatggcaaaactctgtctctaccaaaaaaaa

SEQ ID NO: 164050 - DNA, 1238 bp, Homo sapiens
ttttaggggtgggaagaggagatcttgctgagaactgaggatgctggagtcagggaagcagagaaggttggcgggggtgacagataatgcctggcacaatgataccttgggatttgagatgatcaagctgagatccagctccctcttgtgtgtggactcctgcgagagcagagcaactgcccccacccctgcccccacctgtctgccttgctccttggacctgtgtctaagaccagaggcatctcacccagcccagtttcagaaggaggatgctaatacatctcatggtcatcttttccatcctttcttattatctaacttccctccttcagtttgtaacataaaaccttttttctctctacttttgaaaattttaaaggggaatccttttcatttggatggggtcgggggatggggataaggggggagaaaagcataattttattttcactcaccctaactgaaatttagtgttttctgtgattatgaatgttggcaacaattcatgatagtattagcaaaaagtttcctactacactacagttatttctggtaccttgaaaatctattggccgggcacggtggctcatgcctgtaattccagcactttgggaggccgagatgggaggatcaactgaggtcaggagttggagaccgttctggctaacatggtgaaatcccgtttctgttaaaaatacaaaaaattagccgggcatagtgatgcacgcttgtaagcatctcaaaaaaaaaggaaataattcatctgtattttggcattaagctaataattagatttaccactagatcttactatttaatgtattaataaagaatgacatattactaatattgcaaaaaaaaaaaaaaaaaaaaaaaaaaaaaaaaaaaaaaaaaaaaaaaaaaaaaaaaaaaaaaaaaaaaaaaaaaaagagagagagagagcgcgcgcgcgcgggagcaaaaaagaaaaaataaaaaaaaacaacgggggggggggggggacacgcacgtgaggagcaagaacgggaacagaagggggagcggcgggaagagcggggaacagaaagagggggagcacccaaaaaaaaaaggggggggaagaaacgagagtgaaaacacaacacaagagagagagagcaggagcaaagggggagcagaaaaagagggaggcaaggaggagagaaagaaaaataacgcccggaggagggagaagaaggaaaaaaagcaacggggggggc

SEQ ID NO: 164051 - DNA, 142 bp, Homo sapiens
tttcaggggagcttgcagggtaactttttattctttttttctgaaccattgcaggcttctgaaccattgcaggcatccctatgtgcacggcctgctgtttccactcccactgtgcacagaggcaaagatgtctcgtttgagg

SEQ ID NO: 164052 - DNA, 192 bp, Homo sapiens
gagacttatagaggatccccggcccgtgcacagtttgcaatctcttggtatctccaacagatagaataagaatccatggctatttaaatgccctcagtcctgcctctagttcccttacatattccaggaatatgcatcccagcaatacaaattgctggaagtcacctccagcaatttctagtccaaaccact

SEQ ID NO: 164053 - DNA, 117 bp, Homo sapiens
aaactgaagtttagcatcaacttctagacttatagttttctggtgagcataacaattccttttattatcttaaaagaaaacattagagcaccaagaggaaataccaaagcatcttag

SEQ ID NO: 164054 - DNA, 489 bp, Homo sapiens
tggacttctgatgagatctgttttcacagagtaccacagtaccagacctgtagcagtgaggtttctttactcttccagtaaagggtgcactcctgtgagtgacttctgtagctaattgcttcctgggtgctttaccactgggccaatttgctggtaatctgccttgtactagtcatgatctagaggcccccttacttatcccccttctcagcagacattagagatgagggcgccactgtggcaggcagtgcctgagaacacttaaaagcagtgctttcttactatcttacccaactcttacagctttgagtggaaatgcaggtacaattaatactcttccattataaccacaaatttaaataacaggaaagaattaagtagaagaacaggtcccttgaccagttggtcatacttttgtctaatagtgtttttagtcttgttattgggggttgttaattctagttatcaatgttttatttactcaaattg

SEQ ID NO: 164055 - DNA, 851 bp, Homo sapiens
cccccgcaacccgaggtcctagcccgcccggggactcggctgactcacggacacgccccgcgagacaaacaacaaacgcgcggaggccgagcgcggagtcccgcacggccgcgcccctgtgcacctggcccccgcccccgagacgtcccattggccggcgccctagcctggtcccgcccaagtggaccccgcccccgccccgaggcaccccattggccggcgtccccgccccagcgaacccggccccgcccccgaggcgccccattggccccgccgcgcgaaggcagagccgcggacgcccgggagcgacgagcgcgcagcgaaccgggtgccgggtcatgcgccgccgcctgtggctgggcctggcctggctgctgctggcgcgggcgccggacgccgcgggaaccccgagcgcgtcgcggggaccgcgcagctacccgcacctggagggcgacgtgcgctggcggcgcctcttctcctccactcacttcttcctgcgcgtggatcccggcggccgcgtgcagggcacccgctggcgccacggccaggacagcatcctggagatccgctctgtacacgtgggcgtcgtggtcatcaaagcagtgtcctcaggcttctacgtggccatgaaccgccggggccgcctctacgggtcgcgactctacaccgtggactgcaggttccgggagcgcatcgaagagaacggccacaacacctacgcctcacagcgctggcgccgccgcggccagcccatgttcctggcgctggacaggaggggggggccccggccaggcggccggacgcggcggtaccacctgtccgcccacttcctgcccgtcctggtctcctga

SEQ ID NO: 164056 - DNA, 1114 bp, Homo sapiens
cccccgcaacccgaggtcctagcccgcccggggactcggctgactcacggacacgccccgcgagacaaacaacaaacgcgcggaggccgagcgcggagtcccgcacggccgcgcccctgtgcacctggcccccgcccccgagacgtcccattggccggcgccctagcctggtcccgcccaagtggaccccgcccccgccccgaggcaccccattggccggcgtccccgccccagcgaacccggccccgcccccgaggcgccccattggccccgccgcgcgaaggcagagccgcggacgcccgggagcgacgagcgcgcagcgaaccgggtgccgggtcatgcgccgccgcctgtggctgggcctggcctggctgctgctggcgcgggcgccggacgccgcgggaaccccgagcgcgtcgcggggaccgcgcagctacccgcacctggagggcgacgtgcgctggcggcgcctcttctcctccactcacttcttcctgcgcgtggatcccggcggccgcgtgcagggcacccgctggcgccacggccaggacagtgagtgcggggcggcgggggcctggggtggggaggcggcgggtgacggcaacgcggccgccgtcttcacggtgacctgcgcccgcgggggagtcccggaggctcctctgtgcagcctcggcctcagtttccgtggtctgtgagatgggtgcagcctgcctggtgggagggttgcactgttaaagcgaaggctgcagcggcggacccggctcaggggcagagaagcgtccgtgtggtacaaccctgtgggtggggccacccatctgcaggtgggaaactgaggctccagaggggctggggcaggcccagctgcatggcggaagcggcggggggctgacctccggactcctgacatcacagaatccagtcagggctgcctgagtcggggccccctctgcttcttcccagacaccccatctggcaggtgaggacaaggaggcacacagaagggatgggacctgcccagggtcacactgacaggggtggcggagctgggtccccacagggcccaggacgtcacggagcgggcgtctctgtccccagggtctgccgagcacactga

SEQ ID NO: 164057 - DNA, 287 bp, Homo sapiens
gagacaaggaagagtaattaaaggacaagggagacaaaaatcagattcttgtggactaggatgaactggttgggaattttctttttttctgtttttgtttttcagatggaaagttgctctgtcgcccaggctggagtgcaatggcacgatctggctcactgcaacctcagcttcccgggttcaagtgattctcctgcctcagcctcgtgagtagctgggattacaggagcatgccaccatgactgtctaatttttgtatttttagttgagacgggggtttcaccatg

SEQ ID NO: 164058 - DNA, 333 bp, Homo sapiens
gcttagcggctgaagactgatgctgcccgatcgcctcggaagccccgtaggccatcacggacgccgagctttgggtaactctcagagtggaaggtaagtccgtccccttcttaatcaatatggaggctacccactccacattaccttcttttcaagggcctgtttcccttgcctccataactgttgtgggtattgacagccaggcttctaaacctcttaaaactccccaactctggtgccaacttagacaacactcttttaagcactcttttttagttatctccacctgcccacttcccttattaggccgagatattttaaccaaattatctg

SEQ ID NO: 164059 - DNA, 390 bp, Homo sapiens
cttgcctcctcctattctcaactatgtcctgaacattttctaaatgcaacataaatatctcaaactcaacatgctcaaaaaccaatctatccctctgtgtatcagttaatactatcagcatctacttagtcacttgagcttttaaaaactttagttgttttcatttcaaaaatgatgatgcagggcattaggccttgtattgagcacaaaaagagaataaaagacaagacaggtccgtggcctcaagaaccctccatctagaagaagaatctagcaagcaagaaaagcacaactgagtgtgctaaggaacaaggggctgactgtctaaaaacactagcaatgggattcacaacagaagggaaatgggggctggatctcggaaacaagtaa

SEQ ID NO: 164060 - DNA, 210 bp, Homo sapiens
ggagcccagtgctaatagctaagacaatgtttaaaaggccttgaagccatttcagagacctttgcagcagagcttgctgtcagagtccccgagttctaggacccaagaatgctttcctgggtcagtcccatgggcgcgctgctgtatccgtcctcaggacactgctgcctgcatccctgcagctccagctccagctccagctccagccat

SEQ ID NO: 164061 - DNA, 417 bp, Homo sapiens
gtaaagtagcatgtgtcatcatacaatagaaaagataaaaaagtgtagtgccaggaaggctgaaatacaagcatgaatattttcaagtgctttaagaccactgttcttaatccatctaacagacgtgaagtcaatttttagtccacttcttgatccttaggctaatgaatgacaagaatgttgcagagtggcgtcagctgctgagaagacagaaaactacttgttaaccagtgtaagaaattcccactcagacctggaataatactgtcttcttcctaggtttaaaattttttcccagtgaccttcaatcaggcaagaaatagtttcagattagaactacacagaattgatgaagtaaacccgtattacaagatagaaagttaccccgtgtacctgatgatgttcattgtctatttg

SEQ ID NO: 164062 - DNA, 492 bp, Homo sapiens
taaaagccacagggttgaaagcaaaccagccttaaaaaggcccaccgtttcgccacctacctggatcaggtgtatgcaatacacttgagctttgtcagctaacccaattatgcccaatcttttaggccaacccttaacaaatttaataccttctattaccagcccaagagcacggtcatgatacagaaacacttttctgcaaactgttagtaaatctctactacaccttacaacagtccacattttaactactaataaagcactgaagttgggtgaggatctgatggaacaagtggatcttctagtcggctcctattccactttaaggcctaaggttggcagttaatgcccagtcaaatcagattaggtaatacgtgaagaaattgttcacaatgcaaaaaagagaaatcctgaataaacattcagagaagtgtcccctaaaaagtaaggatcattcaactatgaaatgagttaacatgggaaaccaagatt

SEQ ID NO: 164063 - DNA, 257 bp, Homo sapiens
  misc_feature (50)..(50): n is a, c, g, or t
  misc_feature (54)..(54): n is a, c, g, or t
cctggcggagccataagataccaacttgaccagagaggaaacctgaacgnctcncagaagactcaaaaaatccaaacaagatgaaatgtttacgtttccctgcctccttcctctttgccagattgcacttcttactggtctcgtctgtctgctgctcctaacatggggagagggcaggcccagctcatggaccactcctaatctaccaagggttgagaaagggcacgaccaagctgtcagcactgtctacaaaagag

SEQ ID NO: 164064 - DNA, 552 bp, Homo sapiens
agaatataagttcatttacagatgtgtatggtagtaggtatctctggaacatccaagaaaagaggttgtgtaggaagttgagttgtagcaattgcacatacaggacttgctttagaagaaaggagtaagtttgaaataaaaatctataactggcatatagatggctctggaaacatgagcatgtttgagatttctcaaggaaagcatgcagagtgaggggaaaagaaaaagccaagagcaaccccggagaattgctaacatttatgattagaaaggaattcatcaaaaaagactgaagaaaattatcacagtggcaaaaaagggggaagagagtaagaggaatcccatcgtgtcaaatgttcccaagaggttatacaagataagaaaaaaaatatagcttctggatttacctacaaaattgtcattggtgagaaaagtttcagaaaaattaaggagaaagaatctagattgaattaagttgtgatgtaaatcaaaggtgaaaaattgaaaacagcaaatatagccaactttaaaaagattgatatctaaagg

SEQ ID NO: 164065 - DNA, 576 bp, Homo sapiens
ttggatacatatacctataaaaacgggccaagaatatgcattctgtgctgactgccttaaaatcggattctttgaagtgtagtttgtcgcttcacttattcagaaaattacacaattcttttaaggaactgcgtgccaccattaaaatcactagtgaaaggcagtgagtttgtgaatgattgactttcccagggcagtggtgcagtggaaggcactcgttacctgggcagagttagatggagcatatttcattagtcgttcaggctctgtgttctaatgtgtagattttgttttcactgtatgcgttgctggctttatttccagtttcttctctagttaaaatatggaggaagtcacaggacatccagtttgttcttgggtactatgggacaaaatatatgacagtaaactatcagctcatcttggcaagtacttttggtgtggaccactgaagcatatttgtaggaagggagttacattttggtgctcaggatgggagtgatgatagtttcaaagatttctattttggaagagggatctcaaatgccaagattactcatcggggaccgagtcgaa

SEQ ID NO: 164066 - DNA, 171 bp, Homo sapiens
cttgctgttttctttcccccttttcctgtgagctttcagctcatttctgcattcccttttattccttagatctttaaaactcattttacaacctaactggattgacttaaccacgtatgagaatttgttgtactttaattgtcctagtgaaaaacctattgtcttatataa

SEQ ID NO: 164067 - DNA, 187 bp, Homo sapiens
acactcaactacgtcagtaaaaagacagggtcaaggagcaataagtgatgcttggacaatcatgggagatacacaggagtcaggctgtctgctcagcgaaccactcattccaacatccagacagcggtcaaagatacacctgcagatgcccatcaggaaatgtgaatgagtgagctgaagaggcaat

SEQ ID NO: 164068 - DNA, 860 bp, Homo sapiens
taaccatttgccttttattttttagcttaatatgttcttgaatagctaaaaagttttccagtagtttttataagtgagtttaaagaagtgatagccatctgaagttttatcttgtgtagccagtatttaaaagttattaagattatctacacagaaaaaagatacaacttacttctggccatatatgtgaataaaagtttaacattgttaaaaattagcttgtcaagtaaacgtactgactgaggcataattttgttttcgttatccattccgttggctgaaaatgaaatagaaacgatctggttactaaagaccagtgctgcattggatcacttccttgagcttttgctatgatcgttaaaggcaaagttagacagctgctgtagattttgccagtggcctcacaaaataaattgtttaaccctattagtttcaaacactatcatttctactttgcagatatgctagctgtgttttatatgaatctatatgactatgatttgaatttctgatttacaggaaggtagtatagcagaaaatgagtaattttaacatgattatattttcatgtcttggaatataacaaatctcaacatttttgcttatattgggacagatttaaaaacttcagcttagactgtttaaagttagactttgttttttgtatctgaagacttttagaaaactgtgaaaattgagtttgacttataatccttgataattggatatttaaatgtcatttttaggcttgaagttcagaggaaatactaactcattgactttaaaatctcatcttggataagtgtagagttagaataataccatgtactcctggaattgatgtcataatgttaaaaatc

SEQ ID NO: 164069 - DNA, 302 bp, Homo sapiens
attttctccgtttttaaagaaaatgtcatcctggctcaggtgactctggggtcacgtgacttgggcccagactggccacctctcagccaagataccaccctgaaaagtactgccaagggttttgcctcagtcttttccctcccacctttttcgtccttcagcaaatctgcatcgagtactgccttcatgctgggcctgtgaagtgcagaagctgtaggggaatgaggccaatgggctcccctccggcggcagcactaagacccatgcatgagatcctccagccacagccttggctatgtgag

SEQ ID NO: 164070 - DNA, 687 bp, Homo sapiens
gacctctttggcttcaacctatttgggaacttttgggcttcgtgagtctggatgtccattttcctccctagatttggtaagttttcagccataatctaaatgtgctttctgccccctttctctctgtctttttgccttctggaacttttataatgtgtttattaagttacttagtggtgtaccataagtcccgtagtattacttcatttcactttttattctttttaatatttcttcctctaattgtataatttcatatgaccggtgttcaggtttgctgattctttcttttggttgattgagtctgttgttgaagccttctattgaattttttagttcagtcattgtatccttcagctctaggatttctgtttggttcttttttatgcttctcctttattgaactttttgttcatgtattgttttcctgatttttatttcattttctatctgggtttgtttatttgtttgtttgtttttgtagctcattgagcttaagatgattattttgaattctttgtcaagcagatcatggatcttcatcttgttatagtcagtttctgtaaccttatgggtttcctttggcatgttgtatttactaataatcccttgagtccttcattggtgtctgtccatttgaaggagcagttcccacttctgtactagacagagtgattcagtagatga

SEQ ID NO: 164071 - DNA, 343 bp, Homo sapiens
tggtcaaaacattcgggggtgatgagagcatggcttgaagggtgagctgggatgtgtacgaaaggtcttatatgacataactaggatttaaaattagtcatggaaggtttttaaacagggaggttgcccattcagatttattttagaaaaaagtatttctggtgacagcaaagacaatggattggataaaacaaaggaggataaagactagttaaaacactgctacaaaagacagacaaggggttgaacttcagctgtggcaatggggtaagagggaaggtatcatcagccttgagaaaactcaggagcaaaaccatcaggaatggtgattactggtgattaa

SEQ ID NO: 164072 - DNA, 448 bp, Homo sapiens
cttttttctacttcatatgtagtttttgtcttactgcctttgcatatcttttacaatgcctcattcagaaaagctgaagggtaggccaccattttttttcttggatgctcttaatagaataggacactggtaaagcttaaaaatgccttgttattaaacatcaaactacctcttttgactgaagattaaatatcattttggtatgtgctagctgctgaaaattatttgttttcaatgcaacatcaaaaataaattcatagtgaggtgaatagaatattgttctggaagagtggagaaactaccttaaaagctagttttgagcattggagttatattcagcacgctaaactgcattttgaaactacctagttaaggaaactttggatatttaaattcagattgttactgaattatttaattttctttacacatagttgtagatatatct

SEQ ID NO: 164073 - DNA, 508 bp, Homo sapiens
ggattacaggcgtgagccaccatgcccggccatatgtcacctgtttctaatcccaacaaaacctgtactcagaatgaattaaacaaacaaacaaacaaaaaaaaacccttacctttgaagaactaaaaaaggaattcaaattttattgaaactttttgtgtttatccttttagatcacactaaatcagatgagtacacaaatgccaaggaatggacttttacaagtagagatgatgtttcatgcaaacacttgagttaaaggtgttctagaaacttcccatgagcggattttgatcattcttggctctagtaccccaaaagcttagcataaaacttaattatatatcatactaccttctctctcactctctctctgtgtgaatgtatgattttccaccaaaatggctatttgtaacctgccatagtaaaaggtctgcttattcaagaccaggacaagactttccattgtcttgtttttctgcccataatcgccggtcacgagatgggg

SEQ ID NO: 164074 - DNA, 469 bp, Homo sapiens
caacaacaacaacaacaactcaatgtagaaagatctagatttttaaagacttaataaccaaatataatattggatcttgttggatcctgatttaaacaaaccaactttaaaagacattttcgaaacaagtagaaaaaactgaacatggattggttataagataaaaccaaggaaatattaattttgacaggtataacaccactgttgctatataaaaaaaaatttctctactttggtgaatctttcacataatctgacacagtaaagtaaaataaaaacgctctacaatccaagcaaaacacatctgaagtccacatctagcctacaggataccagtttgccacctctgcttagaacttgtcatcatattaaaaaactgctctacttctaagatctcaactctgaaatgtacatccctgattgtttataactctccaacttccttgctcctgctgcagtagcttgcttt

SEQ ID NO: 164075 - DNA, 544 bp, Homo sapiens
aaatgaactgatcattttcataacattaaaaaaaagattaatttaaatgggtgccggactcatttacaacaaatacatatgtaagatggcaggtttctgaacaaggcaattaagaagcacagagatggacacatgctgcgtggggctgtgagttgtgcgttcctaaaagcagcactgtatctaagtggaagcaaactttttccaagtgaatggtttcatgtagctcatgtcttttggggttctatcataacttgtggttcaaagattccctcacatagcaaatgaagtggaaaaagaaatattactactcttactaaagttgcacttcagagctttaaagagccggacttttctgtattagcaagagctgtaatcacatcaaattcaaaatgctgactttccttgcagaattcaacatgtagcaaagccagctggctaggaaggcgttctggtctgctgtctcctggaggacagttgttctgggtgccaggtaatccaatgggttcatgcactgtctgcagagcagcctggcaatcagggctgg

SEQ ID NO: 164076 - DNA, 618 bp, Homo sapiens
taatcaacggatatggatgtaagaactaaaggcaagcagaaagatttttttaagtatcccagaagcttgatttctggacatgacctttttatggttatgatgaagaacctggatgccaatatggtatatgaaaatgaagtctgcaaaacgagaggaaattgggaaggacaaaatccttgaataacaaaatcaggattaaaaagaatcttgacaagttggggagacagaagggatctaatatggtaaaattacacaggaagaaaaaggtaatacacttgtacaccaaaagaaaaagtatacaaacgtagattgagaagacataattaaaagttagcatttattttttaaaaattttaaatgattttagtaacctcattgagttgtgagaattacatggctgcccaaaaacgtaatgtcatcttacattacattaacttaagtataaattgttagcatgaagagaaagaagatacctctgacctcaaaactggccagatcatatttagagtacagatgaagtgctgagatttacacatttaagagaactacaaaaacataaaatgcactcaaaaaagaggaatcacgattgtagatttataatcatgccacatcaaggtt

SEQ ID NO: 164077 - DNA, 181 bp, Homo sapiens
gacttaaagctcaagggattataaggaattgaggggccagagtgggagaggaaaggtctggcaggagtggatggaaaggtggaggagatagagggttgaaagaggaagatccaaggattaaagggagctgaagggaacatggaagatggtagaaaagagagattgggggataggtgatgag

SEQ ID NO: 164078 - DNA, 247 bp, Homo sapiens
ccatttcagcctctcatagtgctgggattacagatgtgagccactgtgcctggctgaaattaagtttttattagcataattagcattagagaaacaagatactgaccaaagtgaccagtagaagttatttttttactgagttgactagtttaaaaaaatgacctttacaataatgtctggagtctgcattttgttaggtgccttataattagagaaaggtattgtcggggatagggaagttgggtgt

SEQ ID NO: 164079 - DNA, 352 bp, Homo sapiens
tggcggaactgggatattccatagacacggggatggcggaagtgggatatcccagacacaggggttggcagaagtgggatattccatagacacaggggatgacagaattgagatattccatagatacaggggatggcgaaagtgggatattccatagacacaggggatggcggaagtggaatattccatagacgcaggagatggcggaactgggatgccctatattacaaccctcttgctgggtgcacacgcgatctcagggtaacaatgctactgctaccactgccaggcacaactcctggactgtgctgcacgcaccgtcctccttcccctcagtgttttctcggctgca

SEQ ID NO: 164080 - DNA, 487 bp, Homo sapiens
agggtaagtgacttgtccaggcctgacaggctttaaaaacaaagacaacgatgacagagatgggggacgactgagttcttctctacccaacaatctgctttcacctgcagctggcctcattcattcattctccactcattcttatcaagagcccaccaccatgcaagttacatttttgtgctttgcagccctgaaagaagattctttcttcattagccagcctgggaagcttgtttgcttgcatcttcttaataagggctggcttgttaaaatgcagagggcactttctgcttctcttgccatctctgctatcagcctaatccaaaccacactgacaactggacagggctccatgacccaattaagagccaaggctacactctcaggggctgtcgccttcagggtgctgctcagagtcctgggatgtcctgctgcctgcccctggatgtagaatggccctgtacaggctgtgggtgcgcaccctggt

SEQ ID NO: 164081 - DNA, 252 bp, Homo sapiens
gagacactgctgtatatatttctttagagagtagatataaaccaggatacttcactgttgcccacaccattgcaatgaacttacattttgcaaggggaaatattttcttaaggaaaacacagtgtaaggataatttgtttttaaaaatatagttaagatcaaaaccaaccaaccttccctaaattatgttttaggaataacactagatctgcaagatatcactaaagtggaatgtcccccactttttctttt

SEQ ID NO: 164082 - DNA, 640 bp, Homo sapiens
gttattatcacagggtaatcagtcatactctgctgccattgaaggcagtaggggataggcttgcaggtcagtggtaagacacggaaggaagaaatccagacaggtaggtgctgctgtgggttttgtctcagagtaagcacaggagcaaggcatcctgagtagcacaggagcaaggcatcctgagtaaggctcaagtttcttagagaggagaaaacacgaaacaccaagaggatgaattttgccaacctccgcatttgtcccaaagccttccatttagttattagaaattgagaaagaactgctccctccataacttccactttagtagcttttacattctactttcaaacctttcattagtttgcattcatttgtttatacatttaactccccttctggacagtgagctctttgagggcagagatagagtcctgttggttcttgggactgtacagagtccagggaacaaagatgttagttaccatggaaacattaatcaagagaaaactggggggatatattaatatcagataagaatggcttcagaacaaggaatattaccaattcacaagaagatataacaatctgaaatgtatatgcacctaatgacagaacttcaaaatacatgaagcaaaaactg

SEQ ID NO: 164083 - DNA, 589 bp, Homo sapiens
gtcatcagtattcctcaacatattgttcaagcttcccatttcaattgtattgaccatctaaagacaaattcagtggtacaaatgttgcagatgttcagtaaatatatgatggcaatgaacagcacaaagcaagaatatgcaatgtcattttcagcagtactgtttacctgtcttccatttgaagaaatccttattttgtttaccacattttgtattgattttctgtcatgtggatttcagtattttaagaaaggtaaactgctactttccccacacttgccttagtgctttggtttctttcttttttttccttttttcttctaatctttcaaaaaaaggtaatgccttgatataagtttataatttctaacagaaaagcaaataattcttcagctgagagggttcttagtaatccaaacttctcatgtcgctaatgtggctcagagagataaaataactggttcccaatccagagttcttcctgcgacatgagtctatttctgctaagccaagatgactccctgttctacccataatccttcaaccatacaaagttatctgagcatacaaaaacaactacctccagcaa

SEQ ID NO: 164084 - DNA, 177 bp, Homo sapiens
tgggaaagacagcaagtgcctctgcatcgatcacaacctgagtctgttcacctgtaccagtgacaatattccctatggctcttagtgcaggagtcacaattggcaattcagaagctcctagaagcttcacaagttggggcacaactcctgtttccatgacaatgtcaattcattcat

SEQ ID NO: 164085 - DNA, 478 bp, Homo sapiens
tgaaattttaagcaggccaatctctgggtaatttttgggtactgtgaatgtagtgcctttcataaaactactaaaatctacactgaaagccaccatagtgataaaaataaaaaataagaatgaacaggggttggggatggtgactcacacctgtaatcctagcactttgggaggtcaatgtgggaggatcacttgagccctggagctcaagaccagcctgggtaacaagagcaaagctctatctggggaaagaaaaaaaaaaaaaccatctgtggaaactatgcttattggccccttatgtgaatgaactatggaaaaaatttccttttaattccagaaaattcacctcgtgcattgtaatttcacctcgtggcttgtaatttcacccttttatatgtttagacaaaccttctaaacattcgtgtatctggcaggtttcaggccctaggggtttaccttatttacattgcaatttccc

SEQ ID NO: 164086 - DNA, 140 bp, Homo sapiens
aatttcgtgtttatttggttcatacgttgaagcttagtttcacattttgatgttttactgctttgtacagcccacgatggtatttgcccatattgagtaagtgaataatagatacaccaattgaggttcatttagcaaaa

SEQ ID NO: 164087 - DNA, 116 bp, Homo sapiens
ccagactttagaatactgaactgaaatcatcaatgaaatctagcaatttcactggtatctgtatttgatataatttttcatttacagataccaaatttcagtgactcctggaagtt

SEQ ID NO: 164088 - DNA, 584 bp, Homo sapiens
ccagttaaatcactcacttaatcatttattcaacagataattattgaacacatactaagaaccaggcattgtgccagtactggggatacgaaggtaaacagaaacagacaagatcctgcccttgtggaacttatactctagtaagtactttaaagtcagaggtagactattgatcaagcagatatagtatcctttttggtgtcgagagagaaaaggaatgtgtccataccttaatgcaaccatataattcccagaagttagagcagggctccttcatgagcagaaggtacagtctgtaattagggctgagaggcaggtggctacgccctggactggggttagtctcttgggtttagtctcttagaaagcaatgtggtttgcagttctgttgcaatccagatgatggaatgcctaccacgaaggagcaagcccgacctcaagcgatagagaccttttgagctaagttccgtccttcacccagtgcctgtgtattggaatgggtggagtgggtgagagcgggctgagaggaagcaaagccgtggagattccacaatgttaagattaaagagaaggatcagcacaaa

SEQ ID NO: 164089 - DNA, 437 bp, Homo sapiens
tgagggaggaacagaggaggatggcaggtacaaatctcaacccacggcaggtaaaagacatgcacctttttagaagtcccctgatgtcagtttttagaagtcccctgatatttgtctctgcccaaatctcatgtcgaactgtaatcctttgcatgggaggtgcttggatcactgggctggatttcttgtgaatggtttaacgccatccccttggtgccgtccatgtgttagtaagttcttatgagatttggtcatttaaaagtgacacatagcatctctcacaaagtgtgggagcacactctcactctcttgttcctgcttttgctacctgcctgctcttcctttgccttccatcatgattggaaacttcctgaggcctccctggaagccaagcagatgccatcatcatgcttcctataaagcctgcagaactatga

SEQ ID NO: 164090 - DNA, 156 bp, Homo sapiens
ctggctcttaggagcaaaaggagaaaacaaatgtgcatccctgagctgttgtctagcatataaaaaagatgctattattaataacattttgtcttattaacatttgtcctactgtgatttattggcagccagaagcccaagctttaggattagtca

SEQ ID NO: 164091 - DNA, 506 bp, Homo sapiens
gtgtgctgcagtatttattgttaacatttgtgactcaaatgtatccactccctgctttggttgctctggcctgcaagtaggccgtactaattctgtagttggtcctagcttgcctttgtctttaccttgcatgcgtttatgtcttaatgcacctattaggattccttgcttttatcacaggtttcccatttttctgaaaaaattacagtaattattaacgcagaacccaggtaaattaaaaaggtttgtatgctttatgaatttttagtaagtactcattgattgataacagcaacagaggaaaacaaaacggtcagttccgatcttgatttccaggagcactttgtgtttccacttggcagcgtgatgcttcctcatgtcggtgattttctgttgagacatcttcaagcatcatcttacgtctgcttgttaacatttgttcagatttgatttcagctaatccttaaaagttttttgagacatcaaacttagaataaaaggaattt

SEQ ID NO: 164092 - DNA, 324 bp, Homo sapiens
atcaaggagaggcccaataaacactcgaagtgtaagcagttattggtatcacaattttcattgtcattgtaatcattatcttattagcatcctctcaggtagatgtaaacattgatgacagttgaaaatggttccacttagagaggccaaatagcagagtcaagatttgctcttaggtcaaacttgagtttgaatctagaatcagttgcttacccgtgatgaagcttcagagttggcaattaaaccactctgagtctcggtttctgcatctgtatgatagagattataatatcaacgtctcgtgttcattctttcattcacaag

SEQ ID NO: 164093 - DNA, 340 bp, Homo sapiens
ttacttctctgtacattataactgccagcttaaaatgatattatttttgctttaaatgatcacttgttttttaaggaaattaactaaaaagcaaggcttttatattcacatacatattcaccattctgatgctcttaattccttcttgtagatctgagtttccagctgtcacttcccttcagactgaagttttttgtttttctttagggtttggttttggttttggtttggttggttggcttgcagtgcaggtgcaagtctgctggagaagtatttttcagctatcatttaatagaaaatgtctttatttcactcttatttttgaaggacatttccactg

SEQ ID NO: 164094 - DNA, 239 bp, Homo sapiens
agaccttcgttccgccacgtcagggtcagctaatgctcagcaaattatccacttagtaaattcatttcaccgtcaacagatagtggtgcagactcgtgttctaacaaattaaatatcccattcggagttctgaggagtctttttaagttattcccaatcaataagaaaagcacacatgacactaaagctcctctagaaagatggctcatttctcttccaatgtcaaaaagccatgaagt

SEQ ID NO: 164095 - DNA, 459 bp, Homo sapiens
actgtactgtttaattatctatccatccatctagctagctaatctagctatctcatctctctatttctatttctttcactttactctgatatattaaaatgcacagtttctgggcaagctgacatctttgagcctcttgagggacagctcctcatttaagagatcttcttgttgcatgaaggatttactcttccctccccaagcttttctacagcttttcttttcaaataaattttattgtttatcccttttttaactgtctgataccatgcttcttatccttctttccacaccctgccctgacgctgtaaactgccctgacgctgtaaactgccctgacgctgtaaactgccctgacgctgtaaactgccctgacgctgtaaactgccctgacgctgtaaactgccctgacgctgtaaactgccctgacgctgtaaactgccctgacgctgtaaactg

SEQ ID NO: 164096 - DNA, 449 bp, Homo sapiens
gttccccgctgaccattattaatattttggtgtttggcctttcagtttattttatgtgtatacgtatgtgtgttttctaaatgtatatgtagttttttgaacaaaattcggatcgtgttgtgtataatgttttgtatcctactttttaacctaatgttacagtgtaagcattttccgcatcttatataggattcaaaagtatgattttcaatggctacataatagtccatcatatgctttaccatagctgaacaaacaaatcctcttgtgtgggactccactttgaataaagttcttagaaatgtagtttgttacaaccattctgaaagtcagtttggtaatatatcgtgaactgtacaaagctcttacctttatatcctcgcttctaggagcttattcaaaggaaataaacaaaattatggtcaaagatttatgaatgagggtgttta

SEQ ID NO: 164097 - DNA, 464 bp, Homo sapiens
agtgtttgatttcaaatgaggctccaaaggatgtaagatatgagatttatcaaggcaggaggagagaagccaataaattaccctatttgcaaatcattgctatggaagccaaagccccaactgttaaaacaaaggagataagcccttactatagcttagcctgctcacagaggaggcacagatgcccacggagctggcccagcccccaacaagcccctaggcacctccattgtatcccatcccagcgcccagcagaactctagttcccgtccatgcagggtgtgtggctttccatggcgagggctgcacactccttcctttctttatttctgactcctcctgaatcatcaccctctgctgggtgagcacaatgtgcagaggttttaggggctggggaaacatccctgctgcttccatgtcagggagacataaaaacacactaagaaaccttttggcaggaggct

SEQ ID NO: 164098 - DNA, 632 bp, Homo sapiens
agtgtttgatttcaaatgaggctccaaaggatgtaagatatgagatttatcaaggcaggaggagagaagccaataaattaccctatttgcaaatcattgctatggaagccaaagccccaactgttaaaacaaaggagataagcccttactatagcttagcctgctcacagaggaggcacagatgcccacggagctggcccagcccccaacaagcccctaggcacctccattgtatcccatcccagcgcccagcagaactctagttcccgtccatgcagggctgggcagcaagtcaggaagcctggcagctggttcccaggagttgccagcagatccaaggacacaaagagggactcctggtccctgcagaaccagcgcacccctcctccagaatctagaattcgcgagaacattgcccacccctcactgctacccagatgtgaacggctgtgtggctttccatggcgagggctgcacactccttcctttctttatttctgactcctcctgaatcatcaccctctgctgggtgagcacaatgtgcagaggttttaggggctggggaaacatccctgctgcttccatgtcagggagacataaaaacacactaagaaaccttttggcaggaggct

SEQ ID NO: 164099 - DNA, 480 bp, Homo sapiens
tgtggagttggctgcttactagcccctctttttcttagactgatgcctctactagcctcagccacccaggggaactgactaacccatttgtccaggtttaaaggtgacctcactgaagtcaaggctctgatgttgggtctttggcttccagcaaatgataccatcattagtggcattctgggtcctgatctagttccagagtgtttgctcttctcctgcccttaaaagtaaccaagagcatagctgggaaagaagggagaggagacagcagacagggagagatgaataagaggctagtaatgacacagactgtaggatctcaacacagcctttcctaagttgggtatataaacaatagtatatcactatactaaactgaactgaagatgtaaaagggctcacaatctagttagggtgacaaaaaatgtatgaaatgcctacaggattaaagaaacatgccaattttccctggcactatac

SEQ ID NO: 164100 - DNA, 429 bp, Homo sapiens
taagtggcatctacatgctgagggctgtacatctaagtccctggccagacctgtctctccagacttgacactccgcttgtctgcatgatacccagccgaaccaaacatcatcttcccaaaactgcatctgcagacagtttcctatctaacctgcaacaacccatccttccaggaacttccagtcgccatcctcatttcctctcacacaccccacattcagtccaccaggaaatcctactgacccagcttccaaataaactctatccgcgtttgactctttgtctcatctccactgccagccctctggtttgtgccaccggactgatctctaccagactgatgtcttggcagagtgatctgattaccagaatgtctctcctctgctcaaaaccctccaaggactcccatttcagagtgaaacattcagtc

SEQ ID NO: 164101 - DNA, 252 bp, Homo sapiens
ctgggcaacaaagtgagactccatctcgaaagaaaaaaaataagagtaaataactttaaagctaattaatgcgaagttctgaaggatttgataactatatgctgataaaacgaggcattgactatttcattaaaagaatttcaggccaggtgtgttggctcatgcctataatcccagcacgttgggaggctgaggtgagagggtttcttgaggccaggagtttgagaccagcctgggctatatagccagact

SEQ ID NO: 164102 - DNA, 391 bp, Homo sapiens
agagagacacgtgtgccatgttgtgtcattgagaaggaccgtgaaagagcagggctgaaaagacaatcctcctaagtttattattttccaaaaggccaggctggtgtcatagtgaaaaactctaagggcttctctgaaaaaggagaagaaaggtagctggggaaagactttatgagaaaaatcacatgttatagttttaaagtttccaaaatatttgaatcaatattgggccttccaactcattctgacgttctgactcaggggattataaaaaagtgaaattacaacaaggtttgagtattctgctattcgtttaccttgggccacagtgattatgaacgaacgatatttcagaaacaggcattgctttgggatctatttcctttgcatt

SEQ ID NO: 164103 - DNA, 296 bp, Homo sapiens
ggtggtgctcccctgccgttccagggaggagttcaagaccaacctggggaatatagcaagatcccatctcttaaaaaaaataaaataaaataaaaataaagaataaaaaaggggcaggcctctcctgtcctgaaataaacacatgaacaaaccctccaatgctgcccttcaagctccccctcactggcaaactttgtaagttatctgcttttagggcctccacttctttttcttcccagttacttctcaatccagcacagtctcatacttatttttcttatttatttttttgagac

SEQ ID NO: 164104 - DNA, 237 bp, Homo sapiens
catcacagccacatgcccagacgctccattggaggtgaagtgacccgcccaagactccctcttaggcaggctaatcattgttttttgtttgtttgcttagagatggggtcttgatctgtcgcccaggctggagtgcggtggcgcgatcatagctcactgcagcctccaactcctgggcaagtgatcctcctgcctcagccaacccaatagctgggattacgggcgcagtctgtgagg

SEQ ID NO: 164105 - DNA, 480 bp, Homo sapiens
ttctcttggtatcatgattccattgagggtctctgctctatcccactgatcaatttgttccataggaacaaaatccctgatgggattttgatggaaatgactgtaaatggaatttacaaataagtatggggagaattgattttttttttactgtatcgaatcttcttatctatatatatgggttaatttatttaagactttcaaaatgtcatttaagataaggtttcggccaggcacagtggcccatgcctgtaatcccagcactttgggaggccgagcggatcacgaggtcaggagttcgagaccagcctgaccaacatggtgaaaccccgtctctactaaaaatacaaaaaatgagccgggtatggcggcgggcacctgtagtcccagctacttgggaggctgaagcaggagaatggcgtgaacccgggaggtggagcttgcagtgagccgagatcgcgccactgcactccagcctgg

SEQ ID NO: 164106 - DNA, 410 bp, Homo sapiens
gggtgatctagaggatcccgcgacactcttgagttgaggtaaacagcttttacagactatattatgtaaagatatgccttactatggcagcaaaaatgcaatatgaagaaaataaacctagttttatccaattcagaggaaaacaagtacatttaaaaggataaaatctggccaggtgcagtggctcatgcctgtaatcccagcactttgggatcttgctcaaaatctagtccttcccttatatttgggctcaaaatatatttttttgaatgacaggtcagaataaaaaattgatggtggtttaagaatctattacctatttcctttgaatcatatattattaagaatattggtcatataggcgacacgtttactctagcagattttctttttgtctgagatggggtctc

SEQ ID NO: 164107 - DNA, 397 bp, Homo sapiens
ttctttatctgaataggaagattaattttttaacatgataatttttgcaatgtattaaataatgaagttacattaatttaatttaattaatcaatctcttattttcactggtgaaatatctgatacaatgctacagtggcagtataactactgagtcttttcctgatcatcattattgtgtcattattgataattacaaggttttgggttttggtatttagtatttagtctttattcactctgttcatttagtttcttattctacctttgccaaccattgcaaatcatcagctataacgtgatggcactgacagggaaccttgacttgttcccaagaaacatctttgaaaatattaagtataaaaattctcttagaatataatattttacccatatg

SEQ ID NO: 164108 - DNA, 393 bp, Homo sapiens
gtgcccagaggtgtggcctgggcactttcacgcaggtatgttggtttcagcagccatgtggcaggataccgccagcctagaggggagaaatctcagcagaactctgaaggaagatgggagctgctcaaatggctccctctttgttttggtcaagaatccccactctcctctcgttgaccctgagctcccaacatcaccagcctggggcataggcagctggcctgagtgtgagtcctgatctcagcccttgctaaaatggcccaggtcttctctgccactcgtagaatgggagaagtgagggaggaagtatttgaggcagctcatgacccagagctagtgctcaattccggctagctgtttttatcaggaaaagttttcactggcaaaactcaa

SEQ ID NO: 164109 - DNA, 324 bp, Homo sapiens
gaaaaagatgaaaaagtattgcaagccaactccttatatttccccatcaactgtctctcctatttcccacagtaactattttgaagttttctgctccccaaaagtattggactccccacgccctctcactacccactgaagatagctcctcctccctctcagagtacgcagaagccatcagtcaggggcgtcctggactttgtatatccatgcccaacttttcctccttttgttctcatacactgaaggaagtttcccaactcctgtttagagatactgtcccacttctctttcccatccattcccatccagctcacacagcct

SEQ ID NO: 164110 - DNA, 452 bp, Homo sapiens
acctcaggtgatccacctaccttggcctctcaaagtgctgggattacaggtgtgagctaccatgaccagcctaattttcttatttttagtagagatggggtttcaccatgttggccacactagtcttgaactcctgacctcaggtgatccacccatcttggcttctctaaatgctgggattataggcatgagtcactgcccccgctacgattgatatttgaacattgaattagccttgcacacctgggataaatcctgcctggtcgtggtgtataattattaatacattattggattcaatttgctgattttttgtttaaaagttttggccaggcatggtggctcatgcctgtaatcccagcactttgggaggccaaggcaggaggatcacttgagcctaggagtttgagactagcctaggcaatgtggcgaaaccctgtctgttaaaaaaa

SEQ ID NO: 164111 - DNA, 368 bp, Homo sapiens
tagacactttgcgggctataagagtgctttaaaaatgtgaattcagcccacattctcactgcagagaaaagactaaaatcctctcagcaaccacattcaggaactttgccaagaaaggcaggtgaggactccattgtgcctgtcatccttcagcatggaagaactagtaactgcaagggctatgattgtagctgttgttccaacagttctgtgacaacacgtacctcctcaaacacaatgcaacagtgaggcctaatgtcccaggatttattttcattaagtcgatgcttatggaagacctaatatgtgacaatcactgtgcctggtaaataatgttggaaagaacactttgctcagtccctgagggg

SEQ ID NO: 164112 - DNA, 455 bp, Homo sapiens
ttagctatcgttaacatgggtgtacaaatacctcagctcactgtttttaatttttttgggtgtatatccagaagtggaattgcttggtcttataggagtgatatttttaatttcttgaacaactgctgtattattttctgcaatggccgtacctcattttatgttcctgctagcagtgagtaaatttccagtttcttcacatccacatcaacacttgttactttctgtttttttttttttaaatttgtagtagccatcctaatggtatgagggggcatttcattgtagtcttaattgcattttcctatttataaatgatactaagcatctttttatgtatttattagagattcatatatcttctttggagaaacggctacacaagccctatgcttatttttaaattggcttttttggttttttattgttgagttttaggatattttttctttttt

SEQ ID NO: 164113 - DNA, 479 bp, Homo sapiens
  misc_feature (20)..(20): n is a, c, g, or t
  misc_feature (37)..(37): n is a, c, g, or t
  misc_feature (64)..(64): n is a, c, g, or t
acaagtatcagttaaagacnaaacaggctgggcgtgnggctcacacttgtaatcctagcacttngggagtccaaggtgggcagaacacctgaggccaggagttggagaccagcctggccaacatggtaaaacccctgtctcttaaagagaatctccaagtaagcatatggttctctccatttgagagtccagagatgttttatatggccttgcataatgtgaccttcttcagaccctcaccagagttagctcaaaaacaacagcagtcacgtttgatctgtagtctgaaaagctgtggtgctaaaccctgctaggatggactgaagaatagtgtcaaggtcttgcatatcttcattataccttctttggtattacatgggctgataggactttttagagtcctgcttgactgattatataggatgctatttcagtggcacagtccctccccatcacctcaacaagataagatgagagct

SEQ ID NO: 164114 - DNA, 375 bp, Homo sapiens
attttaatcaaagaaatgaaacattctagttaatgctgaaatctcctttgttccccatcagcagtcccagtcctcgccctctcctcagcgaacaatcactgtcaagaatttagcatctatccttccagaatatttcacactattttacagacctgtacgttttcctgagtcatgcatacagtttagtgtgtgtaatcccatattgtacatattgtcctctaacttgcttttgagcaaggcttctgttttagatctttttccatactgatcttttcatagagcacctgctgagcctcttttctttccagtttgccatatgtgtgaatgtaaagatgtgagagtaatagccaacagttaatttgctttcaccacatg

SEQ ID NO: 164115 - DNA, 382 bp, Homo sapiens
ctcagggaaagatactgtgctcccaggtcttcatccaatcaagaaactgccctttccagctatgcctgtgttcaggatgtcagttagatacaagaggtcacagattgcttccaacacacacagaccacctaatatgtgctaccaaccatagtctggttaaaaagacagtttctgctcttcagaaagtatctcattcgtgactgagcatcagctataggaaggtgaactttaacaaaggagctaagctatgccagaggtgtgccaaggtgatgtgagacagggaatgctagcatgcacttggaggcagtgatctgctaagcccactgggagctgaaaacacaggggactgcctaagcacagccatctgagtagcacacggtgg

SEQ ID NO: 164116 - DNA, 320 bp, Homo sapiens
atgctcccaaatgtctgctgtaaaccaacatctttcggaggaccagttgaaaataatatttctcaaattaatgtgaaaagtgtttgctgttgagttgcggcctttcagtcccgcctttgttctctactcaccactgttgagttgtggcctttcagtcccgcctgtgttctctactcacctctactgcttgttttgctcctgattcaaaccagttccacacatactaagcccactgtgctaggtggcctgaccgtggtgaatattattgtggaggaaggactttgctgtaagaaattgcattccccaaaactgaaaccatg

SEQ ID NO: 164117 - DNA, 94 bp, Homo sapiens
ctttatgcaataaaaggatgtttaactagagatgtgagcttgagtcagctgcccatctactctggggctcatttttcccacctgtaaaaaaaat

SEQ ID NO: 164118 - DNA, 419 bp, Homo sapiens
atatgaggaactgtggctattcttcctggagagaaactgtttagggagaacatggtagctgtcttctcatacctgagttgtcatttcacaaacagtgctaagaacccaaactagtggactaaatttgtaaggagacaggtttcagctcactacatggaaggaagacaatctcttatgtatgggtggtagagaacactcagaaaccaactgacattgaatagaggtggctggactaaaactcagtaactctaaagcctctttgaatgcttgagcctacgactttgtgatatatgtttaaacttatggccaaatctggatgtttttcaggagttcatgaagtcatacaaaagtttgaactaataggtttaagtctggggtccctgagtcactccttttacaagtctcttatgttcctagct

SEQ ID NO: 164119 - DNA, 535 bp, Homo sapiens
atttgctttaccatctgtgcagtatgactggcacagccacatcttttcttttcatgttaaaatgtctatggccgtttttggggggacaaaacagatacaaattgtcattagggaattgagaattaattcaatcagccatatggtttgcaaacaagctttatttttctgtgtttaaaaaatgcatttaagatgtatagcattattatggtttctctagaagtcatccttcataaaagtaattcggtaatgttagaatctctgtcagtttcttggcaaatagtattcgattataaatttatgctccacaggacacacaattttagaaatgttctggaatgtttccaaattttattttggaacttggcatttggtttctctttaataatctcaatcaataatggtttatactagtcataaatgtattagctttaaatagctgccatattccatttcagtagaaatgcttttccctttcccatagtgtgtatttgaatattcatttttgtgtgcaaagttttttccttgatacttggat

SEQ ID NO: 164120 - DNA, 279 bp, Homo sapiens
gagtcacgcagaatctgggggcagagaatcaaggcagagaaacagccactgaggaaatattgtttcctcagtacaaagccctgaggcagaaatctccccaacacccttaagggacagtggctgaaaaactgagcagggggagaagaggagacaaggtcgaagaggtcaggatcctggggagtccttaataggctatcatgatgactttggctttttcttcccctcaaatgaggaatcattgcaggattttgtcagaggagtgactcgtggaaatgtcca

SEQ ID NO: 164121 - DNA, 317 bp, Homo sapiens
cattataaggcgcccatcagcttttcatctaatagctgtagtatcccttgagatccattttttccttaggggttgcacattactatttttctaatattgtcattcttttgtatttattagctagaatttttctatagaagaaattttcctaatcagcaattttgttactttgaaatatagttcctagaagaaaggcagggcaaatccttcattccctccttcccttactttatttaacagctttagtgaggtataatttatatatcataaaattcacccattgtaagtaactatagttaaatgatttctagaaaatt

SEQ ID NO: 164122 - DNA, 319 bp, Homo sapiens
ctttggccagggccggcagagagccccagtcctgaagaaccctcgttcttcgcgtgctgtcgcgggggctccgtaggcacggttgcagcagggtcttggaggccgaaagaaggacggtctgagctgagagaggggagttggccaggcacaggggtttcagagctttacaggattcagaaggtgcccggggttctgcagcccagtgaggagttcacagagtggtgggcgacccagcagccaggggcatcagccgtgggagtgggacgctccgggagtctgagctgcatcctgtgggcgcagcagacgctcaagggctggg

SEQ ID NO: 164123 - DNA, 210 bp, Homo sapiens
atcctaacattgattacgttcctagggcttcctctaaatgaattctctcatgcataaagggaggaatcactgaaaatttttctgaaattaatacactcgtgagtattgcatccaaggaacatttacatatttttcctaatataagaggtatcactgaaaacattccctcatcctttatcttaagaagttctggctgagagtggtagctcg

SEQ ID NO: 164124 - DNA, 130 bp, Homo sapiens
agttgtaccatctacctgtttgccttcatggaacacaaaagaataatttctaactctgtccttgattgcctcatccatctagatacttgtaggctctctgtggagtccatctacttctttcagtcatcac

SEQ ID NO: 164125 - DNA, 307 bp, Homo sapiens
aagagtcctaagctccaggttcacatatgctccagccttcactatattctccacttagatgactaagaagtaaatcaaacttacaaatatcaaactaagctcttggtctccactccaatgatcagctcttcccttcatctttccacttcggtaaatggtacctctaaacttctacatgtttaggccacaaatcttgaggtcatacttaacacctctttctctcatcccccacatccaaatttaccagcaaatcttcttagcttttcctttaaaataaacctagcacgtgtctagtctccaaagtgca

SEQ ID NO: 164126 - DNA, 158 bp, Homo sapiens
attttacaacgctcccaactgcttgtgtttgccattttgcctgctttgttggacttgtaagcttcttgagtgagggggtcttacatattacacatctttatacttccaattttgcccaccagtgtgctgccaccccacggatgctctgcaaacataga

SEQ ID NO: 164127 - DNA, 556 bp, Homo sapiens
cctcctgcttcagcctcccacacagctaggactacgggtatgtgccactatgccagacacatttttaaaattttttgcagagacagcatctcgctatgttccccaggctgatctcaaactcctgagcccaagtgatccctattccttggcctcccaaagtgctgggatcataggcgtgagccaccgtgcccattcaggaagcagcgtttgtttttatctgaggaagcccccaccaacagttctcgctgtccagtgaaacagctgccttttgaaacggggggctccccatgctcagcacctcttcagctgtggctggacattagggactgtaatggaaagattttcacacctggagagatgatgtccacagttccttctgagtccaacaacaggtgatgccagtgtttcagagacaggaacacctgctctcaaagtcagagactcagtcactccagggtggagacaggactggcactgccacctgaaagggggctgggcagctgagaactgcacaggcatgcagggttgctttttggtgtttcgcttcaattttccc

SEQ ID NO: 164128 - DNA, 906 bp, Homo sapiens
tgatttgtttgtggatataattgagttacatcatgcttgttagtcttttcagctttaggtggtgacattttgttttttatttgttttgccaaaatgtttatttgcagaggtggatagcttttttttttttttttttttttaactttcatttaagaggaatgcacatgaactatttgaagcagtaccttcctaagaggttttgtttgctgataaagctttcctattctagctgcttgactcataccagaggagaagcattaaagaagaccagaaggtgaaaagagtcaccctaacctatccatgtgtgctcttgaattttcctaaggaggggcacgcgttgatttcctcattgtctttatcccacaatagattcttagaatatgtatgtctatataaaatttttaaaactgcttgagtttgtagccaaatgtaatgtggctttttctacttggaacttttactgagagtactttatttgatggttaagacttagtaagtcgtagccaggcgcggtggctcacacctgtaatcccagcactttgagaggcagaggtgggtggatcgcctgaggtcaggagtttgagaacagcctggacaacatggtaaaaccccgtctctactaaaaatacaaaaattagctgggcgtggtggtggctggagcctgtaatactagctactcgggaggctgaggcacaagaatcgcttgaacttgggaggcggaggttgcagtgagccgagatcgcaccactgcactccagcctgggcagcagagtgagactttgtctcaaaaaaaaaaaaaaaaaaagtaagtagttaacacccgccccaaccacccaaacatactgtaggcaaggcagaactacagtttgtaatctatgctttcaattttcaaaggtctttagcatt

SEQ ID NO: 164129 - DNA, 318 bp, Homo sapiens
ccctagattgcagagatgaacaggtaaacacaaggagtcttggcttaccagagcacagactcatgagcagaaacctctgtgagaaacagagctagggtaggaaaacctgaactataattgatgaattgttggaggttcagaaagcgttaagtctgaatgttaaaaactccagggaaggccgggcgcggtggctcacgtctataatcccagcactttgggaggccaaagcgggtggatcacctgatgtcagaggttcgagaccagcctgaccaatatggcgaaaccccgtctctactaaaaatacaaaaattagccggc

SEQ ID NO: 164130 - DNA, 909 bp, Homo sapiens
ttcgcggtatcataattcgcggatcataagagttgagaaaggtggctgggcatggtggctcacgcctgtaatcccggctactcgggagactgaggcagaagaatcacttgaaccggggaggctgaggttgcagtgagccaagatcacaccactgaactccagcctgggcgacagagcgagacttcgttctaaatacggttgaaattgtgacacttagtgtatacttccttatattatggtgtgcccactccctcccctttttacttcagactttatttcagtcatgattgctttcattgtactattgtaggtgaacgaaatttaggaggtttatttctgtgttgagcaggatattctctgaagttattgcatattttgaaagtagctatcagccctttcctcccttccattctctacttggtgcacctccatgtttttttctgctttgttgtaactgctgcttcctttttcttttgttcttttattcatttttttctattcttcctacattgggttttatcttctggcttccaaatctggaaaacttggatttgttattcttcggtcagtttgacaaagcaacatacttaattgcctcttttatgttaccattaaattaattctgtgaactctgacttcccttagaattgaaaaagaccacgtgtacaaaaatccggttagatagtagaaataagttctagtattcaatagtacagtagggaaattatagttaacatttatttattctaccaaagtagctagaagaattgcagtgctcctaacacaaatagaagatcaatgtttgaggccaggtgcagtggctttacgcctgtattcccagcactttgggaggctgaggcaggtggatcacctgaagtcagaagttcaagaccagcctggccaacatgg

SEQ ID NO: 164131 - DNA, 945 bp, Homo sapiens
gccatcctacactcaagctaaatcaaggcttaatgttaatctgttgaatcttcctgaaatataatctcatttagaaatccacagtatttcctcagtttacttcaaaatgtggatgtaagttttacttttttccctcccattaatttttttaatttttatttagagatgaggtcttgctctgtcacacaggctggaatgcagtggcgacagagcgagacttcgttctaaatacggttgaaattgtgacacttagtgtatacttccttatattatggtgtgcccactccctcccctttttacttcagactttatttcagtcatgattgctttcattgtactattgtaggtgaacgaaatttaggaggtttatttctgtgttgagcaggatattctctgaagttattgcatattttgaaagtagctatcagccctttcctcccttccattctctacttggtgcacctccatgtttttttctgctttgttgtaactgctgcttcctttttcttttgttcttttattcatttttttctattcttcctacattgggttttatcttctggcttccaaatctggaaaacttggatttgttattcttcggtcagtttgacaaagcaacatacttaattgcctcttttatgttaccattaaattaattctgtgaactctgacttcccttagaattgaaaaagaccacgtgtacaaaaatccggttagatagtagaaataagttctagtattcaatagtacagtagggaaattatagttaacatttatttattctaccaaagtagctagaagaattgcagtgctcctaacacaaatagaagatcaatgtttgaggccaggtgcagtggctttacgcctgtattcccagcactttgggaggctgaggcaggtggatcacctgaagtcagaagttcaagaccagcctggccaacatgg

SEQ ID NO: 164132 - DNA, 424 bp, Homo sapiens
aatcccagcactttgggaggctgaggcaggtggatcatgaggtcaggagttcaagactagcctggccaatgcagtgaaaccctgtctctactaaaaatacaaaaattagctgggtgtgatggcatgtgcctgcagtcccggctactcgggagactgaggcagaagaatcacttgaaccggggaggctgaggttgcagtgagccaagatcacaccactgaactccagcctgggcgacagagcgagacttcgttctaaatacggttgaaattgtgacacttagtgtatacttccttatattatggtgtgcccactccctcccctttttacttcagactttatttcagtcatgattgctttcattgtactattgtaggtgaacgaaatttaggaggtttatttctgtgttgagcaggatattctctg

SEQ ID NO: 164133 - DNA, 670 bp, Homo sapiens
taaggaacaaaaaattttgaatgttacacctgaaacaaagaaatgtggtcacctaaaaataaaagtatatatgtaggaattaatgtactcttgctttgtcaagctgtttgctatagtttccaaggtattatgttactctaactctgaaaagtgatgtaatctggtagcaatgtagtagttcaaataaaggcatttacataataaatttagggttgatgcatcaaccctaaatttattatgaagactttcagtaaattaggaagagagaggaactttcttacctgataaagaacatccaaaaaaccctacagctaatatcatagttgatgttaagaaactggaacctttcctgcaaagattaagcacaaggcaagaatgtcccctctaatcattgcttttcagcatcattctgttctagctgatgcagtaagacaaaaaatggaaataaaaggtatatagattgaaaaggaagaagtaaactgtcattgttcacagatgacaagattatgaagaaaattcaaaagaatcaagaaaattacttctggaagttgtaaaccactatcactttctcttattgccagcagtgaacaagtggaatttgaaattaaaaacacaataccatttacattagcaacccccataataatttagggtagatgataaatctaac

SEQ ID NO: 164134 - DNA, 301 bp, Homo sapiens
ataaaaatggtgttcccatgccataagaaaagacttcttttatgattccaagtggcaagtgtcagtgatatattcagtatcttagagaggctaagcttttaacttcagggctaaaatatcacagttgtaaatatcaaagataagttatcagaatttcataaggaggttgagctgtggtgcaaatgaatctatcactgagtagaattttttttctaacactttattttctccattcatcacagaaagaagtcaatatcatattattgggcatgtttaaaagtcacattcaaacaccgtacca

SEQ ID NO: 164135 - DNA, 399 bp, Homo sapiens
caggtgtgggatgagagaactgccccgacgccccctttccccaccccaggcaaggaagtccagctggttgggctggcttagcctctccctcccgtgaaatggaaaactctctctatgcggagttctggggactgacttgcctagagacccctcctggcccagactagtccccactcccctcctactgagcttctgagcgtccgacgaggcacagtccctcccgtcgtgcagcgggaaaacggactccccgagaggttgaggaatttgctcagagttacacagtggggaagaggccaagccaggattttaacgcaagttgtccagactccaagggccagattctcctctgacattaacgccgtgccccaggaccatggactgctttccctaacacccaga

SEQ ID NO: 164136 - DNA, 493 bp, Homo sapiens
ctcatgatagggagttatgagatctgaatggtttataagtggcaggttctcctgctctcgctctctctcctactgacatgtaagacatgccttgctcctcctttgccttccaccatgactgtaagtttcctgaggcctcttcagccatgcagaactgtgagtcaattaaatctcttttgtttataaattacccagtctcaggtagtatcttcaaagcagtgtgaaaacagacgaatacaaatggtttagtaccatccctttggtaacatcctcatgatagtgagtgaattctcctaagatctggttgtttaaaagtgtgtgcaccttcccctccgccttgatcctgctttaaccatgtgaagtacaagctcttccttctccttccactatgattgtaagtttcctgaggccttgagcagatgccagccagcatcatgcttcctttacagcctgcagaaccatgagcaattaaacctcttttccttacaaatta

SEQ ID NO: 164137 - DNA, 135 bp, Homo sapiens
gggtgtatgcggggctgattctccattctcacgtctgtctacatctgtgtaactccccaaggcagctgccctaggtacaaggagggaggctcccacaattgctctcaccattaactgcctgcctgtaggtaagta

SEQ ID NO: 164138 - DNA, 532 bp, Homo sapiens
acatgtgtatgaggctcagagatgcagggtgaaggctgtcatcacatttctgtagatttcccttaggaagagttgagcaacaggctttaggtagagaggaaagagttcttaaaaatggtaggagccagagagtaaacagaaagtaaaccaactgtgttataaagaaggcatctttccacaaagagggaaggtggctggtgctgtttttaaatgttatttgtctgtttctggctgctatactgtagtaacattttccttgaccaaaatccagaagcaatgtgtgattaagctagctttaaatggatagagaaaaaagggtatctgtgtgtttcttcccactcctacccatcaagtttgtttccagatagttgcgatatgtttcctaaatgaccaggtattttataaaaaccggtagagctaaatttgatttttaaaacacttctaggtttaaaaagtgtatgtaaaatcactctcccaaatctcatatatatgaaaaaaatcagtgtcagcctcaaactaatgattagaatca

SEQ ID NO: 164139 - DNA, 506 bp, Homo sapiens
gacagttaaagagagatacaaaaagttccagggagctaaaaaggacaactgattgaactcgttgaggttgagaaccagaggagaaggaaggaagtcagtacagagtgaggacccgaggagaaggaaggaagtcagtacagagtgagtatctgaggagaaggaaggaagtcagtacggagtgaggacccgaggagaaggaaggaagtcagtacagagcgagtatctgaggagaaggaaggaagtcagtacagagcgagtatctgaggagaaggaaggaagtcagtacagagtgagtatctgaggagaaggaaagaagtcagtacagagcaagtatctgaggagaagaaaggaagtcagtacagaccgaggacccaaggaggttctgatctgggccactagggcttcctcccactgggggcctcttgaagagctgggctgtttgtgcactgactcctgtctgtcgctggttgtggaaggttcctagagtcataactgcctgacccttc

SEQ ID NO: 164140 - DNA, 448 bp, Homo sapiens
gaatctgtaggtaacttagcaaagatgaagcacacaacaaaaaaaggaaagttggaggacagagagagaatgaggataggtgattttaggaaagcaggcagaggctaggtcataacagattttgtaagctatgctaagaagcttagattttactttctttgggagtcggtggtccctttgagaatctcatgaagactactgagaatctaataaaatctcctcaaaaattatgtacacatttcaacgagttcaaagatctattcaagttttgacatggaccttcactccctctctactgaatctttccctctaagacgtttctatgttcctgtctctcccaccttcaattctatgcccctctccagcaacttccctatcttttcccattccttcataaacaaacttgaaatcattccagagcaatttatctttccctatcatttatttc

SEQ ID NO: 164141 - DNA, 493 bp, Homo sapiens
aggaaaacaccattttgatgcttttctctgcagtctttttctttgtgagccccctccccagtagttacggtcttttctaaaaactagaggcctttttacactgcttccgtctgtttttaaagggtatagtaatacaacttagaagtttcttaaaaagtccaaatcacagggagactcagatggcttccgaccacacacaccagttctcagagctcctaagggtccgaaaccacaggcgccccagatccaactggggagatattaaagggcgtttgggagaggagactggctttcggaagttgcctttcagcttcgcttcctactaggcccatgaagcggtgccctgtacaccagcaaacttgctggctgcagcagaatttctgtctctaacagaaggttagccatggacttgaattgtagatgcaggcagccggtggagtttgataagaggttcctggcaggccgggccgagcactcctggtcagctgatgaa

SEQ ID NO: 164142 - DNA, 435 bp, Homo sapiens
cctccaaaagaggatcaaccttttatttgctcatttgacaaacatgtcagagaggtatataggagtcaggatgcctgattagcttctctgatcctgattctgctgccagttagctgtgtggatctaggcaacctgctctctaggcctcagtttgcacatctgtaaagaacgggcctggggctggatgtggtggcttatgtctgtaatccaagcactttgggaggccaaggcgggtggatcacctgaggtcaggagtttgaaagcagcctggccaacatggcgaaaccccgtctctactaaaaatacaaaaattggccaggtttggtggtgggcacctgtaatcccagctactcgggaggctgaggcaggagaattgcttgaactcggagggtggagtttgcagtgagccaagatcgcgccacttcactctgtctc

SEQ ID NO: 164143 - DNA, 319 bp, Homo sapiens
ttagagaaagattaccatatggagagtggtttgggaagggtaccattcagagaccaaaaagttacgtagggagttgtagaaactgaagtgagagatgacggtagcagggcttagaagaatggtgataaaggtggagaggagaggactgctctaagatgcataaggaaactgaatacacatgtacattagacctaatggctgactctgtgtttgcacacacgtgtgcatgctttgcaggggagaggaggcaaaatggataagagggagaaatcaagaaggactcctttttcctgaaatggaaaacacaagtgcatgagca

SEQ ID NO: 164144 - DNA, 793 bp, Homo sapiens
ctccaaaaagcaagcaaacaaacgcaggaagaacaagagtcagtgtctgtctgtctctctctctctctctcccccctcttctctgtctcttcccccccctttcaaatcctagcctcagcgtcactgctactgcaatagatttttaaaaaatgacaagttgtatttatgtaagttctaaatatgaactaataccattgaaattacaatgtctggaataaaataaaatgcaatcagcactttaagtaatctgcaaatgtaaaaacaacatttatgtttttgaaggcattattagtaaaccctgtaacaccagatagcttgctaaaacttatttttcttgggaaaaaatgttgccctagcctaccagattatttattttagaaggaatttgggaattaatcaggaaatctgtttgattagaaagtaattcttcattttgagagattttccaatgctcttaagaacatgcagcttcttagtcaagactagagagaaaaaaaccggtttaggattttgcagggttacctcatctaatccttctgaattcactctgggaataatgctattttatttacggggggcgggggaagaaaatacatttagaaaaatcaggggtttcctctctgtgagccaaatctgggttgccattcaaactttttctggctgcttttccatgcaggacagctgatcaataaagccaagtccagcctggcttgctacaggtttcaccagtcagtgcttgcaaaacctttgtcattttctaaaaataaaaaagctaaaagttattgtagaagaa

SEQ ID NO: 164145 - DNA, 473 bp, Homo sapiens
ggtgagtgaaactgcaatgctactttccagcagatgggcagaatcctcacctgtcccttggtcatatacaggtgtcaagactgccacaactgacaggagagtgagctcctcacatctagggatgagggagctggagagcttgtgccccatcccagctgacagggagtggggctcccacccatcctgctctgaggtctggccttggcccttaacaggaaggttcataaagctaaggggctggggacctggggtcacttgccatcagaccgcctcagggtggacagggggatgcccagggcagcactggagtacatggaagaccactgaaaaggttaagattgcacagtggcggctgggcgcggtggctcatgcctgtaatcctagcacttcgggaggccaaggcgggcagatcacgaggttggcagatcatgaggtcaggagatccagaccatcctggctaacacggtgaaacc

SEQ ID NO: 164146 - DNA, 224 bp, Homo sapiens
cttgtggtgtcatctaggggctggctgggaatggctctccttttggtctctccccaacgctagcatgacctgccttacagcatgtcagtctcctggtagtctgacttcctgcatggtggctggcttttccctagagctcaatagtagaaactgttagccttcttcatactggggtgcagaagtcccagaacattagttctgctacattcttttggtcagagcag

SEQ ID NO: 164147 - DNA, 683 bp, Homo sapiens
gtaaatttaaggatgtgtttgaccctcgtgcattaaaacagacaattggccgggtgcggtggctcacgcctgtaatcccagcactttgggaggctgaggcaggcagatcacaaagtcaggagatccagaccatcctggctaacacggtgaaaccccatctctactaaaaatacaaaaaattagccaggcgtggtggcgggcgcctgtagtcccagccactcgggaggctgggacaggagaatggcgtgaactcgggaagcggagtttgcaatgagccgagttggcgccactgcactccaatctgggcaacagagcgagactctgtctcaaagaaacaaacaaacaaacaaacaaaaccagacaattgaggcggccagctgcatttcataattcctcccataagcttcctcctatttgccacttgtttagcaatggaaatggagaacgaagatggcctcaaagtgactacatcaccagtgttacaaaaatgggccagaatttaaggcaagaattatatgtttcttaatagagggatgtttctctgtgtgtggctacttgtattcctgtggatttttaccagattataagagctgctaatttctgatcagaacagagaccaaaaattggagatatggatgtggggatgattcttttgggtaccgatagactgcaggaatcgcagg

SEQ ID NO: 164148 - DNA, 447 bp, Homo sapiens
  misc_feature (49)..(49): n is a, c, g, or t
cgtgagctcatggtcatagcatctctctaccttctgtgcaggacatatnatgctcaattcaatctgtgaagggacaacctaagttccaacctcccaattccaagccaaggttaaacattattaaaggggctgagtccagggtttaatttaaatttggccaggaaatcctattgaccctaccttcaaaatatatccagaatcctattaacgccatttctaccaccagggtccaggccacttcatctcttatcaggatttcttctatagccttctcttctcttctccttgttctacccttgccttcaatccactcttaacacattggccaaagtgattccttagaaatgtctcagttcatgtcaagtctctgtccaaaccttccaatgactgccaatctgaattaaggacagtctttccagtggcctctaatgctctccttccctcacc

SEQ ID NO: 164149 - DNA, 137 bp, Homo sapiens
atgcttaccctggggaagaaacatcctgagtgagacaggattgctgacctgtatcttaaaagagtatcctctagaagtagtagaacaagctattctgcatttttcttaacagttacaaccagtgggaaggaggtaca

SEQ ID NO: 164150 - DNA, 400 bp, Homo sapiens
gacatgtgtatgtgatcggagcctgatgctgccttgtggggctttcctgtcccactttttggtcactaatccagttctctggcccttcagccctcttctctttggggtgactgttacctctttgcctagctcctctgtgtcattgcggctcagtgtagctgagggctggggatttttctacatttttcatttggaggctagggaccctccctctccacacactgactccctgaggtttgggaagcagtggtgttttaagaggagctgacgtctggcactggctgtagtattctcagaggtcggcacaagcagaaggcgctcctggctgggataagccaggcctgcagcctcacacctggtcgtgagatttgggcctttctggggtggggccagcagagaa

SEQ ID NO: 164151 - DNA, 371 bp, Homo sapiens
agcctttaaatgtcacatggatttgaactttactattagatatctggagctaattaaaatattttcaaagcatgttttaaaagtgctctgaatagactgtgctctggatttacatgatgccatcctttcaaatatttcggagttgtgacataggctcttctacaatattcatcaatgaaaaactgagctacactcaagagcaaaagctggtgtttgggccacaaaacggtcacctccaagtgctccgcagctaggcctgccttatatatcagttcctaggctcattctggctattgccctacccatcctcagagtccaacctactcttttcctccttcatcttaacagacgtgtctacagtgaatttgtgt

SEQ ID NO: 164152 - DNA, 355 bp, Homo sapiens
attcaatttaagtgagtgggagcccaggtatgaaggattttttaaaagctcccagaggattctaaagctgagctaggactacagaccactgcaggcggtaaagtccccaaagcagccagccgggaaaacaacttttcttttccaccctgcaggctgtgggcagggcactccctgggcaaggtggctctcaaaggcagaaacctgcaggggagccctggggtcaaaagggggagggctatgggagatgagaagctggatctgtggactctctgaagtaagaatgcccttccccgccctcgctggcgttggccagtgtagacacctgctgctgcgtctttttccctttcactccaca

SEQ ID NO: 164153 - DNA, 406 bp, Homo sapiens
gctcattatgaatttaaaggtactcaaatgaggtaattttgtgtttgttgaatcactaacagtttaattatgctcagtattgtttgtacaaaatgatttttaaaaatggattctaacattttaaaaatggattctaacatcttaaaaatgtgtaacccattgtatgtatgatatagatagtaactctattattcagagtagttgattaactcaaatgccctacttcatatctagcagagaacaggctaaatttaaattaagcagcattttattagaatttttgaagacttgtattgagaaatgccaattaccagttgtttgtgagttgccaaaatattataatgttctgaatttacggaatggaatatgatcattcaaacaataaagcaacaaaaccaaaactata

SEQ ID NO: 164154 - DNA, 212 bp, Homo sapiens
ctccatgttggtcaggctggtctcgaattcccaacctcaggagatcctcctaccttggcctcccaaagtgctgcaattacaggcatgagccactgtgcccagccaaggtatttattttaaaatgagatgtaaattagaaatgtatcaagcatttatgagcagacaattagaatttttatttgcaaaacaaggaaataaaggcttacttcttt

SEQ ID NO: 164155 - DNA, 407 bp, Homo sapiens
ggatactgtgatacacctcccagaccacttttcaagactgaaagacctatccccttgcagcaggaatgctgcttttcggcagccctcaactgtgagcccctctttagtaattgcctggatgaagagaactgcctcaactaaggttacttttcctcccacaacagccgcaaatcattgcccatcttataagaaggttagaaccccagacattctgattgtcccaattcatggcaagtctgaagggccatcccagtttgagatctttgtggggctgttcaaggattccattgagaattggtcacagcccatcctcttcctgtgcccaattctgctttcttcctctcccttcccttccacgggtgttgatcaaacaagcactccctacctgcatgcttatctccatccca

SEQ ID NO: 164156 - DNA, 461 bp, Homo sapiens
ggcagtaccaggctgctgtgaaatccgggagaaggaccaggttaggcaaggccaccactgtggagctgaattcccacagggagaagaacagtgaggccatggatgcatggaaatggggtcgggcatgggagaagactagtgaaaagaacagtgaggccatggatgcatggaaatggggtcgggcatgggagaagactagtgaagtctgggctggggtgagcggtctttgcctggggaagtggatgtggagaagaagcaatgaagcatcagtaggattggaggtaggagcatgaggagggagacaggtgagaggctgggaagcaagatgggccaactgaaatgaaaagaatcaatattcaatccagctcacataaactatagattctttaaagacacatctccttgtggtcagattcaatgaaagaaataatattggcctgttgtagacacttcataaatat

SEQ ID NO: 164157 - DNA, 100 bp, Homo sapiens
gctactcactccagcggctactcctcactccagcggctactcactccagtggctactcctcactccagcggctactcctcactccagcggctactcactc

SEQ ID NO: 164158 - DNA, 125 bp, Homo sapiens
catctgcagggaaggtgagtcagggcaccttggagggtggctggaaagagaaggtgagaagatgtgttgaatccagcaccacttggcagacctacaactttacacatgacctgtgtgccacctag

SEQ ID NO: 164159 - DNA, 339 bp, Homo sapiens
gtgatcagattcagattcaagcagactaacggatagcagtattttccgttcaagatgatggacatcttatctttataaatgattataccggtccgtctgggagaacaagatgctaaatgttacatattccttccttctttcattggaagttcattggaaattttatacacgtaccatgcatacagagaagttcgtgcatcacaaagattcaactcgataatttttcacaaagtgaacacgtctataaccagcaccaagatcaagaaatcgaatgtcaccagaactccagaggctgcttgtgtctgttccagtcactgactcagaattttgtgatggcat

SEQ ID NO: 164160 - DNA, 328 bp, Homo sapiens
cacactgtcgcaggctgtcatgaattgtactgcacgtcacactttcctcagagtcaacaacgggtttatcaccgatacaagagaccagcaggagcctgaagcaagctgatacctctgacatgagcattctggtcaactactgctgatttcaaagtctttctatgactagccatgtaaaaggaaggcagagccacacaactggtctgcatgcaaagaaaagaatgatccaggaaacagatgcttgagcttgatcattagagtctgaactatcagtctttgctttttcactttctacagtgttgccccgggaagttactccagttctctg

SEQ ID NO: 164161 - DNA, 493 bp, Homo sapiens
tgtaagagcagaagaaaaagttattttctacacagtatgtaatggtcttattttgaatctattctaaacatactttttgcaatctttgctaacataaaaatttacattttctttacttatttaatttgctatatagccttattatcctttgtattccttggatactcagtggagatgaaatgtttattctctgaaaatagaaaagccatgtagactacagagatcatactgggtgactagagattgaatagtgcacaatatttcaatcctataaacatggatccttaacgtgtgacctggagaaaatattatccatgtaatgtcctctagtcttccaaaaagacttaacactcccttgagaaggagaacaacaataatcagttgagactggaactcaacaagcaggctcacattattaatatttttatttctaggctctagaaaaaaggctgcttctaattatactcaaggtccaatccattgtaattttttt

SEQ ID NO: 164162 - DNA, 423 bp, Homo sapiens
tgtagtgagttttaaaaaggggagagataatctggtgagatagtgagagctcagagaaggagctccctgcagaacgggaggggtggagtcctgccgcagtaggcaaaggggtgggagctggacaagttcattaggccagcaggtgacactggcctctcacttcatcaagggctgagcacacccggtgggagagacagtgacacggccctgagcgaaagtcacgtctcacactaacgggagagctggagggaagaagtgtgcagcgctctctctcgagcagcccagatcaatacccctagtgatgacttccctggcgcctgagaacagttacacaagcacatttagatactggttgccttagccacggtacccttctagaaagggtgggcagctgaggatggggagagatgaaggcatcaggga

SEQ ID NO: 164163 - DNA, 552 bp, Homo sapiens
ggcccaatcctcttatcataaacacctgcatgtcaattaaggcttgaactcaatgttaagtcaacacaaactcaagtcaatgctgaattgactccaatgtcaattaatgcttgatggtttgctatactcactgcattgggaacagttatctcaaaaatgaattttctgatgttctgcaaggagtgacctcggactgaagaccttgccacactgatgacatttgtaagatttctctccagtagggattctctgatgtctaatgaggtgtgaacatgaagtaaaggctttgcaacactcatcacacttgtgacatttctctcctgcatgaattctcctatgttttgcataggatgaagcttgactgaagaccttgccacagtcatgacatttgtaaggtttctctccagtatgagttcactgatgaactgcaaggtatgaacgatgtctgaaaaatttgccacatttattacactcggaagatctctcttcattatggattctccaatgatttgcaatcgttgtagcgttactgaagactttgtgacaatcatt

SEQ ID NO: 164164 - DNA, 509 bp, Homo sapiens
gcctggccaacagaactttatgtgtaggaatcctttgtgccgtggctgagggtagatctgttcagttttgtatttctgccagatgttgcaggtttattgccagcctgggactactttttgtgttaaatttttggcttggggatcctcagaccatgtagtagtacaattcaaatctgaaataatctgtgatcacacattattagaggagatactgttttcctcccacttcagagtttttattgtcactatgtgccagtgggctaatgttttttctaatctgttctccccctctgagggcgccagctttgtactggttctcagttccaattccctgtttcaggtgggcccaagatcaacaaactaccccactttctaggtcaactggaaaggcctgatctcatttactactgtggtttctagttcccgctgtcgtttttggtcccaggtgatcctccttgctttcttgcaagttcagctttgtaattaaaagtgattgttgtatagccagg

SEQ ID NO: 164165 - DNA, 517 bp, Homo sapiens
tgagaatgctacagtaataatccaggagggagatgatggtggggtagctttccaaggtcgggccaacaggattttctgatggattggatatggggttcgaataaaagagaagtttccaggatgattccaaaatggttggcttgagcaactgggaaaatggagttatttattaagatgggtaagaccaaaggagaggcaggcttggtcagttttggacatgttaagtaaggcatgctttttaggcttctaaatggagacattgagaggcagatggagctctgagtttgaatttcagggcagaaattcaggcgggagataagactatgagacctgcccatatacagatgatatttaaagccataggactcagagagataaccaaggagagtttggctgaagaaaggaagaggacttacagtgaatgctgcggctctccaacatttggaggccaggaagatgagaacaaagaataacgagtgaagtaggaggaaaatgaaggaattgggtattctggaaa

SEQ ID NO: 164166 - DNA, 468 bp, Homo sapiens
cgcatcaggaagcaaggcagagaggaatgcagtgatttaaaaactaaggccatatttgccttatcaggtattcctaatgcgaacacaaatgcacggtgattggcacaaaatatctttaaagacttctgtaggagttttattgttggaggatcttgggcaagttaatttatttttctgagctacaggtttctttgataggtattcaaataatagattactgttgaaaggatttattagtagacagagggtacagggagaagaattgcttatagactcatacgttccagatgagactgaattgcattgatgtaggtgattgggatgggaaaatactgtaaggtttttagaatcatttgagcgtaacaatactgttgtggaaaataggacaagaagaccgtgaggctattcagatatctcattggcccagatagtgataacagagcaagaaaatccagataaattagaaag

SEQ ID NO: 164167 - DNA, 437 bp, Homo sapiens
gaactggaggtcattatgttaagccaggcacagaaagagaaactgcatgttcccacttatttgtgggagctaaaaaaaattgaaacgattgaactcatagagatagagaacagaaggatggataccagagggtgggacggatattagtggaattaattagtggcaagggtattcttttgaaattggagtcagtcctcttaaaccctgcctctgctttatcaactaagtttatattttgtaaatcctttgttatttccacaatattcacaggatcttcaccaacagtagattccacctcacaaagctactttctttgctgatccaaaagaagcaactcctcatctgttcaagttcgatccacttttaattctcattgtcttgctgtttttaccacatcttcagttcttttctccactgaagtcttcaatcctcaaagt

SEQ ID NO: 164168 - DNA, 436 bp, Homo sapiens
gctgggactacaggcgcccgccaccacgccgggctatttgtttttagtagagacagggtttcaccgtgtgagccaggatggtcttgatctcctgacctcgtgatccgcccgtctaggcctcccaaagtgctgggattacaggtttgggccaccgcgcccggcctataccatgcttcttaaccatgcatcagctgatggtcattgggttgttacaatactttttggctattatgaatattgctgctgtgaacatttgtgcacatgtttttatgtggatccaattatttaggcttacagtatttaagagtgctgctttgctactacgctgactggggttaagaccaggctctgctatttagtagatgtgtgaccttgggcaagttacttaacttctctgtgcctcaagctcatctacaaacagtgactatgttaccca

SEQ ID NO: 164169 - DNA, 450 bp, Homo sapiens
aggaaagaagcgccagggcctaccgaaaaggagcagccttggtggaagcttgaaatgtctggctttgattctgtacctcgcctcttcccttggttcctgctggtggcttgtaggattatcatctcccactacgcattctctgaccgctgggaccatcatctcttataggcaagaccactcctaggcttgtctgcagtttgtcacagacttgggatccttgttatttgctgtcttgtgttacagttattaaggcatatctgccgtctccctttcaaattagtcaagagcaagaataagaccatatacatctttatccctggcagtgcgtactgattacaaatttggtatttagtaaatgtctgttgaatgaataagtgaatgattgaatctggaagactgaccttattttttttctcttgagtatggaattaaaagaaaattaacattttt

SEQ ID NO: 164170 - DNA, 128 bp, Homo sapiens
gtgtgtgtgcgcgcatgtgtgtgtgtgcgtatgtgtgtccagaggccactgatccagtccaagtgtatttagaaattagttcagtggctcacaaaggtcttagaggccactactgtgctggggaaatc

SEQ ID NO: 164171 - DNA, 326 bp, Homo sapiens
ctgaggtggctggaacagtaaacaggagggagagtgcagataagcaggggccacatcacacaggcagtaactaatgctattttcttttttaaaatgattactggacaggtagatgaaagaaataaaaacacactgttggagagaaaacatcatttctttttttaccctttttaggttcttagttgagacacttgaaaacaagcgtcagattaacaaaagaaaaacaagtttattaacatgctgtacccatcaagtgggagaggcctcagttcaaaagtatttctctctccaggcagtggcttagggaccttgtttaaatagtattt

SEQ ID NO: 164172 - DNA, 180 bp, Homo sapiens
gatcatgtcactgcactctagcctggtgacagagcaagactccgtctaaaagaaaaaaacagtaaaatacaaaatgtctttttctcctaaccttcttagccttctgctggtacttcaatttctgctggtactgtttggtcattgccctctaaagaatgatagcttcctaaaaaaaaacaa

SEQ ID NO: 164173 - DNA, 443 bp, Homo sapiens
aggaactttgctatgataaattataaagatcatgtcataaggataaagtaatgtgaatatttatagatacacattatttgtcctacttggttctttagtcagctaattgatacctatcaaaggttggcaaatttagatttatgcctgggtttgtcacttctactttaaaataacctagtgaggtttagctgctgatcattagtcacattagacattgttattaatacatcaaaaagttgtccttgtgctcagtattgttcaaaggatcatttttaatttgatttatgccaatgtgtttttgatagctaagatttcctaaagagagcaagagtcctcagttatgtattttggccaccacattgaaaggaagtgtcagcccaggtacaagcacgtgctttcactgattattgatggatttgtttgtaaagtacagttggagtcat

SEQ ID NO: 164174 - DNA, 322 bp, Homo sapiens
tgatcagcactgaaagtaattaaaatcacaggagtacatgagaccaccaagataagacacgagaccaccaagataagaggcggggcacacagcactggtggaagaagtctatgaagaactgagggggaatggtcttagaggaaaaagaaaacaaaaagaaggtggtcccctggaagccaaagataaagaaagtttccagaaataagaagagataaaacatgttaaagattcacaggcaggtcaagataaagaatacaaaatttccatcggatttagtttttcgaaagttactactttggagggtagtttcagggctggaggc

SEQ ID NO: 164175 - DNA, 282 bp, Homo sapiens
tgaaaactttggcccataactcaccagcttcctctccactacaagacactgccatggatcaggtcaatatccacatgtacagttgtccctcagtatccatggaggattgattccaggactcccgatgataccaaaatccacaatccataaatgctcaagtcccttatataaaatggcatagaatttgcatataacctatgcgcaccctcctgtgtgctttaaatcatctctagattacttataccaaatatgaaataaatgctatataaatagttcctatac

SEQ ID NO: 164176 - DNA, 185 bp, Homo sapiens
caaacatacatacatgcagtttctatcctctttcctagaaaacacgctctcatgtctcagaagcagatactagaaatttgagagagaaagagaagaagattatttaaattagatttttgttgtgttatgtgcttgatggtcaaaataattgagtcttgagtaatcaatatagtacctactgtaag

SEQ ID NO: 164177 - DNA, 487 bp, Homo sapiens
accggcccgatgcaagttaaagacagcaagctatctgctctgccctagtgcaaatgaagtctcaggagtttagaaatgtctgaggtgctttgacttctaatttaatacttttagggtttttgtatggtttttgtttttactctctgtgtattcatttgttgaaatagttaatatggtcatggttatgagagaataaaattcaacttagtgtacaacaaaatatggattccaggaagcttagagggtggctaccagtgagacaatgagcagtatccccccagtgtgggcagcatgtcgcacatctaaaatttgtggggtaataatgtctctttaagacggagtctcgctctgtcgcccaggctggagtgcagtggcgcgatctcggctcactgcaagctctgcctcccgggttcatgccattctcctgcctcagcctcccgagtagctgggactacaggtgtccaccaccatgcccagctaatttttt

SEQ ID NO: 164178 - DNA, 421 bp, Homo sapiens
tctttagtgaggtccatgtcgttaaatttaaacacaatgttaaagcaatgtcttcagtgcttttaagccatgggctaggattagtaatacattttaactctaaaattagagaaatagcccacactatacttctcattagttgcgggggctgtgtcttaatttttgttcaagaaaataggaacaggctaagaaatgtgaatgtttgctgtgatgttttgtgttgctgtgctgtggggttattttacatttttggagtcctgccttccatctggggcagggtttctcagtcctggcactactgacatttcgggtcggatgattctttgttgtggggagttgttcaatataggatgtttagcagcattcctggcctctacccattagatgccattagcaccaccacttccagtggtgataacca

SEQ ID NO: 164179 - DNA, 661 bp, Homo sapiens
ccatccagggtgcctgtttccctggaaggctctctccacccagccccataggaagtttaggctaagtctggctctcctacatcaaagaggctttccatctgtctcttgctctgcctcagaaccagggggcccagaaccccctcctcacccaaaagcccctccacagaaaaacagcttgactctgacttcttccatctggccttgctctattaggcgaggcaggagaacaaaatgcctctgccaccaggcttggcagcttttgtctatagagcacaggcagacccagccggtcctctgagggctcagcacaggccattagcacacaaagttgcatgtcagcccatttgaacctagggccacaggatcccaaagatcctgtggaggaggtaggactggagccaggcctgtaggctgttcctgaggccagaattccctctccacacatactcaaagactccccagttcacttgggcagcatgagagtggtgcattatggtgctaggctgcgttcagctgtctgggaagcgggtggagtatggctcagggagtggtccttgcccaaaggtacatggctgatggatgggggtcctaccccagagaagaagcctttgacctgtgacctcttctcccagaagccttccctgtgcacactggcccttcc

SEQ ID NO: 164180 - DNA, 442 bp, Homo sapiens
cagaaaattagcagttgtcttccagattcaggtctatccctcaagtataaccttttaattatgcttaaatcacatactggtccctcaggccattgtccaaattctaggcacagtagagtcaatgcagtctacacagctaaggaggtcacaccccagtcagcctcagctcttcggggaaaaaaatccagttctgttcacacctagttgatcagttaaaaaacatcaaaagagactgagtgcagtggctcatgcctgtaatcccagcactttgagaggccaaggcaggcagatcacctgaggccaggagtttgagaccagcctggccaacatggcgaaaccccgcctctactaaaaatacaaaaattagccaggcttgatggtgggcgcctgtaatcccagctactcaggaggctgaggcaggagaatcgcttgaacctgggag

SEQ ID NO: 164181 - DNA, 501 bp, Homo sapiens
cattcatgtcttgcttgtttctatgggctttcagcctttcactgtgaggcagaggagctgcttgatttcctgctgttggggactccgtcctgtcctgttggcggccctttatgtgacccgtcagcctgcatgcccacatgtaatgtcccggacattacatgtccctgcttgtgcacactgaaatcagcctggacccctccctcaaccgcccctagagcccagctctcatcagtagcattatcttcatgctctcctttgctcctgaacacacctcagcttctgctcccacctgactcagcggctctggctcgccggtgttgggggtgaacttaccctcctttctccctgctcctcccactgccccttctggtgggggcaacattctgagtacgcatcactccttctggcacactcacccccggcagctgccactgcccaacttgttgctggagcttcacctgattctgctggaggcctggagctcatctctcagcagctgac

SEQ ID NO: 164182 - DNA, 785 bp, Homo sapiens
  misc_feature (103)..(103): n is a, c, g, or t
  misc_feature (135)..(135): n is a, c, g, or t
actctagaggatcggttaggtctcgatcgttatgacctagccaaagttttagaaggtagctatttttaaagggccttcttaccacatgggctccatccacttngttcaaggccaaagcaatctgaaataaaaatnacagctcacctactacatggaattctatttcagagcatccagcaaatgttcacctcttgcttctcactggcgaaaatccacaaaagttcttataggaatagtatgtttaaaaaaattaaaaaagctatgcagaactggttctccatggtgctagcttctttcacatggaagtaattagaaataatccgacaatcattctatttcctcattttttgccatcaggcatgcaagtaaaactttcatatcaatctcttacaagcctaaaaaagttacagcctcaagaagtttagactactaataaagttaaatataaaactctaaaggagtgagcaaagacatagccactaagcagtggggttgtgatgtgatcttagttagttctgcctgacatcaaaagagcactaatcttcaatatgcacttaaagtgcacagtatacctctaccacacatgcaacaacctgcaatgctatagaaaactctagccatttccaaagaatgatgaaaggctaatacaagttacatagtcatttatcaatatgtattcaaaactctggcaaccactgtgggtaatgatggagaataagaaaaagaaaaagggaaaaaacgctggcaaccaaacacaaattattattaaatgtttattgggtgat

SEQ ID NO: 164183 - DNA, 158 bp, Homo sapiens
cttttgttccatttaaaatctaattcatacgctaactttttaaatataaaatttagaagtctttgtgatataatacaaaaaatctaaattcatactctatgacttctttacttcctaagggtaaaatgtattaatataaaatcagactactgtattct

SEQ ID NO: 164184 - DNA, 492 bp, Homo sapiens
gttttgcagagtgtcatatagttggaatcatatagtacgtagccttttcagattggcttctttcacttagcaatttttatttaagactccttcatgtctttttggcttgacagctcatttctttttattgctgaataatattctattttatggttttatccacttctttacccattcacctggtaaaggacattttgctttcttccaccttttggcacttatgaaaagaaactgttacaaacttttagatgtagattttgtgtggacataagttttcaactcataaataccaagtaacatgattactgtatcctatgttaagggtgtgtttgctaggccagtgtggtgactcacgcctgtaatatcaacactttaggaggctgaagtgggaggagtttgcgatcagccagggcaacatagttagaccttgtctttaaaaaaaaaaagaaagaaagaaaaaataagaaacaaagaaagaaagtaaaaagaaac

SEQ ID NO: 164185 - DNA, 352 bp, Homo sapiens
cagtgatcttcctgccttggcctcccaaagcactgggattacaggcatgagattctcttgacattcttgagagggcttctagggtgggtgaaaagggaaggaagttagaaattctaatgtaataatttttttttcttattttgtagtggccatatcctccattgaactgagaaattttcacacctaattgattcctaatagaaaatgaaatatgtattcccacaagcagctttaaaacatctaagatcgcaagcaaaatttttcattatagtttgcaaagaaaacactacattatttctcacttcttagttacaagtgatacattaatttcatcctgtctatatacattaag

SEQ ID NO: 164186 - DNA, 486 bp, Homo sapiens
atctgcagtggacagcctggattttaaaagaagagtggcatctttggaatctctactagaatctgctgaggttaaaatagacccagtgttttctaagtgacagaaaatagaatgtgcctagggatggcaaaagtgaaatgtagaaaacccacttggattggtctaaggaagtagatccaggcctgaaattccaagttccaggacttctagttttctttaaaacttttaaagcaaatcctgctttggaaaaaaactcaagtaatatgtgaattatgagattgtgaaagaagggtaaggcttggatccagtcagatttttggcctagaatatgtgacaattgagttaagagtaaacattgtggtgttaatgtacttccaaagaatatcatcgttgatatctgtgtacagtgaatgctttaaaagttctgggtgattgagacagtttaaattttttttaattatagatttacttattttaaaatgttac

SEQ ID NO: 164187 - DNA, 422 bp, Homo sapiens
aaaaaaaaaaaaaataacttttattttaagttcaggagtacctgtgcagatttgttacagaagcaaacttctgtcctgggggtttgttgtacagattattttgtcacccaggtattaagcctagtacccattagttctttttcctgagccactccctcctcccaacctaaaccctccaataggcccctaatctccttttcttataaagataccattcatattggattagggcccaccctagtgacctcattttaatttaattacctcattaaagaccctgtctctaaatacagtcacattctgaggtactgggggttaggacttcaattcaattgggatgtggctgagtggcacaattcagcccacaacagccatttctttaaattttttaaatttaattaaatttttaaatatttcaaata

SEQ ID NO: 164188 - DNA, 276 bp, Homo sapiens
tcagcctcctgagttgctgggattacaggcatgcgttgccatgcccagctaatttttgtgtttttagtagagacatggtttccccatgttgaccaggatggtcttgatctcctgacctggtgatcctcccactgtggcctcccaaagtgctgggattacaggcatgaaccaccacacctggcctctttgaggcatttcttaacaataactagttatatgtaagttagaatcaattcagttatgtaaactaatgaacacaggtatggaaaattttgc

SEQ ID NO: 164189 - DNA, 606 bp, Homo sapiens
ttaagtcgtatctgggtcatgaccttttcccctccaaaacaaggtgctaggaagacaaaaacaatagctactacgaacagtaggagtttataattatgtgctgatgtatttgaagatgttgatggtcgtgagtgtgtatcctcggaaaggccagctggactctgtctccatggttgctctcaccctagggacctaggaacagtccgtcaccacaaattacttttataaccctagagaagaaagtctccttgtcctcagaatacttcctgaagaacaaccagatgggaaggaccttgattgggactctttccagtgggcttggggcagagggaatttaatggctcacatagctgaaaaggcagggctagattgggctttgggctgcatcccagaactccaaacagggatctgtctcttcggctctcagctctgctttcctttgagttggctttattctcgggctccatggtgtggccccacagcaccagttattggtaaaaagagctcccatttgctgacagaactgctggatttagttctcattggtccacacgaggaaggtatccagcctcaagtcatcacatggccaaaagatggaatacactg

SEQ ID NO: 164190 - DNA, 425 bp, Homo sapiens
caatctagcttccaccacctgctatctgtctgcttcaaagcacagtatcttcatctgcaatataaacctgtcaattttaccctgtattatagttttaagtattactagcaataatacaggaggagtatctggaacatagtgccagctttaaaaaacagttactttgctgttgtcatgagtcacctatgggattccctatgggatcctgtgctgggtctggcctggagtggtcttcagaaaatgtagcttacattactcaactgaagctcagttgctctctgaaaacagtgtgggcaaggtggggattgggagaggaaaagggagagaaaataagaatgcgtccaacagtgctgcaatataaggatgttgttctgctcttttactcgtgaaagaaatgaaggctggcagatctacagcaactttaa

SEQ ID NO: 164191 - DNA, 281 bp, Homo sapiens
atggagaagatgcttcctacccaccaggaggcactggtttgtgcttccagaatcaaatcactatctcacttagccttgcttgtaaccaattacaggagctatttgggagctggccagggtcggaaacagagtctttgaaggaaggggatatcaagagagatcaggataactttagctgtaccatgaagcataacccactcctcagccaaaccaccagttttagcctggggcccgacgggcgcctcctccgcgggtatgaccagtccgcctacgacggcaag

SEQ ID NO: 164192 - DNA, 547 bp, Homo sapiens
gtatattttgcaaagactaatcaaaagaaagttgaagtaactatattaacatgagaaacaaggaattttgtagcgataagggaggacattacatattgatcaaagggtcagttcacaaaaaggtataacaattctaaatgtatataaacgcagcagaacttgcacaaagcaaaaactgatagaacagaaaggttaaatagacaaacctaccattgaatctgagatttcaacaatcctttatcaatgtctacatgttttatcaataactggtgtaacaagtagactgagaatcagtagggatatagaaggcatgaacaacatcggtcagctagacctaatagacatttacagaacgttccatctgacaacagaagaatatatgctttcaagtgcagatgaagtatttatcaagatagaccatattcttccatataaaaagaacattaacaaatttaaaagaatttaatgtcttctctgacaataatggaattaagctagaaatcagtaacagaaaaacatatttgtaatattcccaaatattaagaat

SEQ ID NO: 164193 - DNA, 416 bp, Homo sapiens
ctgtgtgcctattgtgtcccaggtactgtgcaaaacatagtatatagtgaataaagcaggcatggtctctgtcctcatggagcttggagtccatttcctctaaacgtggtcacttagcaaaccaaaagaaaaagataacacaatgccacacgaattagctcttacaacaaatggtgcaaatggtaatgaattagataaaaagattaacaggtttccataagacagaggatacatttaaaagagaatctttctagaattcattaagaacagcacaaaatatcctagataaccaatgagtaaagcaactacatggcaagttaaaaatataaagacactactgagacacaccaaaaaaaaactttgcagtctataaggtgaagaggattgggtttcactaaaaaaacagtaatactctt

SEQ ID NO: 164194 - DNA, 407 bp, Homo sapiens
aacctggttgtctgtaccaacacagataaagctcctgccttcagagtctccagtccttccccgtactgccattagaatgagcttggtaatgcgccactttgaccatggcatcgctgcttaaacagcttacatgagtcctaacacctccaggcgaagtccaaactcctgaacactgcctgatctcagaccacctttccagcctcatctcccaccagcactaattttcccaggctgctgtgtttagccacatgtgacagcagccttctccagtgggccctgcccctccactccttattcttcttattttatcttaatccacttcttcccctgctttcaagcacaggcacagctcacgtgcctctgtgaagccttccatgttcattgctccggcaccaccacgacacagt

SEQ ID NO: 164195 - DNA, 557 bp, Homo sapiens
aagaaaaatctatgaacttcattaaaactgggttccatgcttttaatggaaaacagagatggaagatgagacaaaaatgccatttcagtttgagcaatgcactttatgagactcctttgggtagaaagagggaggaggccactgaggtttccactgagtgtatattatagatttgttctctcctcctcacctcccttggcttttcttccatcattggggactgctgtaatcttgaaacagaatattttctcttagttattattgcattattaatattttctgtttttggccatttcttttgagtttaatttgcatatgtgtacatgggcaatgcttcaacgagacaatttttttaagtttgttctctaacatcttagatactagaagatatggattttggtcctgggagattatttaggtttttttcttattgtgttgttgcacatatacagttagcagtttttttttttttctgttggaattttagaaacaaggatccttcttgcggacggggtaagagtatgactgtaatcagagactctgggtgcagtttaggg

SEQ ID NO: 164196 - DNA, 2247 bp, Homo sapiens
  misc_feature (3)..(3): n is a, c, g, or t
  misc_feature (38)..(38): n is a, c, g, or t
  misc_feature (135)..(135): n is a, c, g, or t
  misc_feature (288)..(288): n is a, c, g, or t
atnacacgtgtgagccactgcgcccacccataactgtnttctgtgtatggttagggaaatcaatccctgtccttcaatttgaataggtttagactcctatttgtcatgtctttatcccagctaagtttatttttntatctaatgcaagtaaagtctattttttcatgaagaaagccattcgtcctatcaccagttcttgcatactctttccttttttcaggttcttactctgtcacccaggctggagtgcagtggcacaatcacagctcactgcagccttccacctcncaggttcaaaccatacgcccacctcaatctcccaaagtgttgggattacaggcatgagccaccacacctggcccaattagtttttgagtgccctgaatttgtttacttactatgaccaatgagttgtataccttaagatgttttctttttacatattagcatccttttctttcagattaaaaaacttcctttagcattttagtaggtctagtgttgatgaatcccctcagctttggtttatctgcagactttatcttttctttatgtttgaagaatacctttgcttggtacaatattcttggttggcaggtttttattctccttcactactttgaatatatcatatcattttctcctttcctgcagggtttttgctgagaatctgatgaaagctgtattagggccctgattaatgtgatatgtctcttttctcttctttttttcagtattctttctttgtctttgattttttttatcataatttgaagggtgttggggaattccttttgagttaatttgattagtaacttctatgtttcttgtaagtggatgttgttttctacatgtagatttaggaggtttttagctatgatttccttaaatatgtgttctaggtctattctcccttttctcattcggaaactcctattatgtgaaggttagtttactttaaatagtgtcccacaattcctgaaggtcttcttcaccatattttttcttttttctttttgctcctctgattaatttcatacgtcttcaagctgtttcctctgattatgtctactgtaaaagctttctattgagttttttcagttcagttattatattctttatttctaggatttatttgggctttaaaaatgtttctttatttgtcaaatatctcattgtatttatggattgttttccaaattttagttaattttctatttatattttattgtgattccctgaaaattttaaagtagattattctgaatttggaattcagacattttatagatcagttcttctgtgtccattatagagctttgtttatttcttttgttggtgtcatattttcctgatttttattaatccttttatctttatattgatgcctgtgaatttgaggagatggtcacctctttctgtttttgcaggtgttttttgtggtcttagatcattacaacttaatatcagaacttaattgctgtccagcttttgactcctgagtggggaggacttagtgtgtatcagaatttaaatgctgcactggagtgaaatcactgctctgccattgtttgttatttggaaaagacttatgcgagcaccagaacttactaaatatttcagctgcttctgggtcaggggaaggtgccacataaacacaaaaaaggactcaggcatttccagggctcataacctctgcagtgctatgagacttgacagtctcctcagcatggcattcctgctgagcagaatgcagagcagctaccaagatccacaggacagttgctgcaatcagctctcctgattttatcttcagttcactcaggtcattcagccctcctggaactctcagtgttttccatgggatgagacccatgtagacttcccatgaagcctcctcaactgatagggaaattgaatgtttattttcaacttcgaatttcttccaactcagacatcctaaatgtatagaaattttctgtgagctgttatgtggcttggggtagtgggtggcagattctaaaatcgtcatttatcagtcacagcttctctcatttctgcaggcccctcgttcctctgcttctctctcaagttctagtaacttcagggtagttttattgtctttgaatagttactgcttatacctttgtgggggaagcaatgttaagtgtcttctaatctgttatcttgctggacagattttgtaagttgtgaatataatgtacagctatccattagagaactaga

SEQ ID NO: 164197 - DNA, 2193 bp, Homo sapiens
  misc_feature (3)..(3): n is a, c, g, or t
  misc_feature (38)..(38): n is a, c, g, or t
  misc_feature (135)..(135): n is a, c, g, or t
  misc_feature (288)..(288): n is a, c, g, or t
atnacacgtgtgagccactgcgcccacccataactgtnttctgtgtatggttagggaaatcaatccctgtccttcaatttgaataggtttagactcctatttgtcatgtctttatcccagctaagtttatttttntatctaatgcaagtaaagtctattttttcatgaagaaagccattcgtcctatcaccagttcttgcatactctttccttttttcaggttcttactctgtcacccaggctggagtgcagtggcacaatcacagctcactgcagccttccacctcncaggttcaaaccatacgcccacctcaatctcccaaagtgttgggattacaggcatgagccaccacacctggcccaattagtttttgagtgccctgaatttgtttacttactatgaccaatgagttgtataccttaagatgttttctttttacatattagcatccttttctttcagattaaaaaacttcctttagcattttagtaggtctagtgttgatgaatcccctcagctttggtttatctgcagactttatcttttctttatgtttgaagaatacctttgcttggtacaatattcttggttggcaggtttttattctccttcactactttgaatatatcatatcattttctcctttcctgcagggtttttgctgagaatctgatgaaagctgtattagggccctgattaatgtgatatgtctcttttctcttctttttttcagtattctttctttgtctttgattttttttatcataatttgaagggtgttggggaattccttttgagttaatttgattagtaacttctatgtttcttgtaagtggatgttgttttctacatgtagatttaggaggtttttagctatgatttccttaaatatgtgttctaggtctattctcccttttctcattcggaaactcctattatgtgaaggttagtttactttaaatagtgtcccacaattcctgaaggtcttcttcaccatattttttcttttttctttttgctcctctgattaatttcatacgtcttcaagctgtttcctctgattatgtctactgtaaaagctttctattgagttttttcagttcagttattatattctttatttctaggatttatttgggctttaaaaatgtttctttatttgtcaaatatctcattgtatttatggattgttttccaaattttagttaattttctatttatattttattgtgattccctgaaaattttaaagtagattattctgaatttggaattcagacattttatagatcagttcttctgtgtccattatagagctttgtttatttcttttgttggtgtcatattttcctgatttttattaatccttttatctttatattgatgcctgtgaatttgaggagatggtcacctctttctgtttttgcaggtgttttttgtggtcttagatcattacaacttaatatcagaacttaattgctgtccagcttttgactcctgagtggggaggacttagtgtgtatcagaatttaaatgctgcactggagtgaaatcactgctctgccattgtttgttatttggaaaagacttatgcgagcaccagaacttactaaatatttcagctgcttctgggtcaggggaaggtgccacataaacacaaaaaaggactcaggcatttccagggctcataacctctgcagtgctatgagacttgacagtctcctcagcatggcattcctgctgagcagaatgcatcttcagttcactcaggtcattcagccctcctggaactctcagtgttttccatgggatgagacccatgtagacttcccatgaagcctcctcaactgatagggaaattgaatgtttattttcaacttcgaatttcttccaactcagacatcctaaatgtatagaaattttctgtgagctgttatgtggcttggggtagtgggtggcagattctaaaatcgtcatttatcagtcacagcttctctcatttctgcaggcccctcgttcctctgcttctctctcaagttctagtaacttcagggtagttttattgtctttgaatagttactgcttatacctttgtgggggaagcaatgttaagtgtcttctaatctgttatcttgctggacagattttgtaagttgtgaatataatgtacagctatccattagagaactaga

SEQ ID NO: 164198 - DNA, 1798 bp, Homo sapiens
atgcgggacacgctgtagaacagctcacactggctggcactgctaagcaggtgcggaggggagtcagagacccccggatggaggggtgtggtggacctcagttttgaggccgagagtcctctggcgccccccacagagctcctggagagactgcccagctatgactggcttcttcaagggggcagaggacagatattcttcccacctttggaggccccagggaggccccaggagcaaaggtcctggccctcgttcctggaacacaggagatgccctccccagttggactgctgagggctttaccactaccgtggcctcagtttctcgcctgcacgttgaggaggctggctggcccgcgtgagtccacaggcccttcccagaagcccccgcctctctgttcggtcccctgcagagtccctgcgatgacggaggaggtggcccgggaagccctcctcagctttgtggactctaagtgctgctacagcagcacggtggctggagacctcgtcatccaggagctgaagcggcagaccctctgcaggtaccgtctggagacctttagtgaatccaggataagcgagtggacatttcaaccctttactaaccactctgtggatgggccgcaaagaggcgcctcccccaggctctgggacatcaaggttcaaggtcctccgatgtttcaggaagacaccaggaagttccaggtccctcactcgtcactggtcaaggaatgccacaaatgccatgggcgtgggcggtacaagtgcagcggctgccacggggcgggcacggtgcggtgcccatcctgctgcggagccaagcgcaaagccaagcagtcccggagatgtcagctgtgcgcggggtccggcaggcgaagatgcagcacttgctcagggagagggaacaagacctgcgccacctgcaagggggagaagaagctgttgcacttcatccagcttgtcatcatgtggaagaacagcttgtttgagtttgtgtctgagcaccggctcaactgccccagggagctccttgctaaagccaaaggagaaaacctctttaaggatgaaaactcggtggtgtaccccatcgtggacttccctctgcgagacatctctcttgcctcccagaggggcattgcagagcacagcgctgccttggcctcccgtgcccgcgtcctgcagcagcgccagaccattgagctgatccccctcacagaagttcactattggtaccaaggaaagacttatgtctactacatctatggcactgaccaccaggtgtatgcggtggactatcctgagcggtattgctgtggctgtaccatcgtgtgacatagcatggctgtccccagagcctgccattcacgtttgccaaggaagatggccgacactctctgagtgtgttcactgttggctgcattggacaatcacatacaaaccctggcatgtccttccagaaaaaccagcttatcatctatcaagctccaaccccttatacagctcctctggtggaatccatgactcatatgtttaacctacaataattcagctatacacattcctgtagaacaaatgagagaaataatttaaatggcaaggactttgcctctggtctccaagttaatgccccgatgatgcgtgtgatttgattttgctttttccctttgtcggtcttggttctggtgtgcttcttctagtgggagcctcttgacgatctgagtattactgaaatgttcaaggatacacacaaatatctggccctaatgcacaataaatactgcacttaggcataaagtgca

SEQ ID NO: 164199 - DNA, 1898 bp, Homo sapiens
atgcgggacacgctgtagaacagctcacactggctggcactgctaagcaggtgcggaggggagtcagagacccccggatggaggggtgtggtggacctcagttttgaggccgagagtcctctggcgccccccacagagctcctggagagactgcccagctatgactggcttcttcaagggggcagaggacagatattcttcccacctttggaggccccagggaggccccaggagcaaaggtcctggccctcgttcctggaacacaggagatgccctccccagttggactgctgagggctttaccactaccgtggcctcagtttctcgcctgcacgttgaggaggctggctggcccgcgtgagtccacaggcccttcccagaagcccccgcctctctgttcggtcccctgcagagtccctgcgatgacggaggaggtggcccgggaagccctcctcagctttgtggactctaagtgctgctacagcagcacggtggctggagacctcgtcatccaggagctgaagcggcagaccctctgcaggtaccgtctggagacctttagtgaatccaggataagcgagtggacatttcaaccctttactaaccactctgtggatgggccgcaaagaggcgcctcccccaggctctgggacatcaaggttcaaggtcctccgatgtttcaggaagacaccaggaagttccaggtccctcactcgtcactggtcaaggaatgccacaaatgccatgggcgtgggcggtacaagtgcagcggctgccacggggcgggcacggtgcggtgcccatcctgctgcggagccaagcgcaaagccaagcagtcccggagatgtcagctgtgcgcggggtccggcaggcgaagatgcagcacttgctcagggagagggaacaagacctgcgccacctgcaagggggagaagaagctgttgcacttcatccagcttgtcatcatgtggaagaacagcttgtttgagtttgtgtctgagcaccggctcaactgccccagggagctccttgctaaagccaaaggagaaaacctctttaaggatgaaaactcggtggtgtaccccatcgtggacttccctctgcgagacatctctcttgcctcccagaggggcattgcagagcacagcgctgccttggcctcccgtgcccgcgtcctgcagcaggtgagccagggcggaggggccatctggctctgacgtctcttcctgggctgctgagccctctttcctgagaacgtcggagcggaaggatgaggacgtagagcgccagaccattgagctgatccccctcacagaagttcactattggtaccaaggaaagacttatgtctactacatctatggcactgaccaccaggtgtatgcggtggactatcctgagcggtattgctgtggctgtaccatcgtgtgacatagcatggctgtccccagagcctgccattcacgtttgccaaggaagatggccgacactctctgagtgtgttcactgttggctgcattggacaatcacatacaaaccctggcatgtccttccagaaaaaccagcttatcatctatcaagctccaaccccttatacagctcctctggtggaatccatgactcatatgtttaacctacaataattcagctatacacattcctgtagaacaaatgagagaaataatttaaatggcaaggactttgcctctggtctccaagttaatgccccgatgatgcgtgtgatttgattttgctttttccctttgtcggtcttggttctggtgtgcttcttctagtgggagcctcttgacgatctgagtattactgaaatgttcaaggatacacacaaatatctggccctaatgcacaataaatactgcacttaggcataaagtgca

SEQ ID NO: 164200 - DNA, 876 bp, Homo sapiens
ttggcaccatctcaagtataattcaaatcacgaggcatttgtgcatatcgacaatacacccatcgtggtgtggtggacctcagttttgaggccgagagtcctctggcgccccccacagagctcctggagagactgcccagctatgactggcttcttcaagggggcagaggacagatattcttcccacctttggaggccccagggaggccccaggagcaaaggtcctggccctcgttcctggaacacaggaagaaccctgcttcctccggggagtcatctctggcctctccagcccacagtgtctcttgtgctgccatccatggatctgaagacagacgggcccctctgtgtgccagggctggaggatgctggagatacaagtgtgcagaattgtggattaatggctctcagggctgccatggagaaatgcatgaagatgcaaggggaggaaggaggattctttcctcttggaggtgttggggccagaaagacttcagtaagggggtggcatggcctcagggaagggacttccaggaggagggggaggcatgcagaaagagggccgaggttagggtccctgtctgtcgtcccacccacggtcctcagggtgagtctccatgggcgctgccatcagccctgggccagtgcctggctggggtcttcccatcatgttgctagcagctcctctggctaaggtcaaggtacccgagggcaggagccttatttagcctgtctctgcctccttttaactgtgcgacatcctctctggacctctgtttttcttatctataaaatggtacaattcctctctaaggttgtgtttcttcagttgcaggattctatcagcttttctcctaagctccacatttcaactaa

SEQ ID NO: 164201 - DNA, 297 bp, Homo sapiens
aaaggaggttcactaagcagccaagcagaactgcctcagacaataaatgatataacaagggcacagagggatactaacctgcccaacctcagggtgaatacatgtggatggggtataatatgcctatcaaagcccattcttctctttgccctctaatctaaagtggaaaagtacgaagctatagtccataagcaccaaagcagtgggctaagattccaggtttgtttgagtctacggtaagtaaggctagaggtgctgagtaagcagacagagaaaacacattttccccttatacct

SEQ ID NO: 164202 - DNA, 254 bp, Homo sapiens
actccaaaaactgaactctgcatctttccggcagtgatggacatgcctcttcgcagccacttacttctgtcctgaggcgtgttgtcctggctaatgtccccctgtggttctaggcacacgtcaccaagtagtgctgaatcactgtaacttccatgccacttccaggagccttttggaaacacattcagaatggctacacttctcggtttctctattaataggatttttctctttcttcttttttttttaatggc

SEQ ID NO: 164203 - DNA, 158 bp, Homo sapiens
acccaggcctaagtgttgagagttttactgggacttcattacataggcatgattgactaattgtccatgtggttgatctcaaactccaggtcaactgatactacatcaaccagagcccccacccttccgatgagaacatggcctagagaaaaaataaa

SEQ ID NO: 164204 - DNA, 436 bp, Homo sapiens
ttgaactatgcattagaggcagggggaatagaatgagaaggtacataggttaagagcttttggttgaatatggtggcccaattcataagtgtgctgaaagcttaaaggaagggtttgaactttatcctagggatagtaatgatttatcatctgggaaatggcatcatgaagagtatttcagaaagatgaatctgatagcttaattaggatacagtagaaggagatcatagagcaaacctgaaactaattttatgtcatgtcttaatttgatatgtgagacgagttgccaggataaagtaaaaactacatttcgtattgaggttgatagtgtttctacaataagtaaaacactccaaatcttccataaagaagatttgtaatgttagagtggtaatttaaagatacttaaatacaaaacaggaatcctgaactcttc

SEQ ID NO: 164205 - DNA, 204 bp, Homo sapiens
tttttacatttctattttaaaatgggagtattacttatgtagagtaaagtgcacacagcctgaggaaatgtttcctgtgtgtacacctgtgtaaccaccatccagagcaaagcatggaacactcgtgaccccctagagcacacccttcactgagcaatactccccctctggggtcccccgctttctgactgacttctatcacca

SEQ ID NO: 164206 - DNA, 413 bp, Homo sapiens
atcttgaactcctgggctcaagtgactctcccacgtccacctcccaagtagctgcgactatgggctggagccaccgtgcctggctatttttttttggtagcagtgggatcttgctgtgttgaccaggctggtcttgaacttctggcctcaagtgatcctaccaccttagctttccaaagtgttggaattataggtatgagccccagtgcccggcaaaggtgtaactttataactagatctggaagaaatataatgttataaatcctgttctaggtttctctagagaaacagagccaataggagaaacatatatcgaaatgtattacaaggaattgtgttacttgatggtggaggctgacaagtccaagatgtgcagttggcaagctggaggcctgggagacccaatggtatag

SEQ ID NO: 164207 - DNA, 254 bp, Homo sapiens
aattttgaactctgggaaaaggagaccatcctaaaaatttgcagagagcaggaaaaataaaaagtccacccaaagaggagaaagagacaaaattccgtcagttttaataagcaacgctgaaagcaagagacaataaaaccatcagggtcattaaaataataaagaatgtactttcaatctagaattctataaccagccaaagcaggtctcaaaaactttaccttctatacacttgttctcagcataaagaggaa

SEQ ID NO: 164208 - DNA, 631 bp, Homo sapiens
acgccctctttcgttccctacctcagtcccattcttcggaggggaacagagttttccttctagaaaggtttactttttaagcgcagatacgtgtaccttttttctttttttctttttggcttgtttgttttttgagacggagtcttgctctgtctgcctcctgggttcaagcaattctcctgtctcagcctccctagtagctgggactacaggcgcatgccaccacgccgggctaattttttgtatttttagtagcgatggggtttcactgtgttagccaggctggtccccatctcctgacctcgtgatccacccggctcggccttccaaagtgctcggattacaggcgtgagccaccgcgcccggccaacgtgtatcttttcttgtatgtaatatgtgagcatactatgtgtatatactctgcactagtgtggtttcactttgtgtctgggatatatttcacatgaaaacggacaaatccatttcattctgtttttgtagtatgtattttctgaatctagtatgatttatttaaccagttcacacttgtaatcccagcactttgtgaggtcaaggcgggcggatcacttgaccttagcagttctagaccagcctgggctacttggtgaaa

SEQ ID NO: 164209 - DNA, 629 bp, Homo sapiens
agaagagagccctgctaaaataacattactgacatcctagggtgcctgtgcatatgcccaatgttgcaccttctgaggaacaacatcagaggctttacagtgtgaaggaaatagacttcactaaaataatccacccagacaatatacaaacaggcatacaacaataacaagccttggcatcagagggaggggagtgatatccagaacttctacaatatatcatctgaagcatttgttttcaacagaaattatgctaacgtcaaggaaacaggaaagtgtgacctatacacaggataaaaatcagtcaacagaaactacttgtgagagggacagatgtcagacttaacaaagacttcaaagtagccattatgaaagtaaggaaaccatgcttaaggaagcaaaagaagataggatgacaatattttattatgtagagaatatcagtaaagtggtagaaactataaaaaagaatcaagtagactttgtgaagttaaaaagttcagtaactgaaataaaatcactagagaggctcaacagtagatttgaactggcagaagagagaattgaacttgaagatagatcagcagagattatgaaatccaaagacagaagaatgaagaaaaatgaac

SEQ ID NO: 164210 - DNA, 364 bp, Homo sapiens
aggtagctgggattactgccatgtgccaccacacccagttaattttgtatttttagtagagacagggtttctccatgttggtcaggccggtctcgaactcccaacctcaggtgatccgcccgcctcggcctcgcaaaatgctgggattacaggcgtgagccaccgcgcccggccatctttcccaatttcttattatgctttgtctctaccggaagggatttcagtgtgggggtacagtcagggatcttttgacaagtacagcttaagctgtatttcattggaatgggggcatttccttcagggcctccaagtcaaaaaataatgataatattgttactagtagagggtcttgactgcaagttgt

SEQ ID NO: 164211 - DNA, 142 bp, Homo sapiens
aggaggataattctaagataatatccctctcccaaggagtatatgtgaactcagtaacaggagagtgctttgaatctttaaagtactgagtagctagcaaagagctgccatatgcagatctcaaccagacctgaccatttgg

SEQ ID NO: 164212 - DNA, 446 bp, Homo sapiens
agttgtaatcagcggtggagaaacacggatgggttttaaaacatagagcttcgaaaaaaaaaagtggtccgggcacagtggctcatgcctgtaatcccagcacagcactttggaaggccgaggcaggaggatcactttgaggccaggagtttaagatcagcctgggcaacatagtaaggccctgtctctacaaaaataattacacaaataaattccatctgatttgtttttgcccatttgttcagattcattttgaaacatgattatgtcaactatctacaaccattcaattgtgatgataattctctcgtcttcacccaaatcaataaattttttgacaggacagagctcaatgggagatttctacataccatttcctcaagtgacattgattaattaattaactattgtccggggcgttcagccacccgagattgagcaatctc

SEQ ID NO: 164213 - DNA, 221 bp, Homo sapiens
ctctagtttgtttcatcaggaatcacagctttttaaaaattaacagtagatgggaatgacatgatgatttcctcagaaaacataacctacttggctgcgagaccatgccaatgatgtggggtcagaaagacctggggccctgttctccaagccaccatttaattggggagggctactgacatggcaccattgaacttgagacctgccattcctccggtggc

SEQ ID NO: 164214 - DNA, 280 bp, Homo sapiens
gttcaaagagatgttattaatgcacgttagtagctctataaatgatttaaggttaaattatgtaaaaggatcaaatatttttcttttgttggaatatcctgatttttataaaccaatatctatggtaaaagttcccatctctagtatttttcaaagagatgtgaaaaataactgttgatacagaaagataatttagagcaaaccccagcaaacacaaatgaacgtacatacccacaaagattcagcctgccctcaaacactatcattagttgctgtaatt

SEQ ID NO: 164215 - DNA, 270 bp, Homo sapiens
acatttaagaaaaagcaggataataacctgtatatggaatatatggggtaaataatgaaaggctctatgtcacacttgcctccacgcttatgtatacatgtatctgtatgtgatacacgctgaaatgacactgtaccacatcatttgcattcagtaatttactttttgccatatatctgggaacttgtttgatttatgtactacagatttactcattcattttaatgactgcttagtaatcctttcttttctttctgattgacatttctt

SEQ ID NO: 164216 - DNA, 266 bp, Homo sapiens
tgctttcatagcatacatctctataaaaggacttatcttcgttggtaacttatttgtttacctgattctttcaatagattgagaattatttgaaggttcttacttagctttgaagcatcttaattagcttggtatccttgttgcctcattcattaccaggcatacattagaacttgctgtacactagttacagggaacaaaactaaaaccagaaacagggtaaagatcaagaatcgagcaaataccaaaaccatcgtggaagcaga

SEQ ID NO: 164217 - DNA, 329 bp, Homo sapiens
cactttcccaggttcagtaacttgcccatctgagccagtttctacaatggagctaaggatccccgctcatgggggacaaaatgagattgtgccaatcaagttctcccagcacctcgcccacacagagactcattctatttgggggaaaccgaacatcaggaatcaaatcataaacatgactgatcgtggctaggagtggggcacaggactgcagagaatctggctcctgtctgcaaggatccacaatttaattaggatatgtgacctaaataataataataataataataataataataataataatacagcaacagtaacaacagcca

SEQ ID NO: 164218 - DNA, 518 bp, Homo sapiens
tcttaaagctaataaagtgtctggtatacagtatatgtacaatcaatatgtgatgactgtataaattaatgaaatccacaagtgaaaggaaaaattgtacattttactctacgtagtgataaatagggatcaataagggatgcctagtaaataatcagtctttattacctcctcattaaagatataatgataatccctaatgagtgttatcacagttaatttgcttttttcttcctagttgcatgtggcagaattcctcttcttgattcaaaatcttattattcctcttactctgccggggattcaaatatcaatctatcaatttgtttattctccaaacttctactcaacagactccagaagtttttgatatgccattctagggttctaatctcatgccctgtatccgggttttctctgaaagaatatatattctggttttgtgactgtggtaaggagcccttaacctcttttggtggaataagtcccttctggtttagagtgtagactgataatgg

SEQ ID NO: 164219 - DNA, 429 bp, Homo sapiens
gaccatcagtagaatcattgcttccccgcttctccttgcttccccgcttacagtaattgcctcctcttggagaactgctaggtctcagaccacctaggaagtggaattgagaccctgtgagaccgatgcacaggctcccacccatgtggaaagctgcagccctgattaggtgtttggctggctgaccccaccacccttgggaccgcggtttccctgagtagcttgagctctggccctggtcacgattcagggttgttctgaccctctcagaagagaattttccaaaaccccaaacaacgacagctttatgggccagctgcactatgttccctttgagaggcaaccagagctcttaaatcacatgaaaaacacatccaagttgtgctgtggggactcacatcaggcaactggctgctctactcaattctt

SEQ ID NO: 164220 - DNA, 1005 bp, Homo sapiens
  misc_feature (792)..(792): n is a, c, g, or t
catcaaatagttaatgtactccagtgtaagctttttgaggtcagggaccttatttagtgtacttcatgtgcacatgataggctttcagatattgaaattactgaattagtgaccattattggtaaatagccattaatattaccaaaacctgtcctcttgatttttggagggtttttttcctgcttcaattagtgagttgcctgagtgtaaaggaggttcttgtaggtgtcagaaatagaacactgagaattgtagtcccatgataggctgtgttatattttttcttctgttttcaataatgtattgttagagatgtgaaaacaatattttaatgttggtatttattagtagtaaaactatatgaggataccatttatttggtaagaagacccgtggagttaaaaaataaatggctatggagcaaatcagcctttcctagggttgaggtaaaagttgatttgttccagccacccataccataaaactcctgattttcctgtttacttcttcccagctttatgtctttactcttctttgttcagcaccgaatcgttctctctcttttcttctcactcatccatccctgctttgtctctcttaactaaccatcttacacaattgcaattatttgtcatgttcatatacgttttaaaagcacatagattgaaagtgttgtctttcaagctttagggtgtgtatcgggggatgattttaagtccgcttttttatatgtgatggttctttactcattatagaaaagtgttaacactcatcaataaaatactagaaacntttctctaaagacattcagggtgggcctatgatagggatatttgggttcaaatccaatttatttgcttttattaattgtgccattacttcattgatgagattgtgtttgggctacatatttgaggggaggaaataaatataaaaaggttaaattgcttttgggcactttaaattgttcccctgaatatttactaagatgggtaacgtagatgg

SEQ ID NO: 164221 - DNA, 386 bp, Homo sapiens
agaggatccccggtcattcctgaccttctgcacactgacagcgcggcatccggggagattcgaacacagtcattgccccgtgtctcccttctctcccttggagcctggtggaccatgcatgccccgctcacctttccctcccttggggccagagtgagcgagtgtgacctgaggggactgaggagtgggcatcacacttccggtatagagagaaaaccacgggccctagtagaagtcacagcaagtttagactgggtcacacagcatgtgtagcatgacaagcagccatgttatcccagcaactgggaggcggagctaaccaaagccaggcagtttagaggaggtaggttagaccctctgcaaatgttacaggctgaggaaatgga

SEQ ID NO: 164222 - DNA, 352 bp, Homo sapiens
cacccaactgtgcctcttccataggcagcatgagtcaccatttttctggggcctaacattctgagttgacctgccacattggtccaccaagggcacaaccccagctcccctcagctctaagccccctgactttgggggacatcaggagtacctcctaggctccctgctccctctttcaatccagtcccccaccaaatctgttaagactgatggtccccagatgtgcagaggttaccatggaaaccaagcagccatgttatcccagcaactgggaggcggagctaaccaaagccaggcagtttagaggaggtaggttagaccctctgcaaatgttacaggctgaggaaatgga

SEQ ID NO: 164223 - DNA, 362 bp, Homo sapiens
ttgaaatttaccatcttaagttagccaagattgagtatcagggatggctttcctaataaactctcagacttattagaaagtttagcgtttagagaaatattttaatattttatctaagcttgcaactctcagactctcacctgagttatatgctaaaatgtgctggggattaaaaaaaagatcagattttctttttttccctgatatgtgccttgtggagagggaaccatgctgactttgtatcaagtgtagggagagcctgtgtcttttctgatgcagaaaggctgaacatgtccctaaagagtgaggttagtttttttgtttagtttagtttagtttttttttttttttttttttttttt

SEQ ID NO: 164224 - DNA, 598 bp, Homo sapiens
tgagaactgtcgcaggcaggaacttgtgtgctgtactctgaaggaggtgagtaccagtcgctgggtaattagggctgtgctgcaggtacagcctctcttgcttgatgacaatgatacagaaagaaaatcttgggaagggaaaaggctgccctgagaaacagccttacagagagtccaccagtattcttcctttagtacccagagcttctgttcacagtctggtttgtgagctccagccttgctgtgaaggaaaatgggaaaacatgtagagtgctcagggctaaccatctcccagaaacccgaatcagcagctctcccatttaccctcttggggcccaagctcagcttaaggatgaaacctgacacgcaataaggaatacagtttatttgggaagtttgggtgtttttcttaggcccagaccccagtctgtgggataacttttaaagcctgagggaattgagtaaatgaaagaggaaaacaatgttcttaggggttgtgggctctgctccagcctgcttctgatctggccctgagccacaattgccctggcaacaggagctaattggatacctaacagggactgccttccgccaccct

SEQ ID NO: 164225 - DNA, 418 bp, Homo sapiens
gcctacattgactgatgacatttcttaggacaattttggattaattatgaaaacaactactctctgagcaattgttgaaaaaaaaattaaaaagcaaactttgcccagaagattaggctttagttagtttgaaggcactgagtcagagtgtggtgtcaggtaaagggatgaggaagcattcaggtagaagaaactgcatgtactaaggttcctaagctgaaaggaacagaattggaaaaaacagaaagcaaaactcaacagaaatagaatgtctgggctgtacaagttagtagagaagaggcaagagttttggtgttaggatgaggttgaatcttagctctgtttcttactattcatgtacatttagacaagttatttaacgttaatgaattttggttttgtcatctttaaaagggaa

SEQ ID NO: 164226 - DNA, 140 bp, Homo sapiens
tagatctacaaaatataatagcacagtccagaggtttctattttttttcaagcagcaatcaggaaagactgctcttatcctcctacctcccaaatctgccaacatattcacatctgcatccttatactctgccttctctc

SEQ ID NO: 164227 - DNA, 142 bp, Homo sapiens
agatgtccacacaaaaacctatatatgaatgttcatggcagtagtgtttataatatgcataagacagaaatttcaacatagctaaaagagtgttttttgaatgtccagccactgttgaataaaaaaaatgtggtttttccat

SEQ ID NO: 164228 - DNA, 362 bp, Homo sapiens
tggacctggactcagatataggttttgctaattgatacctgtgtggccatgggcaaatatgctcatttactcatttgtgtttaacaaacacttatattgcacttactgtgtgccaggcagtaagtgcttaacacatgttaaatggatttaatccttacaacaaccctgtggctaggtactgtcatcatccccatgtttaaagaagaggggagtgggctgggcatggtggctcacgcctgtaatcccagcactttgggaggctggggtgggtggatcacctgaggtcaggagtttgagaccagcttggccaacacggtgaaaccccatctttactaaaaatataaaaattagctggtcgtggt

SEQ ID NO: 164229 - DNA, 370 bp, Homo sapiens
gacttaacatgctagccctctagtggtgctacggttgtttcagaaggaaacagcttgtgctgtctctgaacgccatccaactggatcacagcaccaaagaatgcactgctccatgctggagagctctggtcagagtagcacggtctctgagtcctcctgctggagtccctctggtccgatttgaattaaggccccatgattcttctttggttctttctaaaataactgatgagttaactgaaagtgagcatccatattttcttgtgtattgtgttatgtccttcccagtgcatgcagatacacacagcccctcatactgacatatacacacagtctcacgcatagacactcttggaatctcatgtgattt

SEQ ID NO: 164230 - DNA, 374 bp, Homo sapiens
aagtagtgaaagatgaagagacctgtttgccataagaagatggagggagaggcatttcagagccagggaacagcttgagagagaataacagagaatttgcaagagcagaatttaggctgtctcagttaattgcagtgtatggtatatagagaaattaaaggagagattctataaagagttaggaaagaagaaagaggctgaatcaggtaatggaaagacttgaaaggcttatttaaaagtttggacttcattgtatagctgatgacagattcttgaacctcttcttggagattcacatcaaaggtttcaaagtcatagaaataagacctcatgtgtgtttcaggtcggaattcttgcaagggtatgaaaaaaag

SEQ ID NO: 164231 - DNA, 247 bp, Homo sapiens
tgagggacaggcacctgtcccacacccagctaagttttgtatttttagtagagacggagtttcgccatgttggccagactggtctcgaactcctgacctcaggtgatccacccgctccagcctcccaaagtgctaggattacaggtgtgaggcactgcacccagccttacatctgtttttaagtaggttactgggttctggcagtgagggttggatatagctctatagtagctattatgtctcgtta

SEQ ID NO: 164232 - DNA, 288 bp, Homo sapiens
ttttatttaaagaatgaccaatctgagggcaatgacgggaaggaatcagtggagagcaagactggaagtagggagaacaactgagtggctgcttgcaagtgagaaatgatgaaggttgaaacgaggagcaaataagaatgaatggatacgagagaggttggggatacagaacagacagacctccacagttttgtcaggcatcttccctagtcatcttacagctggtccttagtctgaagattgtattgcccagaggtctagtcttctactgttgactctctccttttc

SEQ ID NO: 164233 - DNA, 241 bp, Homo sapiens
cgctggagcctcagggacaggacatggatcctgggctctgcccaggatgcctccagaggcccaaggatcttgcgtcatgacactctggagcatcttaaatgattctcaaggaaaaggcagcagaatgagtctcatgatctcagaatgagtctttatagtcttaggttctaaatataaccatgacgagaggttattagatttttaaatgcctgaattcaggctgggcatggtggctcatgaa

SEQ ID NO: 164234 - DNA, 374 bp, Homo sapiens
gtcatcgtcatagctgactctagaggatacaactccataaagtgagcccatcaattattaactattctagagcacagggagaccttagtaggacatagaaatatgggcattatacaatgttaagaaagaattaaataaaacagatgcatcacaaacctagtgcctaaagtgaagagaacacagttaaggatgaatagaatctggatttaaggaaaaagcagagaaagaaaatccacaaaggaaagctgagaaaaaaaaaacaaccataaagataggcaggtagaaaaaaaaaaaaaagttggtaatggaaatcaagtaacaagaggagcaattggccaagagagatttagacttattgactttaataaacaaga

SEQ ID NO: 164235 - DNA, 333 bp, Homo sapiens
gctgaggtaaggcaggaaggtcacttgaaccaagagttcaaagttacagagagctacgagagctatgatcatgctactgtactctggcctgggcaacagggttgagaccctgtctctttaaaaaaaaaaaaaagtttcataattaaaagtaaaaaatttaaagtaaaagtaaaattctggctgggcacagtggctcacacctgtaatcccagcactttgggaggctgaggctggcagatggatagcttgacctcaggagtcaagaccaggctaggcaacaaggtgagaccccctctccataaaaaacacacaaaaaattagctgggtgtggtg

SEQ ID NO: 164236 - DNA, 516 bp, Homo sapiens
aaaattatattttgaagttaaatctggtagtgttttttccaatatgaataggcctcaggaaagagataatacatttccttctttgttcagagggtgctcaacttgctggagtcatctctgctatggctttatttgccaacaacagagaacttgctctgcagcagccccaggctctctggggaccccacaggctatgcagatcccccaccccagaaccacagaaggagacagagcagaagcacaccccgtcttccaggcccaggacagctgctgagctccaggacacggactcttgaaggttgattttgactacttactaagctccagctgaaccagttccacttctttaaccttcccatgatccctgtgaggggtctgtggtattgctatttgcaagtaaagaaagtgagattgagggaggctgaaagacttggccccaagtcacaatgccctgctgttgatgttgaagcacccaggatatccaggaggcagcaccacattcagcagggcattgcg

SEQ ID NO: 164237 - DNA, 212 bp, Homo sapiens
gagcgtctgcgggggccgcttccaccctcagcggatgataatctcaagacaccttccgagcgtcagctcactccctttccaccctcagctccaccctcagcagatgataatatcaagacacctgccgagcgtctgcggggagcgtctgcgggggccgcttccaccctcagcggatgataatctcaagacactttccgagcgtcagctcactc

SEQ ID NO: 164238 - DNA, 249 bp, Homo sapiens
ttgaggcacgttggaggggggccagagggttacgcagctgcaggcgtgggccagatgggaaatccagatgctggcctagggagcaaggtcccttctgctgctcatgcaggctgtcaaagcagcagcctccttaggaccctcactgcaagctttaaaatgttactccttagggagaatttcagatgggagggaaggcttaatcaatacatgcaacgtttaactggcattagaatgatgttttgttttgtt

SEQ ID NO: 164239 - DNA, 309 bp, Homo sapiens
tcatcatggaataagagggtagactagaagacctctaaggcaccttcaaactcttactcataaagttggagaactgtacttttgaaagatctgcacaaacaagactacttggaatttctctggatattaaataaacccctaccagttctcagcactaggcagcaaggacaaaaagtcagagtcaaataaattcaatataacatgatagatatgtgccataatgggaatagataaaaagtgctataagagtccaaaagtagctgtagttgagctagtgataatgtggggtttgaaagcaaaggggaggaa

SEQ ID NO: 164240 - DNA, 349 bp, Homo sapiens
tcctttgcaggctgactctcctgtactccacatgaaatactggagtttctcaagcctccttctttgatctcctgcattctcactctgatactctttggcctagacaaccttatccccacacatggcttgaattatcaactatatccatatagcacacaatttatatatccaatatataggccccttctgagctctagatccatccatccaactacctatattctcttgggtgttctcaaaggcacgtcaaacacagtatgtctaagactaaactcacagtcctcatacctgaacttagtattcaatgtgatcttaaaggtcctgcttcttaatgctgttactccaaaca

SEQ ID NO: 164241 - DNA, 593 bp, Homo sapiens
cccgagtaaaacaccctctgttaaagatttatcacttccgctgtatttcagctgcctgtgggcatccctcaatggtgagctccgtgacagcaaggactgtgtctttgtcctccagatcacgattcatgctaaacactgctctgtccagaatttattgttttgtattttgacgtctctgtccagatgtctctctgggatcacagacggagagctctttgagcacatggactttgtcttgtttatctttatagccccagtgctgaacagactgtcacaccgaaggtgctcacgggcctgccggacgattgaagttgtacaacctgcagacagaggagctaagtgtccacacggccctccctgctctttccattctatgtagctatcttgctggcaccatttactcctttctttctttctttttttttcttttcttgagacagagtctctagctgtcgccaggctggagtgcaataatggcatgatctcggctcactgcaacctctgcctcccgggttcaagtgattctcctgcctcagcctcccgagtagctgggattacaggcatgcgctaccacgcccagctagtttttctat

SEQ ID NO: 164242 - DNA, 230 bp, Homo sapiens
attacattgtcattttccaggaagccaaatttctgtttgactagctatattattctgcaaattagtgtgtggcttgcattaagcaggaagcaaacaaaggatctttcacaatcagaattctaaggaattaaccagaaaacccttcccatctgttcaggatgtatttgagtaatctccaagtgagggaaacaaatcaaaagtgtgctgtacctgtgggaggtagaagaaag

SEQ ID NO: 164243 - DNA, 439 bp, Homo sapiens
acagatcatatttacttattggtttgtgtatttctaacgagtagctgtggggaatgccactgcagaaccctttctaattgccttttatttatttattttggccatagcgtgggtggcttttgaaattgcacgtaatttacggaggcgaggatcctgtgcctgggataccagatgatgtggctgaatggctgttggctgtttattggctagtctgtcgttaccaacacagtattcttgagttcagaggcacaacagtgttggatccccctcctctctcctatctaaatatatccaactagtcaatcagacttggcagccgtcagggctgtggctgtcagattgagttggccttggctcctctgaactatgggctggttttccaagctcgaaagtgtattcaaatagtgatatctaaattagacttgcaaacacacaccca

SEQ ID NO: 164244 - DNA, 388 bp, Homo sapiens
gttctgggattgctggactctcttggtgaagacataaaccagatactaccctattagcacattatgtttctatcctagaaggatagaataattacctcctgtggcctaatgagttctatgaatttgactgattaatggaacctaagaccactgacaggggcattgcaagacttatgcaaataatcaccaagtattgtggtacaagttaatcaaggtttacgtacaaggtgttataagaatttctgctccagttgttctggtttgggattggtgcttgtgaaaatgtgtagtatgcaatctaagcaacttcctcctccttacacctgaactgattttcctataatttcacatcatcataattaaaagaaaattttataattagaactca

SEQ ID NO: 164245 - DNA, 399 bp, Homo sapiens
gctgtcgttattctaatgtgagctcatccactgctgctgcagagtggtgatcaggagtcacagacaagatcggggatggtgtgtgtgtgcgtgtgtgcatacctctgtgcccagcacactaggtgtgtgtttagaatacggttgattatgctgtaatgtctagagcatttgcattagaatcgtcttgagtgtttgttaaaatggagacctctgggtctctagaagctactgactcagaatctctggggaatggtgacctgccttttataataaacatgctctcacgtgggattctgctgtccagtttgagaaccactcttctaaagaacttgaacatgtgttgggagactgtgcagggtgatagcatcaaactagaaacaacacaaacatccacagggg

SEQ ID NO: 164246 - DNA, 325 bp, Homo sapiens
tggatcatagagggcctgagtaaagtcattaaaaaatatcaaagaagcaagattatctattaataatataggttgggcattctctacctgaaatgcctggggattagaggtgttttggattttaatttttttttgttttcttttaggcagagtcttgctctgtgcaggctggagtgcagtggtatgatctcagctcactgcaacctctggctcctgggttcaagcgattctcctgcctcagcctcctggatacctgggactacaggcgtgcaccattacgcccagctaatttttgtattttcagtagagatggagtctcaccatg

SEQ ID NO: 164247 - DNA, 605 bp, Homo sapiens
gagtgcttcacttccaaatatgtggtcaattttggaataagtgtggtgtggtgctgagaagaatatatattctgttggtttggggtggagagttctgtagatgtctattaggtcctcttggtgaagagctgagttcaatccctggatatccttgttaactttctgtctcgttaatctgtctaatgttgacagtggggtgttaaaatctcccattattatcatgtgggagtctaagtctctttgtaggtctctaaggacttgctttatgaatctgggtgctcctgtattgggtgtagatatatttaggatagttagcacttcttgttgaattgatccctttaccattatgtaatggccttctttgtctcttttgatctttgctggtttaaagtctgttttatcagagactaggattgcaacccctgcctttttttgttttccatttgcttggtagatcttcctccatccctttattttgagcctatgtgtgtctctgcacatgagatgggtttcctgaatacaggacagtgatgggtcttgactctttatccaatttgccagtctgtgtcttttaatcagagaattcagcccattgacacttaagg

SEQ ID NO: 164248 - DNA, 549 bp, Homo sapiens
ctcccattttgccttccaatgatcctgcttatttccttcattgtgttcatcaccagctgtaattttacatttgctcttacttatttgcttattaaaaagtatttattgcactcttgctacatttcagtcactttcagatgcaatgataacaggaaagatgggatgcatgctctcaggatgttacatcctggtacagttgagacaagaaacaggaaacaccacagacactatgatgaacaattgcagacggtgccgggtgacagatgaggcagtaaatccaggcgaggggtgagggcagcttggccaaggtccataccactacttagtgcctggaaagcatgctccataaggacggggactctgtacctgggctgctagggcacccgagggccacaggcaggcaatgcacattcactgaagatgtcagtgggtattcctttctcatccgcccagcaccagaccctgagcccctcaagggaagagattacttataatttatctctgtatgtcctatacctgacccatagcaatatgagtgtgtcccccaaa

SEQ ID NO: 164249 - DNA, 293 bp, Homo sapiens
taagatagatggaaggatattctgagctacagaattattcactgatataaatcaaaaaggaatctagttaaaaataaaccgacctttaactgtgtataaggtaatttctgagcaaactcctaatgttattggaaagaaaataaaaaggtgactgtaaaaataatctaaattattaacacttattctaacccctatttctaacattgttctggggatatgtgcatgtgtatgtgtatacatgtacctggtgagagggtgaggagtgaagaatgagggagtagtactaataagct

SEQ ID NO: 164250 - DNA, 196 bp, Homo sapiens
atatttctacgtccatgttatttaatttatttctggacacacagtttgattcaactgccagacatattagaattattttgtcttctgaaatgacagttgatgacattctgattcacaactcctacagatatatctctgtcctggtggaaggagtccagtgtttgaagttaggagaccttatctccaacacttattt

SEQ ID NO: 164251 - DNA, 549 bp, Homo sapiens
aattaactcctaatcctcatctgaagactcaatatcctgttccaagatcacttgagacatgtgtcagctccttttggtcccaaatgcttgttctttttcatcaggcatctcaatatcccaaggagaaatcaaacaggcaaatgagaaaaatctgtggcagatctaaagtcagttaagatttactaatttcttgctcagcatttccttttgggacgctgttgcgcattagaatgagatatactgaaagtagcataaagacgcctggttccttttaacagaacaaagtgctaccagaggaagaaacaagtctggttatcccagctttcagtcttcatactctgttttagtaaatacactaacataaaaactacctatgtatcaataaaaatatatcagaataactatactattataaagtatccataacatttttctaattacctatagtttctagaggaagactgacatttatcaattcccattttaagtcattaaatctgaagttggaaagtcaaaaagatcacactccttctcacttgattgtgtata

SEQ ID NO: 164252 - DNA, 397 bp, Homo sapiens
gagtcggggcggggagggccgggcaggcttatgttcctgtgtaaacggagcgcacgtacctggagcgcggcgggcgcccgattagcgccctgaatggaggtgatgtaacggtgatgcaggctccagcccaccctcgccgaaagcaaggagccctgcctggggacaggcccgcgcgagagcgagcaacccagcgcgcctggctcagcctcggtcccagggagaggcaggccctgcgtcccggcccgggccccgccatcccagccaggaccgggcctggcccagcgccccgcgccgcgtccctcccacccccgcccgccccccgcctggggctggagttggccccaaacgctgcgctggagcggggccggcggcgagtcccaggtaagggctgctgcct

SEQ ID NO: 164253 - DNA, 477 bp, Homo sapiens
tatcttttctatcgaccgggtagtccctgttgcctagctttttggtaatttgacaaactcattctcaccttctcaaggccatgctttccttaatgtcccctaagcagaaatgattattctctttgtatgcttccatctaagtctgagtattcttcaagtaaatgcatgtaaaatagcatattactgaccctaagacctggaggcaagtaggatgaatatcaagaccttaaaggctcttgggttctcagctctgtaccccaggagactcttgggacccagcagagccaactgtcattcatactgaattaggggatttcttaaatggtttgctagttttcttgcataggctgttgtaatggcaaactgcatgtgtaccacctgtctgccaggccccctcatgggcatagcattgcactggtcattaggaagccccatctctgcctgccatgtttagagacaatgagaaacacctgttat

SEQ ID NO: 164254 - DNA, 268 bp, Homo sapiens
gggtctacgtgcagacgtggagttgcggggtcatgtggtcatccgtctacactgaacatttcgaggaacccccagacagtctccacgtggccacatcattctgatgcatggcagacgagcccgaaagaggagcttagtcccagagggttcttggctttgcccaggaaagaattcaaggtcgagccagaggtggaaggaaacagctttacttcagaggtggggttacagctgtggctgctcccgcagggcagggcttccacagacagca

SEQ ID NO: 164255 - DNA, 486 bp, Homo sapiens
gaaggtaccattgtcttgttccctttgagcaccatgtccaattttaatgagtcaaagaatacaacctgaattccattaaagtcaataactctgtatcaagtgcatgcagtactgaggaatacagaaaaaagaaagaatagttttcttcccctcagatagttcatagctgatcttgtaagggagtcaaacatacaacaaaataggttacagtcataacttcagagtagaaatgtggacaaggcacaaaaggcagtagtggtgagtagtttgagtgtgcaatgggagcttcccaaaagaagtgacatcttcaattgggttttgaggggagaaaaataagggttcaccagggtgacatttcaagaggaagaaaccagtttataaagtagtttgctttttctaacactatcacattgagttgaagtctaaactgttaggaggtagcattcatacctgtagacatgatgacccgtttatgtaaattcaatc

SEQ ID NO: 164256 - DNA, 450 bp, Homo sapiens
atgatccacccgcctcggcctcccaaagtgttgggattacagacatgagccaccacgcccagccacattttccatttctataaaatgagtgtaacagtttcttgcagttggttgtggagtttaagtgaggtaatttttacaaaaaagagtgctctccaaatgtttataaattaaaagaaaaatatcttctagctcagggcttcccaagcttctctcaagaaagtaccacctcctagttttttgtcaattccatgtgtatccttagtattactttttattgattgattttcctcaaacatattaacttgtttacttagatggtcactgtagctttatcctaagcaatacctaaatacaataaaattgcagatttttgtcctactgatattttactgcacattaaaatatgtaattatattagtttcaacaccagagggaaaaaaaagaaaa

SEQ ID NO: 164257 - DNA, 380 bp, Homo sapiens
acacgatgaagcctcagggctcggatgctcaggacagaggggtgagccagctcacagccccagggcagctggggctgccacgactatgaccctgacgttcatggacagaggtggggtggggtcacctcactggtgtccagaagctgtaacacagctcagaaatacgacagaaagcctccaaagagccttcacaggacatcgctgggagaggagagaaccacatctccaataaacgtgcatcagactggcaagctccagagttccaggctggaaacgacccaggactggctctgccacttaccagctgggaacccgggtggcaggcttaacgtctccaggctgcagctgctgtgtctgtagtgtagtggacagtgatacca

SEQ ID NO: 164258 - DNA, 497 bp, Homo sapiens
ggctggtggagctgtgacagtagaacccgcctcacggtgttggtgagaggcccctttgggggctggcatagtcaaatgcattgctgggcacctgccccacagtgtgtgctcgcccaggaagaacccaaacgcctagagtcctgggcactcggatgttgccctacattgagaaatgggcccttctgccacagagcatcctggctgcagcatcccagaggcctttgggagccttgacgaatcagagaagtgcagtccctgcccaaggctgcacaagcttctaagtgctggggagccaggattggagcccgggtctgcctcaccccaaggcgcctgctaacctggtgtctcttccatgaatcctgtgaccttcaaggtctgcagctgacatcctagcacctcagggccaagagactacttcttttcttcgctgcttcaggcattcttgggaggtacagagaggtatcagggaggaggacagtctaggtgtgacttctcag

SEQ ID NO: 164259 - DNA, 238 bp, Homo sapiens
agcattgcccagtttccctgttaggttagaaagcccagttccagagagacagtgtgaatcacagaccctaaacttggacccacactcccacagcatcagggcacacatgctgactcccataagagccgtgaaaatgctaggagctaactgggtcaaccgcgggagggggcagctccacccatacatttggccttatccagagccagtgacatgaggcccaacagttttctttgcatta

SEQ ID NO: 164260 - DNA, 529 bp, Homo sapiens
ctttgtggaactcttttcagaagaaaaaaagagagaaagtgggggccatacttggcactagtaacgatgcatatgcacttctgaaaagaggtgtcaatggaatgtggctcagctagatgtttactggatgggctctctcctccttccttccttagcccttctggtgggatcttgacatgttacagaggaaatgctaattgaagccccagccacaaccacttctgtgctctgcttctgcctgaaggaatgaataaatagaaaaacgggaacgttactttccagtaattttttaaatggatctcagtggcgaaaagtacgttaagttagcaaacgtgcctcacatactgtggatgcctgtaagactcttacattcgtctgcctagatgtatttcagaagccaataaaagataatctgtgtttgttgaatgaatgaagaaacccagtctaccgtgggtttaccatgtgccaaatgcagagctacaaaaggaaaaatgacaaagaagacctacgagatctcacgtccagtggc

SEQ ID NO: 164261 - DNA, 281 bp, Homo sapiens
agccaggcatggtggttcatgcctataatcccagcactttgggaggccaaggcaggaaggctgtttgagcccaggagtccaataccaacctgggcaacatggcaaaaccccatctctacaaaaagatataaaaactagctgggtgtggtggcatgtacctgtattcccagctacttagggggctgaggtgggaggactgcttgggcccaggaggaagaggctgcagtgagccactgcagtccagcttgggtgacatagcaggaccctcccctctcccatcc

SEQ ID NO: 164262 - DNA, 262 bp, Homo sapiens
aaactcacactgatagaaaagggaagatactgtattaatagcacatcaggtcaaaaaattagaacataagaatgataaaaaccatggcaattaattcaacgccctatatatagtctatcctgtaaatataatttgatttgcacagagctgctcagctggctattagtacagcgatcagctcaggtcttctaggccagtccttgctttgcagcacgatgccttgtaagaacaattcagtggctacaaaaccttggaaatagta

SEQ ID NO: 164263 - DNA, 421 bp, Homo sapiens
gcaagaacgagatgaagccgttaaacaactggaagaatttcagaaaatttctcacatggtcatagaggaagttaatttcatgcagaaccatcttgaaatagagaagacttgtcgagaaagtgctgaagctttggcaacaaagctaaataaagaaaataaaacgttgaaaagaatcagcatgttgtacatggccaagctgggaccagatgtaataactgaagagataaacattgatgatgaagattcgactacagacacagacggtgccgccgagacttgtgtctcagtacagtgtcagaagcaaattaaagaacttcgagatcaaattgtatctgttcaggaggaaaagaagattttagccattgagctggaaaatctcaagagcaaactcgtagaagtaattgaagaagtatgtatctca

SEQ ID NO: 164264 - DNA, 274 bp, Homo sapiens
gggtgtggtaatgaacatcaggtgtatttggctcaagacttctaaacttggggaagtggaattttgcttttatccacttactggaatgtgtttttacatttctggtatttttaaaaaaaataacttaagaactacgttatttttttattccttatttggaagctatactggtcagcataagaaaatacttaacttaagatcttcaaaggcatactgtagaggtttggaaagcatttggtttggcttgaagcgagtttggcgagtgaagtgacag

SEQ ID NO: 164265 - DNA, 139 bp, Homo sapiens
aggtaattctgtcaacaacattttgagataaattctgtaataaccactcttttacagatgaggaaactgaggccaggagagattcagtatcttaataaaaggcagctagaaacagcaaagtcaggattcaaacctatgc

SEQ ID NO: 164266 - DNA, 339 bp, Homo sapiens
gggttaacagcctgtaaacacttaagttcacaaacgctaaggaccatttcctcaattctcaatccaaagaagtaaccacagagccatagtctttccttcccttctaccataccttgggcttcatttactattcctcctagcttataatggaatggagagtagtataaaagcataagaaggaacttattccatgaagccaaccatacctcctaggtttctcaaaagatcctgatttcaaatatttgatcataatgtcattatcataaatcactgacaatattaactactgagtaaatagtttaaaaatttccagtgctcatggaacactttccaatgaaa

SEQ ID NO: 164267 - DNA, 518 bp, Homo sapiens
tgcccccagcatctatacaaagataacagcctctgggggctagcacctcaatggcaggtgggctgggggcacaggtgacccctatttcctacctggggaacccctgacaagtcccttcagacctgcttctaaaggttgcttgccagcccctcctcacaccccacctcctgcatacccaccctcacaattgctaagctgaggcccatggagattccaggataaaacagagaaaacagctgggcatggtggctcatgcctgggaggccaaggcaagcgaatcccttgagcccaggagttcaggaccagcctgggcaacacgatgaaaccctgtcatggtggctcacgcctgtaatctcagcaatttgggaggctgaggcgggcagatcacctgaggtcgggagttcgagaccagcctgaccgacatggagaaaccccatctctactaaaaatacaaaattagccaggcatggtagcacatgcctgtaatgtccagcctgggcaacaagagcgaaactcca

SEQ ID NO: 164268 - DNA, 532 bp, Homo sapiens
cattgtgtgatataggctgtatgtgtgtgtgcatgtgtgtgttgggggaggctgaaatgacttctttccctaaatgtctctcccatgccaaaagtttttccattgattatttatttttatctctttataagacaattttttaaaatatcagaaacagcaggagcaatcatatgggtctaatcagtcattgacgctttcgagtctataaatctttccttgtagcaggttctgaggaaggtagggggagattgaaggaaaacaaccccttcatattttagtccaaagctgttgttcataggttattcatctggtggcccaggtgctgacacagtgacgtgctttcatgccagttccacagccaaattgcaaccatgtggaagctggaagcgtcttgtcatctcagaattgggcacatccagtggggtaaaatctgaagccagaggggcagaactaagctcacagcatctgtttactgagtttgggattagaagaattttgatttaaatgtgcactatcagtagttgcttgatga

SEQ ID NO: 164269 - DNA, 385 bp, Homo sapiens
atgtttatgacagtacctgatatgtactaataactaaatatttcctgttatcattttcattacacgtacatcattagtgcagctttataaaggaaatgaagtgtgacccaagaaaactgtgttttcttcttactattaaggctgtacatagatatgctgaaacatgaaaattactatggattctactttaaagaaaaaagagtggggatactgctgattgttgaaaccaaggaaagggtgattcaaagtaatagaatcagtagctataaaaattgtgatcatgtgattgagtataaatgataaaaataagaaaccaaaactagaaggtggggaaagatgacaggatgcatggtaattattttttcgatgtaggtaggaaaacact

SEQ ID NO: 164270 - DNA, 448 bp, Homo sapiens
ttcacagggtggggcaagatactcctcatcacctgctagggtctcctgctgctgcttctggccataggattttcactcaggaatgggaggggtttaggctatcactggtggttctccaagctccctcatcagcactgttttccgccgacatgctttcagatttgtactcaatttctcccagtgtggtccctgcctcatctgaatttaaaattctagctccctgcatgtggtctccttgtgttcttctttccagacttggcatctcagcagagccatttctgtttttgggtactcctccttttgaggatgaacccaccatggtggacatttctcctttctgccttcgcaggactgactgttctttccccagcagctgatattgagtagatttccaatacaagttgaaatgttcttaaggtttaagaagtaataagatggtgcagagtca

SEQ ID NO: 164271 - DNA, 338 bp, Homo sapiens
gcaggatgacggcatgaaaacgttttgcaaataataaaaattcagggtggcctactgggtaacaacgtgttaattttccacagagtaatgcagtttcctcttggcacaacaagactgaaatatttgggagggtcgcacatttcttggatgcagaaatgatagttctatccatgagatggcgcagttgaaatgtcattatcacttctaaaccaaaatgctcacaccgttcttcttcatttaaatttttatctcgatgaaaattttgcattttatactgtcatagaccacattagaaatgtgtatttcactgttttcatacttgattttatgaacaattt

SEQ ID NO: 164272 - DNA, 350 bp, Homo sapiens
agctttccagctgcgtggccttgggccgtcttactctctgggcctcagtttcctcattggtagcatggagcactgaaagctacgaacaggagctgtgagggtgaatggaggattcatgccagagcctggtgggatgcccctgcagagcagatgctcaggaaaccctcctgccagctcctggggagcacgggaggcgctggctccttagttctctatggaaggacggttctgcaccagatattattattagagtctcttatttggaattctggacttgtgtgctcgacaggggcctcaagtccccagtgtcgctcaatagtgacaaacccaaataaaagatcctggcaaat

SEQ ID NO: 164273 - DNA, 268 bp, Homo sapiens
gccaagacgagatgagtgttgggcctttgtttttattttttaatgggtaatttcaaatatatatgaaagtagagaggatggttcagtcattcctcagtatctgtgagggattggtctgaggaccccctgtgaataccaaagcctgccgacacttaagtccctgctataaaatggcacagtatttgcatataacccatgcacatcctcccacatactttaaatcatctctagattacttgtagtacctaatacaatgtaaatgctatgt

SEQ ID NO: 164274 - DNA, 380 bp, Homo sapiens
aggtgtgtctgttatctaatccttagggagagactgttcttctccccgttttacagatggagaaactgagacgcaggaagattaagcacttcccgaggtcacaacagtgaatgttggagctgggatgtgaacctgagcagtctggctgaagagtctgctgtattcaccacacagacgctctacttttctgacatccctcttagagccacaaagatgccattccttgccctcaggaatgctcaaggttccccccatttcctccagaattccttccttcttctcttcctcttctgtccagaggctctaaggactctcactcactcatcctctttcccaggggtacccctggccctgccccagtctccagacccacactcaca

SEQ ID NO: 164275 - DNA, 960 bp, Homo sapiens
gggggctgagggccaaggctgcaatctcgggggaaggggaagttggcttttcctggtggattggaaacatcctcttggaggcaaagacttttcctggatcttacagacttcccgggatttttagattagaatattgggggcaaaggaggctgtcttgttttaaggcaatgctacatagacacagtggggaagacctggttcgacggcagataagcagtgggtgatgggcttgaggaggagagtcagggcaaagtctaagactgagcagaaagaaataccaccatctcccatggataagtacgttctagaacattctctttgggtctaatactctgaaatgacatcttgtcttcatgctcgagagagaattacttcactggctccacttggagtgccagtgttcagacaccaagcctgactgggagggttccgttttcttaacaccttcccaccgccgacttccaagtccccacgcgtttcacatgagggcggaggagagtctcgttgcagggtttcagcattccaggcactacggtaggatttttgtggtaaatacaacttttcatcctgagtgctggactaacgtcctcctgaaacgagaagctcggtcccttcaggattatcatagaaaacttccgacttaacctccccaggtcaggaggtgccacttcgaggtggggcaagagctggagcagccccttccagctctagtcaccatctctgcaggctgctaggcctggggcgtccgtgggtggcaggtgccaaggcttccaggcgaatgggagctctggcctggtctttttagtctgtgccctttttccttctttctttaatgaagggatgtttgcagtcactgccatctctaagcaccaagggggctcaccaccccgcaggacagggagagcgggttttattttgcaaaccgactaacgagcacctgggagacattcgccagcctgc

SEQ ID NO: 164276 - DNA, 230 bp, Homo sapiens
ctggcatctatggtgtttatgaagtatctcctgtcattgtattgtttcctttctctggtagcttttcacattttcttttgattcttgatgttctatcttacaaaagatgtgtcaaggtatgaatttactactttttgttttgttttgttttttgagatggagtctcactctgtggcccaggctggagtgcagtgctgcaatttcagctcactgcaacctccgcctcctag

SEQ ID NO: 164277 - DNA, 259 bp, Homo sapiens
tgatctatctgaatcaccactgttcagttggcaaagtgaaaattactgaccgtgttttatgtatcttcaaaaattcagacaaatttctgtgataattgtagtaggaattcaaaagtggtaataagtatagctgaataagaatctttttcattgaataaaatttcaaattttttgatttttgattattttttaagagacagtgtatcacccatgctggggtgcagtggcccaattatagctcactgcagcctcaagctcc

SEQ ID NO: 164278 - DNA, 384 bp, Homo sapiens
gtcttgcatggcagcaggcaagggagaatgagagccaagtgaaaggggaaacctcgtataaaaacatcagatctcacggacttaactcattacaaggagaacagtatggggaaaccaaccccacgtttcaattatctcccactgggtcctttctgtgacacatgggaattatgggagttacaattcaggatgagatttaggtggcgacacaggcaaaccaaaacttttggggtctttgctatagaattggaagcttatggaacctgggtataaatgagcatttcatagattaccaggactgactagctccaaatcctctctctcctggtttagtcagttccccatggagctcctaaatccaaggtactggcagagtacactaca

SEQ ID NO: 164279 - DNA, 344 bp, Homo sapiens
caggcaaaagcttggtgtttccatcatgacccacttctgagtctcctaagctcagctgcctgccgcatgcatgggtactcagctccaagcagctcctctgcttccttctcatcttcctgggtgtgagcatggaaaccacgttggacttggaatggtcagattggactctggtctgcctttcagtttacaaactgggtcaccttggacaaatcctttaaccccttgatcttttgtttcctagtcagtgagactgagatggtgttgttatgaggattagctgagatgacacattgctagcatatagcactgtgcctggcacatggctagtactagttaagttatga

SEQ ID NO: 164280 - DNA, 284 bp, Homo sapiens
ataaatgaaatggaattatggtcacctgaacttaattacttttaacaaagacaaatttattggttttcacatctaaagggaattcaccaagatgctgccaaagaaagagcatatttattcccacttcctgcatagtcttaaaacacttgaaatgttgtttttccaagagtaattttcaaatacagtcatttctctgtattcatgggggattggctccaggaccctccagaataccaagatcctcagatgctcaagttccttatataatacagcatagtatttat

SEQ ID NO: 164281 - DNA, 262 bp, Homo sapiens
tggctctgctcctctttctggagaggagattttatggcctcagagagtgtcacccatgcaaaagaggacacacctgagagcctgaatgaaaagctggtgccacctcctgggcgcccctgctgccttctccaaggaggctgtgacccaggaaaatgtgtgcggatggaatgaaggagaatttgttcccaaatccaccctctgttgtttcacacctgtcttaagccccgacacatattgagaccttctcttactcatgtgggtg

SEQ ID NO: 164282 - DNA, 327 bp, Homo sapiens
gccagctagcttaatgttaggtttaattaataaagggtattgaaagaccactgcaaagcaacagagggcttcccttcctggtttcaacatgattttattccacctgatacccagtgggtctgtgtgttggaagcctgatagtgctcacctcagggaccatcaaggttgactccagcccacactcactctctgccaaatttcttaaccttccagtaattcacgactataaaccagctccaggtcagtactctggcaaatggtattgccatgataggttgcatgttcctgtggcagccaaaccctcaccaaaaggtctgaatctcaggc

SEQ ID NO: 164283 - DNA, 154 bp, Homo sapiens
tttaaacagagagggccttgaatcaggaatgaacatagatttggagatcagtaagagtttaggtcagggatacagaattagaggtcataatcttagaggagatgaatgaaactacgggacttgtaccaagaagatagcatacccaaacatggat

SEQ ID NO: 164284 - DNA, 244 bp, Homo sapiens
aaaagggaaggcctgttgcatggagcagcttgagtagaagtggaaaggtgccagcggttgtggattattatctgatggcctagttctatctgatcagccagtccgtgggacacaggatcaccttgaccagggaggatgatatatttggggagagaaggacatagcacagcacagttgagcatccctaatctgaaaattcaaaatccaaatgcccctaaatccaaaattttttgagtgccaatag

SEQ ID NO: 164285 - DNA, 343 bp, Homo sapiens
gtgtggtgatctagaggatcccattaggcgcgtctgcgtgcctggcctaaatttaaaaatttttttgtacaggtggggtctcactatgttgcccaggctcgtcttgaactcctggcctcaagagattctcccttcttggcctcctgaagtgctgggattacagatgtgagccaccatgcctggcctaattgttttctttcatagcacttaccaccagacagtagagaatatgcttatatttttagttgttttcccgactaagtttcacaagagtaggggctcttgttttatcaactgttgtatttctaatgcctacagtagtaccttgtacgcagaaggtatt

SEQ ID NO: 164286 - DNA, 525 bp, Homo sapiens
ttaataatagctttgttttggtttgagtacacaaaagaaaaattcagtcactgacatggaattaggacactaaagcagtaagtcattcaattgtcttctgcatcaaatgctagctttattcttctgttagttgctctccctccccttttaaagctctctgtagttcccatttcagcagaagcttttttccctcctctggcaggcagacctgtccttgaccctgacctcccaccttgcagagggccagtccgtgaggatgtgtatggcccttcctggcactggagagtaaatttctgtccctaaagagccaaggaggagaagctttggctttttaagttgctgatgataatgtcccaggcagagggcagggaagttaaaaacaggtagtttgggaattaaggggttaaagcattagtgctcacagctccactgtttacgcatcactacattttacagaaaataggttgctttaatcctagggaaactggtcattgtatattttgtggtttgaaagttgttggagac

SEQ ID NO: 164287 - DNA, 400 bp, Homo sapiens
aggcgtcgtgcctgtcttgctagtggggaaactgaggctcagagaggcagaagacttgcccaagatcacaccaccgggacccaggattcaagcgcaggcctgcccaggctctctgtggcctcctggctgcgaggaggcagccagggaccaggtgccacccttctgaggtgaggcaaggaatgcctgtcccttgggcacgtctaacttggtgaaggtcccacgggtgggttgtggcatggttccagcttgccgggtccgatgtgggcagcagctctctgccttgccccaagttcctggtgggcggccccagcagagcccgccgcagcttcactcccctgcgtgccacctgccagtcgggggtccactgcatcctaggtcctgggcaagtcccctcccctct

SEQ ID NO: 164288 - DNA, 472 bp, Homo sapiens
tgtttcaatccactcggagccatccaaggctacatacccagtgggtactccctcttccatggctgaaacctctatttccacatcaatgcctgctaattttgagaccacaggatttgaggctgagccattttctcatttgacttctggatttaggaagacaaacatgtccctggacaccagctcagtcacaccaacaaatacaccttcttctcctgggtccactcaccttttacagagttccaagactgatttcacctcttctgcaaaaacatcatccccagactggcctccagcctcacagtatactgaaattccagtggacataatcaccccctttaatgcttctccatctattacggagtccactgggataacctccttcccagaatccaggtttactatgtctgtaacagaaagtactcatcatctgagtacagatttgctgccttcagctgagactatttccactggc

SEQ ID NO: 164289 - DNA, 531 bp, Homo sapiens
cctcccgcgagggaatgtctagaccagccgcaccttcttgctttgacccttcagaactttggcctgtccagttaaagaggcacagagccctcctacccacagggaatgtttctaacttaccaagcacctattatgtgcttagaacttggactttcctgatctcatttaagcctcaccattctagtgaggaagcatcacagaacccattttcctgatgaggaaactgagactgggaggggttaagatcctgtacacagttgtaactggcatgtctgaatccagtttcaaaccaaggtgcctttcagtgaacacccaagcatcttcctctcggattaactgctaggccaataccaaaatctctttctcgggctactcttttgctgctgagttaaaaagagatcctgagacttagcctgggaccccgactcgcggcgattctgtggcaggcgcagaccttttctcctgtcctccactgcctctttgcctcggagggcgccccggggcgcgagcggggcacgggcgaccctggct

SEQ ID NO: 164290 - DNA, 349 bp, Homo sapiens
ttttactgtacaaaaagcggatctatttacatattgaaataaacagcactggcttgtaaatcatgtccacaggcaatattgttaggactggaaccataaatactatcctcagggtaaaacaatagtacaagattaataggtattggtcattttaattgtaaaaccaacgtatccttcacattagattccttttcctagtgtaataagataaggtttccatattgcttaataccaaatgcccacataaagcagccagcaaaccaatgctatagaaaacattctttttcacgtctcccccaagaatatattttattcaaataaaaacaatccaagaggcttttatacagca

SEQ ID NO: 164291 - DNA, 945 bp, Homo sapiens
atttttataggcttactctgggtctacattgtatggagatatgttgcatagtttattgcatagttgcacaagttggaagtgatggttgcttggagctagttactagctactagcaagctagtagcagtaaaagtggggaaaagtgtggattttagatatattttaaagtcagagccaagagtagtgccaatacgttggatgtagggtgtcaaagaaagaactgaaccaaggatcactcaaaatgtgtgactcgtgcagctagaactgccatttattgagctggagggatattgttggagtgtcatttttggttactgaggaaagaagaggcgagagaactgaagtttcattttggacattttagtttgacatgcctattagacatccaagcggagaggccaagtagtcaggggaataagtaagctggaattcatgcgcaagggctggcttaaaagtgtacatttatgtatttaaggctagaaggctgaaagaaaacacctggagcagaagtatagctaaagaaaagaagaggcgtttgaacagagtgctaacactccaatatctagaggtcggaaagatgaagtggaagcagaaaggagacagaggagaagtgagggagagaacataagagaaaatagtgccccaaaaggctagtgaagaaagaacttaagaaggaggaagagtttatttgtcagataaagagtttgttgtcaaatactgccaataaattagttaagctgaagactgtaattgatcactgagtcaggtgaaagtcattggtgactttcaatcagtggtgtcctggtaaactggctctctgaaaagcagtgacaacagcaaaatcctgatttgtagtgtttactaaatttccctgtggaaatattcccatcatagtcaatttccagctacaaacagtttaacaaccagcttgcaaagttcttgaat

SEQ ID NO: 164292 - DNA, 548 bp, Homo sapiens
tgcctcagcctcccgagtagctaggattacaggcgccaccaccacgtccagctaattttgtatttttagtagagatgggtttctccatgttggtcaggctggtctcgaactcccaacctcaggtgatccgcccgcctcgacctcccaaagtgctgagattacaggcataagccaccgtgcctggcctgtgtctacattcttaggaagttcccaggtgaaaccaaatgccactggatccacactttgtgtggtaaagtgctagactgtgctccctggaaacacgagcctggaagcacataggcctccaactccccacatcagcctggcttaagcaccgtaggctggagttcctgagtacagccaatccattcctctgtcagacagataagccctccttccaccccatggcagcagagctaagcaagggtctctctaaagacaacctgtctaagcaggaagactgtactctcactgcgttgctaccagcatgcacccttccttctgctttcagcatagcaacagccaggacattggcaaagaaccattgg

SEQ ID NO: 164293 - DNA, 320 bp, Homo sapiens
aaaataaataacaagaaaatatgagtcatggttgtttaaagtttgttatacataggcctcatataaagttagcattataaggtaagttcaaggataaggaccatggacttgcttacatcatttggaaactaattttgaatagagattgaatacatattaaagaaatgtagagatgtaggctctttccagaagggaaagggggaatcctaatagaatagagccacatatccagtaaacacctaaattaggggagtgaaagtagacagtactagaaacacaagacatagtaaatgttttttatttagaatgtgttctttgtt

SEQ ID NO: 164294 - DNA, 524 bp, Homo sapiens
gtggatgatgcaggaacacggtttttcccttttatccctctctccttcgaggaagagaaaaatgtggtgtccactaaaaaaatatgatatcctggtttctacagtagttcatgcttatatttacataccttatatgcaaaatgtgtgcccactgtgtatgaatggtactgtctgggctctgtcgttaaagtgagtcgagatttctttattgtaacccttaagttatccttactgcttcttttccatcctccctcacccagagaataactcaagagcgagcacacactgaggaggtaagtggaaggttgttagggcgaggtaataggagagaaacgcatgttaagcttgagtcttctcccttcttgctcaggttctatattctgaccagggtctgttagtctgccctggttttggcattgcctagttcactttttctgctactttcagataggctcttttttttttttttttttttcgctaatcccctgatagttgtttgggagaagggctcattagttggggtc

SEQ ID NO: 164295 - DNA, 364 bp, Homo sapiens
atccatcagttactttgcactctgaataggtctttttatctgcgcaattttataacagcatgtattggtcatttggaaattaatagttcattaacacagttcttccaaatgttggcgtatttcattatacaatatgaaaaaaataatattatcaccatggacctcatcaagagagtatgtacagaaaagctgtcacactcacagcagcagacacaagttttccaaatatattttatttatttatttttttaagagactgagtcttgctctgtcacccaggctgtagtgcagtagtgtaatcacagctcacttcaggctcaaactcccaggctcaaacaatcctcccgcttcagcctcttgggta

SEQ ID NO: 164296 - DNA, 609 bp, Homo sapiens
  misc_feature (108)..(108): n is a, c, g, or t
  misc_feature (112)..(112): n is a, c, g, or t
  misc_feature (162)..(162): n is a, c, g, or t
  misc_feature (167)..(167): n is a, c, g, or t
  misc_feature (180)..(180): n is a, c, g, or t
  misc_feature (185)..(185): n is a, c, g, or t
  misc_feature (194)..(194): n is a, c, g, or t
  misc_feature (206)..(206): n is a, c, g, or t
  misc_feature (208)..(208): n is a, c, g, or t
  misc_feature (215)..(215): n is a, c, g, or t
  misc_feature (219)..(219): n is a, c, g, or t
  misc_feature (233)..(233): n is a, c, g, or t
cggaccttatgtgaggagtatttaatatagggacaatcagtcttatgtcttattaactcaacagaataatcaatgcagcaatgcaaatagatggcctagaaccataangtanggttcagttatcattcgaatgcactgttaggaaggcagggaatcattaantcctnaatatagggaaanacttngattcttanaagtagtaagtntnggttatntggntgattcactgtatngagcacacacacacacacacacacacacacatttttagagggcttgtggtttctgaagatgatgaaagaaaaaaaaactgtgaaaagcaaaaatgcccaaaagttcatcttctgccctgacccatcacccttcttcagaggtacccagtacctccaattcccaagtctttctggggttctgctgaaccaacacgtagccgtttatcccttcatgtaagcttagggttctacattttccaatatgctaactaagccccatccattagccttacagctcctaaaatgttatctttcatttgctgtagtctcctctattgttattcttgttatctgagtgatttgaagactttttatgtctttgctggcattttggtgg

SEQ ID NO: 164297 - DNA, 422 bp, Homo sapiens
tactaatataaattagcgaccgcgtcgacaactgaagcagtccctgcccccactaccagctttcaggaaaagaggtggtcgaaaagttggactgcattttttctaacaacactaatatgctttatgactcatactgtagtcaggaattggggggttcacccttttcttgggcctttgggcagtcacgtatggggtctgggaggagtaagacaagaaggggaaactgagaggagtgccaggaagcataggggctgctagattttgtgtctctgctttcctcattcaaatacttccccagcaagctgggtgcaatgaggcatgcctgtagtctcagctacttgggaggctgagcaggaggattacttgagcccaggggttcaaaactagcctaggcagcatagcaagaccctatctcaaaaaaa

SEQ ID NO: 164298 - DNA, 164 bp, Homo sapiens
aagcaaagcatgtgtattaataaactcagtattcattaaagcagcttgggttgcctgtagaaacggcagagcatccccaaggctgagggaggcggggctcctctgtgggtagcagacttcatctgcaggacaatgtgcagcacaggctgcgggtattaaaggag

SEQ ID NO: 164299 - DNA, 435 bp, Homo sapiens
  misc_feature (18)..(18): n is a, c, g, or t
  misc_feature (43)..(44): n is a, c, g, or t
caccaccacctcctccgnctccgcacacgcgaacacggccctnnaggcaaccccagcgccacgagggaaatacttacgtttaatagactcacatttatccatcttttgatgattgagtttttgtgtcattttcacccatattttccactaaatgtttttaagttttgcttttgatagttaagcccttaattcacctggggggtggtgaggggagccatcttcctctgtgatatatcagaattcaatatatgggaaggggctgggtgcagtggctcatccctgtagttccagctacgtaggaggctgaggcaggaggatctcttgagcccaggagtttgactctgcagtgagctatgattgcactgctgcacttcagcctgggcaacagagcctgtctcttaataaaaataaataaataaaataaataaaataacg

SEQ ID NO: 164300 - DNA, 519 bp, Homo sapiens
  misc_feature (405)..(405): n is a, c, g, or t
gctcggtacccgacggcttcaacggaactttggatcaagttatggcaaacaagaagaatgatttaaaagttataaaacttgaaagaggtggtcatattttagaatcaatgatgaccaaattgggaaatgttggatatagtgagtatagggaaatagatgaatattccattaataactattaaaatctgctaaagcttaggctaagctgaatatatttagttgtaataaaattgggtgaacacattccaacttcagcctgattaagggaaagggtgtaggggtgagacacttaggcggagcttgaaaaggaatggtgagagtttggccaatgggaaggaaggctgtgccagacaggaatagtgtgggctgacgacaactgagggcaaagtgcttgtcccctcatanttgcgcaatgaatgcagaggggctgaggttcatctgtcgtcttcagctctgcaggctacatctcgggtgtttcctgtgaaagttccgttgaagccgtcgggatcctctagatca

SEQ ID NO: 164301 - DNA, 423 bp, Homo sapiens
ggattacaggcgtgagccaccatgtccagccagtgataagaggatttcagtcatctgagtatctgtaaaggtcttcagttgaagaaatacctgaaatgaacaatacttatgtcaaaggctgaaaactaagggagcttttactttggatcaagttatggcaaacaagaagaatgatttaaaagttataaaacttgaaagaggtggtcatattttagaatcaatgatgaccaaattgggaaatgttggatatagtgagtcttgtacctactgctttaaaaatgaggtagtatgctgggcacagtggctcatgcctataatcttggcactttgggaggccaaggcaggaggatcagttgaggccaggagtttgagattagcctggacaacatagtgagaacctatctctaccaaaaaaaaaaagaa

SEQ ID NO: 164302 - DNA, 259 bp, Homo sapiens
tgacagctaatatggatgagaaagccaacaaaagtggtaaaatacattctgatacctgaaaataattcacatcaagtttcattttacataatcgaactattgtttttactgtttctgattgctaaatacttgcaaagccagttccatatttgctaaggttgtaaaggtctaccatctatttgcaaggactctaattcaagcactcaagtcctaaggtctatgcctgcagctttaactttataaaaagtttctgtacaga

SEQ ID NO: 164303 - DNA, 194 bp, Homo sapiens
cagaggctgtgaatggcttcggttcagctgtccaagcggcgatttttcctctgggtgaaatggattagattttagatttccacaagaggctggttagtgcatgatcctgagttagagctttttaggtggctttaaattagttgcagagagacagcctcgccctagacaacagctacatggccctttccctcctg

SEQ ID NO: 164304 - DNA, 539 bp, Homo sapiens
ttcttacttgttttgctttaaaattttttcccagcctctttcaacatatttacatttttctctataatttttggcattatttggacttcaaaaatatttgagattgaggatttatatgaatagtatcatttggagaatttttcccttaaagttgatggtgggtcagtcttttggtttgttcttccgtatgcaattacaaaaccagtgggatgaaatttggggatcacttttttccttgagcctcttcacccacttgacaatgaatttttttttttttttgcgggggggagccctatttttggtcttaaagctaacgaaggccgggtgtggtggctcatgcctgtgatcccagcactttgggaggctgacgcgggtggatcacctgaggtcaggagttcgagatcagcctggccaacatggtgaaaccccatctgtactaaaaatacaaaaaaattagctgggtgtggtggcgggtgcctgtaatcccagctacttcgggaggctgaggcaggggaattgcttgaacccgggaggcagag

SEQ ID NO: 164305 - DNA, 465 bp, Homo sapiens
ccagtgttttccaagcaacacgtaatactcctggtcagaaaggggcttcccacggccgaggaggggagagtgactcgacaggtgggtgggtgggtgggggaagcgaattccctggcccactgccgggccttgacttacaggctggacccagagttcccagggggctgtgagagcccatgccaagtcctttcttctcattcattcattcattcattcagtagacactgttgagagcctgctgtgtgttggggattgttctgtttaggtgctgggaatagagccatgaacaaagcagataagagtctatgctcccctgagcttgctctctcatgacaggagtcaagtaaatacagttacgtcaggggtggggactgtggaggaaagtaaagaggaataaagaggcgatggcaaacgtgaatttggggtgggatgctttttatgtgggtgctcagagagggccttgct

SEQ ID NO: 164306 - DNA, 741 bp, Homo sapiens
ttcagacttcctatctcaatttagaaattactaattgttagaaacctttcctaacttctccctccaaactaacataaataacacttttacatgttttcatggcatcctgttcttccctggtactacatataattccatgtgttgatttgttgattatctctgtctcccttcaaatcatgtagttaaacagacagaagttggaaaaccttgaagatgatgcagtttaaaagacagtaacataatctgacataagctacacacacacacactcaatgttaattcattcaatcataattcaactgaaacataaagttggtttgagaatcactcagaccagtaactcataaaaagtatttgtactgtttagccagtttttttcccaaagatttaaaaacagctcctcagtcacaatctcaacagaactttatagttctgataaattatgccacatgctttccctaaaatgcatgctctagaaattgtttattcaatgataaagcctatcagtgacctctgttagccctctagcagacttaatcagtggaaggaagtgggatataagggaggctgcaaaacagcagggctctggaacactggttttactagttattagcggtgtgacctagatcaagttcctcagcctgctgaacctggttcctcagctgtaaaacaagcatatctcttagcttggaatgctattatcaggatgagaaataatgtatatgacatgtccaacatgct

SEQ ID NO: 164307 - DNA, 1426 bp, Homo sapiens
gattcttcaggagacctcatctgaaaatgttaagactgccagtgagggaaggaattgttaaaatgccagcggcttttttttcctctttttttctgtaattctgtaaaaatgcagagaaagttgagtggtacttcagaattgagggagagggttaccgcagcgtagaaatatatttctagatttcagttccacaccacaaatccacaacaatgccatttttcaactgtacaaaaatctgcttatgaactggacatgatcttaatggtagtgtcaaaggccaagtttttcacctgttaatatttttccacatttgtccttgaatctgaataactttatacagtactgtaaatttaacttacatcgagtttgttgtcaattcttatgaaaagagctttctgcatgtaacacatacggttaaagaacacagcaaaggacaaaatttgcaggaacagttttggaaccaacagaaaatgtcaccttttatttgccatcttatatatatctatcagttttaccagctacttctaaatttgtacattatttgtaagggaaagaaggaaaaccctaagacttgtctaacttagtggagaatgtgtgtgttgggcttaggatggatagctaagtcttattgagctgtgttacctaacttgtatataaaaattgtaattaaaagtttgggttcacctgtttctcacagtttaaaatgatgagtaattgcaaactctggaaatgtgactagtatatgatttaaggctgtagaagcaaggaagctctttcaagtgctaaaactaaagacttctagtttttggctcaaataagtactgtttgtataccaggatatgtgagatgtaaatgtagtaggtcacttttcacccttgtagctataaaataaaaattttgtagaacagaaatagcttgtactactgaattaacaaaagttatactaaagtatcatgtttaaaaaaaaatatatatatatatacagagttaagcttgttgctgttaccctgtctggatttgaaaagtgtgctgatttatatatatatattacacacacacacacacacacacacacacacacacacatacacctaaaatggcctaaagcagacatccatgtaattacagttgcaaaatgaaaacattttggaaagaacattgtatcatagttcattcatttgcagtggatctttgttcctttttactgtggtaattttagaaatgagtgtcaagtttgaaattagatctgctaagttggggttttgctgcttgaactctgcactgggtcctcaaataaaccgatgtgaatgtagttttttccccctgtgtgaagaagcagttacaccccaacaataggaggaaaaatctagaactatttcaagttttatctttttgtatatgaaaataaaataataataaaacaatc

SEQ ID NO: 164308 - DNA, 1422 bp, Homo sapiens
gattcttcaggagacctcatctgaaaatgttaagactgccagtgagggaaggaattgttaaaatgccagcggcttttttttcctctttttttctgtaattctgtaaaaatgcagagaaagttgagtggtacttcagaattgagggagagggttaccgcagcgtagaaatatatttctagatttcagttccacaccacaaatccacaacaatgccatttttcaactgtacaaaaatctgcttatgaactggacatgatcttaatggtagtgtcaaaggccaagtttttcacctgttaatatttttccacatttgtccttgaatctgaataactttatacagtactgtaaatttaacttacatcgagtttgttgtcaattcttatgaaaagagctttctgcatgtaacacatacggttaaagaacacagcaaaggacaaaatttgcaggaacagttttggaaccaacagaaaatgtcaccttttatttgccatcttatatatatctatcagttttaccagctacttctaaatttgtacattatttgtaagggaaagaaggaaaaccctaagacttgtctaacttagtggagaatgtgtgtgttgggcttaggatggatagctaagtcttattgagctgtgttacctaacttgtatataaaaattgtaattaaaagtttgggttcacctgtttctcacagtttaaaatgatgagtaattgcaaactctggaaatgtgactagtatatgatttaaggctgtagaagcaaggaagctctttcaagtgctaaaactaaagacttctagtttttggctcaaataagtactgtttgtataccaggatatgtgagatgtaaatgtagtaggtcacttttcacccttgtagctataaaataaaaattttgtagaacagaaatagcttgtactactgaattaacaaaagttatactaaagtatcatgtttatgaaaagtgtgctgatttatatatatatattacacacacacacacacacacacacacacacacacacatacacctaaaatggcctaaagcagacatccatgtaattacagttgcaaaatgaaaacattttggaaagaacattgtatcatagttcattcatttgcagtggatctttgttcctttttactgtggtaattttagaaatgagtgtcaagtttgaaattagatctgctaagttggggttttgctgcttgaactctgcactgggtcctcaaataaaccgatgtgaatgtagttttttccccctgtgtgaagaagcagttacaccccaacaataggaggaaaaatctagaactatttcaagttttatcttcgggtctatcaacattcactactataaaccatctggtcttcttaaacaatgcacttcggggggcccggtacctggcctatgggatcgtc

SEQ ID NO: 164309 - DNA, 261 bp, Homo sapiens
caggatcttcaaacaccgcaatctttttctctgtttctgacataaacatcactgccatatcaaacctttttagttcagaaagtctttataagatacacagatggcaaataagcagatgaaacggttcaatgatgttagccttgtaagacacgcagaaaatgcaagatgagatgccactgcatgcctaccgtgatgactgaaacaagaaagagtggtgacaccagaggccggagaggatacagagaaactagatcactcagg

SEQ ID NO: 164310 - DNA, 493 bp, Homo sapiens
ggttgcactgagtagattaatacatcatctgggcaaacgagcacacaaaaacttaagggattctttgtggtaccagaatgaaacgagggagaaagcgcctctggaaaagtgtgtcaaaaacctcaaggggtatagcttgattaagcataacacaatttaaataaaactgtataaatgtaaatattaaacataatttcacatttgaaaattttgtctagttttcttagtacagatttcaaagaatcaaagtttggcatatgttttcattttgttttgctgtttttagacatggggtctcacgatgttgcccaggctagagtgcagtggctgttcacgggtgcaatcataatgtactgaagacttgaacgcctaggctgaagtgatcctcctgcctcagcctcccacgtagctgggactactggtatgcaccaccacaccctggcaaaatttcttttatttttgccagcaaggctagaccaattgcatctcaggt

SEQ ID NO: 164311 - DNA, 528 bp, Homo sapiens
gtcccaaagacactctttagcaaaaatcctgctcaccaagctccatctcagaatcggcttctgactggccccagtgaatcacagcctatgtccaccccttcacagtaactgtgctttcctcccttccagaggggcagcctatttctccccaccttgaatctgagctggcttcgtgacttgctttgaccaagacaacgtgtagaagtgacggttgggacttctgagcccgagtttaagtggacttgcagtttcaccttcactctgggaacccagcgccatgtaaacaagtccaggctgtcctgctggagggagatgatatggaggagaactgcggcagcccagtagatagccagcaccatggccccaggcaagcaagagaggaagagaggcccttgtggctctttcagccttggttgggctgccgtggccaacacaactggagcagagataagctatctctgctgagacacacaaattctgacccagagaattgcgagtaataaaatgactgttgtttgaaagccctaa

SEQ ID NO: 164312 - DNA, 561 bp, Homo sapiens
actggtggtggcctgaggattccaagaacagactttatttgcaactgtggacgggagtatggctcaagggctggccttgatctcacctgactggacattctcccagtgctgaggtgctacctgggggatatttgtaggaaacattcacaacaaatttattattctctgctgcctggggccacagacagcagatgaggcaaacaacagactaaccaaacaggccagggaataaaatgctctgggcgatgggggcctggaacgcagacagagctgtgcaggagctcaggagaggcctgcgagggccgaagctaagctctcacgtctggccgccttcaggctccgcacacacaggaagcaaaagctaaggcagagttgaaaatgtgtttaaccgcggaagggctgaccccacatgcacacagacccttctacaaactctgggagggttttatgggtttttttgattccagatgtttaaggaaatctctgtcctatcactgaccactgggctaaaagaataggaagaaacggccatacgtgacaaaaaatacagactttacaacc

SEQ ID NO: 164313 - DNA, 502 bp, Homo sapiens
ctttcattggcctaacagagttgggaaatctagatgttattcccagttctgcctgactgaccagttccaccttgagcaagacattccctctatctgggcctctatttcctcattttgaaacctatctgtgtctcccagactttcctgtaacagaataaccttgagtgtttgttaaatatacaaagtcacaggccccttccctaaatcaggggtggggacagggagctggaatctgtatctttaaacctagcatcctggtggattctaatcatctggcaagttcaaaacatgaacaccagatggttaccaaagtaccattctatgctatgatctataatttatacaaataatctcttagaagaaaggagatgaagtttggtacagattttgaaatcacgtgtcttgttctttactgaatgtagtttatcatgatcctcagttttcatttataaacacacacaagggggaacattttgtatattcctttgcaaggtgaaaaacc

SEQ ID NO: 164314 - DNA, 517 bp, Homo sapiens
atgcactgacctgttgccagaaggaacatgcctgtaggaggtggctggagacccctgctgggaggtcccacccactcgggaggaatgggatcagggacccaccccaagaagccctctggctgccctttggtagagtaggtgccaggagacccttccttgcctggaccatttgtattttccaaagttggcaggctggaatggctgagtttaccaaactgcagagatgacagctgctcttcccctgtgagcttcattccagggagagatcagaactttgtctgtagaacccttgcttgtgtggctgaagcccctgcagggaggacttgcccagtgaagaggaatagattgaggtaccgcttaaagaagcagtctggccatgatctggcaaggcagctgtgctgtgctgcagggaacctctccttgctcgaacttcttgtattcttcaaagctagcaggctgaaaccaataaatttaaatttaaataggtaaaaataagtaaataaagataaagaaaaat

SEQ ID NO: 164315 - DNA, 322 bp, Homo sapiens
gtctttctccatctcaaaaataaataaataaataaataaaaataaaatgctcaaataaataaaaacaaaccaatgaacaggagtgctggtagacctgcttctttgcgactgcttaatggcttaaagggccattcatttggttttgaagccaccaaagccagggcaaggtgaaacgtttagtccaaatgggtccctcaccccatttgggaaccaatcactgtcccctatagacctagttcattgaaggcatttaactgaatccaatcatccacattactaattgacctccacaagccaacaaaagaaaagatcggttcatcca

SEQ ID NO: 164316 - DNA, 258 bp, Homo sapiens
tgcatctctgttcacagggctttgcgtagtggcagctaaccagatcacagtgataaaagaaaagctgatagaacatgccataatattgggtttttacatgctcataaggatcagagtcaggagcgtggttgggtggaggtgggggaggtgtcatatggcggctaagcaaaatcagcagagaaaagagcagcagtcttgcagtgacatgatctgaccccaccacttgcccctggcttcaaataagtaatgtttggggtc

SEQ ID NO: 164317 - DNA, 104 bp, Homo sapiens
caggacttagattctggagtaagtggtgcagagacagaaacattatttggaagtcaaattcggcataggatcagtgtccgtgtgtggcctagacttgtaaattc

SEQ ID NO: 164318 - DNA, 187 bp, Homo sapiens
tccagagttctgagtctaacaaattattgaacctgggggggtcctgggaacccccaaatttgcatccagttggtcagaagtgtggtggcctggggatccccaaagttcgactggcatctaaatcagggcggtcttgtgggatctgatttagatgtggaagctcttcacctgtggggtctgcactaac

SEQ ID NO: 164319 - DNA, 525 bp, Homo sapiens
tctagaggatcccgggacactcttgagtgcatgggaatgtgaaaaacccttgagataatcaaaagctgtggtcactatagcaacagctcacccttgtctttccttttttgagcctgtcttaaatcagaatcctaaaacagagttattattggttatttgtacccataattttttttcaacatgagaaaaactattgtatatttgttgttcatagatattctcttagcttagtggcctttgttttcatgtgactgctgtcagctgctctttccaagttgtctgaaagagctgatggttccatttaggttgggagcaggaacaggtgctttcagccttaaactcctttcaggttgccagtggtgggcacgtgatggaaaagggggttcttagaaacaaagctgggtcagtggcttgctcagcagcaaatgctttgctttagttggtgttttcctttatttcccagccttggatgggtggcatgttctacacaaataactactttcttcttctgagctcttgccccaa

SEQ ID NO: 164320 - DNA, 200 bp, Homo sapiens
tgcctcacagtgggaatgctggcacagctgtcttggcaatcagtagaccatcctgtcagttcttcaagcccagagagggtccgtgacttgctcagagtcacacagcaatccattagcgaggccagccccttccctgggctctgcatttctcttgtagtgaagagctcctcacagtttatttgcatactgtaaatttgcaa

SEQ ID NO: 164321 - DNA, 523 bp, Homo sapiens
cgctggaaatgggaatattttcacataaaaactagacagaagcattctcagaaactactttgtgatgtttgcattcaacccacagagttgaacattacttttcatagagcagttttgaaactctctttttgtagaatctgtaagtggacacttggagccctttgaggtctatggtgaaaaaggaaatatcgtcatataaaaactaaacagaagaattctcagaaaatttttgtgatgtttgcattcaactcacagaattgaacattgcttttcatagagcagatttgaaacactctttttgtagaatctggaagtggtcaattgtagcgctttgaggcctttgttcgaatcgggaatatcttcacataaaaactaggcagaagcattgtcagaaacacctttgtgaagtgtgcattcaactcacagagttgaaaccttcttttgatagagaagctttgaaacactctctttgtagaatcggcaggtggacatttgttgtgctttgaggcctatgttgaaaaag

SEQ ID NO: 164322 - DNA, 310 bp, Homo sapiens
tgattgcagacatcaactaacttgatgtccacagaggtctcaatccaaaggtgtgacttcatggtggactgtttgtgaaaattcccataaggaataagagtgtgagcatctgaggtagaaatttatctttttatattcagaacacttatctatgcctagcagatattacatatttgatgaatgaataaatgaatgaaacaggtaccacttccagagatggccctagttttttgtccttgtgatttctcactgtccgtgtgttctaaccacaacaggatctacatatgatgctgttgttgccatcagcact

SEQ ID NO: 164323 - DNA, 228 bp, Homo sapiens
ctagttattttaaagtaatttttgagtcagccagctttcagtcaccagtgtggcaagctaattatattgcacaatagagtattgcaaagtaaagattaaataaatttgattccattactttttaatgtagaaagagactgaatcttatgcttagagcaaatgcaagcaatatttccttatatgattgaaaaaggttctatagtgtgaagcttatgattccataatgga

SEQ ID NO: 164324 - DNA, 324 bp, Homo sapiens
ggccgactgggagaagcaggttacagaggggcacagccgagggcgccgcccagacacggtgcggctgaggctcccggagaaacaagcagggaggctgagcaggcagcgggcgctcagggcagtgtcgccagcacatggatatttatggacatggaaagccatgagcctcccctccatgggctcctcaggggaggaagcatgaagggaagagggaggagaccgaggagccccacaaccaccgaggtggtgtgagacactgcctccaacagtccacatctgaaagcagttctccaggaggcaagggtgcaggccatggctcagccc

SEQ ID NO: 164325 - DNA, 501 bp, Homo sapiens
taagtctcaggagttcaagtcatggcactggattattcataatatcatacaagagagggcgagtggatgtggagaaaaagaacaaataagtctcgtaaaagcacacacaggtatttgttttctttggtcacaaaatgcaagaaagaaaataggaactattgtgactgtaaatcacattttaaattggaggctgtcaaatgtgcggtagagtggcagtgcttaatctttatttaacaacaaaggcctctttaatgatattttcacttttctctctgcgtctgcatctgtccgtgcttccccatgagtttgggtctagccaatttctgtccagcagatttcacctctaggtcataattattttctgtagaagccaaaatgtgggggtgctgcgtgccattcagtcctctcagtgtttgtatctatgcttcctctagggtacaacttctttctcagccttagcaacacgttccggaaggatgctattatctttcctggctttaa

SEQ ID NO: 164326 - DNA, 1241 bp, Homo sapiens
ctctgcctcctagataaaaatgattaaggtaactagtcattaattgcacccacttccagacaatatccaatccagactgaccctctcttcctcaaatcctctttagaattaccaagcaaaaccccaagtcctataagcccatctcaactccctccttatgcaacaccccatggttcctctgcagtgcctgctaaatctaacttcgggttattacaggtgcacgagtgatggtctttgactcatgacctttaacttgctgtgggtgtctgttgctttggagcagcccagcgctgatttctacttctgaaaagtgccctgacttgctttgaattggatgccagtctaggaagactcatatctgggcctcttgtaggccaaggtcaggcatgtaccttagcttgaaaatgagatacgcctccctaggatttgaaacctgagtgagaggcgcagcactggggttggtgtccaggccagaccggccatgttgcgagaccactgccgtgcttcctgcttcctggtcctctagtcctgcccgttcctagccagggtcctcagctttcccatcaatgcagtaactcctttcacttaattgagccggggtcaattttgctgttgctttccagcaaagaggatggagatgcacaactgtcatctgaacagtggcactcactcaccacctgaacagaggcgctcattctgcatcagggcgggtgaaaacgccttacgttgatccactcctggggctggggccgggactctcaggccctgggaatattgtttccacaattttattaacctggaaaatgtgttcctttgttctgattgtgtggtcaccaacaacggctgatttttaatatgggctctcatacaccctgttaccgattatcagacaccagatcctggtcacaagaaacaacagctcccatttgtaaatgaatgccttgacattgagctttacccacaatggagagttggttaacaggaggtggtctctctgtgcctgaacaatatgtgtgttctgacaaaatcaaatcaccagccctgcaatcccacagacctcacaggctcagtttgacccaccagggaatgctgcctccataagctactggccgccttccatggcatttctatctgtgacaactgccacaagctacctccgctggatgtcaaacaggcactaagctttgtgcactgggtctttgctcaaatgtcctttttagtagggagatgtgatccaaagg

SEQ ID NO: 164327 - DNA, 775 bp, Homo sapiens
tttggattatttgagaaaatgtcatacttatttttttttttattattattttcgagacagggtttcactctgtcacccaggatagagtgtggtatacaatctcagttcactgcaacctccgtctcccaggttcaagtgattcttgtacctcagcctcccaagtagctgggattacaggcgtgtgcctccatacccatctaatttttgtacttctttaatagagacaggtttttaccatgttggccaggctggtctccaactcctggtctcaggtgatctacccgcttcagcctcccaaagtgctgggattacaggcgtgagccaccgtacctggcccatacttctttgcaccattatacatttccagcaacagaacataagtctcccatttctgcacatttttgccacttgtgatgtactgttttttttgtcttttgggttttttttttaacaataaatattccatattggatgtgaaaaaaaaaaaaaaaaaaataaaacaaagaaaaaaaaagacgaaacgcagaaagaacaacaaacaccaaagacaagacaaacaacgcaacaaacagaagagccacaagaacaaaagaaggaagagaacagaaacgcaccagacaagcagcagacagagacagaaagagaaagcaacaggacgagcaaacgaccaagagaagcacaacaggacggaagaagaaagaagacgaagagagcacaggaacacgcggagagggggcggggcgggcgcgggcaggccagggagagttagtaggcg

SEQ ID NO: 164328 - DNA, 733 bp, Homo sapiens
aggctggcggatcacttgaggtcaggagttcaagaccagcctggcaaacaaggtaaaaccccatctttactaaaaatataaaaactagcaggtgtggtgtcgtgtgcctgtcctcccaagtagctgggattacaggcgtgtgcctccatacccatctaatttttgtacttctttaatagagacaggtttttaccatgttggccaggctggtctccaactcctggtctcaggtgatctacccgcttcagcctcccaaagtgctgggattacaggcgtgagccaccgtacctggcccatacttctttgcaccattatacatttccagcaacagaacataagtctcccatttctgcacatttttgccacttgtgatgtactgttttttttgtcttttgggttttttttttaacaataaatattccatattggatgtgaaaaaaaaaaaaaaaaaaataaaacaaagaaaaaaaaagacgaaacgcagaaagaacaacaaacaccaaagacaagacaaacaacgcaacaaacagaagagccacaagaacaaaagaaggaagagaacagaaacgcaccagacaagcagcagacagagacagaaagagaaagcaacaggacgagcaaacgaccaagagaagcacaacaggacggaagaagaaagaagacgaagagagcacaggaacacgcggagagggggcggggcgggcgcgggcaggccagggagagttagtaggcg

SEQ ID NO: 164329 - DNA, 609 bp, Homo sapiens
ccctatctctaccaaaaatacaaaaaattagctgggtgtggtggcatgcacctgtggtctcagcaactcgggaggctgagatggatcacttgagcctgggaggtagagtttgcagtgagccaagatcatgccgcttcactacagcctgggtggcagagtgagaccccatctcaaaataacaacaataataataagcaaggatagccacaaatatttgagaaataggaggagtgtggtcagtgagataagaaccctaatgtaaagttgtaataaacagaagttcaacaagtatgaaaacaaagtaactattagtcattaaaaaaaaaacccaaaaactgatgtacatatgatatggcagcacttcaaatcataaaaccaactatacatgccaagacaattggttaccaccaagtaacaaaatccagaaaaagtaagacctaacgtctacattttaacattgttaagaaagcacagaaatatttattgacatggaaagatgtttaccctgttatatatgtgttattttttaacttgcctttttacataacacagggtgaacatctttccataaagtgaaacaagccagtcacagaaggacaaatactgcat

SEQ ID NO: 164330 - DNA, 498 bp, Homo sapiens
gccccagctcacctttaatgcttacaacaaagcccgttcacatttttgacagaagaggaaactgaccctcacagagggaaagtgacttgcccgagggatgctgcagttaaaactcaaccacttttcctgattccgaatccagtgctccttcccctaccccgaccctatctcgccttccagatgagcacagtctccaagaagggaactctaggaggcgaacccaagctccactggattctgcatgttctccctcaagccccctgaccatgggcctgcagacgctctgagcatgcctgctgtccctgttctatcagctgtctccacggggtccctggtttctcatgcccaaggagtgggtgacttgggtccacagaccatcagtgcaagagcagtccactcttcccccatttacagatgagaccgaggccagagaggaaaggaagactccccagcagtcctggctccccaccatagtgcctaacacatggcttccctgcc

SEQ ID NO: 164331 - DNA, 1695 bp, Homo sapiens
gcttgggtgcaatggccgctcaaagggcgaggcttattcgaagcctcaaattcagaaaacccagccagaccttggaagttaagaaggtggaaggcagatcgcggaaccagtgttctgatagttgtggttctctgagggaagccaattctggggaccggtagtggaaagctcttgcgctgtttccggccacctcagcgggaagcggagacgcaagcagctggatctccggtaactgagacatagggtataactgttgtcgcggcggaggaagtgaggacggcgccaagggccttccgggccagtgttggatccctgtagtttgtgaagatggtgttgctaacaatgatcgcccgagtggcggacgggctcccgctggccgcctcgatgcaggaggacgaacagtctggccgggaccttcaacaatatcagagtcaggctaagcaactctttcgaaagttgaatgaacagtcccctaccagatgtaccttggaagcaggagccatgacttttcactacattattgagcagggggtgtgttatttggttttatgtgaagctgccttccctaagaagttggcttttgcctacctagaagatttgcactcagaatttgatgaacagcatggaaagaaggtgcccactgtgtcccgaccctattcctttattgaatttgatactttcattcagaaaaccaagaagctctacattgacagtcgtgctcgaagaaatctaggctccatcaacactgaattgcaagatgtgcagaggatcatggtggccaatattgaagaagtgttacaacgaggagaagcactctcagcattggattcaaaggctaacaatttgtccagtctgtccaagaaataccgccaggatgcgaagtacttgaacatgcgttccacttatgccaaacttgcagcagtagctgtatttttcatcatgttaatagtgtatgtccgattctggtggctgtgaaataatgaatacagtcactggtaagggagaacctagaacccagtaggtgtatattttcaggaaactgagctcacagagatgtgtattagaatccaagtggaacttctgcctctaaagaccttgcaagaaaagagatgccctgaaaatgaaaggttgcacctcatttaatgaagcttaaccctatgtagaaagtctctttcgggggcagaggctttctctgggtgccaagccatatatattagggaatagtagattgttaatttcgttttttccctcccagtgcattttaaaaacagcactggctggggcattctcattctctgatggagccatcaatgagatttaacttagtcaacctgtgccagcaacattctgaaattccttcaaagaaggcagtcctttgggaaggtgttttttttttttttttttttttgactctaatcaacattccttttgttggtgacatttgtgattttcagtaatctgagtttttgatggccttttaaacaagactccagtatgtgaaggttaattgctgtgctccacagatctcgtctattggcccctgtagaaagttaacctttgttgttttccttttataatttgcttattgcacaattgctttagggtaagtgaattatattaagatgccttgaaattatagcactccttgattaagaagctaaaatgtttctctcatttactccttaaacaaaagac

SEQ ID NO: 164332 - DNA, 1585 bp, Homo sapiens
gcttgggtgcaatggccgctcaaagggcgaggcttattcgaagcctcaaattcagaaaacccagccagaccttggaagttaagaaggtggaaggcagatcgcggaaccagtgttctgatagttgtggttctctgagggaagccaattctggggaccggtagtggaaagctcttgcgctgtttccggccacctcagcgggaagcggagacgcaagcagctggatctccggtaactgagacatagggtataactgttgtcgcggcggaggaagtgaggacggcgccaagggccttccgggccagtgttggatccctgtagtttgtgaagatggtgttgctaacaatgatcgcccgagtggcggacgggctcccgctggccgcctcgatgcaggaggacgaacagctacattattgagcagggggtgtgttatttggttttatgtgaagctgccttccctaagaagttggcttttgcctacctagaagatttgcactcagaatttgatgaacagcatggaaagaaggtgcccactgtgtcccgaccctattcctttattgaatttgatactttcattcagaaaaccaagaagctctacattgacagtcgtgctcgaagaaatctaggctccatcaacactgaattgcaagatgtgcagaggatcatggtggccaatattgaagaagtgttacaacgaggagaagcactctcagcattggattcaaaggctaacaatttgtccagtctgtccaagaaataccgccaggatgcgaagtacttgaacatgcgttccacttatgccaaacttgcagcagtagctgtatttttcatcatgttaatagtgtatgtccgattctggtggctgtgaaataatgaatacagtcactggtaagggagaacctagaacccagtaggtgtatattttcaggaaactgagctcacagagatgtgtattagaatccaagtggaacttctgcctctaaagaccttgcaagaaaagagatgccctgaaaatgaaaggttgcacctcatttaatgaagcttaaccctatgtagaaagtctctttcgggggcagaggctttctctgggtgccaagccatatatattagggaatagtagattgttaatttcgttttttccctcccagtgcattttaaaaacagcactggctggggcattctcattctctgatggagccatcaatgagatttaacttagtcaacctgtgccagcaacattctgaaattccttcaaagaaggcagtcctttgggaaggtgttttttttttttttttttttttgactctaatcaacattccttttgttggtgacatttgtgattttcagtaatctgagtttttgatggccttttaaacaagactccagtatgtgaaggttaattgctgtgctccacagatctcgtctattggcccctgtagaaagttaacctttgttgttttccttttataatttgcttattgcacaattgctttagggtaagtgaattatattaagatgccttgaaattatagcactccttgattaagaagctaaaatgtttctctcatttactccttaaacaaaagac

SEQ ID NO: 164333 - DNA, 608 bp, Homo sapiens
cggctcactgcaacctctgcctcccaagttcaagtgattctcctggctcagcctcctgagtagctgggattataggcgtgtgccgccacgcctggctaactttttatatttttagtagagacggggtttcactgtgttagccaggatggtctcgatttcctgacctcatgattcacctgccttggcctcccaaagtgctgggattacaggtgtgagccaccgcgcctggccaactcagaacttttaatctcctacctcagtactttgatggccatgaaagaaatggtcagttttcttcatcattctagatactttcattcagaaaaccaagaagctctacattgacagtcgtgctcgaagaaatctaggctccatcaacactgaattgcaagatgtgcagaggatcatggtggccaatattgaagaagtgttacaacgaggagaagcactctcaggtatctaaaagcaatgagtcttatgaagaaatggttctcattccatagacaaggatagcttattttgcagtgccttttatgctattagattctacctagaactgttaagaatttatctcccagaagtacattacattacaatgcttccaatat

SEQ ID NO: 164334 - DNA, 1475 bp, Homo sapiens
  misc_feature (41)..(41): n is a, c, g, or t
aattcgcggccgcgtcgacacggctgcgagaagacgacagncgggaggaagtgaggacggcgccaagggccttccgggccagtgttggatccctgtagtttgtgaagatggtgttgctaacaatgatcgcccgagtggcggacgggctcccgctggccgcctcgatgcaggaggacgaacagtctggccgggaccttcaacaatatcagagtcaggctaagcaactctttcgaaagttgaatgaacagtcccctaccagatgtaccttggaagcaggagccatgacttttcactacattattgagcagggggtgtgttatttggttttatgtgaagctgccttccctaagaagttggcttttgcctacctagaagatttgcactcagaatttgatgaacagcatggaaagaaggtgcccactgtgtcccgaccctattcctttattgaatttgatactttcattcagaaaaccaagaagctctacattgacagtcgtgctcgaagaaatctaggctccatcaacactgaattgcaagatgtgcagaggatcatggtggccaatattgaagaagtgttacaacgaggagaagcactctcagcattggattcaaaggctaacaatttgtccagtctgtccaagaaataccgccaggatgcgaagtacttgaacatgcgttccacttatgccaaacttgcagcagtagctgtatttttcatcatgttaatagtgtatgtccgattctggtggctgtgaaataatgaatacagtcactggtaagggagaacctagaacccagtaggtgtatattttcaggaaactgagctcacagagatgtgtattagaatccaagtggaacttctgcctctaaagaccttgcaagaaaagagatgccctgaaaatgaaaggttgcacctcatttaatgaagcttaaccctatgtagaaagtctctttcgggggcagaggctttctctgggtgccaagccatatatattagggaatagtagattgttaatttcgttttttccctcccagtgcattttaaaaacagcactggctggggcattctcattctctgatggagccatcaatgagatttaacttagtcaacctgtgccagcaacattctgaaattccttcaaagaaggcagtcctttgggaaggtgttttttttttttttttttttttgactctaatcaacattccttttgttggtgacatttgtgattttcagtaatctgagtttttgatggccttttaaacaagactccagtatgtgaaggttaattgctgtgctccacagatctcgtctattggcccctgtagaaagttaacctttgttgttttccttttataatttgcttattgcacaattgctttagggtaagtgaattatattaagatgccttgaaattatagcactccttgattaagaagctaaaatgtttctctcatttactccttaaacaaaagac

SEQ ID NO: 164335 - DNA, 884 bp, Homo sapiens
gcttgggtgcaatggccgctcaaagggcgaggcttattcgaagcctcaaattcagaaaacccagccagaccttggaagttaagaaggtggaaggcagatcgcggaaccagtgttctgatagttgtggttctctgagggaagccaattctggggaccggtagtggaaagctcttgcgctgtttccggccacctcagcgggaagcggagacgcaagcagctggatctccggtaactgagacatagggtataactgttgtcgcggcggaggaagtgaggacggcgccaagggccttccgggccagtgttggatccctgtagtttgtgaagatggtgttgctaacaatgatcgcccgagtggcggacgggctcccgctggccgcctcgatgcaggaggacgaacagtctggccgggaccttcaacaatatcagagtcaggctaagcaactctttcgaaagttgaatgaacagtcccctaccagatgtaccttggaagcaggagccatgacttttcactacattattgagcagggggtgtgttatttggttttatgtgaagctgccttccctaagaagttggcttttgcctacctagaagatttgcactcagaatttgatgaacagcatggaaagaaggtgcccactgtgtcccgaccctattcctttattgaatttgatactttcattcagaaaaccaagaagctctacattgacagtcgtgctcgaagaaatctaggctccatcaacactgaattgcaagatgtgcagaggatcatggtggccaatattgaagaagtgttacaacgaggagaagcactctcagcattggattcaaaggctaacaatttgtccccttcattctatagaatcaactattaacacctgga

SEQ ID NO: 164336 - DNA, 1330 bp, Homo sapiens
cggctcactgcaacctctgcctcccaagttcaagtgattctcctggctcagcctcctgagtagctgggattataggcgtgtgccgccacgcctggctaactttttatatttttagtagagacggggtttcactgtgttagccaggatggtctcgatttcctgacctcatgattcacctgccttggcctcccaaagtgctgggattacaggtgtgagccaccgcgcctggccaactcagaacttttaatctcctacctcagtactttgatggccatgaaagaaatggtcagttttcttcatcattctagatactttcattcagaaaaccaagaagctctacattgacagtcgtgctcgaagaaatctaggctccatcaacactgaattgcaagatgtgcagaggatcatggtggccaatattgaagaagtgttacaacgaggagaagcactctcagcattggattcaaaggctaacaatttgtccagtctgtccaagaaataccgccaggatgcgaagtacttgaacatgcgttccacttatgccaaacttgcagcagtagctgtatttttcatcatgttaatagtgtatgtccgattctggtggctgtgaaataatgaatacagtcactggtaagggagaacctagaacccagtaggtgtatattttcaggaaactgagctcacagagatgtgtattagaatccaagtggaacttctgcctctaaagaccttgcaagaaaagagatgccctgaaaatgaaaggttgcacctcatttaatgaagcttaaccctatgtagaaagtctctttcgggggcagaggctttctctgggtgccaagccatatatattagggaatagtagattgttaatttcgttttttccctcccagtgcattttaaaaacagcactggctggggcattctcattctctgatggagccatcaatgagatttaacttagtcaacctgtgccagcaacattctgaaattccttcaaagaaggcagtcctttgggaaggtgttttttttttttttttttttttgactctaatcaacattccttttgttggtgacatttgtgattttcagtaatctgagtttttgatggccttttaaacaagactccagtatgtgaaggttaattgctgtgctccacagatctcgtctattggcccctgtagaaagttaacctttgttgttttccttttataatttgcttattgcacaattgctttagggtaagtgaattatattaagatgccttgaaattatagcactccttgattaagaagctaaaatgtttctctcatttactccttaaacaaaagac

SEQ ID NO: 164337 - DNA, 735 bp, Homo sapiens
  misc_feature (41)..(41): n is a, c, g, or t
aattcgcggccgcgtcgacacggctgcgagaagacgacagncgggaggaagtgaggacggcgccaagggccttccgggccagtgttggatccctgtagtttgtgaagatggtgttgctaacaatgatcgcccgagtggcggacgggctcccgctggccgcctcgatgcaggaggacgaacaggtggactggctaactgtgggccctttgtgactttgatcttgaaagcaaactaaagatggagtctcactctgttgcccaggctagagtgcagtggtgtgatctcagcttactgcaacctccggtccccaggttcaaacgattctcctgcttcagcctcccgagtagctgggattacaggcacctgcaaccctacccggctaatttttgtatttttagttgagatggggtttcagcatcttggccagtctgatcttgaactcctgacctcatgatccacctgccttggcctcgcaaagtactgggattacaggcgtgaacccccatacccagcctcatcttgcctttcttaaaggttcacagatcagaattgcacataatcgatacactggatgcaaatatgtaatgaatgaatgatttttcacattacaaaattaatttgtgcatattgtagaaagttcagtaaatacataaaagcaaaatgaccaaaatgttaacagtgtttattaactataatctgtactcaaattatatccattttggtggatgaccttaa

SEQ ID NO: 164338 - DNA, 280 bp, Homo sapiens
aatgctccctgtctagtgcatgcgtgagctaagttgctaggaaatgactcattctttaatttgcaaagtcacgacgcccatggaacatgtgaaaagcaactaccagccgcagttctaagccgtctttcaccaacaaggaagatattactaaattaggaagactcattttgcccaaacgtactacaacgtagaaattcagatgagttttctcttttgaagtcttcttagaaggctgaatatttatcttactacagccaaagcccagacgtttcctaaaaca

SEQ ID NO: 164339 - DNA, 344 bp, Homo sapiens
aatccatttctaaaagtttattttttatgcctgtaatatttaaaaagcctaaaaatgatcttgctggttttcttcagttgagtgttgtgtaagtgaaaattacttcacaaatcctactattagctattataatcaaatcagctttcactcttccatgagactgtttccttcacaagactttggttgaccataaccaattttatagtaatatacaacaaaaaataatgtggagaatagcaaaattaaacatatttttttaaaaaatagaggtgttctttcccaggattttttttaagagtaaataatgttagcttatgggattgtagtgcacagcacagccccat

SEQ ID NO: 164340 - DNA, 104 bp, Homo sapiens
atttactcccctttgtgttttagatctttgataccatactttaatctgtatcttcagtttctgaacataagtatgcaaaatctttttaaggtgcatactctgct

SEQ ID NO: 164341 - DNA, 227 bp, Homo sapiens
gcctcatttggttcctggctaaatctggcttttcagtcttctcatccattccatatgtactcaatctaataaattcattttctgcttaaattgactagcatcaatttttaatttacatttttgcaactgacaacccagactagtacaggtcctaaaggggactctaattcacatgtcctcccaagaaaggcaggtagcaaggtatcttatttgtatgtgtctgatag

SEQ ID NO: 164342 - DNA, 383 bp, Homo sapiens
cacgcccagctcaggcttcagggacacgagcgccccgcggctgcgcggcgtgggagggggttccgacagcctgcggagcccagccccaccctccccagacccgctggcagcaagaggggttcagggctgttgccccgggaaggaggcccgaagagcttgcagccgccgggaggggtggggcgggagggggcgtcggaagacaaaaggatgtgaggctttaaattcaaaaagatgttttgaaagccaagcgctggggtttgaaaggcgctgggaggacggcggcagagcgatcccaatcagaaatgcgatttgaagtcctaatgaacttgattgcgtgaacatttataatcccccatggccctaaatgaaatcagatataatca

SEQ ID NO: 164343 - DNA, 754 bp, Homo sapiens
ttgaggctgcagtgagccattgacggtgccactgcactacggcctgggtgacagagtgagatccgtctcttgaaagagggaaggaggagaaaaatagagacagagacggtagatactgagaatgtgcggatctaacattgtcttgaatcttgagagctttcatccatcccagagattcctgacaggtcataattctgctaagacatagatttgcattgcagcccagctgctaactcttaagtcattaaaactttctttgtgaaaaatggctcttttgcaacgagaatcagctgctactattggtgatatcagggaagaaaaagcaaagattatctaaagaagtgatagctcttagccagagaaagggagttttggataaactaaagactggaatgatgactttttgctgtgctgggagcaagcccaccatgtacttcttggggaacagggacgttcgtgagcattttagcagttgcttgagccagggcaacgtttgtatgagtgaggtggttttagagaaagttgaatggggagttgtagtgagaggtgagacattaacagcagcaacaaccaccacagatcaggagctgggcacagtggctcacgcctgtcatcccagcactttgggagactgaggcgggcggatcacctgaggtcaggagttcaagaccagcctggccaacatggtgaaaccccgtctctactaaaactacaaaaactagccagacatggtggcgggcgcctgtaatcccag

SEQ ID NO: 164344 - DNA, 391 bp, Homo sapiens
cttctggggtctctgcaagtggaacaagaggccctggcctctgagtgggcctgctgctgtgggcagcctctggcgtaccaccccccaaagcccaggaagtggcatgcatacgctgggaccagccctgtccacggggccctggggcctggtgtgctctgccggagacgggatgcattttgaggaaatgcctctgactccaggcctcccatacaggtctgtgcagattgcacctggcacctacccagagaactcagctgttctgtttacattgtggaggcacctctcaccctgacccacgcaaaggttctggagatttctggagaatatatttattaaagccacctcttcaccaaaagttaccaaaagggttggtttaggaagtaaatgaagg

SEQ ID NO: 164345 - DNA, 413 bp, Homo sapiens
gttgaagggaatattaattcccttcattgacagtggtccaatataataataattatttccaatagagtattcacagttgagaattccataggagacaataatgtttccttcattaaaaaaaagagggagggaggaaggaaggaaataaagaaaataaagagagaagaaagaaagaaagaaaagagaaagaagaaagaaagaaagagaaagaaaggaagaaagaaaagagaaagaagaaagaaagaaagagaaaggaagaaagaaagagaaagaaaggaaggaaggaagagaaagagaaaggaaggaaggaaggaaagagacagagaggagagagagagacagagaggagaaagaggcagagagacaagcagggagtcaaagagagaaggagaaagatagaaatagtaaaaaaa

SEQ ID NO: 164346 - DNA, 320 bp, Homo sapiens
atcagttaaaaaataaataaaagaaaaataaaaagtaaactaagaaaatggattggaggcaggaaaatgaaggtagagagcttataaggagcttgttctaatactgtaggggaaagatgatgaccttgagactaagaaggtcacagtggagaaggggaagaggggtgtggggttcagaggtgtttaggaggtagaatccgcctcaggcaaacttgactccgttcctaatgataggaataacaaagtgttcatttttatatattattgtttttggtttggtgctagcattcatttgttgcttcagtggctagggagaatgc

SEQ ID NO: 164347 - DNA, 592 bp, Homo sapiens
ccagtgaaacctgaggtggaaaataagaggctggggagatcaatgacctaaaacactaagtacaggaaaaacaggtagatcaaagtctgaatctttttacagtttttatggaattagaaaagacactgaaacaaaaaatactttaaaattctgttttggaatactaaggaagaaaatgaccacaaataacccttgggtccaattcggtttagtagaaggattaactttacattcagatttttaagaagtttgacatgttttctcaagtggttgagagtgttaagcatttctttgcgggggtgggggcagtaggcggggatggagtcttactgtttcccaggctggagtgcagtgccacaatctcggcattctgcagctttctacctcccgagttcaagcgattctgctgcctcagcctcccgaatagctgagattacaagcgcacgccaccacgcccgtctaattttttgtatatttagtagagacggggggtctcaccatgttcaccagcctgatcctgaactcctgacctcaggtgatctgacccttcttggcctcccaaagtgctggaataggcgtgagccgccacgcc

SEQ ID NO: 164348 - DNA, 503 bp, Homo sapiens
gaaagggagagagaagagccgggagtgcctgtgtattgatcccagaagctgagctggaagaaagagttggctagaggctcacggctgggcctccaggaccagcacaactttgtcggttcccctgcaaaggacaccccggatgcctccagccatgcaaaaagcattaattaagtaccttctgaatgcagatgttgggactgtttagtcaaggggtgtgaaggaagatgctggcatggcagagttgaagagaatgtcccggctctgccattgtctgtgtgacccatggccactcacccaaccccctctaagcctcagcgtccccgtccatcaaatgtgaggtacaattcacataccatgtaattcacccacgggaagtgtatgattcagtggtttcttatacagacttctgcagccattaccaccatcaactttacgacattttcatcagcccatagaagactaccactacagtccattagctgtgccccatgcctactccacct

SEQ ID NO: 164349 - DNA, 185 bp, Homo sapiens
aacagtggatgaggtggtccgtaaacatggaagaaggaaaccgctgagggtgagatgagttagagctaatgcagccagacccgagttcctgcagaggacccagagtccagggggctcaggaggggcatggggcagttcgaatgtccatgggagggatttccactctcacctggctcagccagatg

SEQ ID NO: 164350 - DNA, 204 bp, Homo sapiens
ctgtaatcacagctactcgggaggctgaggcaggagaatcacttgaacctgggaggcgtaggctgcagtaagccaagattgcaccattgcaccactccagcctgggcaacagagcaagactccatctcaaaacaaaaaacatccttttcttgactctccccaaaagctgccactccatttccttgctaaccccccctgccacaa

SEQ ID NO: 164351 - DNA, 868 bp, Homo sapiens
gagaaatttacttttttgcatacctaagttcatggcccataaaaatcatacctacgacacattgtcttaaaagtgcagtctgattcgccatagccaaaaccaaaaggcagagcaacccaagtacccactggcaggtcatagacaaacaatatgtggtctacacacacaatgaaatgttactcagctctgaagaggaagaacattctgacacgtgttacaatatggctaagcctggaagccattatgctaatgaaataagccagtccagtcacaaaaggataaatactgtgtggttctactgacatgtagtagccagaattgtctaattcatagagatggaaagtacaatgaaggttgctagagctaggaagaggggtaaaagggagttattatttaatgggtacagaatttcagttgcaagggcaggcacagtggctcacgcctgtaatcccagcactttgggaagccaaggtgggtgaatcacctgaggtcaggagttcaagaccagcctggccaacatggcaaaaccccgtctctactaaaaatacaaaaaattagccaggcttggtggtgggcacctgtagtcccagctactcgggaggctgaggcaggagaatggcgtgaccccgggaggcggagcttgcagtgagccgagatcgcgccgctgcactccggcctgggtgacaaagcgagactctgtctcaaaaaagaaaaaaaaattaactttttaaaagtgttttccacagcagcagcagatcagttttgaacccttgacactgtcaagtggtgaccagaattcaaggctaaagaacaagccaacaagcatgtaagtaggtgatagcagagagagaggatgggctggctgagg

SEQ ID NO: 164352 - DNA, 163 bp, Homo sapiens
ttaaccagctagtataaaaatagccaccaaaacaagtcaatcacccaccttaaatcagcccagtactcccatcttgagcggagaagcccattctgaatcacagtcaagacagtgatggaaaaacagctctctctgggtatcaaaaccacgctcgccccaaatc

SEQ ID NO: 164353 - DNA, 647 bp, Homo sapiens
ctcatttatagtgggagctaaacattgagtacacatggaaacaatgaggagaacaatagacaccaatgccttctggagggcagaaggtgggaggagggtaagggttaaaaaactacctgtcagttactgtgctcattacatatgtgatgaagtcatttgtacaccaaaccctattgacacgtaatttagccatgttacaaacctgcacttgttcaccctgaacctaaaataaaagttaaaaaaggaaaaataataacaaaggactacaccattaaaacatgtcttaaatttcttcctttatggagcttatcttctagctgaagcgtccatccaatttaattctctttaaggttcttacctctttaaaactgtttacccttttactgctgcgaattttcttcctcctgtccctctcctttccctctctcattgtccttaccaggaggctccctctccactttcccacctcttctgctcctcctcgctctctctgttacacagcaacatgtccaagcaacaaagagacaatagtatttcctttttggtccagtgactttgttgggccatagtaggatggcaaagaccccaacactccctttcataaatatgatctccccttgagccactttccagggaggaatgtgatc

SEQ ID NO: 164354 - DNA, 162 bp, Homo sapiens
tgctgggattacagacgtgagccaccgcgcccggcctcaacaagatattttgtcttgtcttgctcaacaagaagtgatggttcctgacagatgaacaagaggacaaaaagtagcaaaatgtgaaggtgttacagttctaacactcaaaagagaaaaagaaca

SEQ ID NO: 164355 - DNA, 463 bp, Homo sapiens
ctcccatagcgtttctcagtaccttttgtagcatttttcatactctaataatctgtaactcgtataatcttctcctttagaccaccctcaaataccttactttcagtcctcaaagcttagaacagtactctaagcactaacttaatggtggttgaggaaatgataaacaactattaaagaaatgaatgaataataaataggcctattcatgtactttatatttgcaaaaatctctctcaatctaaagtcatttcttaggtgacaatggtccacatgcaataccatccactgcaatatttatttaaaagggcctccattctaaagtaaccaccagaaaattcacatgttctagacggactgaggtcacaggttccaaatggagaacagggtgttagctgccctcactctagttaaagcatactgatgttctataataatctactggggtgccaatgacaatcac

SEQ ID NO: 164356 - DNA, 499 bp, Homo sapiens
cctcatccatgacacattacatttaatggtcctgtctccttaggctcttcttggctgtgacaatttctcagattcttcctgggttttgatgactttgacagttctgaggagtactagtcgggtattttgtagaatgcccctcaattttaacatttggctgacagtttttctgggatgaagacttttcactgtatacctttgaacaggttttttaaaaacatacttgaactatgttaatctataagctatttaaatgttgacgtaccttaatttaaaaggcgaactgtaggaattagaagaaaagggaggagaggaggggagggagaggaagaagggaagttggggaggagaaggagaaagagagagagaaagggggcaggggagcaggaggagcaggaggaggaggaggctacctggaggggctgggctgatcctgccttgggcccactctcccggcgacctcccggctcccagacctggctgagcccggcggccgcca

SEQ ID NO: 164357 - DNA, 499 bp, Homo sapiens
ccaggtttaagcaattctcctgcctcagactcccgaataggtgggactacaggcgcccaccaccacgcccggctaattttttgtatatttagtagagacgaggtttcaccgtgttagccaggatagtctcaatctcctgaccttgtgatctgcccgcctcagccttccaaagtactgggattacaggcgtgagccaccccccacggcctagtttggtctttttcaccatcatgcagtgagacatggtgtgcacaatccgcatgttttctggatagtcccttctgaaatgttcatttatgattttggctcttccagaggacatcacggtaaataatctcgtgcattttccaagtgtttccctcgtgtttcctgatcattgatcatgcgcattttcaactgtcctaaatattgccaaattgctgtccagagtggctatgactaatacatccctgccagtttgcctgggggcttctgtttccctaaatccttcccagcactc

SEQ ID NO: 164358 - DNA, 460 bp, Homo sapiens
caccttcctgattcaactcaccatctcttgcctcatcaaatgcaatggcctcctaacaggtctcttgtgctctgtcccctcatatctgattattttcaacacagcagctaaactgttcctttcaaatatgcctaatgttgccacacctctactcaaaaccctccaatgacttctgatctcattgaatgtcaataaaatgtccataagggccctttcgatcccatcttccactagtgtcccccttaatcagttagctaaagcttcactggttctgtttctcaaatatgccactcacaccttgcctcagggcctttgtacttgcagtaccaactcaccttctcagtgtagtcttgcctacatgagatcagtgtgctttcatctgcagcaccaagagtccttatctccctccccatcatctaacatactatgtatttttttaaagtaggtaatttgtcttact

SEQ ID NO: 164359 - DNA, 382 bp, Homo sapiens
  misc_feature (364)..(364): n is a, c, g, or t
gagaactctgggagttatctgctggattaaaaaacattgctcataaatacaataaactgcttatgtaattttgtaatttcaggatttatcgcccaagagttgcttgtaggtgagtacatcaaaccttggtaactttgtgagtctgttttaattccactaactttagggttttgtaacgaagtcacttactgaaaagccttctcttgcttctggtaactatgcctttttggccgatactatctgacacaaatcttctgctctagattgcattatatagagggatcagatgcatagctgaaattcttggaaatgtcttacatttataatgctttcagaaagttcaaatgttggaagatagggggancctgctgtcgtcaccgga

SEQ ID NO: 164360 - DNA, 389 bp, Homo sapiens
gagaactctgggagttatctgctggattaaaaaacattgctcataaatacaataaactgcttatgtaattttgtaatttcaggatttatcgcccaagagttgcttgtaggtgagtacatcaaaccttggtaactttgtgagtctgttttaattccactaactttagggttttgtaacgaagtcacttactgaaaagccttctcttgcttctggtaactatgcctttttggccgatactatctgacacaaatcttctgctctagattgcattatatagagggatcagatgcatagctgaaattcttggaaatgtcttacatttataatgctttcagaaagttcaaatgttggaagatagaggacaacactttataagttattcttcagcc

SEQ ID NO: 164361 - DNA, 459 bp, Homo sapiens
atttcccaagagctttatgaggtggatactatattatttccatttatagagtaacacatgtgacttgcccactaagctacacagacaccagggcaacctctaggaatccagggtttaatttgattttaaaataaaaaccaaattattaaaataaaaacaaaagtttaaaaaagtactaagcaaagccatcaatgaccacacattgcaagtgagacagacatcataacttgtcccagacaagttacaaaacaaacaaaacagcaacaacaaccattacagggaaaataccagaaatcagagtttgatataatagcaaaacatccaattttcaacaaaaaaggaattataagagatttaaaaaataggaaagtgtgacccacactcaggaaataaagcagttaatcaaaactattttttaatgcattcagatgttggatttagcagacaaatgctagagtt

SEQ ID NO: 164362 - DNA, 476 bp, Homo sapiens
atgtaaagatcttttaggctacaatatatttgaccaggaaagaaagcttgtcttctattcaacatttggttaatagttatttacatagtttttttttttgctatagtagaataaataatcaggctcaacctgaataataaaaacttactaatgtcttacaaatactagatcaagatgaaaattatacctatccttacatattattccaccttctactttattatcagaagagaattaattggtagctagtgttctcctcttacagacaaatatagcatctatttttcatgcttctttcttgaggacataacttaaaatttgaaactgaacatttggtctgtgcaaactttatttgtagaaatatttccatggtcaaaatgaaattttcaactttaagaagctgaggcaggaagatcacttaagcccaggagtttgagaccagcctgggcaacatagtgagaccctatgtctacaaa

SEQ ID NO: 164363 - DNA, 331 bp, Homo sapiens
cttccatctagcagctgagtgtaattcacaagggagggctagagacaaggtgtagctaatctttgttggagcagccacatacaatatcatttataacactttgaaactcttagaaaaattcaagtatgaaactctgatccctttccattttcacaataagaaaataaaaaaaaaagggcatacaccaggaactaagcaacccatttgtgattcaaatgaggcataaaataaagaaaaacagaaaaatattgtattgtttcagatttcaactcccatctctaatttaaatttctactcattaagcacaaaacctatatttcttacccatgca

SEQ ID NO: 164364 - DNA, 564 bp, Homo sapiens
atcccaaagtatctacacagattccaccctcgcgttcttcctctgattctgggcctggcctgcccacatctcctctgaggccttcctccatcagtttgcccatctttcccctcaagagtgggaacacgcatagccgccctcccacctcccatccattctttcaccctcactgccaactccaaaaagcagctggtcacagaccccactggctcatggcctcgcctggctgatctttccttttcaaccctcttcaccggctgctttccctcccactacaccgtggtgcctgcagcctacttctcattctctcctcctccgtcctagacaatcttgtccaatctcaaggctttcaccagcacctgtatgctgataacgcccacttatttccatcctgaccttttccctaaatgtcaggatctttagtaaacttcctagagacaattttatctccatggtccaagggatttacatgcaatacatttaaatccaaagggttcctctttccccactcagcttgctcttcctcctactttccctatctcatcacacaagctagatagcctc

SEQ ID NO: 164365 - DNA, 594 bp, Homo sapiens
tgttctctatagttaaaggggcctggatttggacccagaagaatctctgttgtggttctaattctgccactagcaatgcaaacttaggtaattcatttaacgtctctaaacatgattgccagctgcaaactagggaccatatttgactggctataaaaactaaaaaatagtggcctggcacagaggttcacacctgtaatcccagcactttgggaggctagggcaggtggattgcttgaacccaggagtttgagaccagcctgggcaacatggtaaagccccatctctagaaaaaaaaatataaaaattagctgggcatggtggcatgcacctgtagtcccaactacttgggagactagggtggaaggatcgcttgaacccagaaggtggagatggcagtgagctgagatcacaccactacagtgaagcctgggtgacagaagtgaaactcttgtctcaaaaaaaattaaaaaatataatttgaagccagtcatggtggtgcacacctgtagttccagcaactcaagagactgaggcaggaggattgcttgaacctgggaggcagaagttgcagtaagccaagatggtgcactc

SEQ ID NO: 164366 - DNA, 595 bp, Homo sapiens
ttttactgtatatgttccagtacctggagggtcctcctaattcaactatagttgcttgtttatatctattttgcagacagggactcaggctaatattttgtttaagaaaagtgttctctggtaaaaaaaaaaaaaggtcataaaacattaagaagtaagatagaaggaaggaaagaaactgcaaatttatcctactatataaaccatttcacttgataatttttttcacttagaaacatttttaaaatctttacaaaattataaaaataaaatttaaaaaataaaaatttggggtccagattggtggaaatatatatctagcctacaatatctcacaaatgggttactgacaaagctgggactaccaccagctattctaaccactactcacatcaccccaggtctcctatgcagtttcttcactaatttccactttcttttccttctctgctggccccaacacgtaattaaaataatcagtcaaggttagtacaccttaattacttataacatccatggtctaacaacgctgacatcttccttggcagtgttagccaagaacatctgagaacctcagcctccacagtaaacatag

SEQ ID NO: 164367 - DNA, 159 bp, Homo sapiens
agagggagggcctaaactggactgagctgtccctagctgtgacaagactcccagccttgttgagacagagtatgtaaagtgcagcagctatattttttgcatatggaattttggaatgaatgatcttttaagatattttaaaagtttgttttctatgat

SEQ ID NO: 164368 - DNA, 620 bp, Homo sapiens
tgcttatactgatccttgaatttttaacttcaaagtgtatatagtaaatctggtttctcttcatttctttgcatgcatctatcagcctagtgatttaaggaaacatcgtagaaaggtaaattgtttagtaatttaacatatctttgtatctccataatgtattgaagagtacctatcatattttccataaatgtagcattatgtagttgtataataatgaatggttggcgttttaatggaagtgtttaaagtgacctagcaccttactgacaattgttctattggaaattggtcattagcggttttcacagaacactgggacaaatgtaacagcttgccattctctcaccttttcagccttctgatcattacatgcttattcatagatgtagtagttttaaaaataagaaattactagtgcaaagctatagaatgtagatgcggggggacccattttcataataatcacagctagcattgggctcttgctgtatgccaggcactgtgctgagtgctttcccagtctggtataggctgagtgtccctgatctgagatgcttagggccagaggtatttcagatttcagatttgtttaaattttgaaatatttgcattacact

SEQ ID NO: 164369 - DNA, 327 bp, Homo sapiens
cccggactggataaataattagacctcttagttcctcattttcctcatctgtcacatgggataattatggtgcccacgcccaggcatgtcatgaggatgaatggagttaatgtttataaagagtttagggcaggacctggatgtgaagttcattcacactgggccatcttttcctccagaaccagaggggtcaggactgacctgggcacatttatggatccaactcaggccactgtgagggcttctctgtgtccacctgccttggcccagtactcacagggacacccccaaggtcatgtccatgttctcgttcacctccggcctctg

SEQ ID NO: 164370 - DNA, 106 bp, Homo sapiens
ccggaaagtagatgctgggtacagaaacattaatggttgaagtatatgataatgtttcttcaactcaaatctaatgtttccaattaaagaataaaaagatgttgct

SEQ ID NO: 164371 - DNA, 298 bp, Homo sapiens
ctagaatgtcccccacaatgtctccacttgcccagctctgtcctctgtgtccagctttgaggctactttctgcagtcaccactattatcccaccccatgtagttctctgtccccgacctgcatgtaacctgtttccctcctccggccgctctcagccgctccttcatgcctccttcctgggctccctttggtacttgtgtgtgcaccgccttctcgcctccaagtctgcagttcctggagcattgagtcatcctgttaccattgcttctgactcgaaggacacggccccttggggctg

SEQ ID NO: 164372 - DNA, 379 bp, Homo sapiens
actacatacttccgcatctctattgtgcatggtaaatactgtattctcaaattcctcaaggcattatagtttgtttgcagctcagccatttggaatttcatcataaattattactcaaaaaagcctggatcttgaaaataaaaaatatactatccttctaagtattaagaactgaaactatctatgcctgcccaacttactctgcacatgaacatgaatattccaggacactgttgcccaggaagatggagttccaaaggccttttattgtatatttcagggactcctagaagtactcaaaaagtaaccatagataactcaaacaggttcaccaataatccgaggcctgctttgaacggaagtatgtagtctgctaccg

SEQ ID NO: 164373 - DNA, 434 bp, Homo sapiens
aaaataagacggtaatatctgataaaattgaaacatgcatgcactatgacccagcaacagcactcctgggtatacatctaaagcagagccaaggcatgttgatgggcaggaagtgagttacagggatacatgagacatcagcaatccctcagtccttagggcaactgagaaggtcttagggcagccagagtccctgaaccagtctcctccaaacttgagcagccttatctatttatcccagtgagctgtacaaatattatcattttctgcaggtgccatcctatgaaaaatattcagaaaccctgtgctggagcagcactatccaatagaacttcccacagtgacaggaactttccatatgtatatcatccagtacaataactactagccacatgtagctattgagcacttaaaatgtggctaatgcaaccaaa

SEQ ID NO: 164374 - DNA, 506 bp, Homo sapiens
agacaggtgcttggagcagtttggggatgacaaaagtactaagatgacgtctcccagcctctaactgctcatgtgtcttgtggctgtcccagggcactgagggctgactgggcaccagcgtcatgtggaatagtttgggaagtaggaaagagacatgctggcctgagaggtccagatggacaactatatatttctgagggggagcactgacatctggagttgagtccaggccactggatgatgaagaccttacttcctctggggactgagaagttttcatgattcactgggaactggagatctctgcggtaagacagtgcctaaaggttcccctgccaacagctgatgcagcccttcactgtccctctcccactgccctataggccctggctgttccctacagtccctttggcagagcgcaaaaatggccctacttatctcgctcatctccacccagccccactgcactgtgcctgtcagtcctcccgtctagggagggagtctat

SEQ ID NO: 164375 - DNA, 378 bp, Homo sapiens
ttgaatgaatgctgaaccagccttgaatacctgggataaatcccacttggtgtataattctaacatccctgccatatctgactctggttctgatacttgctctttctcgtcaaactgttttttcttgcctttaatatgtcttgtaatttcttttcttgataactggacatgacacacaagttaagaggaactgctgcaaacaggcctttagtaatgtggtgataaaatatggagggagaggaagggttctatagtcctaggagggggtctcaatcttttagtgagcttgtaccactgaactgtgaacttcacacatgcttctcaggcccccctgacccccttgcacaggacaagatggctagagtgtattggagttgg

SEQ ID NO: 164376 - DNA, 330 bp, Homo sapiens
ttgaatgaatgctgaaccagccttgaatacctgggataaatcccacttggtgtataattctaacatccctgccatatctgactctggttctgatacttgctctttctcgtcaaactgttttttcttgcctttaatatgtcttgtaatttcttttcttgataactggacatgacacacaagttaagaggaactgctgcaaacaggcctttagtaatgtggtgataaaatatggagggagaggaagggttctataccaagtgggatttatcccaggtattcaaggctggttcagcattcattcaaaagtcaattaaggtagtccaaaggcag

SEQ ID NO: 164377 - DNA, 451 bp, Homo sapiens
tttatagatgactgagaccctgcagaatgtgcctttggggagtgtacctttgagaattcccatgcttccatagggtggggccactttccttaggcagtgagtctctaagccttgttctccagaaagggatgggaatgactcaggagattaaacacttttgccttcctgattgttttgtcaatacaatacagtggttttatgggaatacccgagtagtgtgattatcagtttgagctgatagggatcttcttgatgagtcctatggtgctcactgggtgaaccaaggctctctgtggggaacgcaccaagtgcctggacaaaccacagtgaatactatccatgagctctttctcacatcacttccccattcttttttttttttttttttttttttatttaaaatggggtcgggcttggtgcgccaggtgggaggccagggaggctggcaaaa

SEQ ID NO: 164378 - DNA, 577 bp, Homo sapiens
ttaaggatcttactttttaaaatggaaggcatagaagtaggcaaatatgcaaggggagaaaaagaaaacaaaaatcaaaactaataaaaatctggacaataaagtaaatgcatcatcactcatatttccagaggaaatgctacatggagaagaaggtcagggataagtgcctaattagaatagacagaaaggaaaagaaaaatagagaactaacaaaaactgactatgctaagtgggactgaagagattctcttgtaatacattctaaaaatcttcctggaagtggtgtttctaataatgatttgaaggatagcagtaaatgttagtggtatagaacagaggtgtaatctgttggaaaagtgagagcaagaggtaatacaatttcttatggaataaacctttgcattggtctcttttggtagactaagaaaacgctcgaagataagaaaactgctttattcatgtctgaatacccaatactatttcatagggttgtctgggggtcaaattagttactatgtgtgaaagacctaatagtgagcttggcagagtagacacataataaatgtccctagat

SEQ ID NO: 164379 - DNA, 388 bp, Homo sapiens
gaagtagtcataggtataaattttagacacgaggtcttagagccaataaagttattggccagctaaatcaaaaatggtttgtcaaaactactgcagctctctagatccaatcatattgaagaaaaaaatagagataaaaaggacagggaacttacaataactacatgggacaaagtgagttggtaacaaaagcattaacctgaagataaactgtatcttacacagtaatatataactttccctttacaaatatatttctccttattattttggcaaaaatctaatatagaagcaacttttctaaaagcaacagcctaaaagcaacttcaattaagaacttgaaaatgtgcactctaaactacttggaaaagccagtaattcatactct

SEQ ID NO: 164380 - DNA, 422 bp, Homo sapiens
gtgaataatgctctttagcgccactcctggtaccaacgatcttaacctggcttccacagaaaacagaaatggaaacagaggcatctgtgctgtgattctgttagggagtgcagtcctagagggttggagggaggagtaggggagtgaaccagggaaggaaggagggcaatgcgatgatgttactgagctgagtgttaagtgggagtgattggttcatcctcaggaccctgcccctgagaagcacatactgcactcggaatcattccttccaggtaaggaaggggagaaaattgatccatgggccctgctttctccgtagtccaaaatttgtcccactggtcctaacttgctctaccttttgggttgcacgtgtgtgatatgggtgctgagaagagttccacagtgactccaacagttaaatt

SEQ ID NO: 164381 - DNA, 399 bp, Homo sapiens
agacaagatggtccatgcaaatgagctgacacaagtcatgtcgtgtgcaatcaagataggatcccagacatcttcagaatggtttacagtcacaagaaataaagttccaatgaagtggttggcatttggaagcacactgttttaaatatatctccctgaaggtatgtttatatattagtgcactggtcaatatctgacactatctgtcattttattgcaaaaggatatcagggcaattaataggagggatcttagcactactttagacaatctttaaagcctgggtaagattcattagctacccaagtggcatttctgacttcaaattgtagtatcatgcaagatttatactgtattaatggagcctggagtaactctacatttaattatttccattat

SEQ ID NO: 164382 - DNA, 339 bp, Homo sapiens
catggggtagatatttttggaagtttgggaatggtagcaagctgggtcaggagagataaagcccagatcaaatatgggcaggagaggctcagtgacaggaagaacttgaatttgggcagtagccagcaatgaccaggatgtgaggcatgaaggcttcaagtttctgaaaggaactctggtataaagtattttgtttgttttggtgctacctgacagattggtgaaaagctttaggaagcaatactactgcagataataaaattatggtggggctaggtgctgtggttcatgcctataatcccagcactttgggaggccaatgtgggaggatcacttgaa

SEQ ID NO: 164383 - DNA, 136 bp, Homo sapiens
cggctcctgatcaccggtccatcaggcgagttgtcagcttgttttataatcacacctatggatacctttgcaagacttcacgcctctactccaacaataaactactaaaacctctggaaacaatctagaacttgca

SEQ ID NO: 164384 - DNA, 396 bp, Homo sapiens
ctgcaacctccacctcctgggttcaaccgattgtcccgcctcagcctcccgagtagctggcactacaggcgtgtgccaccactcccagctaattttgtatttttagtagagacggagtttctccatgttggtcaggctggtcttgaactcccgacctcaggtgatccgcccaccttggcctcccaaagtgctgggattacaggcatgagccaccacacctggccattttagactttaaaaatttagatgagatggtctgttccaccagaggagtactctgcaaagagggaacaaccaagcacagaactgagtgataggagggactccagccatgcaaatatcctggggacaaatgtcaacttaccagacactaatactgagcaattatgtgacctc

SEQ ID NO: 164385 - DNA, 390 bp, Homo sapiens
gtgcctgcctcccttatcccatggtagccccagcatcatgtcacacccagtattctggcctctcacaattcctagagcacagcactaagctctcacccaccccagggcctttgcacatgcggttcccattgactggaccactcttcccctgactggtactttcttatcctctaggtctcaacttaagtataacctccttcaagagaccccactccctgggccattttttaaattatggtaaaatggacaaagcataaaatttaccattttaactacttttattttatttatttttttgagacagagtcttgctctgttgcctaggctgaagtgcagtggtgcgatctccactcactgcaacctttgcctccttggttcaagcaattctcc

SEQ ID NO: 164386 - DNA, 704 bp, Homo sapiens
agccagctccagcacaaaaatcatcatcaagacaatcatccctcatttcccatctcgcctcacaggtataaagcaccttcttatgcagtaatatctctgagcttcccagcagctcgccagagaagacaaattattcccattttccagataaggaaactgagactcagttggtgaactgcctgtctctggttataaactcaaaccaggtctccttacccagagcctctgctctgcgaccacttgtcccacacaaatcatgagccatgattcttacccatgccctccaggcagaccctctactcctgcaaggacccgtcctaccccatcagaaacataattgtggcaggttctattattgctcagcaaatgtttcttcagcctccatgagaggagtagacttcaactcattgatgtcaggcttgccacgtgacttgcttcagcctatagcatgagagcagaagtgacagcttctcagttcagaacggaggcttctgttgtccaccacagaagaacacgccctggctggctgccacccttcagcctgtgaatctggatgaagattcacgagccagacctgaacccaatccaaagcctagggccagccttgctggtgaagcctagctaaggtcagccaagctacctgctgactcgtgagcatgaaacaaatgtttgctgttaaaggccactgcgatgtaggagatgtt

SEQ ID NO: 164387 - DNA, 436 bp, Homo sapiens
  misc_feature (46)..(46): n is a, c, g, or t
  misc_feature (225)..(225): n is a, c, g, or t
actgtctacaaaaactgcactagtccattacccgtattaagtaaanctgttctctcgccagtattaaaggttaggataatttctgtacatgtaaaattattgcttttttgaaaaatatatttagcatgctcgttttaatccatttcctgcctttacaaaatttcacaattaaaaaaaaacctagtaaagcttttgcaaaaaatttcacagaacattttcattcanaccctgccgaattcggcacgagccagaaccggagtggggacgggagcgagaaccaaggtcggagctgaagggggcacaggagcctggatgagagccaagggaggagctgaaactgggactgaaagcggggcaggagctggagccgacaagggaaccgggcctgaagggggagcagaagctggcacaggcaccaagactgaggccgaaacag

SEQ ID NO: 164388 - DNA, 421 bp, Homo sapiens
gggtcagagccaccctgttcaggaaccagaggacagcctccctaggccctgaggcggagggcctgagatgtttcgaggacagttcagaaactcaaagagtctgtacggacctcccagggtgtctccaaacttaagacaggactgcacctgaggctatcacagaccgggtgggccaggcatggaaacagacagtccccacagcaaggaaatcctccccatattgccaggagcagcccataatcttgatcataaatttctgtaagtgatccatgctatgccagcgctcctgctgggcaagaccaggcctcaggttcccggagccagccaggtggccgtatggcagctgactcctgttctccacattctcccacttaacagagtataaacacaaatattccatttgaatttaccattttaattc

SEQ ID NO: 164389 - DNA, 347 bp, Homo sapiens
cacccttggctaatttttttattttatagagacagtctcactatgttgtccaggctggcctcaaactcccagactcaagccatcctcccacctctgcctcccaaagtactgggataagagatagtagccatcacacctggcggcccacaccctttgacctagcattacactaacaggagtttattctaagactcatacttgtgtgagaaaattcttcgttcactgcaaaatctggaagcaacctagaaactgcaccacagagaggttatgtggacagtctgtgcacgtaacagaaaaaaatgaatgaggaggctcgctatatactagaattaatgcctgtcaaaata

SEQ ID NO: 164390 - DNA, 418 bp, Homo sapiens
ataaaagtaatccacggtcaggaatatccacaaaatcagaagtaagcacttttccagcaagataaagtcacaataaaaaaaaatatatattcagtacaacataaaattaatttctgagtgcataattctgctatcaatttccctggtttatgtagtgacctctgagacgtgtggtcaggagaaggtgggctgggctaattacaaccgagggtgagttaacagagatatcaggggcagcctcagatgaggccaccaaagatatcaaatacatatgtcaccctttgttttgtattttaagtttgtatcagctcccatgccggaaatacaccccgtcaggagtttgcaatctggagtctgattgaggtgacaaacacggagcagctttgggacaggatttgtccaagactgggccaagcca

SEQ ID NO: 164391 - DNA, 261 bp, Homo sapiens
caaggagggtgtcaagcccttatctgatctggatttctaggccaaagttcagccttccagcctgagtgcatgcaggtcacttctgggtcccagatgtgggtaggtggggtatagccaagtggaaccccacagctcaggaatccatcagacctcaccatccactctgcagaaaagggacctctcccacctgccccagtgccacccagctcttccgatcgccacttccttctgcttgacccttcttgccgatacttccttcct

SEQ ID NO: 164392 - DNA, 328 bp, Homo sapiens
ggatgttttttctcgcagaaaggccaagtcattgtcaaatggtagactataaagatccccaaatcagtgactaacctctttatgatctcggggaaatattctgtggatttttttctccccactcaggaacaatgaatggtgacgatctttaagtcaatgatgtgaatgaatcacatgtggatgaactaaggctctttcctgattctcagtcctaatgagcagctcttcatttaacctgtgggattcgtttgtgctgccctgaaaaactatgaagttttggcttgaggttgttgagatcctaaggaaatatcagccaaataagtcattt

SEQ ID NO: 164393 - DNA, 363 bp, Homo sapiens
gcgaatggctccgtgggtgagagagccgggagggctcgcagaacgatgaggacgtcccgtgctgtaagagggacagtgggcagagttaaggtaaggctgggaaggctgacgccccctgtgcctggagagctaggtgtggaggaaatggaccaaaagtcaggctggaagagggagcctcctggtgcagggcatcgggttccacctcagagcactcagaggcgaggatgggccacagagaaatagaaatagttttggaaaagaaaatatgaatgctttccctaagtcctagaccaagctgaggggaagcacctttctgtctgagaacaggaaaaggccagtattgccaggagccagtgagatgcc

SEQ ID NO: 164394 - DNA, 331 bp, Homo sapiens
cgagggtgaacacttctttggtgttcctctgtgctagccagcgtcctgagcgcttcccacacatgagcaacatgtggggtggttactatctcaattccactggtgagctagggaaactggggcacagggaggttaagtaccttccccaaggttgcccagctcctaggtgggagagctgggcagtctggctccagagtcctgctcttacccactgaggaagacgcctaccgcgccagctgtctacctcacgttcacacagtcaccctgtggacagaatccacgcacacctctccagtcacccctcacccacgctgtcactcatcctcacagc

SEQ ID NO: 164395 - DNA, 579 bp, Homo sapiens
ttattgtggtgttagcttctttgttcagttacaccgacagctgagttttctatttggggccatagttttggggtcatgattcctggagtagaaaaaaaacaacataggagctcactcagaaggatccctgggtaaatgccatcctttcctgggccccagtttcctcacgtgttcagggggaaaagaaggtggtggtgaaatgccccccaccagctccaaagtcctgtggttctgaggctggaatattctgcaaaaggacatttgcacaccacccttccactgcccccgccccagtgtcgtgtccaggtccagttctaccagccacagatgtgagcatgtctggaacctgtctacctgtctcattcattccatgacctctgatttttgaggtcagtaattctgcagcctccctcacctttctggtttaaagcaacctcctctctcaggaagttgtttgaaatcaatttaattcctttatatcccacatgacagctacgactgccactgtttagttgatgttggcgtcgggtttggggcttacttggcttttgtgtttgcttctaacctgcagaaagagtc

SEQ ID NO: 164396 - DNA, 821 bp, Homo sapiens
gactgttcatgaacttgggtacagggctattgacagagtatcgtgctgggaaaagaaagatcctaagctcatagtgtggggcagtcattttaaccccttgcctttgctatcgcccaagcaggttatacaaagcagagcacaccaaccgtgcccataaccccctcacagtctcctcatgccacatagtttctgagttattttcttctttgtgaatattctttaaatccattttcaactagacatgataacaatgagaactgggttaggaaaaatcattatgaattaaccatgttgaattagccctaagaaatgcctcttgccagaagagctacatttgttttgttgtttaccctcttccaaatcagcaatccttttaaagagaaaaatctactttagtaaaatttgggtggctacatgattactcacttacccatgtggttcctatggaaagtgccctcttcaatcacccagaaatattatgacaatggtcagaaaataggaccaatgaacaaagaagcaggagtccctgtgggttaaatgagccttgatatctttgctccagaaaacaccctcattgtagagcgtggtgtttgggggcatgaatacttgagttctgcttccaggggctcttgcctggttcccatcttttgacacactacatcttgaagcctcagttgtctctccgtcaatggcctctttctttttgagactactggggagggggctatcctaagttggcaatgtgtgataggtactttgggagatatgacagagaaacaagcaactttcttaacagtgctcccttgttaccctgggtcatg

SEQ ID NO: 164397 - DNA, 396 bp, Homo sapiens
aagaaattttatgggagaagtatgaggtatttaaaagtcatctgcctttgggaaagtgaatgctttaataatgaaagacttctttgtaatggctcagaagaggaagagtctaagcttttcttggtaatgttatatcatccatgctacgtcatcatttcagagcagagattctgcgctgtggagaggccagccgcggaggcaccgtgggggcatttgcctgtgtgtgttgtgcaccttttcttccattgtttcctgtgatctgccttcctcctctcctgccctggtttcctactgactgactctcatctcattgcttagttctatcagttacctggagctaaaaagtgtgctgacccctgatctaactgaatgcctttcctataatttttgactatt

SEQ ID NO: 164398 - DNA, 347 bp, Homo sapiens
aaaaaaagggggggcagcaatgggtaaacatgaaagaccttcacctaaccttgctctatgctggtttgtaaggagactttccggctcacaggcttctaaagtccaatggagtacatagggtaagatgattcttctcttatggcaaacgcctttctagatgggcaccggtcttggcctgcaggctgcttgcttaggggtatggggagagaaacattccctttctcatcctgcacataatgcaaccataaaaggttcagaagcttagtcactcttacagacttggaagtgtaaactcgatcctataaacaccagaatttttatttctacttcaaaaataaattgctttt

SEQ ID NO: 164399 - DNA, 404 bp, Homo sapiens
ctacttatcttggtataatcctccaccaacataggtgtgcacttccagcagaccgtattcagctaatctccaaattccaatccccaccaccaaacaactactcctctccttcttagacgttgttggatacttctgcctttggataccaggttttgccatcctaaccaaaccactctataaactcacaaaaggaaacttagctgaacccacagatcctaaatccttccctcgcccctccttttactctaaaaaaggccctagaggcaacccctactcaagcgcttcccgactcctcccaaccctccttcctctccacacagcaaaaacgcagggctgcgctgtaggaattcttactcaggaaccaggcctgtgaccagtagcctttgtattcaaacagcttaatc

SEQ ID NO: 164400 - DNA, 348 bp, Homo sapiens
cggatttctatacattgactcttgttggttataaaacagcagtccaacgacgtgtcaaacaatgagctggtttgatgggacgactgatgggagaagagcgcagtcttctcccatcaggaggtctatacccatccgacagtaactccttcccctccccctgaccattgttggcactttggaaaagagttgctttttttttttggacagctgatgggccagtccttcgtcccatcagggatttctatatatggatctcttgtgggttataaaaacagcagtccaacgacgtgtacacaatgacgctggtttgatgggagcaagagctgatgggagaagatgcggggtacc

SEQ ID NO: 164401 - DNA, 543 bp, Homo sapiens
acattatggtcctgttactactcacttattttctcatgattacaagttggagaagagctaaaagttctcaaaaaagcagtttttaataactgttgaactatttttgggtgtaattcaactatatgtatcagtaacaagttttgttcttattatttctcatctcttttagtcacatctgccttgtcaatgagaagaatgtttatgaaattaaaaagttcattttgttgaatcagctacaaaaatatctgaaccataaaaaaattccaaaaactatctcttaggagccaaagggtagcccttatagaattttccatggatagatttgcttacttaaagtatttggcaggctttgaaaacataacagaggtcaataatttgtgaccacagaagatctgtgtttagtttaaatctgtatgggcacataattaaggcagaaaattgaacacaaatggagatctagttcaaacccatttgtaaaaaatgagatggaatcagaattatcaaatcagaatgcacacatgatataggaacctcatgatgacc

SEQ ID NO: 164402 - DNA, 351 bp, Homo sapiens
atggggcagactgtgagcaggtgtatgggttctgcatcccgctccagccttatgcactgtggagctgaggaagagtctggaacctgtcaggacagttgtgaggtggtggggcccactttccagcagtcttatatgaggaccctggaaatgtgccttcagcactgctgggtttttatatcaggggccccatgagttcatagctgacctgacacccggactagtaagggctgtgccttgttcttgcctcccacttggtgaacagcatcttgaggtatctttcccatccttagaaaccaccccaagtattgtcaatagaaatgtggggtgtaattgatcacgccatgaactcat

SEQ ID NO: 164403 - DNA, 398 bp, Homo sapiens
ttacgctaggggacccagttctctctccatgttgggccagaccctttcttagccctcttttctcaggcaagccctcaacaaatatgtgttggattctaaagaggtaggaaagttggaagaagatggccagatgtttaattgacaaatacccttgaccatatagtttcacatgggcagatagcggtgagggcgtcaaacaaaaatccttcattgaaaacatattacacataggtatcagggatatgaagatgactagggcacagtcctcactcttaaagagctcaaagtgtaattccaaccacttctccctatcctttgctcctcttttaaatggggactaatgataccttccatacctgctttacaaggttgtgtgaggctcagcatcttagagctaa

SEQ ID NO: 164404 - DNA, 409 bp, Homo sapiens
  misc_feature (16)..(16): n is a, c, g, or t
  misc_feature (20)..(20): n is a, c, g, or t
  misc_feature (23)..(24): n is a, c, g, or t
ctgactctagaggagncccnccnntccccgggtaccggggcagtctaaacattgcagccttctgagacaggcacccaggaagaccaggcaagagtacagtcatgtactcactgtcagtaaacattaggctttcacaaagtccaggcagacttcagaagacgtggatgaagtccttagtgttagctctcctggggcatttctctccacctagtgttgttagtgccctttggattgggtgagggaggggtggaggaggtgaggaaggaaagtgtcgagaaaggcaggcgcccactgactagagtagggaagtagctggcactttgggaggccgaggcgggtggatcacctgaggtcaggggttcaagaccagcctggccacatggcaaaaccccgtctctactaaaaaata

SEQ ID NO: 164405 - DNA, 570 bp, Homo sapiens
gcgtgctgactctagaggtatcccccaagctagttatacagactcaggcggttgaaaaggctttcctgaagaaatgagatgtttgttgaggttaagaggagagaagtagatgttagctggtgggggcagagagtgggtgaacgggcttaggaagaggagagcctttcatccgaaggaaactgcacttgcaaaaatcttaaggcttgcaacagtgagcagcaaatgcataagaagaacctaagaaaggccagccaagcaggggagcaaagaaccattgagcaaagcagtgataacacaggtggcataggccaggcatggtggcttatgcctgtaatcccagccctttgggaggccgaggcaggcagaacacttgaggtcaggagttaaaagaccagcctggccaatatggtgaaaactcgtctctactaaaaccacaaaaattagccaggtgtggtggtggagtgtgtctgtaatcccagctactagggaggctcaggcaggagaattgcttgaagctgggaggcggaggttgtagatcgcacactggactccagcctgtgtgacggagca

SEQ ID NO: 164406 - DNA, 552 bp, Homo sapiens
agggagaaaaaaaaaggtgcctgtgtcggaaaagcctttaaaacgttcgtgtatctagccttcccacagcattattcacctttcagcctttcctctagtgtgagaattccctctacaggaagttttttcctaacccactttagagaccctgaactctctatgggaagaccttgaccaccatgactagaggtcttgttagatgaatttataactcataagttactgacacattcctcctttgtagatgccccttccctagtatgccgcataaacacaccttcctgattttgggtatatgtaggtattctaggcaagaacattctatatttcagggacaaagaaagcagaagtagcttaagtttttaaaagaagtacctccctatatctcttattacaacccaaatttcattgttaatatcttcctgccctcaggatttccttctttaactgatttgatccagatattgacagaagagtaagatgattgtcagagagtgtctaacaatcaggagatctgaagaacaaattattctaacttccttctggggaagc

SEQ ID NO: 164407 - DNA, 139 bp, Homo sapiens
tggagcctggcttcttgaccaggggatgttgaagtagcccaagtaagagacgatggcggttgggactgggtagcaggacagagggagtgggcagatcccactaactttcagaggtagtgctcatagggcactgatgagt

SEQ ID NO: 164408 - DNA, 104 bp, Homo sapiens
cagtttaaggtttccaagacacagaactttggaagagagttaagtaggattgctgtgagtggagttttgttttgtttgttttagtgtaaacttgttgaatagaa

SEQ ID NO: 164409 - DNA, 309 bp, Homo sapiens
tgacaattgcctaaaaggagcttccaagaaagattctataatattcttcttgtaagtctttcaaaatgaagatgctcttcaaagtagtgggtcttcaggatgaaaattactcctgagtccaagcatgatttgacttcatctttcaactctccatatcaatctcttaaaattctgtcctccggtcatttctacctagtctatatgtctatgtatgagagactagaaaactccaagatattgttacatcaacgtagcataatactggatacctacagagacgtgaaaaacaccagggtttctctttctgca

SEQ ID NO: 164410 - DNA, 146 bp, Homo sapiens
ctctagggtcaagcccattccatcacccgctggccaggtgggtggtcttagagccacagcgggggtgcaggctgcctttgggcacctggtgccccagccgtgggtgtgcctgtggggcgctgacccgaacgggaactccttccagt

SEQ ID NO: 164411 - DNA, 622 bp, Homo sapiens
gctatatcaaggtgtctggaaagtaccttttcagcactggcacaaggctgtgtttcggatgtttcagtccagccattgtcagaaaatgacttcccacgctcacgccacagataaaagcccctgctggggctgagaccactcaggagtcatcttgtaatttccactgccacctgctgcctaccacacgtgattaaatacgagtcacccaagatcccaaaacaagagctggggatagtaaaggacttttgatctgtctcatcccctcccgttctcagcagaccacggtagttagaagctcaggctgtgtggtcagacccaattgcaagctctggccctgccacttgttggctgtgtgatctcaggtaaactatttgacctctctgtgcctctcaccttctcaactgtgaagcagaacaccgtcgaagcttcgacggtgtctggaggtagaagtaatacctggaggaaaatgaaaaattttagaaccagttttctgcagcacaaactgccataaacaatgtatttgctataactgtccttggtttctaaatgcatagtacagtgattctttcataaaatggacgacaatgaaggcaaatggaaatgaaggtgctgctcaaacaga

SEQ ID NO: 164412 - DNA, 347 bp, Homo sapiens
cataagagatagcatcctcctcccatttttcttcagaaaaatctcttccaaatcaaggtaaaatttcccccaagtcctgggggaggtcagtgagcctcagagctaaactgatttgaaggcactggcaagaccacatgcctttggcttgtttctgaaaatccataaatgtgtgttcattcatcaaatcacctgcaattatgccttcttagtacatactcttttttttcagggttgcatttaaaaaaaaatctccttaatatgaataaaagacatattaaaattagacttacaaatgggatcacaaatataagttacttcttcatttggcctaacagctaagagaagcc

SEQ ID NO: 164413 - DNA, 550 bp, Homo sapiens
tgatgatcagcctgccctatggatttcagacttgcctcgtcacacctcgcaattaagccaattccgtgcaaaaaatctcgaattatacatctctcacgggttctgctgagaaccagggagttattcagtagttgttaagccaaagggcatcagaataaaataacacaaggtcaaatctcatctcttctccctgcgaccttcgtggctgcagttccttcagctataaagtggggatctcggtgttcggtgcacaggcatcctgtgaagggtaactgctctcaggagtgtgtacgttcactacacatcaggactgagtgatggcagctgctcttatactgctaggctattctgggccatgagcaaataaatgttcagacaaaaaatgcggctggtgttccctcaccattgcttgacatctaaagtttagggccttggagtgacctaatccggcttcccccagcttgctcccgcagtaggcaagagggcgcctgcgcacacacagacacgtggacgctgcaccccagcaggtgcaggacaccgaggcggccgc

SEQ ID NO: 164414 - DNA, 480 bp, Homo sapiens
ccataccaaatttggtccttgtctacttctccgtctcactctactatctgccttagttacttatactcttattcatttatcttcttttaattccactaacacattagtggtgttctcctcttcaccccttcacacatgctgctctgtctgtgagaatgctttctctgcgcctccagtccccgtctctttccttcatttacatggttatttctcatcctttgaatctcgcttcaaagtcatttactcacagaggccattcctgaaaaagttaattgcaagttaaacccccctgttttccttaagagcactgatgatatatttgtgtgtttactcaatgttagtttctcccgtcagactataagctccctgaaacttacctattttgtacaccactatattcttaagtctcattacagagcctggtatgtagtcagcatttaagtaaatatttgagggaattaaatgaaattttttttttaa

SEQ ID NO: 164415 - DNA, 493 bp, Homo sapiens
gttttgttttccccttggccattcccagcatgaggggctctgcccctgcaggtgaaggcttgagcttcctaggtgggactggaaactggatcttatttggagaataataagagatgaggaggaaacttcttaaaacccctgcgaacttactagtttcatgttgttttgaactgccacctactggtcaaacagtgggagcatttgacttggaatctgagccagtcacgctgcccaaaatagcaggaatccatgcaaaggatgaccccataagccccaaggatatattaagaagtagcatgttgacagctgacagcttcctgctaagtcatccacttttatttgcttcctccaagtggtatcttcaaatggtattatatcaaaaaagatttttacagagcaaccagccttggctaaatgcaattttcagacattctaaattccaaaggatcttggaaaatggtctcagaaacccagaatactttctaggcagtta

SEQ ID NO: 164416 - DNA, 763 bp, Homo sapiens
ctggaaattctgagtatgcctgggtcaaagaaatgtgtgattggcagtcgccattcagaattcaccaagctacaataaaactgctgcacttgagctcagaaaatgaaaactgtaataaggcagaatttgccaaaacacaaacagtgaaagctagtttccccataaacatttccaaaacagattaattctactaattattttcaaaagtccttcaatccaaggataatacatgtgtttctactgaaaacactcaagagtaatggcattgtcaccacaacacctccatctgacccctactgctgctcactccctgctcaagagacatcctgtccagctgaaggcttgtcccacaaggcatattattctccttccctacagagccagtgacacgattcttccaaagtatataaactctgcgtgttcatctctagcttcttaacctgcatggacataactatttcaacatgtactactatccctctgcctttttatgtagaaaaatttatttctaatcctctcctacagtgtgtgaccttaaaccttcccagctcactccagcttctctccaactggcatgccagtagcagaggctctctggaggttgagaatttacctctcagatatctgatcctaccaaattgggtacagattttttttttttttttgagacagtctcactctgtcgcccaggttggaatgcaatgacgcgatctcggctcactgcaacctccgcctcctgggttcaagcgattctactgcctca

SEQ ID NO: 164417 - DNA, 381 bp, Homo sapiens
aatgtgtccactcctgatgagggaccgtgagcctttccaggcgtttgctgttatgaactgtcctcctgtcggtgattcttgggtgtctcttggacacatgcaaggcctgtgtgcagcccaacctaaatgtggccccaggtcggcccccaagagccagttggtgctggtctccaggaggccaggagcatgagccagaaagagcactggccatgccacctcggccctctggcccagctgacctcgctttttggtagcagtgctctcccactgaaggaagtatttgttggcctctctctggctcaggctcgtaggtggttttcaccactatttgatgagccctgttagggaacacgtagaccaagaccagaacttgcacatttc

SEQ ID NO: 164418 - DNA, 466 bp, Homo sapiens
cgaaccactggcaacagagtgagacatggtctctaataaaaagtaaaaactaaaaaagatttttaaaaatccattgttccatttcatacagacctttacccatgcatgattttggaatataatacattggtcatttggaagataatggttcaatgagttatgtggatcttctaaatgttgacccatttcattaggcaatttaaaaattcattaatatggctgggagtggtggctcacacctataatcccagcactatgggaggccaaggtgggtggatcacttgaggtcaggagtttgagaccagcgtggccaacatggggaaaccccgcctctactttaaaaaaaaaaaaattagccaggcatggtggtgcgtgcctgtgatccttgctgcttgggaggctgaggcacgagaatggcttgaacccgagaggcggatgttgcagtgtgcttccggggtaccgagct

SEQ ID NO: 164419 - DNA, 218 bp, Homo sapiens
gaacccctccctaagggacgatgattaggtcctggctatgcttatctatatccagaattaaccttatttgccttaccaaaaagagcacattgaatcagaattcctagatacaattgaagtgagcttgaggaagttctgggagtggtgtgaagcagagggaagtatcgtatcgtatcgtatcgtatcgtatcgtatcgtatcgtatcgtatcgtatcgt

SEQ ID NO: 164420 - DNA, 523 bp, Homo sapiens
ggactggtgttatactccatcagtatcaacagcacggcagagacaaggacaagggacatttgtgggcgctgactgcaccctgcctgaactgtcatgggcggaagccccccagctccaagctcggagctgcagttgtgcccattttgcaggtggggacaagtaaggtaacttgcccaagaacagagcagatgagatatttcggccgggcctagagctgcccaggtgacctcacctgccacctgcagtggacttggtgagcctcggtcgcgtggcggcctgcggggctggctgagtgcgccttgcccagcaggcagagcctcctggcggggcgggcgcggttccagcggaggcggcctccaggctgctgatccccatcccggtttcctcccacgtctccttgactgaaggagggaagagcatagataattcagctccttccagagcaaacaatggaaatgtcggagagcaacgattggaacagaactttttgctcaggtcataattgatgtatttagggtgaggc

SEQ ID NO: 164421 - DNA, 529 bp, Homo sapiens
actgcaacctccacctcccaggttcaactgattctcctgcctcagcctcccaagtagctgggactacaagcatgtgccaccacacccggctaatttttagtatttttagtagagacagggtttcgccatgttggccaggctagtcttgaactcttgaactcaggtaatcgcctgccttggcttcccaaagtgctgagattacaggcatgagccacccatgcccaaccaagtcttctgcttcttgactcatctctgcttccaggactctggtgggttttctcctgggaaccccttcattgcttcagtgattgcttgtccatgtgagctcagggtggccattttacattgtactctggtcatgccattgtcctgctcactggcctttaatggcttcctgtcattttcagaatgaggtccacagtcgtagccagcacagccacggggcccttgccctgcctcctgccaccctctgccccagccaggtcagctccttgcagctctctgtgtgctgtgctctactgtgcctttt

SEQ ID NO: 164422 - DNA, 161 bp, Homo sapiens
agctactttgaaatacacaatgtttggttgttagttatggtcactctattctgctatcgaatgatggaacttatgccttttatctaactgtaggctttcatgcgttaacctccctctcttcatctccccccacccacacccttcccagccaagtagtgtct

SEQ ID NO: 164423 - DNA, 358 bp, Homo sapiens
tatgctcgcttgatgtcctgacttggtcgaactctttaggtatccccccaggtatagtctaaactaattaaataatgataaacgataaacttagagaaatagcattccaactcatcacccaattcgaaatcttgctgatttgagacactgcacgcgtctgtcaaaacaatcgtgtctgagtaaacatcacatgctgggggatgtaatttacaggtggtggtgtgacatcatttaattggcaacgtattttgtttttagttgcttcataaaataatcaggtagagtcagtggcaccttagattctaggaaatatggtaaagatgacttctacgtgaatggcactgtgttagatcatgag

SEQ ID NO: 164424 - DNA, 470 bp, Homo sapiens
tagaatttgcagcagggcagcaagaaggccctgatgctggcagtcctgggaagcctgagtgtttctcacttgcctagtggcctggggacaatcactttctccttccgcaccttcagatcggggtctgagggttgagtccccagggctctgggtcagagacacaatgtcagagttgttccaaaggacagaaagtcccctctcctccaggcgcccaagcctcacccttaactcctctgggtcaggccacctcctgtcccctctgcctgctgaaggtgggaggagtagggaggaggggtggggtagcagaggagaagggccctggaggaatggcgagcccctccagggccagggtgtctctccccatccccgcccagagcacagcggactttctctagttcactcctcccagcggctgggtctccaggtgccttcctttaattaaaagtatttagccttccgctacactggcc

SEQ ID NO: 164425 - DNA, 479 bp, Homo sapiens
caagttttggacccaatgcctgttttcaattctcttgtgtagagagcactttttagcagaaaaagaatagatttgtggcctccctttgtgtgcggtcagtgccttgagaagagtgaactgtgctgccacctccggagccgtggagagcgcggggcttgggtagcagctaggacgatacaagttgggacaaggccaggtgcaatggctcacgcctgtaattccaacactttgggagaccgaggcagggggatcacctgaggtcaggagttcaagaccagcctggccaacatggtgaaaccccatctctaataaaacagaaaaattaactggacggggtggtggacgcctgtaatcccagctactcgggaggctgaggcaggagaatcacttgaacctgggaggcggaggctgcagtgagtggagatcagaccactgcacttcagcctaggtgacagagcgagactccgtctcaaaaaaaa

SEQ ID NO: 164426 - DNA, 624 bp, Homo sapiens
ctgagtcctagctgatttgatggacaccaggttgtctccagtttctcactgtaataaacaatgatgcagtgaacatcctgtgcacagtggctttcgaaggtagaagccaagaagtggacgtgatgtaaaaactttgtcaaattgccattacttttataattaaaaacaaacctaaaagaatatgtccaaaatgcttggggagaagcctctaactccttcccagcagatatgtactctgggcaaagccttcaagaacaagtacgaatttgccaaatggacaacgtgctgattctgggatactgtggcagaggagacagaatgctatcgcttttcaaacggcaagattttacatttaaactcacagagttatccacaaggcaagattctgtctctgtcatagctaggaacagctgaagagtctgcctcttgctccaacatggctgggtaccgtggctggataaccgttcccggtgcaggtaacaggtggacaatatcacaatatcactgcacccctctcgtgaaaaagaaagggaacacagtctagcactcaccagagaagcaggtttttcttcatcttccagaaatgtgttctaaaacaccagaaaaaaacatcagccaatcatc

SEQ ID NO: 164427 - DNA, 657 bp, Homo sapiens
ttacttggcacttagcttacacatttgccttgtactggcagtattgtacatttagcaatgctggcacaaactaagtgctcaaaaaatctacttatgattgtcttctatgcatattgtctagccaataacagtgtacgatcatacacaagaatgtataaaatgaaggaaacaggatggtgggattgtgtaaactttgagcaatataaacctagaacaataatttttatccaccacttactagtacttagaacaaagaaaaattattttacctcttggttacctcagttactcaactgtaaaatggggagaataccatgcaccttgcaagctcttgaggattaaatgagatattttaaaagcttttaatatacaacttgttgcctaagaagtaattattattttgattattttccaacgactagagcatctagaaaagtcaatgacttttcagaatgtctatgactaatggtaagtaaacaatcaggaggcatagcagccattgctttatcgtattctagagaaccaaagcacaaaatggtatctgttctcaaagtctggttattcatatgccaccaacatgatttctgccatatccacgtactgcaacttaatagctttctttaaatcaactcattttatgtaatcataatcattcta

SEQ ID NO: 164428 - DNA, 324 bp, Homo sapiens
gctgcaagctggaaagaagagggagcggggtcgtatgccgccagcagcagggagacccctcacaatggaccccatgtattgctctggcttctccgtgggcagaactgcatcctgtggtcctgcctgattcgatgatttgaaaaggcagaaacatggccgctgccattggcctggccagtgaaaacgggctccctgggaaattcacccagcctgacctgaagcagttgctgagaggcagaggagcagctccaggtgttttggcagggaagcagctggcagctgtgcgggagccccttgcctcccgtgttcttactgaggagtgtg

SEQ ID NO: 164429 - DNA, 452 bp, Homo sapiens
tatgtactgtagattgaggtctgcagctgtggttgtccaccactccagacagatgattctccttgtaaacagatgatgtaaacttacagtatcaacaaatacagtattgtaaatgtattttctcttcctataattttcttaataacattctctttcctgtagtttatttatcataagaatacagcacataatacatatgtaaaatacgtgataatccacagtttacattattggcaaggcttccagtcaacagtaggcttatttgtaagttttcttggagtcgaaagttatatgtggattttccagtgctcggggaactggcgccccaatccccgtgttgttcaaggctcaactgtatgcttgggagttcaagtacagtattgggtaacacagaaagggggggtaagagggaaaaaggcatttttatgatcttcaggtaaagacagcaagag

SEQ ID NO: 164430 - DNA, 645 bp, Homo sapiens
tgacagaaaaccttttaagtgctacctatctcttacagagtaaaatacaaaataagggatgtgtattatatttagtgtcagcctacttctccctttctcattttacagtattgtccaaaattgaactccttacagtttctaaacacacaagctgtttcccatttcagtgtctttgcacattctatttcctttacaaccctgttcctctccttttctttttcaaagccactttttagacaacacatatcaccgtcagcacctctaccattcagggcactcctgttccttcagttgactgctgtattttgaaatttgcaagtttatacttgttcctatgacaatatattgtaaactgtttagcaaatgcgtctcacctattggattatgagttccttgagagcagaggttgtcttaagctgaaatgcaagtgcaaaggcatgcagtagtcaggcaggtcaagttaaaagatgtaagctttacatgagtggtacggattaaagggggcagctgcatttggccccagccaattgttactacctgagaattttggcctaccgatgtcagaccttctgatttcaaagagaaaccggaaatttggatctctatgtgaaatatctagaactataaacattatctcaagtgatg

SEQ ID NO: 164431 - DNA, 519 bp, Homo sapiens
gcactcttctgtcctctgttcctctgccgctgttcccatctccatgacccccgatctcttctggtctggctctgtagacctctgtctccccctatctagtggtacccctcttctccccatttttgtctccactctaactctcccactagttgtcccagtcttcctccttcttggttctgtgtctcccacagacacacaatttccctctctagctaagtctctcacctctgcgtcttccccctgactcttcttttcctcctttgtctctccctctctcctcctccttttcctatctctgtctcttcccccttatctctctgattctccttggtctctctggctctgactttccctctatatccgcccccccgccccctcatatctctgtctcttcatctctctctggcccttgctccctcattccctccctctctctattcctcggctctctccggctccctctctcgcctcggatgacagcgctgcctcttttgttggctccgcagccaatcgcggccg

SEQ ID NO: 164432 - DNA, 230 bp, Homo sapiens
ctcactgcccaggggaccactcaacaccaccctccaatcagctgagcatcccaaatgcagtctccttactcctgagtgttaatgcctaactggccgctcctactcttccaggacattcccaaggctacatcctatgccatcaaaaccatttctatacctcaggggcctactccataaggctggacgtttcaccagctaacacattttaagttatcaacctgtttgctttt

SEQ ID NO: 164433 - DNA, 583 bp, Homo sapiens
cttacttggaacttttggtgttcttatatttgagatacgtctcttgtaaaaggcatatgtttgatttcacttttatctttttatctagtttgactaaccttgtctttaaattggagtagtgtgtttacatttaatgtaatttgggtataaattgagtatcttactctttgttttctacctatttggtgagaacaggggagtgagagaggaggggaaggccatggagggtgattgatgggcaggtccttgcacacaccctctggaagacaggcacactgaggcactgtcccacatgctgagggacccccacatactgaaggacctgggtgtttttctgccaactcctgtccctcattgttgaggctcctcctggtgtgtgaaccacctgatgcttctgtcccatccacaggaaggcggggaacaccccccaggcagagagacctgggcagccaccgccatgaatgagagctctctggctgtccccaggccagctatgctctgacggccaagcgtggtggtccttgcctgtgtccgagcgtggggttagttctggaacatttgatcacttctcctgctccactct

SEQ ID NO: 164434 - DNA, 454 bp, Homo sapiens
tcatgacagttagctaactttctacttgaaatcatttccttattgttcaagttctgccaatgcagtcactctcatgacagcccaaacactagctgcctcaaccccaccacatcccagcacccaagaaacagctctctctgcccttttattattatttttattttttgagatggagtctcgctctgtcacccaggctggagtgcagtggtgccatctcagctcactgtagcctccacctcccaaactcaagcgattctcccacctcagcctccggaatagctgggattacatgtgccagccaccatgcccagctaattttttttagtagagatgagatttcatcacgttggccaggttggtctcgaactcctgacctcaagcgatccacctgcctcggcctcccaaagtgctgggattacaggcgtgagccatggtgtccggcctctctctgccc

SEQ ID NO: 164435 - DNA, 535 bp, Homo sapiens
taaatatgggtgttctcagtttatagagggtatttaaaaccgtggtacgggttaaggttatctaaggagtgagcaaagaacagatctgaggattgagtcctggggcattcccagtgttttaagttccgagacatgggaaagaactcgctcagtacagtgaggagtagcagttgggaacagaggagaggagcatcttagtctgacttggccttgccccattatgcgttatcttccttttacccaaattttagcccaaagacattcttacaggtttatttcacttccataatgagggcacccctagtcagttctggaccacaggtcatttgtattaatatgtagtgaatcctgttttgactacactccttaaggggagtatagtctataggggtttacagtttcagatttgaaagaagtgtttagatctagtgaaatctcacttgaaatactggaattttctcaataatagtgacttttatcatttttagggttattatcccttttgagaatctagcataaggactcttacctgaaa

SEQ ID NO: 164436 - DNA, 462 bp, Homo sapiens
gctcagccttgaccctaaccccactgaggcagcgccacccccaccaggctcaaggtgccaccaccaggatggccattgctcaacagggtcggtcccattcagggccatgggtggttcccgacccttgaatgttcacggcctgactccgtaagccagatcacccacacccaacccctctgcaagcctcggggacagagggctcccgtataagactcctggccacggagaccctgtggatgccctcatgtggcctgggcagtcctccaggactcacctgtgcaccaagtctcagctaggatctgcactgcgttgggttgaaagaaccctctcttgcctggacctctgttacccctgcaaggtttcagggaaggtgtccttcttgggactgatttccaaggaaacctgcttcccagagaaaccattcatcactggtgggttaggtcggctcccttaggaaaccct

SEQ ID NO: 164437 - DNA, 213 bp, Homo sapiens
cctcactcttgaaggataagctagctgagtacacaattcgaggatgaaagctattttgtctcattaaaaaaaaatgttatttgctggtgtttaatataggttgagcatctttaagccaagaatctgaaatgctccaaaacctgaaacttatgtgtgcagacatgatgctcaaagaaaccctcactggaggattttggcttttttttttttttt

SEQ ID NO: 164438 - DNA, 459 bp, Homo sapiens
aatctttgcctaacccctggtcataaagatttcacatcaggctaaggtggggaggatcacttgagcccaagagttcaagattaacctgggcaacgcagtgagatcttgtctctacaaaaaaattaaaataaaaaagattccacatcaaggcacagtggtgtaagcctgtagtcccagtgcctaggaggctgaggtgagaggatcaccttagcccagtagttcaagccagcctggacaacacagaaagacactgtctttaaaaaagaaaaataaaaacaaagatttcacatcaatacctcgatgtcttggttactgaggctttataagtcttaaaatcaggcagtgttaatcctccaactttgttcatatttttttcaaagttgttttggctagcccagttcttctgaacttccatataaactttagaattagtcaatttctttgtccctaatccaggag

SEQ ID NO: 164439 - DNA, 259 bp, Homo sapiens
tagggacaatggatcagagaacagagattaacttgtacattatcttgtgaagggtctgtttaggtgtggttaccttcttggtcctacaggaggagaagaaaagcagttgttcgttttggtgggtctggatcttaggcagatgaaggctttgggatatggtggggggcatcaggagggcagggaggaaagtcagagagaccttgaggcttcttcattcagcatgtcaaaatgccatattttgggtatcactgagccccaa

SEQ ID NO: 164440 - DNA, 363 bp, Homo sapiens
tgtttattgtattcccctcttggagagacatgtggctattagcatagtaaaagctctgagaagtcctgctgcatggtgacctgtttagctctgtttaatccagtgttctctgaacatatctagccaaggaactaattttcccaagaagcacctacaaatgcagttggtgagacactgcccagatgaggattctgaaaaccccttttgcccacttgcctgccattgtgattgctgagtagggaagaagaaattaggaagtatcatctgcattacacagggaagctgctctcctagggttgccaaacagaaatggctgtagtggtgccagtgggtgctttgtagggaccagaagaaaaaggagga

SEQ ID NO: 164441 - DNA, 365 bp, Homo sapiens
aggcagaaaagcttcggtgccaaatgggggaggatgcagagccacttcgagtcccatcggaccactcaggccgttgcagctggagctgcctgcctgaggcaaagtaatgccaaagtgagcggtaggagcccgtcacagccaagcaaatggcaactggacagagttggccaagggctgccagacatgatagagcagggaaagaggcagagatgagggaataaggcagctgtcatttatttgggagggaagaggttggatcctgtaagggcaatagggtggaggggagggagagggctcagagggcctagggtcagattggaagcagcagaccccgaagcgtgctgatcctgaggcagagggtgcag

SEQ ID NO: 164442 - DNA, 220 bp, Homo sapiens
caggtaattatatgaacatgtcaactcatttaatgacagcatggagtttttaccagttatacgtaaatagtgtatttgtacaactggaagtgatttgcaacaactttgacttatcaagaatactaactttagcactgataaatattagtaaaatgttggatgggattcagaccacattggttggaataaaccagtgtaggtttcaggggaagcagagggt

SEQ ID NO: 164443 - DNA, 282 bp, Homo sapiens
gtaggtagttcctgacttctaggatagaatcttctctgacaggtaagatagacatgaatagacagaaaggaaaccaagcaaacacacgtaatacattgattccaactggcaactgaaggggaactcactggggaggtcctattccatgtagcagaactcacagatcctattccatggaatgctgaggttctgccactgcctgaatgaagaggcagctttgtggggcccaaacatcccagatatgcttaagaaaaaatattccaaaacacaatggactttgag

SEQ ID NO: 164444 - DNA, 455 bp, Homo sapiens
ggcaatttggatcatgatggtgatattagaggtggagaaaagtagttagctagattgtaaattttttttaacctttaattatagaaatttggatatgttttgaaaggagagctaacacaagatatgcggatgcactgaataaaagatgtgaggagtcaaggatgactccatagtattttggctcaagcatctggaaaaattgggagctaaaggaggtattggagaagaaaattaggagtttgattttggacatgttaagttgatgatgtgtattagacacccacctatagtattgagtaggcattggttatatgagtttggagttcatgtgggaggtttcatgattaatgatgtctcatgtggctccttcaacattcatgtcacaagagtacttgatgacttcactactgttcatggtgtgatgagagaaagttgagtagaatggaagagatgag

SEQ ID NO: 164445 - DNA, 354 bp, Homo sapiens
atttggagtagtttagtataccatagtggttaagggaaagcactccaagagccagctaaagcatgaattctggctctaccactttgtgaccttgggcaagttactcacttaacttgtgtctccatttcctcatctgtaaaatgggcaaaatagtataatttacttcgtaggtttttatattttagaagtctgttttcctaggaaatcgctgttgtaattttcctttttcttcctttttttttttaatgcttgataacagtctttagagttctactggattttggtgtgcttcagttagttgtaaggaaataatggaaattggaaattggatgaagttaactgcctgcagtagta

SEQ ID NO: 164446 - DNA, 275 bp, Homo sapiens
aaacacttaaaataatttgcttcaagaaaacataaaatgtttgaggtaaaggaaaagtagaataaaaataacgtattaagttcggtctgtatatactcttcaaaagtattgaaaattaagataaccagatattttccttttttatgtgtttactcatggtaatttcctccatccttctattgattatatgttacaatacctttatcctattaagattattacataaacattttaatgaaaaatattttttgaacaaaatttgtttagcatcattg

SEQ ID NO: 164447 - DNA, 370 bp, Homo sapiens
tctatagtttcaacagaactgatggttcatctaccttatgttacctgcccttttctgacacaatcactctgtccaagaaaatagaatacacagcttgaccaagccttcttgtgtgctcaatctggaatcgggagtggtggcagagaagtgtcccttcccccctaaagttgtgcattactaggagggagaaaaacgaatactatgtaggcaaaaataatcaatgtatactacctgaggataataagaattttttcaataagtgagaattctgccttctcattttttcttgtcacaaagtatgctttcacatagacataaaatgtaattgtagcaaagagaactacaatgtgcttgatacccattttcagag

SEQ ID NO: 164448 - DNA, 333 bp, Homo sapiens
gtaaagaactggaagttgcagaagcaccttccactttagttttggcctccgacaattctgtgctatagacacagcatcgtttctggcacgactttgtgggcattttgaagtacttaacatttcttcatgatttgcctgtgtgtgtgcgattttagttccacgtggtgacttgtgaacattatggatttaaagggaaaaaaaagaagtctgttcccctcatatcacaaacatagtaactgataggtaaaaatactgcatgattcaattttccacgtatgttcaattgcttgttgaaaaataaactaagatgtacatttttatcttttagacaat

SEQ ID NO: 164449 - DNA, 189 bp, Homo sapiens
ggttctcacagttcacagccttcaaaggcctctctgtccaaccaggtaaatctggcattacaatgaattataaaactaacaaatcactaagatcacccattcatttggtaccctgaccagaaacaatctgcccaaaatgaaagaggaaaaagtatcccctgagctacattcccatgaccctgcgaatta

SEQ ID NO: 164450 - DNA, 305 bp, Homo sapiens
aaaaatacaaaaattagctgggaatgatgatgcgggcctgtggtcccagctagtcaggaggctgaggtgggaggattgcttcagcctgggaggtcaaggcagcagcaagcccctgtctcaaaaaaaaaaaattttgtctctgccccttcaagggtgcttatgttcaataataattattacagtactttttagtataaaagcccttgggattctctagaatgagagacttgaaaagttcactagcagtttttgaactatgatgttaatagtgaataatttgggaaatgtgtaaaaaatgtataaag

SEQ ID NO: 164451 - DNA, 101 bp, Homo sapiens
ccagtggtttgcaccaacctagatggttaaaaaaaaagcaaagaaaacccagaggttgagggagggtagatccaaccagtttcctaagctgttccacattc

SEQ ID NO: 164452 - DNA, 158 bp, Homo sapiens
aactaaaagaatatgggggccatgaagaaaagccagtcaaaagtaactctataggttcattaactcaataaatacctacctagagtgattttgtgccatgcattctatgttcagtaaagacatggtgctaacaacacaattaaacaaaagtactatgc

SEQ ID NO: 164453 - DNA, 719 bp, Homo sapiens
ccagtgatttgcagttgtatcagtcacattagactgatttaattcatgcttagacactgtataatgtgggtgttcatgattggatgcctctattggttgggatacagtctcctactatcagtggctcttctttgctgtaggtcctcagagctctccccatttctccagagaatggaggttggggaggggtacaactcatcagacttgggagtaggcatttcacttccacccacattccactggccagaactcagttacatggctacatctgactgcctgggagcctgagaaatgcagtctagctgtgtgtcaagaggaaaaggaaatggtcggggaaccatattctgccacacaggttgattctcattttatataccacaaggattgtccaacttattgtgagctactaaaatagtctagtctgtgctatctcttgaaataactgtgtactttaagtaagtgggacttaaaattatttttattttttaatttatatttttatttatattttaattagaataaaggtacaagtatttgacccatattatataatagaagcattcaaaaaagggaaaaagggacaagaaattatttgaagaatggtcataaagttttgaggagagaatcaaatatgaataaattgagcacgagttattttactcaaacatatgaagagtgcacattatcacgataaaggggaaaatgggagactcctgtaa

SEQ ID NO: 164454 - DNA, 348 bp, Homo sapiens
tgatggctttgaattcaggggctcaatatttaacttcctctttttatgatatctttgttcgtcttttcttggtgacttccagttgacaacttctaactctgcttctctgtttgtttcccagtcctgtggcttgctttcatttgcctactattcagtatttgcatacctctggttttcatctttccttttctgtttggtcctgcaaaatggccaggcttgctaatgtaactccaggccctccacattagaaaacagaggggttttgtccattggtgattacttcaaatgttaaacatttctctttgttattgagtagaaatgtgtccctttatgatgtcctcatattgg

SEQ ID NO: 164455 - DNA, 914 bp, Homo sapiens
gggtgaaagctcatgaactcaaggagcacaacggacatatcacaggtattgactgggctcccaagagcgaccgcatcgtcacttgtggggcagaccacaatgcctatgtctggagtcagaaagatggtgtctgtaagccaaccctggtgatcctgagaattaactgtgcagctacttttgtgaagtagtccccactagggaacaaatttgctgtgggaagtggagcacgattcatttctgtttgttactttgagtctgaaaatgactggtgggtgagcaagcacattaaaaagccaattcgctccacagtcctcagcttggattgccatcccaacgacgttttgctggcagcaggatcatgtgacttcaaatgcagactgttttctgcctacattaaagaagtggatgacagctactcgggaggctgaggcaggagaatggcgtgagcccgggagagttcgtagtgagccgagatcgtgccactgcactccagcctgggtgacagagcgagactccgtctcaaaaaaaaaaaaaaaaaaaaagtggatgaaaagccagtcagtatgcactggggcagcaagatgccctttgggcagctgatgtcagagttaggtggcagtggcactggtggctgggtccacagggtcagcttctctgccagtgggagccgcctggcctgggtcagccacaacagcaccatgtctgttgctgatgcctcaaaaagtgtgcaggtctcacacagagttcctgctgctcctaagtgtttcatttgtctcagagaacagagtggtggctgctggccatgactgctgcccaacgctcttttcgatgaccgaggctgcctgaccttcatctccaggttggacgttccaaaacagagcatccaacgcaacatgtctgtcatgaatgctttt

SEQ ID NO: 164456 - DNA, 548 bp, Homo sapiens
gccaaatgagaattaaatgtattagctcctttaaaagatatatcaagaaaatacatcgccactggaggaatttcaagaatctgttccaatagttgcaaatatgtttgagtgggcagggtcatcactagtactgtctgaagtcatgacagcaacctgaatttctgctttttctacatgtagacttagggatatactttttacaatttttaaaacttattcactaataggaaacagactcatttaccatctgcttgaaatgtggtgattataatttatccatgaaaatattgaatgtttccttatcaacttgggagtcatcagggaggacccagaagtaaaggttaacagagagggaaaacagattgtctagattaattttgcatatactatgcagtatgaaaaacctcaacttacagtatttaattttttactcaatgtaaaaggaaaccctcaaaaataaaaaaagctaaaattttacatccacagataattaatgattttgttgtattgctcactttttttgtatactgtttaataaagttgagatc

SEQ ID NO: 164457 - DNA, 451 bp, Homo sapiens
ttataaatattgttcagttatttcagtactcatggaaagactgaacaaccaaaacgttgcctctgttggaagacctctgaggaatttatcacaggaataatcaagtgctttgcttttaagtctttgttctttatttgtatctactgcaagtttgttatttctttccttcaatatgtattaaacacctcgacctctaccatgcaccaggtaagctttgaggccaaaaccataaacacaacaaatgtggttgctgcccccacagtatttacagtctaggagatggagcagttgggggcaggagtacacatgaacgaaataattatacactgagtcattacaaactgtgttaagtgccatgaaggagaagcacagggtgactgaaagtgttcagtaggctcctgacttcgtgtggaggtctcagaagatttccctggggaaatgatgtttattc

SEQ ID NO: 164458 - DNA, 245 bp, Homo sapiens
agaaaacaaaaacaacaaaaaaaatcaactgacccagaaattactggtaatagaatcagtagaaaaagacatgaaaagttcttatatgattatgactatatccatatgttcaagaacctagaggaaaaactgaaaacatgttgagtgagataaggttaatataaaaaaagacccaaacaaaaattctagaaagggaaattctaaagtctgatactgaatgggataaaaggtagagaagacaggtt

SEQ ID NO: 164459 - DNA, 184 bp, Homo sapiens
taattgggactacaggcttgcaccaccacacccagctaatttttttttaagcaaggagtcctcacattgcccctagaagggatgtatccttgccatgcccattttacagctgaagaaactgaggctcagagaagcatgaaatcttgtgacagagcgagtaggtagagccaggcatccagcctgg

SEQ ID NO: 164460 - DNA, 631 bp, Homo sapiens
aagttgtcttgaagaatccttgctgctaactctggatcctgcttttcctatagtcagagggctccaaggtagaactctctaagtccctctcaatggcactctttgcctagaccaaactaatgaccaaacagtaatcaatctatcactgttgaagtcctggttttctcaaccaaattttaagtctttcccaggtatgtcagtcgagttgccatgaatcctcacctgtaggagtttctgggattcattttaaggaaactggaagaaaattaatgttttaatgtaaatgtttttaaaaccaagatcaccatagagttcacacaaaattttaggcagtgtttcaagaagcactcttatgtgttgttctttcagcccatgctccaggtcaccggtttttaggtaaacatgacatgacatgtacttgtaatatcagtgaaaggggcttttagtcgtctcagtatcttttttgcattcaggtattatagcgtttccaacaaattgagaaattacttatttggtgtaaaatgacgagagagctttagaatttaataaaatgtcaaaaatacaatttgatacccttaaaaattattcatagatctggctgctctgtactactggatgggtggaataggga

SEQ ID NO: 164461 - DNA, 321 bp, Homo sapiens
tcttctaattttttttcttttttagacagagttgctctgtcacccaggctgcagtatgcccagacacagtcacggtccactgcagctttaactttttgggttcaagtgatcctcctgcctgagtttcccaagtagctgggactacaggcacacactactacaccaggccgatttaaaaaatttttgtaaagacagggtttcgtcatgtcacccaggctggtcttgaactcctgagctcaagcaatcctcccaccttggcctccccaagtgttgggattacaggcataaaccaccatgcccaaccttcttcactgtctgcac

SEQ ID NO: 164462 - DNA, 495 bp, Homo sapiens
attaagaaaaatatctccacattttgatacatgttgctaaattgcatttctaaaaggttgtaccaatttactaccataaaagtggtgtgtgtgttgttcttagctcactttttcattattttaaaatcttacgtctttgctagtttggtatatgaaagtattaatttgctttatctggattttttattgcaaaaattcaagtttttttttaatgtttaatgttttagcttttgtgtataaagtttaataattgatattcaagaatgatttatttgctcacttaatcagtaattcaacatatgagtgcctgctctgtgccaggcactgtttatctaaaatctagggatttagctttgaattgaaagttctgcccctcaagaagcttatattctggtaatttaattgtactgatttgccctatctactctggtgtatttacacttttcccccaggtttgagtataaaagcttgtgctttttgtataatcagatatca

SEQ ID NO: 164463 - DNA, 420 bp, Homo sapiens
aggcttccccaggttgggagtcccctggaatctttcccaagcagtgatcacagttccctcatttcctacagtgcaacaaaataaatcctaagggataggtcatctggattgggtttgggaaataatgagaaggggctgggcacagtggctcacgtctgtaatcccagcactttgggaggccgaggtacacagatcacttgagtccaggagttcagagaccagcctggccaacatggcaaaaccccatctctacaaaaaatacaaaaattagctgggcgtggtttcacacacctgtaatcctagcttactctgatggctgaggcatgagaatcgcttgaatccaggaggtggaggttgcagtgagccgagatcatgccactgcactccagtctggatgatggagtgaaattctgtctcagg

SEQ ID NO: 164464 - DNA, 271 bp, Homo sapiens
atagtaaccaaagtcccaacaccagtaaatgggacaaacagacatcatgtgcctcctgacactgtgctctgagaaacacttctgtggaattcctgccaaaagtgcataacctgaatccaaccataaggacaccgaatatatgtaaattaagcagcattctacaaaataattatttactcttcaaaaatgtcaaggccctggaaacacaaagactgaagaactgttcagattaaaagagactgaagagtggccaggcgcagtggctcatgcc

SEQ ID NO: 164465 - DNA, 473 bp, Homo sapiens
tcttcacctcccggcccttcatattaaaatagtcatgctcatactttgaattccccaacatgccatgctattgcttgagttgcttctgcttcttctccttagaatgccctctctccaactacctgataaatgtcagcttcagttttcaacacttagctcagaatcatctccttcatgaagcctttcctaacatctctcaggcagaactgaccttttccttctccctgtctacactgtaccctacacatatatagatcataacctttaactgcaattatttttatatatgtttatttcctactaagcagagaattccctgtaggccctctcttattcatctttataaccccagtcctatacatgatagtatgtaacaggcattcaattaaattttccttaataaacaatgggctcccctccccctctactgactactctcacattggacctataagcccaagttccatttgagg

SEQ ID NO: 164466 - DNA, 123 bp, Homo sapiens
tctgccttagcttcccaaaatgctgggattataggcgtgagccaccacgcccgaccaaacttctctcttcaacattttgaatcaggcgtaaacaaaaagccctctttgtgtttggttcctcag

SEQ ID NO: 164467 - DNA, 222 bp, Homo sapiens
aaattgtaatatacaaactagaaagtagttctcagtgaaatgagccaactattttttaagaatattaaacttttataagaagagtctttcttgctgatttaaaaaaaaaggttcaaacaatgaaatcctgattactggagagctaactgttttggggtggagggcacgtctagtatagagcaaggaaaactatgttaaccaggacacagaagacccaggctc

SEQ ID NO: 164468 - DNA, 377 bp, Homo sapiens
attttctatattaaaaaaagttctatgaagtaccccaaattagaagaacttttgaatgttcatgaaaattgtcagataggatggaaacatgatttctttaggcttcaggcagtgaagtgtgtctatgatgtttaggggctcaatagtgctttcgtattctgtttatgagagaagactctgttctaccttataactgtgagtgaatgaagccatgtgaagtcttaggaagaggaacactattaataaaagcttctcggctggtgcagtggctcacacctgtaatcccagcactttgggaggctgaaatgggagtactgcttgagcccaggagtttgagaccagcctgggcaatgtagtgagacccctctggctccaca

SEQ ID NO: 164469 - DNA, 513 bp, Homo sapiens
atagatttttaacttgtctgtcaactccaattcattggcagcagctgcctggagcactggattgaggagtcccaggtgggatgggtgctcggtgggagagagctctagaactgctaagctacactgcacgggtgcgggagtggagagcggcaatgggtatgtgttgtatttgctgtccccacatgatgctttgccttgttcattgatcaattttgttaggacctagaatcagttgaaagacatgtatttaagtttgttccagaggaaacaataaatttatttccttgtctcttcctttctctggaaggtaaagttaagtttttgagcctatatttgagaaggtgtaataaactataaagtgaaatgaaatatttatggtttttgtatttgtgtctaatgcatgttttaacatgattgacacaatgcattttgtaggtatttttctggaaaagtcaatcttttagaaattgtttttcagatcttcaataaattttttctttaaattacaaaaaa

SEQ ID NO: 164470 - DNA, 409 bp, Homo sapiens
tgacctgaggtaaaaggctgtttaagatgaataatggcaatctgttcccaacttacagaaaaaaaaattaagttaatggaaagaattctctgaattttgctgaaatcctgctaccatttatctgctagcagacaagaaagagataaaagagtaatgtgataatctgtaaaggatactatgatttccatatgttctgctaattgaacaatttggaaaattactagtttgaagagtttacactgtgaaatcaaattacagacaaggtaaaacttataaaagtacataatttaagttctggtgagcttaggttattcaataaattacacatttcgatcttaccagaaagctaaagtggtttttaaaaaagcatggttcaaaaatgtttaataaactcaggaggctgaggtgg

SEQ ID NO: 164471 - DNA, 384 bp, Homo sapiens
gaagagctgtatctgccatggctgacatcatcagggcaagacacccactgggtggagagttgggcttatgcattttacccctgtcttgaagagaccatgcatgcctgcctctcctgggaccagtgatactggagacccccctctgggtccactcatgaccataagcttaggatgcggtgtgccttgcttcctatccacccaggtgaggcatcctggagaggatgcgtggggcgaagcttgtgtgcgcacatgaagcactggaactgggtgtcaccggcctgtttctgagctaccacctgactaagtgataagtgtctcatctacctgaccccgcagcccgggtttctcctccacctgccgacccatgccctcttggggagaatg

SEQ ID NO: 164472 - DNA, 357 bp, Homo sapiens
gagccactatgcctagccaagagagattttaataatggtgactggaaacagaagagattaatggaaaaatggacatataagaaagttagttaactaaggtatttgaaagtatgcaataaattttattcataagtattttgtggtcttagtgctaatggtttcttaaaattgtggctcatgatttcaatagaggtagaatcggcactaaatgaagttggaaaaattggtcatagatgagtttcatctcaatttcttagagactatgatatacataattcttgtcctcatttaactatctagaaggtaaaatagaaataaacataggtaactattattttaaaaacacatgacacctta

SEQ ID NO: 164473 - DNA, 323 bp, Homo sapiens
acacagtgcaagggaggaacttcccacaggctgaagcatcagctggaactcaacaaacgcacgcagccctcatcccctcaccccgcggcctgcctcgcttggggctgttgcaggtgctcagcactccagcccagcttttcagactcttgggctacagcttctgttccttttccttttctctctcttcccagtctgtccaaccaacatttttttttttttttttggtagagacagagtcttgctctgtgacccaggctgcagtgctggagggctgtggcacgatctcagctcaccgcaacctccgcctcatgagttcaagcaat

SEQ ID NO: 164474 - DNA, 191 bp, Homo sapiens
gaagttgagagccacatggctgacttgaccaagattaaacggctagtaagtaggaataagtactgaaacagaaactttacccaattgcagtccatatgttttctgggatcccggagttccctttcaacaatgtaaaatacaaacttaggtcaaaagttcccatgtctgagaagactcaagccaaatcagtt

SEQ ID NO: 164475 - DNA, 182 bp, Homo sapiens
tacagagttgtactgggaaaggaaggaataaaaagacacttaagaggttgcttaaaattttttttgagtttggttatcaggtctagactagaacattatttggcttctgtggttcagggtcaacaaaataacccaatattctataacaaaatagcctctatcttaatttcccttatccagtt

SEQ ID NO: 164476 - DNA, 403 bp, Homo sapiens
ggaaaatccccacacgaccaatttaaagctttacagcctgttttaggacagaattcatcagttctaaatcagatcctttgcaattctgacaaaattcacaaaccacctccactgttatgtaagatacatagagatagatggagagaggtagatatagatacagatagttactcccgttttgcacttaagtaaatggagttgtttcctgggcaaaaatacctatgagctgggcgcggtagctcaagcttgtaatcccagcactttaggaggccgaggcgggtggatcatgaggtcaggagtttgagaccagcctggccaacatggtgaaaccctgtctctactagaaatacaaaaaaaattactggggcgtggtggcacgcacctgtaatcccagctactcagg

SEQ ID NO: 164477 - DNA, 308 bp, Homo sapiens
gcagtagaaaatacctcagatgcaaaagagggaaagaagctaggagaactagaaatctggggccacccttcccaccatatatatacttcttcctcttggtcccctctctacaatcttcctatcccaatctctaacccatgtcaagaggtgaatgcagatgtaaaacttaggttaaggaagatgcatgtgggggaggtggaggtaggggtcaaggcttcttaaatatttctactgctcctcttgcctcactctgataagatcccaacagaggaatagtcaagaattccacagctcttacatagaaaaaa

SEQ ID NO: 164478 - DNA, 235 bp, Homo sapiens
caaaaaaaataataataataataataataaataattgcagaatgaaaggaaactttcacttttgtaaaatctctttcagcaaacttcccaaaactacagatctccaagaaaagattagaccctcaagtatttggtctaatttagagcataaaacaagctgaattccagtatgcagaaaaacaaagtataaagttgtaggcagcaattaattcagcagaatttttgtatttggttg

SEQ ID NO: 164479 - DNA, 452 bp, Homo sapiens
atttcagtgttgttttatactgaatttcttttattacaagtgtgtttgaatagcctatttcgtaagttcattgcccatgtggtatttcatttctatatttcctgttaatgctgttttcagtttttttctgagagtattttaaaaattatttcaaaatagcactttaatttcaaaataagtgtgtactcaatagagaaactttaaaaaaacacagaaaaagacaaaggaaatgtaattacttatgattccgttacccattcttacttgattgctgtcattttcactttgatgtgtgctgaggtctgaatgtttgtttcccctctgcaaatttttacattgaaccctaagcaccagtgtgatggttttaagagaggcacctttgggagatgattaggtcaccagggtagagccctcatgaatgggatgagtgcgcttataaaggaggcccccca

SEQ ID NO: 164480 - DNA, 435 bp, Homo sapiens
gaagggggtgggggttggggacagcatgggacatcctgcatatggtatctgagaacagcagtggagcctggggtccatgaccccctgaagcagtgttacagccagaaggaggtgggcaccactcattcaggagctgtgagcatcgactctggcaccagactgccttggttccaaaccccagcctcaccacttaccagctgtgggacacatagacttcttgttcttggttcctcatctataaaattaggataataataattgctagcttatgggttgttcagaggatttattcagttgatctaagtaaagtgtttagaatagggccagctcttacagaagctatgccagtgttagctttcactgttcactcattccgcaggtacctgctaggcagggtactgggaacacagccgagaaaaaggcccagtggcccta

SEQ ID NO: 164481 - DNA, 340 bp, Homo sapiens
agttcgtgatgtagcgtattcaaggctctcagaatcctaaaaggtcacagtccttttattcttgcctcttttcacttctttactgttcttattgatttatttgggcacataagaaaacacagtaggcaaagcccactacttctattgaaataaagtattctgcagtcaaaccacacaccataaagaaataattgcagtctgtatatattgctaatggacatctctcagcaattccctgtctcataagctttaaacacagacattagtataaatatgcagaaatccccattcgggcaaattactctgcatttctgaatggaaggaagattaaccatgtgct

SEQ ID NO: 164482 - DNA, 111 bp, Homo sapiens
ttacctgcctttaaggccacgtagggaagcagagaaatttagtgtctttttaagtttctcacctactattaggaaccctcctctctctctctccctccttccccagactct

SEQ ID NO: 164483 - DNA, 473 bp, Homo sapiens
cctctgaaactgtcatcgtaggacactgcatggatctgcttctctcgggcctctgagcctccatgtcctaccctgctgaaactttggtcccctgtctttggattgggcacctaggcctttggatgaggagataaggggggctccaggagtacacatgaacctctgaccatgctgccactgttgaggttgtacagaatgaaaagcagtagggcagcagcagcctcttagttttgcccagaccaaggtagcctttaatgcagaggtactgggttgatagctacatatgactgcctccgtggcgagagtcaggctccagaaatctgcaggctacagcctagcaggccacatttgaggcttcatcccagtttaaaaggcagatcttcccaagtgaaaggaagaaggaaggacactgcgaagtttctctcttttgatatctctgtatgaccaggtatctggcaggggaaagggtatag

SEQ ID NO: 164484 - DNA, 585 bp, Homo sapiens
ccgctaaggtctcgtaatatttatatgatatatattcttctaattcatagtcagcaaactttatctatgaagagctagatggtaaatgttttatgctatgtgagccacatatggcctatgtcacatgttattctttcttatttaaaaaaaaaaaactctttaaaaagtaaaaaccattcttagcttgagggccatacaaaacaggtctgggaccaaagttgggtgacctctcctctaactgtttcataattagccttgcctttgcggtcaacgtcaactttgctgaatgcacggtaaggataatttggtatttccacatagagatttgcacagggtctatgaatacaagaacagaggttctaaaaatacttgaactgggtcaggcctgtaatcccagcactttgggaggccaaagtgggcagatcacatgaagtcaggagttcgagactagcctggccaacatggggaaacccccatctctacaaaaatacaataattagctgggcatggtggtgcctgcctctagtcccagctactcaggaggctgaggcgcaggagaatcatttgaacccaggaagcagaggt

SEQ ID NO: 164485 - DNA, 649 bp, Homo sapiens
tcttggtcattatgcattattattttttatatattgctggatttgatttactaaaattttttcaaggatttttctctccatgtagttttctgtaatagtctttctctagttctggtgtcaggacctcatcaaatgagttgaggaatgtcttctcttctacttttttggaagagtttgtgtagaattggtattacgtcttccttaaagttttggtagaattcacagatgaaaccatctgagcagggagttttctttgtctgaaaatatgtaactgcagattcaattcctttagtaaatactgtaaaggcttattcaggcaactatttcttcttgagtaagttggtagttgtgtccttcaaggaatttgttcatcgtatctctgttttttttaatttattggcataaagttgtttataatatccacttcttatccttttaatgttttgggatctgtagcaataccccccttccatttttgatagtgctgatttgagccttctcacttctttttctgaactgtccagctataagtttatcaattttattcgtcttctcaaagaaccagtttttgttatctgagcatttagaactgtaaatttccctttaagtgatggtttaggtgaatttcatggattttgatatgttgtgt

SEQ ID NO: 164486 - DNA, 772 bp, Homo sapiens
cgagaccagcctgaccaacatggtgaaaccctgtctctactaaaaatacaaaattagctgggcgtggtggcgcaggtctgtaatcccagctacttaggaggctgaggcaggagaatcacttgaacccaggaggcgaaggttgaggtgagccgagatcatgccattgcactacaacctgggcaacaagagtgaaactccgtctcaaaaaaaaaaagattgattactcttattgttatgggttaggcatatttttactcttcagagctgggatgtgggatatgctggatccctcttatgctgaaactcagacgctgaacatagcatagctcctcagtcattaaattcttaattcccttattaaagtaagctgagaaagaaagatgaaaagcaaagtacacaaagtcttaatgcagttccttcaaaacttaacatacaaaataaagctgaatttccaatgtcaccaacttgccaaagcacaagtaaaattaaactaccattaaactgtattaagattaaggtccaatacgtatcggtcaatttcctaatttatgctatcgagttaaggaagatatttagaagacagaacattctgttctttcaactttaggacaaacaagaaacaaagattagtggttcttaaatgtaggcacttatgaatcacctggaaactaggtgaaagtttttttaaaaactgcacatacatggggcagaatgctctgtgtcctaatgcaattcagtacagcagtgctaatctctacaagcaccactttgt

SEQ ID NO: 164487 - DNA, 386 bp, Homo sapiens
aggctagtggcatgatcatgactcactacagcctcaacctaccagtatcaagtgattcttctgtctcagcctcccaagtagctgggagtacaggtgggcaccactatggccagctaattaaaaaaaaaatttagagacagggtctcactttgttgtgcaggctggtcttgaactcctgggctcaagaaatcctcccaccttggcctcccaaagtgctgagatttcaggcatgtgccatgacacctggcctaaaattttaagttttaataaataaaaatccatacatacagaaccaggttcagctccactgaaacccctgcaactcagccaaaagtaaatgtaacatggttttgaatgctgtcttaatccagggcacatgaaaaacc

SEQ ID NO: 164488 - DNA, 226 bp, Homo sapiens
ccatatacagttcacaacaatttaaaaagaatgacaggcaggcgatgaaaggcagatggtcgtgctagaaaacgcagagatgcctaatccattctaccttcactgccagtatgatcagagcatgattctgctatcatttattcctccccttttctcccctgccccattctctgtccccattctatcatttcctggtaaaacgatcttacagactactgctactagg

SEQ ID NO: 164489 - DNA, 385 bp, Homo sapiens
cctcccaaagtgccgggattacaggtgtgagccaccccacccggccaaggaaatatttaaaaaataaaataaaataagttatttaaaaattggggcaagttggctgggcacggtggctcacgcctgtaatcctagcactttgggaggctgaggaagggggatcacttgaggtcaggagttcaagaccagtctggccaacatggtgaaacactgtctctactaaaaattcaaaaaattagccaggcattgtggcaggcacctacaatcccagctactcaggagactaaggcaggagaatcgcttgaacctgggagacggagattgcagtgagttgaaatcatgccactgcactccagcctgggctatggagcgagactctccctca

SEQ ID NO: 164490 - DNA, 774 bp, Homo sapiens
tgctaaagttatttgacacttcaggcctgagccagccatgagcctaatgatcccttcttccctaagcatgatgagtataactgttccttgaaaataataagcagaaagtgtttcggatgcaaagaaagtccccacaggcccttgtgccatgctggaagttagccccttccaaagatcatttgctctggttatcagcttccagatgagagtgttttcctcctgcctttctgttcttattcatttgaatctgctgagtctgaccattgtaattatccctggtattcattttgtcaaagtatattagtgagacatcaataatatggatcaacccattccctttctacttgtttggttgtattgattcagtttaaataaaagtcaacctactgtataatgtttgtttaccctgacccttgctgaacatttccacatcctcacagactatgtttgtgtcatttgtttgactaaaaatacttagtttccctggggttcccatgtgacagtacgccagtgttggcctaagctaaactcactttctcaataggactgatggacgccgctggtcgttggcttctctcccttcctctggctatgggacaaacacacccagctctacggtctctgtaagtgcctgactttttttttttttttctcttcctcacaacaacagagctattacacaggcagtgttttctctgggtgtttcctggtagggaggagaagataaattctgcatgtctgccactctgaataagtgacacatcaaatgatggc

SEQ ID NO: 164491 - DNA, 664 bp, Homo sapiens
ggtattgtccaagtttaactcatcgatctctcctgttcatttgaagagtttctttctgaggtagttatgtgacctcactttggtttttttcagtcatcctgttcctcccaggagaagttgcatcagttaccataccaaccaacaccagacgagttacacttcttatcaaaacatttctgtaccaccgaaagcatcgccactgagaacagatgcaggaacacgccgatgcgcccccgttcccgaagtctgagccctggacgttctcccgcctgctgtgaccatgaaataattatgatgaaccatgtctacaaagaaaggttcccaaaggctacagctcagatggaagaacgtctaaaggaaattatcaccagctactctcctgacaacgttctacccttagcagatggagtgcttagtttcactcaccaccagattattgaactggctcgagattgcttggataaatcccaccagggcctcatcacctcacgatacttccttgaattacagcacaaattagataagttgctacaggaggtaagaaccatgtaccatatagttttctgatttattttgcttttccctgaaaaaaatttttttttgcttacaagttataaccatgaaatggagttcacattccagagaagcaaaaaagaaggaaaaa

SEQ ID NO: 164492 - DNA, 986 bp, Homo sapiens
gcgtgctgaagtagaggtagtacagcatggctagactgttgtgagaggctcagagaaagcagagggtgagatggatgagtccagcattctaagacgaagagggctccagaaggagctgagtctccccagaagaggaagtttgatagattcccagaagtggaattgcttggtcaaacgttgccgaacaagcaaccggaaaagcttaataggcaatgggcagtcaccagcattgcctcgaccacactcacctctctctgctcatgcaggaaatagccctcaagatagtccaagaaatttctcccccagtgcctcagcccatttttcatttgcacggaggactgatggacgccgctggtcgttggcttctctcccttcctctggctatgggacaaacacacccagctctacggtctcttcatcctgttcctcccaggagaagttgcatcagttaccataccaaccaacaccagacgagttacacttcttatcaaaacatttctgtaccaccgaaagcatcgccactgagaacagatgcaggaacacgccgatgcgcccccgttcccgaagtctgagccctggacgttctcccgcctgctgtgaccatgaaataattatgatgaaccatgtctacaaagaaaggttcccaaaggctacagctcagatggaagaacgtctaaaggaaattatcaccagctactctcctgacaacgttctacccttagcagatggagtgcttagtttcactcaccaccagattattgaactggctcgagattgcttggataaatcccaccagggcctcatcacctcacgatacttccttgaattacagcacaaattagataagttgctacaggaggtaagaaccatgtaccatatagttttctgatttattttgcttttccctgaaaaaaatttttttttgcttacaagttataaccatgaaatggagttcacattccagagaagcaaaaaagaaggaaaaa

SEQ ID NO: 164493 - DNA, 545 bp, Homo sapiens
tgtaggaagaaggccattcctccagtgctgctacttccaacactggggaaaacaagcttcagaaaggaacggtgtcaaagaggcaggacccaccagcaggactgccagcggccagacgaccacagccccagcattccccagccactacggccgacagcccaggctccagaaatgcacagcttcaaccttcagagtaaaaaccctcccaagccaactatttcttcaacaatcggattggggaatggagggttctaaccctgcccctctctataccacagatcatcagatcccagttcttatcagattgggaagtggggggttctgaccctgtccctctctataccacaggtcatcagatcccagttcttatcggattggggagtggggggttctgaccttgtccctctctataccacaggtcaccagatcccagttcttatcagattggggagtggggggttctgacctgtggtatagagagtctccgtcgaactagttcgacggagactctctatatacatttcccttatcttttaaagctggga

SEQ ID NO: 164494 - DNA, 265 bp, Homo sapiens
gcaagaagggaggggggcttctgtgtcctcatcccccagaggtggggtccccagcatgagcctccatcctcttggggacagttgagggggtgaggttctgtttccccatctttgcctgggtcttagatgctccagaatcaagcttagaaaagaatggagaaaggcaaatgtagtagatcttgtatgttgagggcagagtggagagaagacaaaaaggtcattgctgttctttttattttttaattttaatttttttttttggttt

SEQ ID NO: 164495 - DNA, 844 bp, Homo sapiens
tgacgtcacggggctagctgacagaaccccgggcgcgggcgctcgggaggtattgtccgtccctccgggctttgtagaatcgtcgccggcttacctggccgtgggcgcgtcctggccgctgcagcccggagcagggtgccagccgccgccgccgccgccatggtgtccccggtcactgtggtgaagagtgaaggacccaaactggtgccgttcttcaaggccacctgcgtgtattttgtgctctggctgccctcatctagcccatcgtgggtcagcaccctcatcaagtgcctgcctatcttctgcctctggctcttccttctggcccatggcctgggattcctgctggcccaccccagcgccacccgcatctttgtggggcttgtcttctctgctgtaggtgacgccttcctcatctggcaggaccaaggatacttcgtgcatggtctgctgatgtttgctgtgacccacatgttctacgcctcggcctttggcatgcagccactggctcttcggacaggtctggtgatggcagcgctgtcgggcctgtgctatgccctcctctacccatgcctctcaggtgccttcacctacctggtgggggtctatgtggcccttatcggcttcatgggctggcgagctatggcagggctgcggctggccggggcagactggcgctggacagagctggcagctggcagtggtgcactcttctttatcatctcagacctgaccatcgccctcaacaaattctgttttcctgtgccctactctcgggcgcttatcatgtccacctactatgtggcccagatgctcgtcgccttgtcagctgtcgaaagccggg

SEQ ID NO: 164496 - DNA, 514 bp, Homo sapiens
aacaggatttcaccatgttgaccaggatggtctcgatctcttgacctcgtgatccgcccgcctcggcctccctgttcgtatgttttcttcaaagaatttaagttttacctttttacatttagatctttaattttgagttgatttttgtacagggtgtgaggtaagggtccagtttcattctttgtcctatggctatccagtggtcccagcgccatttgctaaagaggctgttcttttccctgttaaatggacttggtactcttgttgaaaataatttgaccatatatgtgagggattatttctgggctctctatcctattccatttatccatatgattacctatgtatctattattatctcagtatcaaactgttttgacactgtagctttgtaagttttaaaaccaggaagcgtgagtctcccaactttgttcttcttttttcaagattgttttggctcttcttgctttcttgtattttcataggaattttaggattagcttttccatttctg

SEQ ID NO: 164497 - DNA, 504 bp, Homo sapiens
acggagtcttgctctgtcgcctaggctggagtgcaatggaacgatctcggctcactgcaagctctgccttccgggctcacgccattctcctgcctcagcctcccgagtagctgggactacaggtgcccgccaccacacccagctaattgtattgtatttttagtagagatggggtttcaccgtgttagccaagatggtcttggtctcctgacctcgtgagccaccgcgcccggcctggacagtgtctttggtaataaagttcagttttttttaatgtaaagtgccacacccaatgacatattttgtacaaatacaaaaagtctgaggtatatgaagtggaaatgatgaaaataaaggaaagggaatggaaaggtgtagaggcctttgctgtttgatgggaagggaaactagctctgtctttataatactgaattaaatgtcattggacttttggattaatttctcaaatttttgattccaaaataagttactcttggcatattt

SEQ ID NO: 164498 - DNA, 331 bp, Homo sapiens
aaagaattgaactcaatgctctaacagagcaagaagaacccaactctcaccccaagacgtccttttccttaactgttgtttatttgttggaggaaaggggaaggttttgaatggtctgtgctcctaaacagtataggaagcccacttgcagcctgtatgttggccaactccatcaacagccttctgctttagagaatgtgtaaagggagatattttaaaggtataactgatcaagtcagtttaatagactgcatacaacatcatgtcacaatgtgaggtgatagagtgaacagggtctcttgggcattgctagtggagtgcaacatggtac

SEQ ID NO: 164499 - DNA, 523 bp, Homo sapiens
gaaaataaactcacatgttcctcttagagcctctgacaatcatccagtcctggacaaatgtacctctctcctctgagcatccaactcaatcacatcagtaagatgtctgccttttttctcaacattactcacctttgcttaagaaccacagccagtcgaattgctaactctgacaagcgtccctgtcttaactgtctcctactcagtagcttacaccagctttctaacctggtgggcctttctccatcctcatgcccctcccctgatttcatcctgcacacctgccaggtgaaccgtccggaacacccttactccagcccctactcactaaaagcagggccttcaataaggcgtcttaggtaccaacatctctaagatcaaaccctggcccccaaggccctccagaatcaggaaggtctgctctaactaagaaatctaccttttctccatatcgtagctaggttattttccctgtccccaatacatcccccttccaagcccaccttacccttgcataactcaa

SEQ ID NO: 164500 - DNA, 256 bp, Homo sapiens
aagattactgtacaagaaaactgtggttcaaaatgaatagcaaattattatgtagcatgattttgaaaaagtcatgaaaataaaaacataatttattttaattattatcataaactttttggaagaatgatgggcaattaggtaggattcaatatctctttctgtacaaccagtaactactttgttctgaagtgaacattattcatatagtcttaataaggcaacttttatttcttccctacttttgggatcaacc

SEQ ID NO: 164501 - DNA, 231 bp, Homo sapiens
cccttttaacaaactgatacattttatcttgttgcttctctcagtgctgtacctcttgtatctcccctggagaggagttgctgagggttcttggcaggtgccaagacatgtgtgagctcctgggacttgttacatgctaactccctgtttggtttgacacacacttcctcacccctgcaacttggcaaattccttctccttgggagagtttctcatccttgggagcaattt

SEQ ID NO: 164502 - DNA, 498 bp, Homo sapiens
tctccaacctggaggagaacgatgagacccgcttcatcctcagcaaggtgcccagtgaggcaccttcccccatgcccactcaccgttcctatctggggcccggcagcacatcacccctggagaccagcggtaaccccaatggacgctatgggagcggctacctgctggccagcacccctgagtcggagctgtgaccactgcccaagccctgcccgcctctccccccacgctcaacctgcccacttgtccaggcctggcctctttcttgaggtggccaccaggcccaggccaggccctttgcccaagaagagagggtctgccctgcctcactcccctcttcagtcccagtagactctgctccctagccctgagcaggaggctgggagcagctctgtttcctaattcaggaccccactcatctagccctccaagagcctccgccaaattgtagccatgtaattggaacaacccataaggcctgcttcccagtccatggga

SEQ ID NO: 164503 - DNA, 701 bp, Homo sapiens
cctacaacacacccagttactcctatagcacaccaacttaatcctaaccctagagcctttaaaatctcttattccttctagaatctttttcctcctgacactggcatggctgatttttcttgtcacgtaaacttcagctcaaatatcgcctctcaaagaggccccgtttaacccctccacctaagtgaactgtgacatctgcttcgcaacttgcccatctcttgcctcatcacattaccttccagacatccatcatggtgtgaactatcttggtgtgaactgcctctcatggtgtgaactgccttgttatttgcctttattattttctctatctttctaaaaacccagcctctacaagagcaggtccttagctgacttgctttgtactctatttccatgcctagaatagtgcacagcacataatagatgttcaagaaaaatcaatggtgaggatgcaatgaatcaatcaataatgaatcaacagcagccgggcacagtggctcatgcctgtaatcccagcattttgggaggctgaggcaggcagatcaccttaggttgggagttcgagaccagcctgaccaacatggagaaacctcatctctactaaaaatacaaaattagccaggcgtggtggtgcatgcctgtaatcccagctactcggaggctcaggcaggagaatcacttgaacctgggaagcagaa

SEQ ID NO: 164504 - DNA, 319 bp, Homo sapiens
aagcattgggggcaaggaggaatggcagttgctgttcagtgggcatagtttcactcatgcaagatgaaaacgttctagacatctgctgcacaacattaagcatacagttaacaatactgtagtgtatacttaaaaatttaagaaggtagatttcatgttatatgtttctttaaccataataaaaaaagtaaagggcaatgaaatctatattaagtattcatccatttatggtaatttaaggccaggcgcagtggctcatgcctgtaatcccagcactttgggaggccgaggcaggcggatcacttgaggtcaggagttc

SEQ ID NO: 164505 - DNA, 610 bp, Homo sapiens
ggtggacacaactatcaagtcttggtcaattctggggcacacattttgaaattagaagccacatacagaagaacaattgaagaaagatctgctttggagacatgagaacttggggcatgggaagcccataattagccatcaggatatgtaaaggaagaggatttgtaccttgtggttctagggaatagaactaaggccagtggatggaagccacagatagaaagacatggctcaatttaaagactaatttgcagtgagagctgtttaatgatggagtagaagatggcatgatgtgattgttatcattaaccagtcttttactactaaacttaaatggccaattgaaacaaacagttctgagaccgttcttccaccactgattaagagtggggtggcaggtataagggataatattcatttagccttctgagctttctgggcagacttggtgaccttgccagctccagcagccttcttgtccactgctttgatgacacccaccgcaactgtcggtctcatatcacgaacagcaaagcgacccaaaggtggatagtctgagaagctctcaacacacatgggcttgccaggaaccatatcgggtaccgagctc

SEQ ID NO: 164506 - DNA, 424 bp, Homo sapiens
ggtggacacaactatcaagtcttggtcaattctggggcacacattttgaaattagaagccacatacagaagaacaattgaagaaagatctgctttggagacatgagaacttggggcatgggaagcccataattagccatcaggatatgtaaaggaagaggatttgtaccttgtggttctagggaatagaactaaggccagtggatggaagccacagatagaaagacatggctcaatttaaagactaatttgcagtgagagctgtttaatgatggagtagaagatggtaaacttcctgtttgtaggaggttgaacaatcatttggcagctgtgttttagaggatataaaaatgttgaatcactaacaagtgttcacttttcctcattataaatggaaaaggcaagaaacactcaaaatttaaatt

SEQ ID NO: 164507 - DNA, 484 bp, Homo sapiens
agtgaattcataaatcgtcacttaactcaagcaaaacaatgttactctctttgtacattgtacagatgcaggataacaatgcagtgttatcctgcatctgtacaatcaagcacccaaactggttctgtagaggcaggaccttagcatatagcagagataacttatcttccagcagatccggagctccattttgtagacagaaatgaatgctctgtgccacagaaggagctgttgcactattcattcccgtttcctcccattcactctccacatctccaatcctggcattgtctgctttgttacttgttaaaaacttgatttcgtagattgctttaaaataagaacaaaatgtactttgacacacatcattttgtttggttctcattaattttgagagaaaggcaagatagatatttaaatgacccctattttagtggtaaacaagctgaaattagataaataaaatgatttgcctaatgcctca

SEQ ID NO: 164508 - DNA, 266 bp, Homo sapiens
actcccaatcttctctctgcagagcccaaatcttgtgacacacctcccccatgcccacggtgcccaggtaagccagcccaggcctcgccctccagctcaaggcgggacaagagccctagagtggcctgagtccagggacaggccccagcagggtgctgacgcatccacctccatcccagatccccgtaactcccaatcttctctctgcagagcccaaatcttgtgacacacctcccccgtgcccaaggtgcccaggtaagccagcc

SEQ ID NO: 164509 - DNA, 234 bp, Homo sapiens
gatccatgagtatgtaaacattgtaaaataacattgttgacaatctgccatctggcattatcacagtctcttaagaatgtgaatctttttgtaaagtcctgtaaactgtgtttttcaatatcttcacttgaagaccaatatgatggatttttgataatgatcataagttttgatatagccccttttagacagcagcctaatagttaaaacatgcaaatacttaatatattcgca

SEQ ID NO: 164510 - DNA, 225 bp, Homo sapiens
ggctaggagtttgacactaggctgggtaataaagggaggccctgcctttaaaaaaaaatttttttttgttttaattagccaggtatggtggggtcctgaaggctgaggcaggaggactgcttgaacccaggaggttgaggctgctgtgagctacaactgcaccaccgcaatcctgggtgatgttgcctgggatgtagcctgggtgacagagtgagaccctatttc

SEQ ID NO: 164511 - DNA, 139 bp, Homo sapiens
ctgtccctctgtttctgggtctctgtctccccatctctgtccctctgtcccagtctctgggtctgtcagtggctgagtgtctggcctgctgggacactgcggtggggccctgcacccgctcctggctctcccacttgtc

SEQ ID NO: 164512 - DNA, 477 bp, Homo sapiens
cactgctgcatgtaagacaccgagaatgaggccgtggagacaaacaccaactcagagtgggacctgtgcctgactcagggaactcagaacatgactcccttcactaagtgcagtcaagtaggtgctggagggcagagagaaggaggtggtggtggtggcaagctggtcaggaaatgctccctaaagcagctagtttaaatttgtactagatgagggcagcacatctagaagctccccagtttgggatcgagagctgtgcctaaagatagggagggacacactgcaacccgacctggcagcaggcaactgtttcaccccgagactgaccctccaatgaagattattaacagagccttcagtgcatccccagctccaggctgggccctgcagatgataccaagacaaaaccagcatggtcatccttgcagggctgacaccattggggtgggagccactcctgaacaccatagatgttcc

SEQ ID NO: 164513 - DNA, 473 bp, Homo sapiens
  misc_feature (20)..(20): n is a, c, g, or t
  misc_feature (117)..(117): n is a, c, g, or t
ctgagattttattaattttnccagttgcttggcattagaaccgactcatttttacttgacttaatctagcttggaagtaggcaaaatgaataagaaattcttaacagtggttccttnctactgtgagaaaaagacttttcattcagttcccttttgtgcatcgaattaccctccctttccttttttttttttaatatagagacaggggtctcactatgttgcccacacaacatagtcttgaacttctaatctcaaatgatcctcctgcctcggcctcccaaagtgctgggattacaggcgtgaggtaccacatccagagcccctccccctttttaaaaaaaaatcctgtctatgcatagccccttttcaggaaaaaaaaaacaaacaaaaacaaaacaagacagtcactgatcggtaagtggtttttgggaaccacagtgcagcagctctagcttcttggaatagtggtatga

SEQ ID NO: 164514 - DNA, 295 bp, Homo sapiens
aaatgacctaccttcattaaattaaaaaacttgcacagtcaagatgaaccaaaagggggttcttaaagagacaatccctttatggtaacaatttaggaaagttttatacatgttgaaggatgaccagtccaaacaagaggttcttcatataatgtctgggcctcagactgtcccatatagctaatactgctcccaatctcctctctcatctacctagtcccaggtggatgtgaaaaggtagaatgtgagaaggcaggacaggccagagatcagagaaggaacaatctctgagtag

SEQ ID NO: 164515 - DNA, 262 bp, Homo sapiens
agttggatcttctgacttggaaaacccttggggaacaaaaaacaaaaacaacgacaaaaaaaaagtgcaaaacttttctgacactggtttggccaaaatgtctccctgtctcctagataaaaataggaacataaaagccttgaggttctagatgtaaatcatcggtgcatacgataggccaggtgttgggggtagacacagtcagagaggcaaaagtcagagaaaactgccccctagaagcttttactgttaggcagaatca

SEQ ID NO: 164516 - DNA, 740 bp, Homo sapiens
aactgttaggcacaggtcagaacagcttgggagctagtagcttacagagtaaatatatttaaattggaaccatgtggttccttcccctggtgcttacacaatgtgaacagatgcattgtttagtgtcaaagcccttgtgttgactccacagttacagtctctttgaggtctccacatggtacaatgctgaggctgtcaggagtaagaaaaagggcagagaattggagttgtctcaacaagtgttccttaatgccagttgccctgcatttcagaaggagagtattggagaactgcaaagctcccatcagtgagggtctgagacctaaattaaatgcttgtcctttctgggtctttaaaaaagtaaattggtttgtgatatgctttggaagcttttagctccccccgcctccagactttatttctcactatacttttgagcagagggtagagaataggaatagatcccagtaaaaccctcagttgggtatcgtgaaactgagagaaaacaaaaaacaaaaaacaaaaacaacgacaaaaaaaaagtgcaaaacttttctgacactggtttggccaaaatgtctccctgtctcctagataaaaataggaacataaaagccttgaggttctagatgtaaatcatcggtgcatacgataggccaggtgttgggggtagacacagtcagagaggcaaaagtcagagaaaactgccccctagaagcttttactgttaggcagaatca

SEQ ID NO: 164517 - DNA, 115 bp, Homo sapiens
agattacccggcaggtggctacgcctctgggggagttggattcaggggtgggggagaaagagtgttgttagagagctcggtctaggactagaggaacgtgcccttatgtaaaata

SEQ ID NO: 164518 - DNA, 732 bp, Homo sapiens
ggcctactatgtgttagcacctgctggacactgtccagacctttctgatcttcagggagttcagatgcaccaggttccatcactttcttatatttcacactgactatttggtgaatagtcaatcactattcactattaaatagtggcttcagggcatcagagaatgaaggggctattctcatctgcgtaattaattagagaggatttcagaggagatttgagctggggtacaggtgagcagaggacattcggtagagatggataaaaggtaggaagcagaaatgaccatgactgtcaagcaatggaagtgatactttaaatcaagattataaaaatgcaataaccccaaactgaattttaaaaaattgtatttcttttcaaattatttccagataccaaaataactatggttttaatttttaaatgtatgagtttagagagaaaaatattatagttagagttatatagttttaaagatgacacgatactaaggaaagtttgttttccagtttgaatccatgactaaaataaggagagagagaaaaagggaagttatttgcataattcactatttcaatattctcatgagttagtggctaaaagtttatttatttctcatttaaaaataaatacgtctatcttttactttttttttgagatggattcttgctctgtcacccaggctggagtgtagtggcacgatctcggctcactacaacctccgcctcccgg

SEQ ID NO: 164519 - DNA, 314 bp, Homo sapiens
tgagtagctggaactacaggcacacaccaccatacccggcttaatttttttatttcttttagagatgaggttttgctgtgtttcccaggctggtatcaaactcctgagctcaagtgatcatcctgcctcggtctcccaaagtgctgggattacaggtgtgggccactgtgcccagcccatcctaaatccttgaataactttttcttatatcttctaatgcatatgtagaaagacatgctactaatctgaattctggcaagatattcttggtcacttggctgttaaaagatgctttgcaatgaagaatttttttt

SEQ ID NO: 164520 - DNA, 272 bp, Homo sapiens
cttgaattgagcaacattagatagcacttgaacaagatgcgtgggggccattttaaacaacaaaatcatcagtaaaaagcacaaaggtgtaaaatatgtggcactaagtagaccggaaaaacagttgtttacggcattagagctgaaacaagaagacagagtgacctcagcttggagtgtacatgtgatgcaactcaacattttttcctgctctgtagatgcatgcacatgaccatggaagggctgcaagtattgatttggggtgagggggt

SEQ ID NO: 164521 - DNA, 571 bp, Homo sapiens
ctggaagctgatgtggtaggatctcttgagccaacgaattcaaggttgcagtgagctatgatcacaccactgcacttcagcctaggtgacagagcaagaccctattgctaaacaaaaacaggcaaaaaaggatatttcttgatatacactcaaaacacatacactaattttccatccactttattcaaaaaacttatattttttcttttccaagtttacttgtgtgttgatcaaagtatatatattcattataaagtttgaaaaaatagagaaacaaaataagtcattcactgtagctttatacagctaacattgttacgaattttctttgagtcttactagtacatattcttaagcaaaactaaaatggtatgcatatatatgaattttgtgtcccatttttcagatccaacatgaaataaaagtataattttacaaatccatatatgagctaaatcataatttttcagatccaacatcatgaaataaaagtatgattttacaaatccatatatcagctaagtcataactttaaaaaattcatataaacaaatagtacaacagacatgcc

SEQ ID NO: 164522 - DNA, 477 bp, Homo sapiens
tcgaggttggcaggtcatttcctcacagccccgaggccccctcggagccagtggtaggagaaggagccacagggacaagcggtgaatctctggattcccaaccgccctccatgggggcccgcggccctctccctcctctctcccgctgcgcccccgccgcttgctccctgggtacggcctgaggctggacggagcgccgtccgggcgtccaggactcaggcctggccactccgagccccccaccccccgccccgcgccggcccgcgcaccctgcttcccgcaacttgcagcaaacgcagcggcctctggagagcctagcgacgggtagcaaactttgtccccttaagcgcaagagcaatcctcgcaaagtttgtgcggcggagcccactccctacctgagctggggaagctcccgcccgcgccgtgtggctgccggggccgcggggagcagctcgcagcccgggacgcaccggggag

SEQ ID NO: 164523 - DNA, 415 bp, Homo sapiens
gaaagtgaacaagacaaatccagtcctcatgtcctggagctcacagtccagcaagaggacaggagtaggagcaggatgctgaggacatttgggtgttagggagcagttccaggttcaggtggaaggatgatggttgagctcgcctagtggagcaggggagtggtgggcaagcagagagggacacctctatggatttggcatggaaaggattactttagtgaagcactgttccacggaaatataagcaagccacaaatgggagccacatgcatgattaaaaattgttatgtagccaaattttaaaatgtaaaaagaaacaggtgaaattaattttaataattttttttcttttttgagatagagtctccctctgtggcccaggctggagtgcagtggcgtgatcttggctcactgc

SEQ ID NO: 164524 - DNA, 330 bp, Homo sapiens
cctcagaatctcccagggggctctcaaggcacagatgcctgacgcccaccttggagagagctgacacgccaggcccaggctgccagtgagacacagatagcagccagggtgaaggcgccaggacaggtgtatgtgtggtgcagctagggaggccagcgtgcgtgtggcagagtatgaggctgaggtcagctgggaagagggcggattatacaggagtgtggatttcattccacttctgatgaaaggtagtggagggctttaagcaggagactgacaagacgtggtttgatctaaagcagcctctctggctgctgagcagaaggaggactt

SEQ ID NO: 164525 - DNA, 492 bp, Homo sapiens
gggtagagggagaagagagggattgcagaatattccttcagttgaatttttcctttttatttaaggcaatcatcaaatgcttagaagatcgagggtttttcattttacttacatcatcagccttactatcagaaccagattttggaggcaagcagatgggtctgcatgggttacatttatttcgttcacccctgtcaacaggggtgaaagatttgaaagttgaagatgacatctcaatgaaggtgatacctattttatctacccttaattgtgccctgctagaaacaaagaaatcacttcctgaagaaagaatccatccaaacacattagtaaagcgtcatttccaagaattgtacaaggcggacagaagcccttcattgagtgttgctcctcaggatagaatgaaagaccctacattcttggggaaactgcccagtggttttgacttgattcctccagctgaaaagtgcccttcagagtctttaactcagt

SEQ ID NO: 164526 - DNA, 164 bp, Homo sapiens
ttatttttttatttttaatttttttaccctgaagtatagattcaagctgtcctgaatatatacagattcatatttagaaaatatctcagattctgctatgcaccttaaaaatcatctaatgagccaggtgtggtggctcatgcctattatctcagcactttggg

SEQ ID NO: 164527 - DNA, 195 bp, Homo sapiens
gagtaaggccttagcagggactatgtgctatgatcattaagttgaatagaggtgtaagatccttctagctattatagaagagcagttcatggaagaccaagtttctgagaagaggaggatgaagatggtagataaatgaatattccaaaatgaaactacttgttgtctttgtccagtgttaaactattactatcc

SEQ ID NO: 164528 - DNA, 422 bp, Homo sapiens
gcagaacagtggttcaaacccatttgatccttagggcctttgcagctttaggtttccgtaactctttctggatgctcactgctcttatgtgaagtagtacttgtctttcatactcacttcccggccagggaggtggctcactcctgtaatctcagcactttgggaggccgaggcaggcgggtcacctgaggtcaggagtttaagaccagcctggctaacatggtgaaaccccgtctctactaataatacaaaaaaattagctgggtgtggtgatgaacacctgtaatcccagctactcaggaggctgaggcaggagaatctcttgaatccaggaggcggggttgcagtgaaccgagatcatgccattgcactccagcctcggccacaagagtgaaactccatctcaaaaaaaaaaaaaaaaa

SEQ ID NO: 164529 - DNA, 186 bp, Homo sapiens
ctactggacatttttgctgtggagagagaacaacacacaaaccttagcgaacaaaaaagacactgtggccaggcagtcaaaaaaaattacataatttttaaaattttaattgaaatggagtttcactcttgttgcttaggctggagtgcaatggtgccatcttggctcaacacaacctccacctcc

SEQ ID NO: 164530 - DNA, 228 bp, Homo sapiens
cttaaaatgcagattgttcaggaaaataatcctttgcaggctgtcatgttccctagctgtgtggaatcctcattagccagcaggaattactgcagagagatggctggaatgttcaaagtaaataagatggaggggggtgttgttggcaaagtataaacagggtttttttttgtgtgtgtgtgtccccttttcatgcccgtactctttgcaaccatctatcacctagga

SEQ ID NO: 164531 - DNA, 948 bp, Homo sapiens
aactttcccagaactgaactgctccagaatgacaggtatggtccccaacccttcataaccttcctggtctgctctccaaagctgacagactgaatctccttgccacaatgccaccttccctgcagagaggatctgatcggtaaacgtgatgtgtaaatcaatgtgtcataaatcaaattctaattcaaatgctctgggggccagctacttaaatatttaatggaggctttaaaaagttgagccccaaatcctttgtgcaatgtgaacaatcaaatcctaatcaaagacacgtcaaccatcccccgggttgaaataatgggtgttcggcagatgggggctgcctacaaatctgagcctgctgcctcatttcctctagtcaacatgggtagtaaggggattttagtaactccctgaagcttcccagggcttgaattcccccgctcaagcatttcccctccacccactcactccagctgtgtttgttttaattttttgctctcagcctgacacctcagacaacagcagttccttcttgccttctctgttggcaactgctcatgcaccctgttaccttctgaaattacatagtttattaacttgctaccctaacctacactacccttcataagaactcccttctctgctcatgaacatcctgccacgggctccctgggattaaactgcttctctaagaaatgaaaccattgcccagcccaacatcccctttcctgctattttatttgaggagtagggctctgtggttattgatcacttgagaggtagaaggaggatgtttgaagggaaaggaaacaccaagaaaacttacagagtggcagggaagcctgagagatctcataaactactggctttgaagccttcatgggaacttagatgctttgagaagctggaaagctctggacagttccccccgctccccccccccccaaa

SEQ ID NO: 164532 - DNA, 478 bp, Homo sapiens
tgtcggaatccactttcatagtccctgtagttaattatcgtaggctgcaggtctacagactactgaagtgaaccaggggcctgccttacagttgcttttttccctcttaaaatagcaaactgtttaattgtttgctttaattatatttttaggagcatttcaaaggattattatcttctttgtcatacctggctcatttcctggtacgaaactgaaaatagtatctgatcctattggttgcataacatactgagtcataatttcttcctcttgctgttgggaatagccattgctcgttggattcgcagttcctgtttcatttatttgtgcttatatacaactgtcattttgctattcttttagatctttgaaattcataatctacctttctaaaggtgtattttattgagttcctgctatgattattaacattttttttccttttttttgagacagagtctcactttgttgcccaggc

SEQ ID NO: 164533 - DNA, 481 bp, Homo sapiens
ctgcctggatatcttttcacagggggaccagcttgaccttccactccctgctgtatggagagttttgcctaccatcattttcagagctgcttctgccacttttgctactagggattaaaatttctctataatccaaaggcagaaaagagcattcattgcctgacccatgttctcttccatgtgactagcacataatggctgtacctcggctcttgtggaaatttagagtgtggaagccgtagaaggagcagttccaggaatagtgtgtgtgtgcctttgtttttggcagatccatcttgatactaccaacacccagtttgttctaaatctatggaataattctggagagaatgaaaatacccctatttactgagcgccatttagtggaaactaatggtaactactacacagtaaatgccatgtgctgagcaagtcacgttacctgatagctacctgaccttcacaaaagccctgggaaagt

SEQ ID NO: 164534 - DNA, 1108 bp, Homo sapiens
ccattttagtgaggagtttgataatatcattaaagttgaaaatacactattcctagttttatatcctaggaacgctatagctaggtttatatcctaaagaaactgacttatatgatcaaagagaattgaatccgaatgttcactgctacaccatgtagacattattattagcaataaagaataactgaaatgtagattagcaggggaacagagaaaaatacaggtatattcaaatgacagaatattataaagtaataaatatgaattagaactacaatataaatacacatatacacaaaaaacataaaattgagttaaaaaagaaacctgtagaatattacatatcacttacctaagttgtaaaatacgtacaaaatcatactgtatattgttcatggatatataaatgcattaaggataatggcctatacaacatgccttagaattcataattttaaaacaacgcacataaaaagaaactaactgctatatttactactagggtgtttactgaatgcattctttcccaaataataaaggcttctctttatgagaattcattcatatgccagagaagggagaaaggctaaaaatcaattatctagtttccatgtcaaaaactttggaaaagaaaaaacaaattaaactaaagaaaagtagaagaaaggaaataaagatataaaccaaaatcaataaaaacagaaaataagcacaatatagaaaaatcagcaaagcccaaatttggttcttggaaatgaagaaaaagagaggaaacaccaataaccagtattaggaatgaaaagcagacgtccctataagatgttaaaaagaggataatcctaaacaactttcaccaacaaatgacaagtttagatgaaatggacaaattttcaaaaaccaacacgaatatacatacaaattttaatatgccaatatctaaaaattaaaactgttattaaaaaccttctcataaagaaaactccaggtccagaaggctgaattctggcaaattcttttacatacctaaggaataagcacattagttgtacacaaattctttcaaaggacagaaaaataagaaacacttctcaactcattataaagccag

SEQ ID NO: 164535 - DNA, 780 bp, Homo sapiens
cgcccaggctggagtgcagtggcgtgatcttggctcactgcaaggtctgccttccaggctcacgccattctcctgcctcagcctccagcatagctgggactacaggcgcccgccaccatgcccgcctaattttttgtatttttagtagagacgaggttttaccgtgttagccaggaggtctccatctcctgacctggtgatccgcctgcctcggcctcccaaagtgctgggattacaggagtgagccaccacgcctggccttaattatatttttatgtaactttttgatactactcaagtattttttcctctacggtactcactatgctgaaagatttttctttcacatgttttctaaactatgtaatataagtgtcattggctatttttgtccacctgatggaggtaagaaatgatcaaagtacagtttaacagcagtattagcaagagttgagccttgctgaatatgtaagtttcaacggatttgctttgcaactacatgcagtagatgttttaagagggtaggtaggatatttaaacttaacctttttgtgccactgtgtgagagtgggcttctgaaaatggaggggggaagcatctctccttggttagtaggcattcaagtggaagatatgttataaaaacctagttgtatcttataggatgctaaaagcaaggtgactgaacttctaacagggcattctacattgagtatgtgcttttctctataattaggctaaaaaaaggttggtaagtaatatgaacttaaaatcaagatta

SEQ ID NO: 164536 - DNA, 592 bp, Homo sapiens
ctcggaccgctaatctcttctcacgtatatatcttgcccacttctaccctatagagcccaccacgcctggccttaattatatttttatgtaactttttgatactactcaagtattttttcctctacggtactcactatgctgaaagatttttctttcacatgttttctaaactatgtaatataagtgtcattggctatttttgtccacctgatggaggtaagaaatgatcaaagtacagtttaacagcagtattagcaagagttgagccttgctgaatatgtaagtttcaacggatttgctttgcaactacatgcagtagatgttttaagagggtaggtaggatatttaaacttaacctttttgtgccactgtgtgagagtgggcttctgaaaatggaggggggaagcatctctccttggttagtaggcattcaagtggaagatatgttataaaaacctagttgtatcttataggatgctaaaagcaaggtgactgaacttctaacagggcattctacattgagtatgtgcttttctctataattaggctaaaaaaaggttggtaagtaatatgaacttaaaatcaagatta

SEQ ID NO: 164537 - DNA, 286 bp, Homo sapiens
tgttggataaatggagttgaaaatcatgaatttgatggcgacagacccagagagttgggcaggtagaaacttcatttcaagtgatatgcagtaaataccccaaatttgagtcaaatggcctgtgtaaaaaggaagtgaaaatgtaacccgtatctccttgtaggtgaaaaggccatatctctaggtcttaggtatgaaaaggatgtgtgggcttctgggtgtttttgactgactaagaaacactgtgggatggatagcagctataaactgatctataggagtggtg

SEQ ID NO: 164538 - DNA, 493 bp, Homo sapiens
taggttttctttttttgagacagagtcttactctgtcgcccaggctggagtgcagtggcatgatctcggctcaccacaacctctgcctcctgggttcaagccattctcgtgcctcagcctctggagtagctgggattataggcacctgtcatcacacctggctatccacttaggttttcaaagggccccttggtcttggggtggagagtgaagggaagcagggggaagaagtttaggtcttgcaatcatccaggtgagacatgatattgtctttgatcagtggcaggggtggaggtcgggagaagcggccagagagcagatctgttttgcgggtggggctgacggtatttgctggtggactgccctggaaccagagggaagtacagagtcaggttgactacaaggtgtttggcttaagttcgtagaagaaaggagttgccatttgctggcatgaggaaaatgaagaagcagattttgggaggaaaatgaaggg

SEQ ID NO: 164539 - DNA, 400 bp, Homo sapiens
aggctgctccgaggattacgtccttcatcatacctactgggattataggcacctgtcatcacacctggctatccacttaggttttcaaagggccccttggtcttggggtggagagtgaagggaagcagggggaagaagtttaggtcttgcaatcatccaggtgagacatgatattgtctttgatcagtggcaggggtggaggtcgggagaagcggccagagagcagatctgttttgcgggtggggctgacggtatttgctggtggactgccctggaaccagagggaagtacagagtcaggttgactacaaggtgtttggcttaagttcgtagaagaaaggagttgccatttgctggcatgaggaaaatgaagaagcagattttgggaggaaaatgaaggg

SEQ ID NO: 164540 - DNA, 701 bp, Homo sapiens
gctgaaaattgatgtttcaaaccaggcgggcacaggcatcatttgtgagctctgctgtgaagccagactgggggcttccagcaagccgtgcccagagggaaatcactcagcctcagctggcttctcctgactgggacaagggtgtgagcgtgcgggccctcaggtggtcttaccgtgtcctgatgggaaggtgtcctgggtcccaaccctgagcgtggctggtgtgagggaccctcccctcaaccgtcccacttcctgcacagccaaacccaggtctgtaagtcaagggtgtacccccaagaaatggagagtctgagccaggcatggtgacccacccttgtggcagatgctcaagggaaacgcccctattggccaccccattctcctctttcagacgctgccatgcaggggcgtcttagagccagtcgaactgaccgtgggttctggacggactctctctagaagggccccatgacacttggtcctgcaggcacaggcctctggtcccttggtctctgcatggatgcacaaaatgcttacgtgtgtagatatgagggtgcacacaaacacgtggacaggtggatacacacacgtgaacacggatagcggacgcacacacacgcgcgtggggctgacgttaaccctgggatgtgccgtctgttttcagggcctctgtcttactgtgagtctgagcagctgca

SEQ ID NO: 164541 - DNA, 324 bp, Homo sapiens
gttactgtattatccatgggtttgcattgtttttgatgggaagtgtgtcattattctatcctttgcttccctatatgtgtaccctttggttgcttgaattttctttttgaaaattttcagcacaatttgattatatgccatatgtgatttctaaaacaaattcttaacttagtcatggtcccctgtatttatgacaggctgcattatccacccacctatgcccatacttggcaatgcttctaacagttgccattctctgccaactcaagaaaggctcatacatgactccttgaagtttaattcttttttttttttttaatcctt

SEQ ID NO: 164542 - DNA, 484 bp, Homo sapiens
ctggttgctattttatttactgagagcaacctgctcatatttcctattataatggtgcatttgtctgttctgccattcagtgctatcacatttttgtattctgagtctttgttattgagtgcttacacattcagaactgtcatatcttttgggcaaatataatttcgtatcattatggaaaccgccttttaatctgtaatcatctgtttcacattaaattctactatgtctgatattaccagcatgttttcagttagcacttccatggtatacatattttctatccttttattttcacccattctgtactcttgtattttacgaatctccttggttaaaagcatgtaattgtgggttcatttagttaatctctggtaaatcactcttaaaattatagcatgtagtacagcaaaatttaatgcaattactaaggcatctgggtttatatctactaccttagtatttcctatatgtcttgacttta

SEQ ID NO: 164543 - DNA, 256 bp, Homo sapiens
aaggactcgagtgtggtgtctcgccagtgggggtcatggctgtagagggtgtatgcctgtggcctcgaaggtctaggtagtttgggacccagtatatgctaatgagggcagagtggaggaaggacctgagggtatctaacggaggaaggactgtggaatacctgagcctggcctaaaggagatgagaattgcgtgtctgtctgggcccaggaaggagtggtggggaagtgtcttagcactggcgaggctagtggac

SEQ ID NO: 164544 - DNA, 233 bp, Homo sapiens
aaggactcgagtgtggtgtctcgccagtgggggtcatggctgtagagggtgtatgcctgtggcctcgaaggtctaggtagtttgggacccagtatatgctaatgagggcagagtggaggaaggacctgttgggtaccagggaatgaaggtagaaaaaggagccgtgggagaaggctccagggaccaaggctacaaggagaaaggcagcgtgcactggcagctagacagatctg

SEQ ID NO: 164545 - DNA, 526 bp, Homo sapiens
tcactaaccagttgcagaggagggttaaggccattccttttgaaagctaattattttggacaacacacctgtcattaagcaacataaggtactcaaaaagagctatttgtctcgcttgacttctcaccctgccacatgttgttgaaatgatggataatatggtagttcaaaaactaaaagagctttcaatccaaggatttagctttgggacatagggaaggttttatttattattattattgtggtaaatacacgtaacataaaatttaccatctgtattagtccattctcacactgctataaagaaatacctgagactgagtaatttgtaaagaaaagaggcttaattagttcacagttccacaggctgtaccggaagcacggctggggaagtctcaggaaacgtacaatcatggcggaaggtgaaggggaagcaggcacatcattacgtggccagaggaggaggaagagagggaaggaggaggtgctacacacttaaacaaccagatctagtgagatctcactc

SEQ ID NO: 164546 - DNA, 593 bp, Homo sapiens
ctttcaacacttgagggccagttcctgccttagggcctttgcttgtgatgttgcccctgcctggaacattcttccctccctcaaggaagtccctgaccaccccatgtaaaatagctctctgttcttttttctgcattattttctttataaggcttggcaccagtagactgtaagctcttcaaggacaggggcctttgtcttgttctagtgtcctagaacagtgcctggcatataatggtgctcaattagttaagtgaatgaatagatggatgaataaatgaatgataggatttggtcttcatgaaccctgaggtccttccaactctgagattctatgaaagtccttgataagagttacggaaaattcttcattcagaatttaattattggaactgataggagtttgacacagaccttcctgcaaggagtcaaatagggaagggaagatgtgaatcccagggactgccataccgcagagcagagagtggtctgggcctggggagctgtacgttaaggactcagagttcaccggaaggatagagggctcccagctcaaacctaggaagacttctggaggaggtggtgtttttgac

SEQ ID NO: 164547 - DNA, 110 bp, Homo sapiens
gcccaccccttcaatgactataccttctctcctctcatcagtgccttgattcagcccaccccttcaatgactataccttctctctcatcagtgcctcgattctgctttcc

SEQ ID NO: 164548 - DNA, 747 bp, Homo sapiens
gtttctgaaaacccacatctttaaggccaggttgcctcattctgttccgagttggggatgacattgcgaagcctgatggatgatgaagaagacaggttcaaagagaataattaatttccccaaactcatacaaacattggcagagatgaaaatacattatgtgattcccaaatctatggctttacatggtactagaggatcagttgaaaggcatggaaattagatggagtctgctttgttgccctggctggagtgcagtggcacgatctcggctcactgctacctccacctcctgggttcaagcaattcttctgcctcagcctcccgagtagctgggactacaggcaagtgccaccacatgtggctaatttttacatttttagtagagatggggtttcaccatattggccaggctggtctcaaactcttgacctcgtgatctgcccacctcggcctcccaaagtgctgggattacaggtgtgagccaccgcgcctggccaattctgttttatacaaaaaagattttggggtttgttaccagagtttacctagtttaccctggcttatgcgttgccacctttcttcttgactttccttaagctctttatgattctccaaagcacttaaactacctggcatatttgtttatggtctgtgtatacctcttagaggacaggagctttgtttttttcactattgtatctcagtatttagaaaagtacctggaatatagtagacactccatta

SEQ ID NO: 164549 - DNA, 365 bp, Homo sapiens
gtataacacgacgcctggtgattgcttgactctcgaacttcaacagcttaaaaagaaatgaccacacagaaccacagggtacgaaatgactgttctttctccactgtgaaggataagatggaatggaacaaataaatggaatttaattctaggctatgttcaaggctgttgtgtggaatatatgccatgagctctctctcttttaggctttacggtgccttctatttcctttgtaatgttccatagcatctaatagaaatgttccatctagaaagatgctctgtaaatgcagctagtctagcaaatccatacttatgtcagaatgttttccctcttccctggctatccagagaggtgctaatttg

SEQ ID NO: 164550 - DNA, 372 bp, Homo sapiens
tttctattcatttttatttcagctgtggtaatttatatatttttaagactttctaccttaaatataagttgtataatttgtggtcacaaagtgtttcatagtatttcccttataattcatatatttggatgggatgggggaggattggtagtagtaacctttgctcctgattttggtaatcaacacattatctcttttttctttcttttttttttttctttcttttttgagacagagttttgctgctgtcgcctaggctggagtgcaatagcaggatgtgggttcactgtaacctccgcctcctgggttcaagtaattctgcctcagcctcctgagtagctgggattacaagcacctgccaccatgcctggc

SEQ ID NO: 164551 - DNA, 465 bp, Homo sapiens
gaaacagccgactacagtagtgctcacactaaagactgtcccaagtgcaacatctgcattgagaagaatggaggctgcaatcacatgcaatgctccaaatgtaaacacgacttctgctggatgtgtctaggagattggaagactcatggcagtgaatactatgagtgcagtcgttacaaggagaatcctgacatcgtgaaccagagccaacaagcccaggcgagggaagccctcaagaagtacttattctactttgagaggtgggaaaaccacaataaaagcttgcagctagaggcacagacataccagcggattcacgagaagattcaggagagggtcatgaacaatctggggacatggatcgactggcagtacctacagaatgctgccaagctcttggccaagtgtcgatacaccctgcaatacaccaacccatatacatattacatggagtctggacccagg

SEQ ID NO: 164552 - DNA, 323 bp, Homo sapiens
aggtgcctagaggatcccgtagaggtgtggcaggtggcgggcgactgtagtcccagctactcaggaggctgaggcaggagaatggcgtgaacccgggaggtggagcatgtagtaagccaagattgtaccaccacacccagcctgggcaacagcaagacttcgtctcaaaacaaaacaaaacaaaacaaacatctaagtcttagcctggttaatttgataagtataacacagcctcaaaaatgtccagtattccagagctaaaagcagactgcccagattctaaccctagcacctccatttactagttgttcaacctgccacaa

SEQ ID NO: 164553 - DNA, 182 bp, Homo sapiens
agagtgagactctcaaaaagaaaagcaaagaaaagaaaaattaccccaaatgggccgggcgtggcggctcacgcctgtaatcccagcactttgccagggaggccagaacacgcgaagagccctgaataggtggggtctgtacctggagttgactgagcgtgtgaagccccctggcctttgtc

SEQ ID NO: 164554 - DNA, 571 bp, Homo sapiens
acgtccatctaatttttgaatttttagtaaagacagggtttcacaatgttggccaggctggtctcaaactcctgacttcaagtgatccacctggcccatttgctaaatttttatgctcttactacatggttgtaaaagtctccagtctaggtgacagagactccgtctcaaaaaaaaaaaaaattaaatgaggattacaggcttgagctcctgtgcccggccggcctgctatgggttatacttaacgttgagttgggttacttaaaattgataaaaggtagtatagcattgaaccgccaaatttagagaggtgctttccttggggaacttgtaaatggtgaaacattttggtacttgaaattaaatggtatacgcttatagctaacgagatattgggttacagagcccagccaaggcacagaaggctgaaagttcccttgatttacaaagaagcaattacagtttaccccatctccatctagtgtggtggtttactactctatttaagtgtgccttcaacttaattactttctggtggtgctggtaatgaaacttattgtgatcaatactc

SEQ ID NO: 164555 - DNA, 373 bp, Homo sapiens
aacctgggccttgttgctctcattgtcacaggtttcttttgagtggccctcctccccacaatatgaacagcgggttgtgtattttcgcttcctggctctacgaatattcccaggaccatcattcttatacccagaaccaccactggtagaaagagactgagccccagaattgttgggggaatcaataaccagcacttgatccagaggtctggctcttcctctgaagggaggggcacctgtaggtgtcagtgaagggtacagagacaccaccaggatcacatcctcatcagagtcatcaagggtatcatctatttctatcacgttgcagttacagtcagcactgctgattgctattggctgggcgccctgaaat

SEQ ID NO: 164556 - DNA, 344 bp, Homo sapiens
ttcactctgttgcccaggctggagtacaatggcacaatcctggctcactgcaacctccgcctcctgggttcaagtgattctctgacctcagctttttgagtagctgggattacaggcacctgccaccatgcctggctattttttgtatttttagtagagacgaggtttcaccaagttgtccaggctgatttcaaactgctgacctcaagtgatccgcccacctcggcctcccaatgtgctgggattacaggcatgagccactgcgccagccacttttatatttctttggtttccactaatgttctttctttagaggttacaagtttatttttttaatatgcttt

SEQ ID NO: 164557 - DNA, 521 bp, Homo sapiens
cagcaatcttcaaagggaattatcagtgaggttaagtcagataagaacttagtctatttgtaaggctttgattttaaaagaaagtgctgacagccactattcaagatcttttctatatataaatgactgagcaattttgtggcttataattagaacaatgcatgacaatttctagattgaggttccaaggttactcttctctttggtctatcagtgccaaaaagccaaaaggtcatcttctaaggctccagggatagcactcattaccctgataaatggctcactctagaagtcctggctttgatgttaccttttaaaagtggctggtttttgtctggccaaaggtggggccatttgggtggctcacagataatttgtggcaacactgagttaatatcagtttcaagacaaaacacattttattgttaagaaactatttgttaactcattacctcatgtcatagtattctctgccttgccatgtggctataaaaaaaaaaataaacattcaagtttcacat

SEQ ID NO: 164558 - DNA, 446 bp, Homo sapiens
gtgagcaagatatcactaatatctcaaagaaaggaaaggacataattcaaaatggaacatagaacatttcaaacctgagaaatacataaggaaatttgtagacagacactgctttctttaaaagaaagaaaacaggtgtctgcttatccctgtagccagaggatctacatcttctgggggagaaaaacaagggtggaaagtgtaattcaccaaatctcatctttcagcccccataaagacctcacaccctcctgctgctgtgggaatcaggaggattttgactaaggaaagtattttaatctcagtaacactgagacatccaacctgagaggaaagtgaggggcaatgaggcaggagttctcctttggtgtgggctcctgggagggctgttgccctgttgtgcaggagcagtagctcctcgggcaggagcttgtctctgaggaggg

SEQ ID NO: 164559 - DNA, 215 bp, Homo sapiens
aacttgacaacaccaaaagtgggacaagctgacatgatatgcacccgatatgatgcaaaccatttacatgtactttgtagattttttttatagtatttttgccaaaaaagtttagcctgaatataatcaggatgaaatacattcaaaatgttggacattttataagacagtgggtcgaaggccgggcgcagtggctcacgcctataatcccagca

SEQ ID NO: 164560 - DNA, 604 bp, Homo sapiens
tccaaacatttaggaaaggagttaaatgcagtcaaagcttagattttagaaaaattcccctggccaactccagggaagaggagcagctccacgaccagagcaaaccaggtatttcctgtgcaggcccagcaagaatcctgtgcaatgaagtcgtttataacagaggaatgctttggcgagaagggaaggccatggagtaggaaatcaacatatttgtgttccagtcctgaaggtacctcagcccttttcatatacaagcttaatgttttaagcccgagtagctgcctctatgaaatgcaatcataaaagctgccttactcaccttcctgtgctgttgtgatgaccaaaaggtaaagaggggtacaaaagcattttaaaaactataaggcactagagaccaatgttaggtatgtacaaaacaaaatacctgttgaggataactttgaagttttcaatcagaggaaaaagcaaatgtgatctttaggatgagatagataagaactttctagctctaccccctcatctgctagaggacttagggcaattcttctagccattcagaacctcagtttgctcactgcaaaatgaggttaacgctccctat

SEQ ID NO: 164561 - DNA, 365 bp, Homo sapiens
tctatccctaatgcagcccctgtatctgtgtcctttccccattggctggagtaagaccgcacaatataaactaccccgattggctaaaacttaagcttttctaaatatggtcactgcgtgatggggaagcaagggagaggagggggtcctcacgggaaaccaggagctaatgcattcccaaataagggaaggaatgtgagccacaaaccagctgagacttaggcatgccagaatatattagggaacaggtaggccaggctcagaaaaatggagaacaaagaataatgaaactagatttcttgaagaggaacttattgtgtcccacacttacctccccctcaacccctaacctgcatacccatgtg

SEQ ID NO: 164562 - DNA, 640 bp, Homo sapiens
taatgtgtgtgctatgaatgtaaaacaccatattataatgaaaaattgcattggctcctgttattgttaatattaggtttgggacagaggaagaatggaagttcaaatggtgggaatgttgctttagaagcgatctatggcaaggaaacaggtcaggaaatgcagctggagaaagccatatgccttttgtctctttaggacagcaggaaagctgtagagaaaaggaagactgagtgagatgtgcaagtgcctcaagcttcaaggaaagggacaaaatggaagcaacattacaaacacaacatcctcagattaattcaggtttatgcacttatttcctgtaactgatgtaataaacaaaccttagtctgattcagaaagtgacatcacagagattatttccaatatccccaaaaatgtggggtatttccatggtttataaatttctaaaggtaaaatcaaactaaataaagcctgcattaagaaaaaagaaagaaaaagaaacatattcagatattatttatcctgaaaagaaaacaggtattaatttatatttccttatttactttccccctccccccaacagagaaacaaattatataacaccttgtgtttatataaacgtgtgtctccaagtaggagg

SEQ ID NO: 164563 - DNA, 564 bp, Homo sapiens
tataaagcgaacatgtgtcaacgatttatttaactccttaatgagggagccagaaaaatggtaaagctgccttcaaagagcatttgaaaggcagagatttacagtcagctgggaaaagaaacgctaaaataactttgctaagttagatgcagaactagttaatatcctataggacaataatcctgtgacctctgggtttagtttaggattttttttttccctgccagaagaaacacacctttgtcatacaggtgcatctttgcatctctataacaaaaataattggcaatttatcaatgtataagttaatttctaactttgcagaagctgtgctctaatcacacaggggtaaacagtaagtcaaacaaaggtacatttccttagagaactgaatagtctacaggtgggcctgttagtgctccggtgtgacatcaagagaacttgcaggcagcctttggccttacttctcacatctggaattctttaacaatatcctggctgggtgcagtggctcacacttgtaattccagcactttgggaggccaaggcgggaggattacttga

SEQ ID NO: 164564 - DNA, 417 bp, Homo sapiens
tctattgccatccattccctcccttatggacccaggaaagaaagaaaggtgtcctgggtcaagtcttaaacacactgacagaccttctgtcaaacacacatattaatacattaatagcatttgctaggagagagtccttatctgtggattgcttttagcagtacgtaccttgctatggtttggatctgtgtccccacccaagtctcatatccacttgtaatccccagtgttggaggtagggcctggtaggaggtgattaggtcacaggggtggattcttcataaatggtttagcaccatccgtttcatgctgttctcatgatagagttctctcgagatctggtcatttaaaagtgggtggcacctccccccattctttctgctgctcccaccatgtgagacgtgtctgtttctgttt

SEQ ID NO: 164565 - DNA, 683 bp, Homo sapiens
atctgtaaacaaaaagaacgtggtgtcagttctcatggaacttatattctttagggcagatagataataaataaaatatataaaactgttcaggtaatgatgaagtttatgagaaaaatgaaaagataattgtaaagtgtgtatgttggaagatgtagtgcattcttctgtaaatggtgtcaggtgcttttctctacggaggtcattttgcactggtatctgaagaagctagcaatgagatctgacagaatcatgttccaggctgacagaataacaagtgcaaaagtccagatattttagaggcttatttgagagtaagaataatagggctcatttgactagaaaatagtaacgataggaaaagaagtgagagataaaattgaataaactctagcaatgtgctctcgtggtcctatggttttgtcaattttgcaaaggtcaaaactgttgtactctttttcttaaagagggaaccccaaattatataaactttgggctccacaaggcctggatctcccccttatttcatttttagggcatagagagaattaaatgcgataatttaaagtccttacctcattgcctggacacatagccaacatttattcagtgcttgtaactattattattaggcagagttcttcaaaatcatgccaattctcttcataattaagaaatactgt

SEQ ID NO: 164566 - DNA, 582 bp, Homo sapiens
atctttaactaccaagcccagggtgcggcgccaggctgtctgcctgtggatttcatttctgccttttagtttttacttctttctttggaggcaaaaattgggcataagacgatatgaggggtggtctcctcccttactagaagaaggaagaaactcacatttgtcttccccgttggaagcaagctcaaactccataaaggagttacctgcatttcatcgtcatcaaagcaggaaaaacttgcctttcttgcgttggaagatagtaaaactccaaaaaaaaggagttgtactgcaaaataaactttagatcttgaccaagttttgaaagatcagtgattctctggagggggtgcttccaggcctgtctcggcaaattgttctattggtttgagccataaagatagttcaagctggtaccgagcactgataggagatttgtcaaaggtcaggggagcctccacccagaatcccttcatggttgccaaaatgtgagccttgaatatctgagaagggtctcagttaatttaggaagtttattttgccaaggttgaggaggcacacctgtgacacagcctcaggagg

SEQ ID NO: 164567 - DNA, 577 bp, Homo sapiens
gttggagagattatgttcttttggccaaggggaaggagccactagaaagcagaggttgaagaaacaggagaaagaacattgatagattaactggccctcaccttttctctgcctcaaggaaagcagtcaaagttggtatagacagaatttcggcagtgtatggtggattgggggtaggggtagaggaaattaaagcctgtgtttttttgtttatttgtttgttttttctgaggactgagtcattagctgaaagcatagggcattatagagcatagtggggacttggggaacctgccactggagaggacttaggaccttttaatggcagaaatgatgactgtgttggcagcagttcatcagtgcccagtactcaagggtccccctgagaagccagtggttgcactgatctaggtagaatcaggcacagaataagtcaggtgatgtgcctttctagcactggcctcaggctgagttataagggaagttacacagcgagagggacaggcaaagatggaaaagagagagtgagaaacagtgtcttcttcctggctggagagcccgtgtcatgaaaatgggg

SEQ ID NO: 164568 - DNA, 543 bp, Homo sapiens
gttggagagattatgttcttttggccaaggggaaggagccactagaaagcagaggttgaagaaacaggagaaagaacattgatagattaactggccctcaccttttctctgcctcaaggaaagcagtcaaagttggtatagacagaatttcggcagtgtatggtggattgggggtaggggtagaggaaattaaagcctgtgtttttttgtttatttgtttgttttttctgaggactgagtcattagctgaaagcatagggcattatagagcatagtggggacttggggaacctgccactggagaggacttaggaccttttaatggcagaaatgatgactgtgttggcagcagttcatcagtgcccagtactcaagggtccccctgagaagccagtggttgcactgatctaggtagaatcaggcacagaataagtcaggtgatgtgcctttctagcactggcctcaggctgagttataagggaagttacactggcgaggctaggaccactggcgaggctaggaccactggcgaggctagggcac

SEQ ID NO: 164569 - DNA, 318 bp, Homo sapiens
ttagcacgaaatcaccacccaatgcaaagagatcaattttcaaattataaagctgattcaaagctcagcctcctggctgccagctgaaaggatgccaccatttaagtctgctctggctctgtctgactgggctgtttccacggatgctcccacccctgaacaaggccctgagcagctgcctcgcagatcaggccacacaccaacaggtaggtgcccccagcagtgacctcatccccagtcataagaaaatgcctcccacctgtcaaatggcccagctcccctgaagacagcatctgcgtcctcctcctgcacccaggt

SEQ ID NO: 164570 - DNA, 315 bp, Homo sapiens
ctgatttctgcttccagtgttattttcgtccttctacttaacagaggttttattttgctcttttctagtttcttaaggtagaaagtcaattatgggtttgcaacctatcgtcttgtctactgtcagcatttagtgccataaatttctctatcagcactgctttagctacctcccacatatattgatacggtatggtctcattttcattaagtctatgcatttctactattgaatttgaggccccttcttcactccagactttatttagaagtctgatgtttaatttctaaatgattagatattttcctattgtca

SEQ ID NO: 164571 - DNA, 607 bp, Homo sapiens
acgtgggtttgcttctatcaaataaccaccccctaaatttaaacatgtgacctatggggaggaaggggcaccgtggagaaggcaggcttctttgaatatacctttttatagatgtgatattagaaccacacaaatattttatatatttaggacacagaattaaatgagatcggaaatgcaatgcctagaagtcaaaagcaaaatgaaacaatggcgggaacctgcatggagctcacagcatgaccactgagaggaccctgagcagctctaaacaccacggtgtgacttaaaatcctctgagtgaggggcccggtgcgatggctcatgctgtaatcccagcactttgggaggccggggcaggtggattgcctgaggtcaggagttcgagatcagcctggccaacatagtgaaaccccatctctaccaaaaatataaaaaagtagctgggcgtggtgctgcatgcctgtaatctcagctactcgggaagctgaggcaggagaattgctagaacccaggaggcgaagattgcagtgagccaagatcccgccatcacacgccatccagcctgggcaacaagagcgaaactccatctcaaaaaaaaaaaaaa

SEQ ID NO: 164572 - DNA, 149 bp, Homo sapiens
agatatttcaatattccaggagattggtgatgatgacttggttccaggtggtaaaagtcaaaaagtataaaacggtaactaaatatatagtttgaggtagagctaaaaggatgtgctgacaaattagatgtgtggtataaaaaaagaca

SEQ ID NO: 164573 - DNA, 191 bp, Homo sapiens
attcagtgaatacatatggcatttatggtacattttaaggacataaaattgcagtgatattattgggagtagattttattgccatggctttacaacacagacaaacaaaaataataactccattagttgttgaattgaactggcaggaagcagcacatcaaaagcgcttgtgagcaggcaggaggatgggg

SEQ ID NO: 164574 - DNA, 520 bp, Homo sapiens
tgctctgtgatcgatctagaggaccccggctcatttcatttaaaataagagtagactgggcctgggcactgtggctcactcctgtaatcccagcaggtggggggctcattatctgtttgtttcaagcagaagggtaagtctggtgcctgcatttattgaaggccttgtgtaattcgatgtgtggaatacccaactgattagaaagtaaatgttagccgggcgcggtgactcacacctctaatcacagcagtttgggaggcttaggtggcagatcacctgaggtcaggagttcgagaccagcctggccaacgtggtgaaaccccgtctctactcaaaatacaaaaatcagccaggcgaggtggcatccatctgtaatcccagctactcgggaggctgaggcacaagaattgcttgaacccgggaggtggaagttgcagtgagccaagatcgcatcactgcactacagcctgggcgacagtgcaagactctgtctcaaaagaaaagaaaataatgttaatta

SEQ ID NO: 164575 - DNA, 354 bp, Homo sapiens
ttacaggaggcggagctcaggtggtaatgcaagcagtggggagcagctgtaaacacagatgaagcttttgagcccctcctgctgtgaggccaggttcctaacaggctatggaattggcttgtagcctaggggttggggacccctgctgtataggagttgtgaaaggaaattaaatcttggggccctcaatccctaaactaaaggaaaaagtcaagtggggaactgcttagggctaacctgccttccattctattcaaaatcatccctctgctcactgagatagatacatatctgattgcctcccttggaaaggctaatcagaaatgcagccattggtctctcacctaactttaa

SEQ ID NO: 164576 - DNA, 492 bp, Homo sapiens
tttcaggatgaagccagctctccctcttctcaagcacctgtccttgtcacaaccttaccttcttctgttgctttcacaccgcaatggcacagtacctcctctcctgtttctatgtcctcagttcttacttcttcactggtaaagaccgcaggcaaggtggatacaagcttagaaacagtgaccagttcacctcaaagtatgagcaacactttggatgacatatcggtcacttcagcagccaccacagatatagagacaacgcatccttccataaacacagtagttaccaatgtggggaccaccggttcagcatttgaatcacattctactgtctcagcttacccagagccatctaaagtcacatctaccaaatgttaccacctccaccatggaagacaccacaatttccagatcaatacctaaatcctctaagactacaagaactgagactgagacaacttcctcccctgactcctaaactgagggagacca

SEQ ID NO: 164577 - DNA, 476 bp, Homo sapiens
acctggaaatgtggaagcagctttggaaccaggtaatggatggaggttggaagaatttggagggctcaaaagaagacagatagatgagaaaacttttggaccatcctagagactggttcaatggttgtgacaaaaatcctgacagaaacatggacagtgaaggccaggctgaagaggtctcagagagaagtaagaagctttctggaaaatgtcttccttttggatatggaaagcttacacaatgcctgtaccatcattgtaccttagaagcagtgaacttgctttttatttcagagactcataggcaaagagactgtagccttgacccagatgacactttggaccttgtaactttgagttaatgctgaagtgagttaagactttgggagactgctggcaaggcatgattgtattttgcaatgtgagaaggatatgagattcgtggggtcagggacagaataatatggtttttctct

SEQ ID NO: 164578 - DNA, 415 bp, Homo sapiens
tcgtatgtgtgtgtaccaaacctacagtaatcggaataaatatatagaaatattaatataaagaagagtcaagatagcaagcaattacacatttattaagtacatccaccttttgccagactctatgctgagcactttaaatgtcatcttatttatgtctcacaatgtacagtaaactgggtagggagagcttcaggaagtttgctaacatgctcaaagctgcaggcttgaatcacgtgtatttaactccaaaacctgcatgtgtttttcatcaccccaaactaattaagtaatatgaacataaacagaatgattatgcaaatttattttaaaagaagctcaagccttctaggtttatctgtgagaaaatggcaggtcccatccgaagcagttgccgcatccgaagcagttgccg

SEQ ID NO: 164579 - DNA, 182 bp, Homo sapiens
agctctggattcatcatttattggttatataaccttgaacaagtccctaacttcctgagcctcagtttcctcatgtcttaaatgaggattgtctctactttgggcccctcattagtttgtaataaaggtcaaataatatgaaagatgtgaaagccctgtgtaagcttttcacttgggcaagg

SEQ ID NO: 164580 - DNA, 238 bp, Homo sapiens
agaaagatcttaagttgtgcctcagagtattttcatcagacaaacgatgtgtctcagaaaatctctgaataacatcacaggtttttaaaaagtttaagggtattttcatcagcaaaagcttgaggcagagtttatgtgggacgagatgtgtggttgttgcttttgtctgatggagtgaactcaaaattcacaagtgagccacaaagtttttaagagaagtctattagcagaaacatgg

SEQ ID NO: 164581 - DNA, 388 bp, Homo sapiens
ctacaggactgcccgacagcaaaggaaatgaaatgaatggaagagatcatgactttgtagagctgtaagtccacatgaacacatgatctctcttcaaagataccagtgtccagtccaaagaagcagtacagaattccaacccttcagacggttccaatgtagggtctgaatctttccattataccacaaaattagtcccactctctttttttttttttttcttgagacggagtctcactccgttgctcaggctggagggcaagggtgcaatctcgcttactgcaatctctgcctcctgggttcaagcgattctcctgcctcagcctcccgagtagctgggattacaagtgcctgccaccacacggggcgcagtcggtgagggggtacc

SEQ ID NO: 164582 - DNA, 129 bp, Homo sapiens
ttttacatttcaaataatccttgtctgtcttaggccaggctctaagtgcttttgtcaataaactagaaacctttgtgggttttgaaatacccaaagatttttagatttgactccaaaattggctgggtg

SEQ ID NO: 164583 - DNA, 330 bp, Homo sapiens
ggggtggctgtgtggagtctctagcaccagccttcaggacagaaccgtcctgtcctctcccctccccagttagatttctgtcaattctgtgggttggctttcagagagcatttggtcaatctggttgttgtctctttccttccataactacttccctgcccctaggacttttgtagccaggaatacccctgatagaggggcagaagggctggttttcaatcacatctccctggctgttttagttgcgtgactctggggaaaatgctttctcttccctgctcccctgtttttccaatagcagagtaggaattggggaggaggtcactggac

SEQ ID NO: 164584 - DNA, 527 bp, Homo sapiens
tgtgcccagctcttctagttcatttttaagtgttgagtccctgctgttttaagagatgttttggtgaaaatctacattcagagagaaacagattaatcttccacatttttaataaaatacatatagtacttgggattttaagaaaagaatgccatgtattaaaaggtgctattttcaactgtttattattttaaaacaggaatgcttatcaatacttttgaatttaagataaatgtcttggttaaattttctaggcagttcaaagatggccatttgctggtgaattttccaaaataggtaacagataaaatgattatgtaagaacttggcacaacatatccttttgcctttagttgttcaagaaatgataccaaactcaaagtcattcacttgaaacaactgagaagaccattcttaggtgtttagatccttgcttttagaaatattcttagttatatttgtgtttttaagagttattgagtggattttttttcatgaatttttaaacattagacttagctgaattg

SEQ ID NO: 164585 - DNA, 248 bp, Homo sapiens
tttagcatttgccatccatggatgactaagtgttaaaccagcttagtggagagtcagggtgatagcccttttcaccctgccctcttggtacccgggttcttgtccagcatccaggaagaaatcaggtcccatggccttgaaggatggtgaatgtggagatttgattgagcagtagaagtggctttcagtgggatggggagctggaaaggagatggagtgggaagatagtcttcccctggagtttggcc

SEQ ID NO: 164586 - DNA, 320 bp, Homo sapiens
aaatacgtaagaattgtttgcatccatttcctggcagtatttcctatttttaggagtgaggtgaatgatgttgtagagctggagataccagtgggctgactacaattttcaaagcaccttgagatgtaaaaaaatgtttctgtaggagggaaggggtacggttctgataaatctctcagcaggatgaaaaagaaaagggaggtctagacagtcttgtttcatctaatagaattttcccacagaagatgggcaaacatcagataagaacatttatcagacctcacacattttacagccatatccctttgggaacattgcgc

SEQ ID NO: 164587 - DNA, 566 bp, Homo sapiens
tacactgcacggcagtagtatcaaatgatctcccacaatattctgagcacctaggattcattttcccattaacagtaggaggtttaactggcattatactagctaattcatcattagacattattttacaagacatatattatggtgtggcccatttccactatgttctatcaataggagcggtatttgccatcacaggaggctttgtccactgattccccctattttcaggttatatacttaatcagacgtatgctaaaatccacttcatcattatatttataggtgttaatttaaccttttccccacagcacttcctcggcctgttggtgtgcgtcgacgttactctgattaacctgatacatacaccacatgaaatgttatctcatcagtaggctcatttatctcattaacagcagtcatattaataattttcataatctgagaagcctttgcttcaaaacgaaaagttctaacaattgaacaagcatctactaattaacagtgactttacagctgtccaccaccttaccacacattcgaagagccaatctatgtgaaaacct

SEQ ID NO: 164588 - DNA, 226 bp, Homo sapiens
aaggtacagcactgtacaaactgctgccgggcgttcttttgaggaagcaacgtcttctgccttgggtgcttgggaagattccacagaggaagtgacatttgagccagtttgtatgaatagttagagttgtggataggagttggaagaagggggacattttaagaagatgactagaaatgtaattgaatagtttagtgagtcttttatcctccttaaacctttaggt

SEQ ID NO: 164589 - DNA, 203 bp, Homo sapiens
tgtgaaagtccacttgggcaggcagggggagctacttgcaaatagcattaggaagcaagttccaaacagtaggtctaatgttactcttcaggtaactctcagcaagcaggagatttggagttggtttggcaactggatcaagatagacttggcaacctagtttatattacttcagcaaacacaggttgtataatgttttaaaa

SEQ ID NO: 164590 - DNA, 411 bp, Homo sapiens
acttaccacctccatagcatttgcattttaggccctggtgccaggcactttatattttatcttatttagtcacaacaaaatcataacagaattgtaggcgttactcactttgcttcatacatgagaaaactggggtccagaaagattaaataacttgctcaaattcatatagccagcaatggcatgactcaaaatcaggtctttcaagtgccaaagcccgtcctctttttcttctaaatcatactggtcataggaaactaaatagagtttttataacgtaggctttcacatattggagagcaaaaaagagaaacttgatatttgaagtgcccttttcagcagtatggattctgaaaccacaacataaaggcggccacctttctcatacacacataagaccaaccttcccac

SEQ ID NO: 164591 - DNA, 360 bp, Homo sapiens
tggttactgtagctttataataagtcttgacatcagatagtgtaaatcctctagttttgatctttttcacaatattgaatcttctggcccatgaacacaatattgttccatttccctgggacttaatttctttcagcgatgttttataattcttagtttatagctcctgcacatcttttgtcaaatttatcaccagttacttcgtatttattaaagttatcttaaataaccaggttttacaggctttgttattaatgctgtattagctcacatcaaaaaaagtaattgaagagcattttctctgtctttgtactctgtttgttgaagatttagaggaattaacgaatggagcttttgtac

SEQ ID NO: 164592 - DNA, 476 bp, Homo sapiens
ctcacacatttatacacatctgtacttatttatacaattatccatctgtacgtatactaaaaacaatgatttcatgaaacttttgatcccaatccaacactagataaagactatataggcccatttatttgcaaatcagcacataaacatagaagaattattaacaatataagctgtagcttatgctaaatgttggttggaacagacaataagttatggagaacttcagaggacactaaggttggatgggattttggaagttgtacaggtcaatgccactccatctattggctgagtttcactaggttaatacatgaacaacaacaaaaataacctagatcagaagttaaaggtcattttattgactatctgccgtgtctgtgccattgcagtgtactaggtgcacttacgagtcctctacttacaaactgcttttcacaaaatatgaaactccaggcaaaggttcagacatatga

SEQ ID NO: 164593 - DNA, 621 bp, Homo sapiens
aggatctccttcacttcagtttccaataacatcttcctcatttccttcaaagcactcacaagcagcagcacctttaatgttcacatttccaccaacagtctctttatgatgatttaggtattctctaagacgatacacattttctctactgtgctcctcacttccttctggggcatcaccagcagagcctttaacatctgtatttctaccatctgtacattcaagataatctaggttttctccattatgttcctcaaaattctaccagcttctgccaataccccaatttcaaagccactttcacctttttaggtatttgttacagcggcattccacttacaggcaaaatctatatgggctgtggtaagaaattactataaacttggtgtaaagcaacacaaatttattatctcatggccttagctcatggccccttcccttcatcttcaaagcacatcattccaacctctgctgcagtcattcatctcttctgccctgattggttttgcctccttcttacaaggactctctgattacactgggctcacctggacaatcctggctaatctcctcatttcaaaatctttaacttaatcacatatgcaaagtttgtggagccat

SEQ ID NO: 164594 - DNA, 259 bp, Homo sapiens
agctggggaagcagcaggtagcacacttgaaagcaggcacttcgcaggaggaaaaaaggtcaggctgagccagctgagcatgtgcggtttgccaactaagtgaatccatccctccacttgccctggggcgatgttagtaaaaggacatagagaggatagtaggatgcatagggaaaattcttcctcatccaaaccacgagtggggaaatggtgcttccctctgaggtgcctcaagattttacactttttgagggtcatg

SEQ ID NO: 164595 - DNA, 461 bp, Homo sapiens
agcctgaatcaaggttaactatacaaggaggttatttatgaagtcaaaacaattgaaacactaaagagagagttgggtgaataaacatatagagtatacctgagttaagtggaaattttaagaaataggccagattatctcatctatcttattgaattcaactaatctgtaatgccctgcaaatcgcaaaccatccaaaaagatgggtcactgtaactctcactgcacaaacaatgagcctgggtgacagagcaagactcttgtctcaaaaaaaaaaaaaaaaaaaggaaatgcagaaatcacctgtcttctgcattgcttacactgggagctgtaggctggagctgttcctagtcggccatcttagaacctcccctagtttagcttattataattagaaggtgccattttttaataaattttttgtttgctgtgtcagtttttattgggagcaaattacc

SEQ ID NO: 164596 - DNA, 248 bp, Homo sapiens
agctgggtgcagtggtgcgtgcctgtagtcccgtgcctgcggcatgggaatgggttgagcctgggaggcggaggttgcagtgagttgatgacttaggatttttcttctcggtcactttgcaagccggggacccctggccagtgatgccccacctgggccctgcttggccacactggcgtgccccaactcacctgtgttatagcttgtactgtgttcggccattcccgagctcatgtaccgcactcaag

SEQ ID NO: 164597 - DNA, 737 bp, Homo sapiens
  misc_feature (12)..(12): n is a, c, g, or t
  misc_feature (36)..(36): n is a, c, g, or t
  misc_feature (61)..(61): n is a, c, g, or t
  misc_feature (603)..(603): n is a, c, g, or t
ccagacagtatnggtctgacacggtgtgcagaccantattgccctggtattgctttgtgtncctggatttggagaatttctgggaacacaggaaaaggaaaggtaggtaggtgttgggggaggaaagtcaagggaagaaggtatgcaggatattattctccattgcttgaagtctcaagtttctatcccctgtcttagaagcaacttaggggagtcatggacaggttcagcttctatggagcactattagggggacatttcctctatacagcttgttccagagatcatcttatccattttcttgcttccaagtacacaaatcccctacagcccctgacccctatggaattttaccatgtcttataagatctacagggaaggaaatgcattatttaccccacctccttaaccaagaagcaaatcccccaatcaagactaaatgctgagctttttttttgaaatcttaccacatatttccctgctgcaatataataagccactggagaaacttatgccaacaaatgtgttaaggagtagtcttatacgtcttgtcccatggcaaagcctagaacagagatagaatttaaattcaaggccctgaanggctgaattagaaatgctcctgaattcatgtggtgccatggccttagagctcttagacccctctgactcttgtagtgttgatgtacactggagaaaggggcaagtttccagctgtacccatccccaaccccttg

SEQ ID NO: 164598 - DNA, 375 bp, Homo sapiens
  misc_feature (43)..(43): n is a, c, g, or t
gaggggaaatcatttgaatcctgtcctggtattgctttgtgtncctggatttggagaatttctgggaacacaggaaaaggaaaggtaggtaggtgttgggggaggaaagtcaagggaagaaggtatgcaggatattattctccattgcttgaagtctcaagtttctatcccctgtcttagaagcaacttaggggagtcatggacaggttcagcttctatggagcactattagggggacatttcctctatacagcttgttccagagatcatcttatccattttcttgcttccaagtacacaaatcccctacagcccctgcgagttgcacaggcctctgaagttggtctgggtcagagtgcgtgccgtttatcctcg

SEQ ID NO: 164599 - DNA, 309 bp, Homo sapiens
tagaatgcctctctgcaagtttgtttaatgtgaaagagaaacaagcatcattttgaataagccattgttctttgcagtctctgtagctggcaactaattttaactaatccacaactcatccaaagtgatggcacagagttcagaatcaggcctgtcagtctatgaagtttgttctcttaggtaaaaccttgaagaactcttgcttgtaatttgcaagagattttgaaaagagaaaagtttcaaaatgctgaaaaggaatttgacagaagaaaataaggaaagtttgaatatgctcttaaatctgctacc

SEQ ID NO: 164600 - DNA, 632 bp, Homo sapiens
atcaaacccaaaattagtaggaggaaaactataataaggatcacagcagaagtaaataaaattgagactaaaaaacaggagatcaaaaaatgaaaagctggttatgtttaaaagataaaaataatcaacagaccattaaccagactaactatgaaacaagaaaaaaggcacaagtaaataaaaccaaaaatgaaatagtagacatcacaactgatatcacacaaacacaaaatatcattagagactgctacaaataactataagctaacaaattagaaaaccaaccagaaaatatgtaaattattggacacataaaatttaccaagattgaacccaaaagaaacagaactcctgaattgagcaattgcaagtaatgagattgaatctctaataaaatatctcccatcaaagaaaaaacccagactccactgacttccttccagaattctacaaaatatttaagtagaactgataccagttcttctcagagtcttccaagaaattgaaaagaatggaattctttcaaactcactctgcaaaaccagtatatcctgatagaaaaaccagacaaggacacacgcatacagaaaaaaaaaaaaaactataggccaatatccataataaacatagat

SEQ ID NO: 164601 - DNA, 300 bp, Homo sapiens
tgtggaaatggcagtgtgtgactgctgaggccaggtcacaaaatatagtgtgactttctcttgctctttcttggatcattcattctggggaaatcagcttccatgttgtgaggatgttctggcagcctacggggaggtttatgtggtgagactgaagcctcctgcccataaccatgtgtgtgaaccatatggaaactgatcatccacccccagtcaagccttcagatgactgctgccccagccaactaagctgctaagctgtaagataataaatgtttaatgttttaagctacttagttt

SEQ ID NO: 164602 - DNA, 431 bp, Homo sapiens
ttctgaactgaaataatctgctacttaaggacaatgggccttatttaccgtgaggaactttgctgctgagatgaatatttttacaactaccctcataaacccctcccgctgtctgctgcccagggagggggcggagctcccagaggtgagctgaggtgcttgcactgtctcagaagccccattaagttgttaaggcatttagtagtccagacagtgccgactgcaagggcagttcaaatccccacacaaatggggatggggtcatgaaagagggggctttgatttcttgcctgggcagggcacagaatccaccttggtcaggggcagtggttggggaggaagtagtaaactacccagaatgggagactctcacccttaccccacctctttggccatgatctcccaaagcctcagtgtcatttagaggggaa

SEQ ID NO: 164603 - DNA, 337 bp, Homo sapiens
aagggaagatgtagagctgacagccaaatcaggatctcctgtgcagagagggtggggctgtgggtgtggaggaagacctttaccacttttcatgctctagggcacagagggattcaggagcttgcaagagctgcaggtgaaagtgacgtaaagtgtggctatgaactcaggcactctggggaccccggaaattgcccatagccccaaactggctctaccagacacagctgctctctttgcacaggtttagacttccttgccaaggaagatctaaagtgagtcatcactgttgattcaccgggcttatgtatttagctaattcaactaaaattaaaaa

SEQ ID NO: 164604 - DNA, 487 bp, Homo sapiens
ttccaggcagcagctatgaatccgttcccagagccaggctagacaatacaacacccatttcccagctgcttgcagctcttgcattagctgggaagcagctttaccttaagggaatttaccacccttagaatttttttttttttagaaaaatatacattttttctttccttttaaaaaagccttcaggctcttgctaacttcacaactggagccctatcagaaaaaggcaagttgtcaaatggcaaatatgaagtccgtgttgttgaatcgtgagcgccgggggagaatagagggggctgtggagctgtctcggggtcagagccctgcggagacgccagggctgggcgggcctgagacctccgcctgcagtcagcaaggcccccttggctgatggacctgagaatttctgtgttacttctttttatttctgcatgcttcacgtcacagaattttcgaaaagtggcaatagaaccaaatgataaaagca

SEQ ID NO: 164605 - DNA, 302 bp, Homo sapiens
aaaatattaattgccgctttgtaaaaatctaagcaaagggtaacaaaaagtcatgattaggttaggcacgcctggttttagtttcaaacatcaattatttgagattaaaagtattacttcaaccccacatgacagttttctgctgtaaaacttgagattctcaaacctgttttcttctaaatggcaaagcattcttctaagtcatcccttcaacctcctacatgtcaccataaaaatactataataattctggaaggaatggtaatatgaattataaaggcagaaatacttcaattaaatat

SEQ ID NO: 164606 - DNA, 182 bp, Homo sapiens
ttcacgtatctttcatctttatattattcatatctttaactgcaaaataaatgtttctttttttaaatttatgctgggtgtggtggttcatgcctgtaatctcaaaggaggctaaggcaagagatcacttaagtcaagagttggagaccagcctgggaagtatatgacactcagtatctacc

SEQ ID NO: 164607 - DNA, 477 bp, Homo sapiens
agatgtctctgttttagggacctacggtcattttcagtgcagccacgtttcccctggttgactcatctggttgtttatccagtttttaaatctgaaattcataccattttgagtcacaattgcactgtggacaatcacaattaaaatgcttaagtgaaaagcaaatactgtctttccagagagtgtctactgatgcgctgagtaagaagttgctattggttacttgttcactggaacatactttaagtgtggatgtgcattgtgttataattgcttgtggaaatggcctttctgttttcagatttttgtgtagccttctattgctgctgttgtaatagcactgtttttcttttcatataaaaagtgagttagaagcagataaaaagagaagcatttgattgccctcaatcaggcactggcttgcggttgtcattaaatcagaggcttatttgaaatccgttattggcagtaacccat

SEQ ID NO: 164608 - DNA, 1312 bp, Homo sapiens
aaaaaatggaattctggtctaataggcaagaagcatctgtctgatatatcagggagacttaagcatttgacaaacttctaaaggatttaaaagatgttttgaaattaaaatgtccacagcatggtggcttgtgcctgtaattccagcaacttgggagaccaaggtagaaggatcacttgaggcctggagtttgagaccagcctgggcaacatatcaagactctgcctctaaaaataaaaaaaataataataattagctgggcctgatggcatatacctgtagtcctagctactcaggaggatcacttgaacccagaagtttgagactacagtgagctacaatggggccattgcaccccagcctgggtaacaaagggagacccgcctctttataaattaattaattaattccagggcatagagttcactgtgtaaaccatttctagactgaattggtcattaaaagtagatctaaggattctttcattcaactacaagataacaaattaaatagactgaagaaaatgttctcaagtctctgctaaatgcaggtatattcagaggttgataagatacatgtcctgtcttccagaattcagttttaagcagtgtttttcaaacttatctttcattatcgctcccctaatgagctaattaaactttttttttttcaaatcgctccattaccacccactacccccgccaagaaattttaataccaaagataaactatgtatctgttgatgtactgcgtccctttgaaaggctgcaagtcattacaacagctaagatttcactccccccaagaatcaatgttcactcccctggaggcaacatggccccactgagaaatcctggtgtagagaaaatgttcgtagaacctgtcaggcctctgagcccaagctaagccatcgtatcccctgtgacctgcacgtatatgtccacatggcctgaagcaagtaaagaatcacaaaagaagtgaaaatggccggttcctgccttcactgatgacattccaccactgtggatttgttcctgccccaccttaactgagcaaataaacctggttaaattccttctcctggctcagaagctcccccactgagcaccttgtgggccgcccctgcccgtaagagaaaaaccccctttgattgtaattttccactacccacccaaatcctataaaacagccccaccctaggtcccttcgctgactctcttttcggactcagcccacctgcacccaggtgaaataaacagccttgttgctcacacaaagcctgtttggtggtctcttcacatggacgcgcgtg

SEQ ID NO: 164609 - DNA, 142 bp, Homo sapiens
gacgccaccaaatccacctgtccaggcttgacctctgccccgcccagcgccccctcgctctctggcccccgaggcgggaatctggctcctgggctgcggtcctctccacagcctccctgcccagtcgtaccttaggccctgg

SEQ ID NO: 164610 - DNA, 221 bp, Homo sapiens
attgagtgactacttatttaagtatctttgttttcttagctctttgcacatgaacttgggtacaaatcagaaatttgctgtaattctaaagtgacagattagagggatcaggttagaagggcacagggagggaatatctaggaattatgaatgtcatgaccccaaataatgttctaatgctaaattgttttcttaagtggatagaaatgaaaattttataa

SEQ ID NO: 164611 - DNA, 322 bp, Homo sapiens
cccagcccccgtccttgcacttctgttccctgtccctgagctgccgccaactcgtagcttcagtgttcccctgatccatcgtgccttctccacacacggttttacactccctccatatttgttagttgaaagtttccaagacagagacagtctgaatctctcagctcatccctttctcagggcatggcctgggctgctgctgcttagcctggatgaggcaccccctcctacctccatcggctatgactagagcccctcagagaccagttcatttggtgcaaaccctgcctgccctggccacatgagcaggaaccatgagtcc

SEQ ID NO: 164612 - DNA, 144 bp, Homo sapiens
atcctctccctttcccctacatccctctggtctcccttcctctggggtttcacactcaatccattctccaccctgcagctgggatgattctcctaaaatgctaatcccagtttgtcagtgttctacttagaaggtccagcagtg

SEQ ID NO: 164613 - DNA, 305 bp, Homo sapiens
gtgcaggttgcactgggggggcctggttgagatcatgactggagtccctggcccccagagtgggagtcatcagtggggctcgctacctctgcacaatttttttttttctttgagacggagtcttgctctgtcgccaggtggtacagtggtacgatcttggctcactgcaacctccgcctcctgggttcaagcaattctcctgcctcagcctctcgagtagctgggactacaggtgtgcaccaccgtgtccagctaatttttgtatttgtagtagagacggggtttcaccatgttggccaggatgg

SEQ ID NO: 164614 - DNA, 117 bp, Homo sapiens
ctgagagaggaacggacggggagggagcaatggttggcagagagagatgaatgcgcttagcgtgcctgtgtgtgaggccagtgagtgggtcacctgagaacaggaccgggctgtgca

SEQ ID NO: 164615 - DNA, 281 bp, Homo sapiens
tgctgggattacaggtgtgaaccactgcgcctggcctaataatttttatattgatagagaatttgggctctgaaggccttcagatatctacttggtatatatgatagctgctttgccaggatccttaagtagctgaacattgtgtaattagcaatgctttataaggattgagccctttattttaatctttgaagttttagctaaaggcagaacctacaccagaggcccctagaacattgtccttaagttccattcattgtaacatttattttttgagaaag

SEQ ID NO: 164616 - DNA, 506 bp, Homo sapiens
atttcccgacggctgctggcaaggagcacctgccacgccctgattggctgtctgcatcctcttcagggaagagcccccccacgtcttgcccattctcacatcggcttgttttttcatggttgagttttaagagttctctatacagtctggaccccagggctctagtcgggcgtgtgtgtttgtgaatattttccccgctctgcagtttctctttccatcctcatcaaagagcctttcccagagcgcacgcttttcacctgagatggggaggccaccctggatgaccaggtatccttacatgagcgagacggtggggggggggcagggtttgcccccaaagacgaagagaccacatgaggataaaggcagacatgggagcgatgtggccacaagcccaggaatacctggagtgcccaggagctgggagaggctggaagggcccagagcctctggaaggagtatggctagagggacccagagcccccagagggagtacggctggaagg

SEQ ID NO: 164617 - DNA, 527 bp, Homo sapiens
ggtggtgcttggtgctgtaactgaaggagggtaaaggggagagaagcactttgaaaagtctagccttgtagaggcttgcatctcctcgcctgttcttgccaagagctgaaagccatgcctcacttgaaaggtctaaaactgtagtcttcctgttttttacattatttcattttcccatgagttggctaaaagtcaatcctttaccaaacagctgccgatgtgtgagacatacaactgtgttacaaagtctactgaaccttgtaagaagccagaacatagccaaaattgcatggtccattgctaaaaaagtaatagatgagggatcatcaaacaattcatgaaaattcatattatgaaaaacttaagcatggatttcaaatttctttgtgccaaacaaacttttactaacttgttaaaacatgtctgaataggatctagtttgaggcactaagaaggataggacatcagttggaaaaaagcccccatcaaaacaacatgaattctgcagcaattgaagcaatagcata

SEQ ID NO: 164618 - DNA, 498 bp, Homo sapiens
ggatatataagttatttgttgcagcataacaaatgatccccgcaaattttgtggcttcaaacacgaaatgtttattctctaacaatttctacagatcaggaattcaagaacagcttatctctgtagttacactgcaggatctctcatgcctttacttacaatcaagatgtcagccaaagctatagtcatctaacatctttactgatgaacagtccacttccaagatgacttattcacacgcccggcctgggagggatttttttaagctgagagaattaacagcataaccgtattttcagaaacactgaagagatttcttcaggcttcaggaaaatgattccatagagacatacataattccaggaattaagatcaacaggaaacataagatgcaagtaaatataaatcagtactgactgtataaaacaaccctgtatagttttacaacttttatgtatatctaaactttccaaaataaaatgcttttaaaaacacatt

SEQ ID NO: 164619 - DNA, 2155 bp, Homo sapiens
ttttgtaccttgatttttttttcacttaaatttattggagataatctctctgaatacctagaaatcttttcaggggttctttgttttggttttggtttggggtttttttttcctggctacatgtttctttgttatttattaagttgctgcaaaagtaattgcaggttttgccatcgaaagtaatggcaaaaaccgcaatcacttttgcaccaaccttaaagctatcacatagtttattcacccaatcccctactgatggtcacttgtggtgttttcaatcctctgcgattatatgaagtgccacagcgaatcatcttacacgtgtctttcagtatttgtgtacctttgagatagatttctagaagtgggttctaggaaagaacaaatgttttttgcagctttgcttgacatcagcacgtttccttccctaggggttacccccagcagtgtgtgagaatgaagagtgtgggccactgtgtctctgttgacctgccagataggaaatagcgccagagttgctgcaatccacgtctccctggaattcaggagcagcttggctggaaggctctggctggaaacttgcagaaggctgtcagctgggtctgcatcatctgaaggctcaacgggtaccgggggccactccatggcctgcgagtcagagctggccgtcggtgggaggcctcagttcctctccacataggcctctccacagggccacttgagcatcttcccaccatggcaactggtgtcctctagagcaacatccaggagaccaaggcggaagcagctgtagtgccttctaggacctggtcctgaaagtcacccctgcacccacccccgctgtctcctcagccatattctgctggtcacacagagcgctgcgggataaaggaggagcgtcctgcttcccggctgccctgttgctgtcggagtcacaggatggcggctgtcatcctgccctcgactgctgctccgtcttccctgttcccagcctctcagcaaaaaggacacacacagggcggagagctggttaatgagctcctgacaagctggctacggggcttggtaaccttcgaggatgtggccgtggagttcacccaggaggagtgggcgttgctggaccctgcccaaaggacactgtacagggatgtgatgctggagaactgcaggaacctggcctcactagggtgtcgtgttaataaacccagtctgatatcccagttggaacaagacaagaaggtggtgacagaggaaagaggaattctaccaagcacctgtccagatttggagactctacttaaagccaaatggttaactcctaagaagaatgttttcagaaaagaacagtctaaaggtgtaaaaacggaaagaagtcatcgtggagtgaaactcaatgaatgtaatcagtgttttaaagtcttcagcacgaaatctaacctaactcagcacaagagaattcatactggagaaaaaccctatgactgtagtcaatgtgggaagtccttcagtagcagatcttaccttactattcataagagaatccataatggggagaaaccctatgaatgcaatcactgtgggaaagcatttagtgatccctcatcccttagactgcatttgagaattcacactggagaaaaaccctatgaatgtaaccagtgttttcacgttttccgcaccagttgtaacctcaaaagccacaagaggattcacacgggggagaatcaccatgaatgtaatcagtgtggaaaagctttcagcacaaggtcctctctcactgggcacaatagcattcatacaggggagaaaccttatgaatgtcacgattgtgggaaaaccttcaggaagagctcctatctgacacagcacgtaagaactcatactggagaaaaaccctatgaatgtaacgagtgtgggaaatccttcagcagtagcttttctcttactgtgcacaagagaatacataccggagagaaaccctacgagtgcagtgactgtggaaaagcctttaataatctctcagctgtgaagaaacacttaagaactcacactggagaaaaaccctatgaatgtaatcattgtgggaaatccttcacaagtaactcctatctttctgtgcacaagagaatacataatagatggatatgaattactg

SEQ ID NO: 164620 - DNA, 2164 bp, Homo sapiens
cgcggggcggtaccgtgggaggggccgcgcgtggggcagcggggagcgagtccctccgtccccgcgagtcggcgcttttggccccgcgggaggggccgggctcggtgagcgactggcgggggctcgggtccgagtccagggggcgacgtgggccgcggacaccgccagccacgggccctgcgtccctccagggagccgtgtttcggttcatgaggcctcgggctgtgagcttagatgagaaaagcatcattcaagctcagattcgtattgaagcctgccacaaggtccacctgttgttgtgggtttttgggtgaccagaccaagtctcactctgttggccaggttggagtgcagtggcgcgatcttggctcatgtcaacctccacctcccagactcaagcaaatctcctgcctcagtttcctgagtagctgggactacaggggttacccccagcagtgtgtgagaatgaagagtgtgggccactgtgtctctgttgacctgccagataggaaatagcgccagagttgctgcaatccacgtctccctggaattcaggagcagcttggctggaaggctctggctggaaacttgcagaaggctgtcagctgggtctgcatcatctgaaggctcaacgggtaccgggggccactccatggcctgcgagtcagagctggccgtcggtgggaggcctcagttcctctccacataggcctctccacagggccacttgagcatcttcccaccatggcaactggtgtcctctagagcaacatccaggagaccaaggcggaagcagctgtagtgccttctaggacctggtcctgaaagtcacccctgcacccacccccgctgtctcctcagccatattctgctggtcacacagagcgctgcgggataaaggaggagcgtcctgcttcccggctgccctgttgctgtcggagtcacaggatggcggctgtcatcctgccctcgactgctgctccgtcttccctgttcccagcctctcagcaaaaaggacacacacagggcggagagctggttaatgagctcctgacaagctggctacggggcttggtaaccttcgaggatgtggccgtggagttcacccaggaggagtgggcgttgctggaccctgcccaaaggacactgtacagggatgtgatgctggagaactgcaggaacctggcctcactagggtgtcgtgttaataaacccagtctgatatcccagttggaacaagacaagaaggtggtgacagaggaaagaggaattctaccaagcacctgtccagatttggagactctacttaaagccaaatggttaactcctaagaagaatgttttcagaaaagaacagtctaaaggtgtaaaaacggaaagaagtcatcgtggagtgaaactcaatgaatgtaatcagtgttttaaagtcttcagcacgaaatctaacctaactcagcacaagagaattcatactggagaaaaaccctatgactgtagtcaatgtgggaagtccttcagtagcagatcttaccttactattcataagagaatccataatggggagaaaccctatgaatgcaatcactgtgggaaagcatttagtgatccctcatcccttagactgcatttgagaattcacactggagaaaaaccctatgaatgtaaccagtgttttcacgttttccgcaccagttgtaacctcaaaagccacaagaggattcacacgggggagaatcaccatgaatgtaatcagtgtggaaaagctttcagcacaaggtcctctctcactgggcacaatagcattcatacaggggagaaaccttatgaatgtcacgattgtgggaaaaccttcaggaagagctcctatctgacacagcacgtaagaactcatactggagaaaaaccctatgaatgtaacgagtgtgggaaatccttcagcagtagcttttctcttactgtgcacaagagaatacataccggagagaaaccctacgagtgcagtgactgtggaaaagcctttaataatctctcagctgtgaagaaacacttaagaactcacactggagaaaaaccctatgaatgtaatcattgtgggaaatccttcacaagtaactcctatctttctgtgcacaagagaatacataatagatggatatgaattactg

SEQ ID NO: 164621 - DNA, 1352 bp, Homo sapiens
tcattcacttaccaagtatttctctgctttctgccatgtcacgggcccatgatcccctggagattgagggaaataagatcacaggagctcccagtctgagtgagaaaaggcagctgctctgtggtactgtgcactggacctgggaatggcctaaggagacaagcattgagggctgagctcagaagccagggagaagagctcagaaccccaggagaggagctcagaaccctgggagaggagctcagaaccctgggagggcttggtaaccttcgaggatgtggccgtggagttcacccaggaggagtgggcgttgctggaccctgcccaaaggacactgtacagggatgtgatgctggagaactgcaggaacctggcctcactagggtgtcgtgttaataaacccagtctgatatcccagttggaacaagacaagaaggtggtgacagaggaaagaggaattctaccaagcacctgtccagatttggagactctacttaaagccaaatggttaactcctaagaagaatgttttcagaaaagaacagtctaaaggtgtaaaaacggaaagaagtcatcgtggagtgaaactcaatgaatgtaatcagtgttttaaagtcttcagcacgaaatctaacctaactcagcacaagagaattcatactggagaaaaaccctatgactgtagtcaatgtgggaagtccttcagtagcagatcttaccttactattcataagagaatccataatggggagaaaccctatgaatgcaatcactgtgggaaagcatttagtgatccctcatcccttagactgcatttgagaattcacactggagaaaaaccctatgaatgtaaccagtgttttcacgttttccgcaccagttgtaacctcaaaagccacaagaggattcacacgggggagaatcaccatgaatgtaatcagtgtggaaaagctttcagcacaaggtcctctctcactgggcacaatagcattcatacaggggagaaaccttatgaatgtcacgattgtgggaaaaccttcaggaagagctcctatctgacacagcacgtaagaactcatactggagaaaaaccctatgaatgtaacgagtgtgggaaatccttcagcagtagcttttctcttactgtgcacaagagaatacataccggagagaaaccctacgagtgcagtgactgtggaaaagcctttaataatctctcagctgtgaagaaacacttaagaactcacactggagaaaaaccctatgaatgtaatcattgtgggaaatccttcacaagtaactcctatctttctgtgcacaagagaatacataatagatggatatgaattactg

SEQ ID NO: 164622 - DNA, 758 bp, Homo sapiens
gcacgtaagaactcatactggagaaaaaccctatgaatgtaacgagtgtgggaaatccttcagcagtagcttttctcttactgtgcacaagagaatacataccggagagaaaccctacgagtgcagtgactgtggaaaagcctttaataatctctcagctgtgaagaaacacttaagaactcacactggagaaaaaccctatgaatgtaatcattgtgggaaatccttcacaagtaactcctatctttctgtgcacaagagaatacataatagatggatatgaattactgcaggaacttctggaggaaagcactcattgatcttcatccctaagatagtttgagagagctcacactggatatataagttatttgttgcagcataacaaatgatccccgcaaattttgtggcttcaaacacgaaatgtttattctctaacaatttctacagatcaggaattcaagaacagcttatctctgtagttacactgcaggatctctcatgcctttacttacaatcaagatgtcagccaaagctatagtcatctaacatctttactgatgaacagtccacttccaagatgacttattcacatgcctggaaagttgatgttggttgttgtcaggggaccttcagtcattaccatgtaggcctctttacaaggcccagctccttgacaatttggcaataagttctcgccaaggttagtgatccaagagaggaccaatacagaggccaaaatggcttttatggcctat

SEQ ID NO: 164623 - DNA, 740 bp, Homo sapiens
ttaaagctatcacatagtttattcacccaatcccctactgatggtcacttgtggtgttttcaatcctctgcgattatatgaagtgccacagcgaatcatcttacacgtgtctttcagtatttgtgtacctttgagatagatttctagaagtgggttctaggaaagaacaaatgttttttgcagctttgcttgacatcagcacgtttccttccctaggggttacccccagcagtgtgtgagaatgaagagtgtgggccactgtgtctctgttgacctgccagataggaaatagcgccagagttgctgcaatccacgtctccctggtgagtaaggtcattgtcgattccatcaagggtattgtccttgggatgatagcagggaagccagattgcaccgtgtgaggactcaggaaaggggacagagtgaagagctgtggctgggatgggggatacagacggggcagtaaccggaaagaaagctgtaccccaaggatgggctcatcgcactacagaagatgccacatcaggcttgaggggcatgaggaagggtctagcagcacgggagagctagaagggaaagggcggaggagagagcttcgagcacagacagctcctcaaaagcaggagggtggaccccaggccagaactgcccagcaagccctgcggagaaggcaggcagctccttgtctgcgatgggaggaggcagaagggtggggcacaggttgcagtgctggcagcaac

SEQ ID NO: 164624 - DNA, 1912 bp, Homo sapiens
cgcggggcggtaccgtgggaggggccgcgcgtggggcagcggggagcgagtccctccgtccccgcgagtcggcgcttttggccccgcgggaggggccgggctcgatgagaaaagcatcattcaagctcagattcgtattgaagcctgccacaaggtccacctgttgttgtgggtttttgggtgaccaggggttacccccagcagtgtgtgagaatgaagagtgtgggccactgtgtctctgttgacctgccagataggaaatagcgccagagttgctgcaatccacgtctccctggaattcaggagcagcttggctggaaggctctggctggaaacttgcagaaggctgtcagctgggtctgcatcatctgaaggctcaacgggtaccgggggccactccatggcctgcgagtcagagctggccgtcggtgggaggcctcagttcctctccacataggcctctccacagggccacttgagcatcttcccaccatggcaactggtgtcctctagagcaacatccaggagaccaaggcggaagcagctgtagtgccttctaggacctggtcctgaaagtcacccctgcacccacccccgctgtctcctcagccatattctgctggtcacacagagcgctgcgggataaaggaggagcgtcctgcttcccggctgccctgttgctgtcggagtcacaggatggcggctgtcatcctgccctcgactgctgctccgtcttccctgttcccagcctctcagcaaaaaggacacacacagggcggagagctggttaatgagctcctgacaagctggctacggggcttggtaaccttcgaggatgtggccgtggagttcacccaggaggagtgggcgttgctggaccctgcccaaaggacactgtacagggatgtgatgctggagaactgcaggaacctggcctcactagggtgtcgtgttaataaacccagtctgatatcccagttggaacaagacaagaaggtggtgacagaggaaagaggaattctaccaagcacctgtccagatttggagactctacttaaagccaaatggttaactcctaagaagaatgttttcagaaaagaacagtctaaaggtgtaaaaacggaaagaagtcatcgtggagtgaaactcaatgaatgtaatcagtgttttaaagtcttcagcacgaaatctaacctaactcagcacaagagaattcatactggagaaaaaccctatgactgtagtcaatgtgggaagtccttcagtagcagatcttaccttactattcataagagaatccataatggggagaaaccctatgaatgcaatcactgtgggaaagcatttagtgatccctcatcccttagactgcatttgagaattcacactggagaaaaaccctatgaatgtaaccagtgttttcacgttttccgcaccagttgtaacctcaaaagccacaagaggattcacacgggggagaatcaccatgaatgtaatcagtgtggaaaagctttcagcacaaggtcctctctcactgggcacaatagcattcatacaggggagaaaccttatgaatgtcacgattgtgggaaaaccttcaggaagagctcctatctgacacagcacgtaagaactcatactggagaaaaaccctatgaatgtaacgagtgtgggaaatccttcagcagtagcttttctcttactgtgcacaagagaatacataccggagagaaaccctacgagtgcagtgactgtggaaaagcctttaataatctctcagctgtgaagaaacacttaagaactcacactggagaaaaaccctatgaatgtaatcattgtgggaaatccttcacaagtaactcctatctttctgtgcacaagagaatacataatagatggatatgaattactg

SEQ ID NO: 164625 - DNA, 2042 bp, Homo sapiens
cgcggggcggtaccgtgggaggggccgcgcgtggggcagcggggagcgagtccctccgtccccgcgagtcggcgcttttggccccgcgggaggggccgggctcggtgagcgactggcgggggctcgggtccgagtccagggggcgacgtgggccgcggacaccgccagccacgggccctgcgtccctccagggagccgtgtttcggttcatgaggcctcgggctgtgagcttagatgagaaaagcatcattcaagctcagattcgtattgaagcctgccacaaggtccacctgttgttgtgggtttttgggtgaccaggggttacccccagcagtgtgtgagaatgaagagtgtgggccactgtgtctctgttgacctgccagataggaaatagcgccagagttgctgcaatccacgtctccctggaattcaggagcagcttggctggaaggctctggctggaaacttgcagaaggctgtcagctgggtctgcatcatctgaaggctcaacgggtaccgggggccactccatggcctgcgagtcagagctggccgtcggtgggaggcctcagttcctctccacataggcctctccacagggccacttgagcatcttcccaccatggcaactggtgtcctctagagcaacatccaggagaccaaggcggaagcagctgtagtgccttctaggacctggtcctgaaagtcacccctgcacccacccccgctgtctcctcagccatattctgctggtcacacagagcgctgcgggataaaggaggagcgtcctgcttcccggctgccctgttgctgtcggagtcacaggatggcggctgtcatcctgccctcgactgctgctccgtcttccctgttcccagcctctcagcaaaaaggacacacacagggcggagagctggttaatgagctcctgacaagctggctacggggcttggtaaccttcgaggatgtggccgtggagttcacccaggaggagtgggcgttgctggaccctgcccaaaggacactgtacagggatgtgatgctggagaactgcaggaacctggcctcactagggtgtcgtgttaataaacccagtctgatatcccagttggaacaagacaagaaggtggtgacagaggaaagaggaattctaccaagcacctgtccagatttggagactctacttaaagccaaatggttaactcctaagaagaatgttttcagaaaagaacagtctaaaggtgtaaaaacggaaagaagtcatcgtggagtgaaactcaatgaatgtaatcagtgttttaaagtcttcagcacgaaatctaacctaactcagcacaagagaattcatactggagaaaaaccctatgactgtagtcaatgtgggaagtccttcagtagcagatcttaccttactattcataagagaatccataatggggagaaaccctatgaatgcaatcactgtgggaaagcatttagtgatccctcatcccttagactgcatttgagaattcacactggagaaaaaccctatgaatgtaaccagtgttttcacgttttccgcaccagttgtaacctcaaaagccacaagaggattcacacgggggagaatcaccatgaatgtaatcagtgtggaaaagctttcagcacaaggtcctctctcactgggcacaatagcattcatacaggggagaaaccttatgaatgtcacgattgtgggaaaaccttcaggaagagctcctatctgacacagcacgtaagaactcatactggagaaaaaccctatgaatgtaacgagtgtgggaaatccttcagcagtagcttttctcttactgtgcacaagagaatacataccggagagaaaccctacgagtgcagtgactgtggaaaagcctttaataatctctcagctgtgaagaaacacttaagaactcacactggagaaaaaccctatgaatgtaatcattgtgggaaatccttcacaagtaactcctatctttctgtgcacaagagaatacataatagatggatatgaattactg

SEQ ID NO: 164626 - DNA, 775 bp, Homo sapiens
gcactaatgagagcacttaagttacatcaaggctgttgattagacagctcatctatcaactgaagcatgagaatttgtgtttggggtaccttttatacattttaaatgtatatgcatctccattactttataccttttcccgagtgctttaattggtctctggcatgacagtggttgctgtgcagtagaagtgtaactgaaagagagttatgtattatttgtgtcattaaagtttgtatttgaaaatcagtaaattttaaatttctgctttggcatgaaaattcaggcacttattttcataatattaaaaatttagtgtacataaaatattcttttataagatacatttgattcttttctattttaataggaactatcatttcccagcatttttaaaggatacaatctcctaattaaatttaaatgatataatatcctaattaaacagttattataaaaagtatagtgtgctccctaacttttgacatttcaaatttttaaaagaaatttaaaacatcaccactagcctgcactaggagcagcctgtaataacagtttttaaaagctttctgaactatttgacaagatttcttagtgctgaggccatatgctgtagcctttaagctatttcttcctatcagtttcattatcacctgcctctgagtctccaatatcatcagtaagcacatgcagaatcataattatgccatgtacaagttctttgataacatgtacagttttcttcttaattctttatcaaatgcattgatcgtgg

SEQ ID NO: 164627 - DNA, 104 bp, Homo sapiens
aaaaaaaaaattttgcccatctaataataggttaaaaattagatacagtcaaccacactgggtcttactatgtaaaaaaaaaaaagagtgcttttagacagtga

SEQ ID NO: 164628 - DNA, 492 bp, Homo sapiens
attgcataagctccttctctccaaatttctgtctcctttataattaacttaagggagttgtagtgaggcttatattaaagtacagttcatagtgagcaaaatgtttagtctggtgcctagtgtttagtctgtgttctattcatgcttcctgtcattgctctctttcacctaggaaacatatattgttttaagaaaaggaggaacaaaggaatatctccctatgagtgtgttgaatcagagataaaaaatggaaatggctgttagagttggggctcgattgatttaatggacagaagtttatcaacaaaggcgtcagaagagggacatcatgagactggcagaggagaaggaagatatgtgtggggggtaaaggtacaaaaacacatgagctgtgcttgcaggggcattgctgcaggacaccatgaaacctttcacgatttgggtgcagtgtggcttaatgaaaatgggagctcagtctggcggagatttgtt

SEQ ID NO: 164629 - DNA, 176 bp, Homo sapiens
ctccctttgcgcagccctaccttaaggaaagttggacttgagaaagatctaagcagctggtcttttctcctactcttgggtgaaggtgcatctttccctgccctcccctgtccccctctcgccgcccgcccgccaccaccactctcactccacccagagtagagccaggtgcttag

SEQ ID NO: 164630 - DNA, 894 bp, Homo sapiens
gccttttgatcccattagtcacagcaggcattacatctgggaaaagcctgtgggtttaacttcacattttatttatattcttggaaaaccaaagcgaacctttaaggtttccagagaggccttttattttagcagtgcagcaagtttttcctttgtaaagcatcactgtggtacgaatgatgctctgtagcaatagaggaggagtcctgtggtatgtagaaccaaggaaagcagacttcttgcaggaaaaatgagtgcattgaggatagtaacctgactttctgacctgtgattaaattatgatagtagtcagtcattttactctcccagggtttgaggaagtggccggtgaggacttggagcctagtgaggagttagtagagctgcccagggtggaggaggccacagaggacagccctggtgaagagaacagtgaggccttggatgtgttgatatccagcaaggacctggcactgtctagtgaggacgaggcctgcacaggatgtaactggggcctgggcgagcccttcagcgaggagctggggctcatatccagcgaggacggggccagccctggggacgtagaggagctcggcgaggagtgcgaggagccgctgagtgaggaggagcacagcgggccagagctggggcgctgccggcaccaccataaagtgtcaaggagctgcccgagtgggactgacttaaaacagtgtatctagaataaaatggtttcctctagtgccttgatactgtccttggtcagacgacctcagctgccttggagatagaactgaagaagcaagagagggaggtggcagccctgaagcacaggccgggcgtctcgtaggctctttccctagaagccagagcacagaccctgaagacagccttgag

SEQ ID NO: 164631 - DNA, 689 bp, Homo sapiens
gcagatatcaggcaagtactgctctgcatataaggaaggaaatgaccttcaaagcatctgcaccagccagacacaaggccagggtaactggcctgcctactggaagcagcagggcgtgacaggtatcaggaatctttggttttggtcttagctctgctaataattctcaatgtgacttgaccaattggtctttttatttttctggcctggtttcctcatttatatagtaagattaaaggtttccaacaggactcaaaagataattattaggaccaatgctaacagatcactttctgtacatgtaaactaaagcatgtttcttttacatatgattagagttctgcccattgaatatgataatcataaaacagcaatccgcccaagccaaaaattggtcatcctcaacacctcttccatctaatgagaaactgagtactaccccttctgtgtccctctactatatccactgtcacactttccccagcctttgtcatctcttagctaaactattctaacagcttcctagcttatctccctttctgtggtctcttccacactgctaccaaagtgaactttctagcacacacaaattggcccactcttctttaggggaagcagtttcctaagtaatgagaggtttcattgtcttccacatgctcaacatttactctttgacctcagtccaattc

SEQ ID NO: 164632 - DNA, 378 bp, Homo sapiens
ggaaacaaacccctgatgagttggccgatcgctgtgctgtaaatcctccccatatggctgattttaagccacccatggcctaacaagagtgtcataatgggagctggtacgtgccagctttagtccccaggcattcagcgggtgcttaatagatgatggttgaatgaggaggaaaggatgcagagagtgttggtcagctagatttgggagctgcgggcgatactgtaggtgagaagggctttcagggggaggcatgggagggctggaggtgaggggccaccctgcaccagccctggggtgaggcttgagggaacggagagcttctggtgtcctccccgtcctgagaccctttgcacccctgaccctgacgcacacttg

SEQ ID NO: 164633 - DNA, 426 bp, Homo sapiens
aagatgacaaagaaaagaaggaacaatggtcgtgccaaaaagggccgcggccacgtgcagcctattcgctgcactaactgtgcccgatgcgtgcccaaggacaaggccattaagaaattcgtcattcgaaacatagtggaggccgcagcagtcagggacatttctgaagtgagcgtcttcgatgcctatgtgcttcccaagctgtatgtgaagctacattactgtgtgagttgtgcaattcacagcaaagtagtcaggaatcgatctcgtgaagcccgcaaggaccgaacacccccaccccgatttagacctgcgggtgctgccccacgtcccccaccaaagcccatgtgaggagctgagttcttaaagactgaagacaggctgttctctggagaaaaataaaatggaaattgtacttaaaaaaaa

SEQ ID NO: 164634 - DNA, 465 bp, Homo sapiens
ggggttggagtgcagataggactgatctctgtgatttcatggtccacaccaaatcagtcttcttagactcagagctattgttattgtttctgtctaatacatagtgagcttttattgtatgccaagtaatccacagagcactcctttatgtttttctagctcttaaagagcatctgtacaagtcttttggcatagataataggctctactggaaccagcttaagaaaaaacgacaaaagtagttaggggaccagggtgtatgactcagaatctgaggatgggcgtgcacgtaaaccttagccagggattggaactgggagattgaaatcattcaggacgtacaggaccttctacttttctctgcttcttggggtatgtctatttcattctgtagactgtcctgatactcagaccacttgatagaaggatcatgtcacacagctccatcattcaagagaacagccc

SEQ ID NO: 164635 - DNA, 520 bp, Homo sapiens
gcggtagtcagaaactaggaagcattgacaagcagtccctagacaaagttgtgaaataagccaagtttattattagtgactctggttgacagtttagctattggtggatgatagcctaaagcagtggttattagccaagaaatgcacatcggcatctcccataaggcttaaaaaaataatgtgccaagtgcccatccccagaggaaaggaattcagtagatttgagataggccttggtcatttcattttttttttaaagttcttcaggtgaatcttatacataattctgattaggaaccacatgcttaatgtataagaataatgtatgtacctggcatctagtagtactcagtaaataacttaaaaaattcacaaaactttagagttaactgcatttttaagtagaactcctaaaataaatctgcacactagaggaaaaaaaaaaaaccctgggtgatcaccaatatatttaacaatggatttgtatcatatgcatatttatgaattcaactatgttttg

SEQ ID NO: 164636 - DNA, 433 bp, Homo sapiens
ctgtgaaggtgtgcattacttaggctcttacaagtcataagggaaaaagtgctgtcatgggtgatgggtgcttattataatcatatgtgggaactgaggaagcataatgaaccttctaggcagctgcaaagtacctctgagtctcagaggttcccaatctgaaatgtttatcaagtaactggagaagttggagatgacacattgtcattcatgaaacaaggacaagtttacttgccatattttcttaacttccacatgaaaacatttttactatcttttatgtatatgcatatgttctccaaagataaaattttaatgtactagttagtatccaatgtggagatactcagtattgtctctcatcatactataattatgtaaatgccatccatatctattggatgccacaaactccacattaaactggcaaaga

SEQ ID NO: 164637 - DNA, 468 bp, Homo sapiens
taattaaactatcccattacacgttcttgaatatctgtggggtagctctgtgagatagctcattggatactgcattgctgccttgcgaagcttgggctttgaagattgccattctgcccacggatgtgtacccaatttccattccctttcatggtgacaaatgcaaagagcacattggtcaggccagttctcaagtgtcagtctctcgattgcaagcacgggagccaggctgagcttgagagggagtgctgctcgcccaaggtcttcaggaaatctcatcaaatgtttggaattttcattggttgtctttccacactgttagaatcctagatccctgaaatgtggtgtgggggtacaaaagcaagcccagctttgaaatctcagctgcttttcttgttaaacaattatttgaaaattctttttcatagcgagctaaatatactcctttctaccactgcaaagccctaa

SEQ ID NO: 164638 - DNA, 549 bp, Homo sapiens
attactcttaggttcaataactgacttttcagtgccacctgttttactaatattttctcttttctagtttaggcatcactcttttaagatgcctcacctcagacctctaaaacaactgaccggttcaactagttttatagtaacaatgccaataagaaccattgagactatttctttaaccctgcctcaccccatctaggatgcttattattgcttctgagttgttgaatgttgagtgaagaatgacattcatttgtcttgaacaaaaggaaaagactgacaatgttggagtttatctgagctctgtgttcccagaaaagagccataagaagaaaagccgcaaaggaccaccctgttccaccatatttgaagttaacgcccacctccatccttcttcgtatcatctgtcctataacacccataggattccagggtgaacaccttatgtatctgcctccataaaacacaagcttccttccttttctttgagactatcctcattaatggatgctcttcatgttgtagtaggctaaataaaataatttcctc

SEQ ID NO: 164639 - DNA, 405 bp, Homo sapiens
agagcattcacaaagatcctcatgaatcttcagtggtcctcagagctctattctttcttgattcacttgatgttttctgatgatgtaaaaaaaatcctttcttgagaagcagaaagctgtctctgttatattgccaatggtccaggacaggaccagagggccaagagccaaaagggtaccccaaataatttatcctttaggaatgcagttttggcaagcagtgtgtctgaatgtgcccttatgctattttgcttctagggtcaatagaagtatataaagtgaactttcttcaaaacatgtgccatgaaattgacttaataggaaaaaggaataacaacagtagcaagtaagttacaaagcaaaattaggctgggacacatctgttaaaggggcagttgatataaa

SEQ ID NO: 164640 - DNA, 182 bp, Homo sapiens
ttgaccttaaggattctttatatgttgagtgaaaagtaataaaataggtgtcaataacatgagtatggggaaaaaaactcaaacattgaattcattaacagtcattaagttttatttatttttctttttatttatttatttttaaatagagatggggcaacacagcaagaccttgtttctac

SEQ ID NO: 164641 - DNA, 585 bp, Homo sapiens
tataaatcccagaacagtacaaaattcaaagaaatttagaaatggaatttagaggttgccttttccaggtaacctaatttaaagacgtgaagactgagctccaaagtcattaaggtcaagaccacatttcagttcctatgacttccccactacaatcctctcctcttaccacctacagagatgcaagtgtcaataccaaaatataattaagagataaattctttctggtaacctgccatttttaacaccaaccaacatttgtccaggagaggaataatttaagagttatatatatttcacttcacaatggaagcagaaacaactgaaattctttaggtctcccttcttgcagtgagaactttccagaacacaggattaggaatagtcaaagggctgacatgtcttttattggcattcctatctttccacttcccatgtgaacaaaatccaccccgataaccctgtaacctcctttacatacaatttgatcaataaccacctttcttcatctgagaaagaaatgacaatgaaaaactatagccaccaacacgaatcactttcctacttcagactcctatcttttcc

SEQ ID NO: 164642 - DNA, 455 bp, Homo sapiens
cacatctgagattccaggtaaacatgaattttggagggtggggcactcttccaccctctatatcctctccattgccttttctgtgaaatgagggcctggacctgcgggatgggagcaggtcctctatagcaaggggtttcgggtgctgataagattgagaaatgctgctttgaacaaaatcggcctgatttctttatcactggcccttgctgagactttatttcataaagaagtactgcgaatcttcaagaggaagatactgctctgttttttcagggcttatttgattatagaaacccctgtctggttttttttggcatgcctaggaacacctctcaatacagggttccctggaaccccgtttcagaaacactggactagatcagtgatctccaagttctcaatttccaataatctgtggttctatagatcattagttctccaacttcctttta

SEQ ID NO: 164643 - DNA, 568 bp, Homo sapiens
ggagcctcacctacctagaagaatacagcataaggacaaatggtgtctagtatagagctagactatactttatcactttagaacaaagccatcaagcgtgttctagagacagactcatgtccaaatagctttagtatcctataagaatcattaggctggccgggcgcggtggctcacccctgtaatcccagcactttgggaggccgaggcggggggatcccgaggtcaggagttcgagatcagcctgaccaacacagtgaaaccccgtctctactaaaaatacaaaaattaaccaggcgtggtggtgcatgcctgtagtcccagctactcaggaggctgaggcagaagaatcacttgaacccgggaggcggaggttgcagtgggccaagatcacaccactgcactccagcctgggcaacagagtgagactttgtctccaaaaaaaaaaaaaaaaaagggttgggaccttaattaaatttacccttggtgaccttggggcatttggccgtaaaaggcctggtgtcttggcacgagcattagactaattgccctttaccgtgtggtctta

SEQ ID NO: 164644 - DNA, 357 bp, Homo sapiens
ccattttataaatggggatacagaggctcagagagctgacgtgacttgtccaaggtgacacagtatgggaatccagacttgacactggacctgtcccacctccagttggctcagacaagagccagcttcatttttctctgtacttcagtgcccagtacagggtctggccccagatccaggggtgcaggtgctgggcgagaggctgaaatcaaagaccgtgagagtccacggggcctccgtcattccagcctgagaacctgggaaagcgtaaaggcggttgaggcctgaccccactgccagaaggtgatgtctggtatgagctccccggtggcctggcgtccctgagatggctgggaa

SEQ ID NO: 164645 - DNA, 268 bp, Homo sapiens
aattctagagctgttggttaccataaataaatactgagaacaggaaatatgtttattctttatatttgaggaaacaaggtgcagcaagtttgtagcagactgtagagaaaacaaatcttgggtaagtactttgagataggttgttgagggccttaaaggtgtattttatgctatcagcaattgagaaggcagtaaaggttttcgaaacacaattgataggtacaaaaatacaccttaagaaggcaaaactgagtatattatgtaggac

SEQ ID NO: 164646 - DNA, 232 bp, Homo sapiens
agttatgggttcctaatatccaggtgcctataaaggggacattcataggagagtcccatgaagacaaatagtctggggtgggagtccagacctctttggacagctgccctggttctctccttccctttgctgccccttctcagggttgttcctctcaaaatatgtttcttgatgcatgaatgacattgcatttaatttaagaggcaattctctgataagaaagtcctgcctt

SEQ ID NO: 164647 - DNA, 496 bp, Homo sapiens
atacagagtacagaatcataaatcacccttttttgtctccccaggagtttcactcaagtatctcaagtcaataaatcctccttttctcttttaaatggtaaactcattattgacctcttggaattttcttgttttctcttctctcgcagtaaaacacgggtaagctgcgatgccaaccataaacccctccacagtatctctcaaactacttctcaaaaaaaaaagggtccaaagacctaggttcaagtgcctaatctgccacttaatagctgattgaagcaaatcacctaacttgtctgtcacaaaagttttcactgaaaaatcaggataatgctaatacatgcattacttacctctcagcgtatcagttctatgtgcctcatggttgtgcagtgcttagtattttcttttatgtgccatgcttcctccaaatattccctgttttattttctatctaatcatttgtatttcagaggaattggcagatttttttgtt

SEQ ID NO: 164648 - DNA, 738 bp, Homo sapiens
cccaggcctttgtctgtgaccccctagtggccagtcccaggtagctatatttcacactcatcctctccaaacttgaatgcagcttctcccgctctagccagctctttcctttgacttctcagctcccttgaagcacacaattgtcctaggaacttgggggtgaccttggggccactttcggtttctcttcctcctttgaccccatatacagtaattctccctgtcttgtagagtccttctgcagcatctatgtcctttgtgccttcctttacttcagcactgctggtggctggttttgggttccatcacatcctgcctggattcttgtaagagcctcctcctgctctcttctgtgccaggtttgttctgcacacaccaccagcccttcactcttttgtgttctatttattgagtaaatattatgtacaaggcactgtattgcatgctagagagcatacgaaatgaagatggagtgttcccactccagggtgcacactgggcagtggtaaaaggaaaatggggccgggcgcagtggttcacgcgtgtaatcctagcactttgggaggccgaggcaggtggatcatctgaggtcaggagtttgagaccagcctgaccaacatggtgaaacctcgtctctactaaaaatacaaaatcagccaagcatggtggcacatgcctgtaatcccaactacgccagaggcggaggcaggagaatcacgtgaacccgggaggcggagg

SEQ ID NO: 164649 - DNA, 126 bp, Homo sapiens
ctcaaaaaaaaaaaaaaaagtagtgtagtctgttatttggttagattatttttattccagaagaatgtatgctctgtgagagcagtgatgtcactttcgttcactgctgagatcccaggactcgca

SEQ ID NO: 164650 - DNA, 344 bp, Homo sapiens
acagtgacagtgggtagaacatcaggaggtcattctgatggctcgtggcccagccatcttcccatgccatggctaagtgtgcatctcaagggaaggtgatgtttttcttcttccagtgtcaaggcctaggctgttgtcagtggggggactcgaccccctgacatggggctgcctggtgcaggccgtgtgactgtggggctgcctggccgctggctctcacatggtggttcctgctgcactgatggcccaggggtctctggtatccaggatggagctctcgcttcctcagcagttgtgacttccacccaggacccaggacgctgccctccgtgtgcactagcctg

SEQ ID NO: 164651 - DNA, 225 bp, Homo sapiens
ccgccgggaggcatgagctgggctgggccaaaagaggccactgggaggcaggaggagctgggcctggagaggctgccgaaaggcaggagcttcgcctgaggatgccacagtgagacaccatctgggtctggagggtccactgtgaggcagaggctgactcttgaagcccaaaacttcctcaaaccaggcttttgcccaacttctgtctactgtcggactctacag

SEQ ID NO: 164652 - DNA, 227 bp, Homo sapiens
attcatgatgttatttcaattgagcattcttgtgtgacaagaactggtaattattgaaaatttcatctgcataaaaatactagatcttacccacaagtccatttcctcttgtctctcagtgttagactcaccctcagcatcatttttggccgttaaataaaagacaatggagggttttttgtttgtttgtttttactataactgctgggccactgccaaaaatgatg

SEQ ID NO: 164653 - DNA, 350 bp, Homo sapiens
tgttagggatgccctggaggaagggttttctggcagacatccagacgtacaaatccagcgtactagaagagtgggcagcatccagccactgtaaccataggatgtgtaggggagatgtttgggagcctgctgtacagtccaagaatacctctgtggtctcctagaatagggcctaattaattccacaagggggttttccgtaccatttgttttcattactgaacatcattctcagtacaggctcatctgagtagagttttatttgttcaagacaattgtttgggcttgttttttaaaaccagttttgcatttgggggaggatattagatgccttacactgggagtcttca

SEQ ID NO: 164654 - DNA, 273 bp, Homo sapiens
tactagacagagagccttatttcctgaccattgtcaattctacaaacggtggagcaaagtgccagatactgagacagtcattggctctctgaagctaaataagatactgttcctgcttttgaggagtttaggttgtaatgatatcttttctaaaatgaatagaattagctgaggtggttctccctgtattgagtttgggttggcaggcaaggaaatggagttatgcacaattggctcaacgttcaatgggcacaaaatcttagatgaaaatga

SEQ ID NO: 164655 - DNA, 142 bp, Homo sapiens
gctcaagtgatcccccttcccaaagtgctgggattgcaggcatgaaccacccaccatgcctggcttagggccattttcttatgagccctttgccttcaagtggatgacaaagatgttttttgtggaaaaaagtcaactcctg

SEQ ID NO: 164656 - DNA, 312 bp, Homo sapiens
tttactctcccaaatacctaccaccgaaacattctgttcctaacatttccattgcccttcacactctcccttttccttcctttctctgagttaaacatattgctgatttttttcatctcccaaaagattcctagagctgaccttcttgtctctcaaatcatatttgtttttctctaagtagagaatcttctcctagattatacaacctccctcgtaaaaacctggggagcaggagggaggtgttgaaacttcactagagcaggtgcattctttattgctttattccttgtcctgcactggcatgaatgcagt

SEQ ID NO: 164657 - DNA, 660 bp, Homo sapiens
ctgtagctggtgggaaacaagaggccaggtgtggggctggacagtccaaggagccacatccggggacaaaacaagtgcaggggacatccatgcaggtcttgatgccagggagttagggaattggggtcctggcagggaagcagggctgggagctggctgcaagaatgaaaggaagactcagggggaggggcaggaaatagaaagggacatgtagggggagtgctgccgcccacttgcagcctgggggcaaatctgccagagccaggccgttctgggctcagcaaagctggtttctgggagccttcttcagtagggtggggtgggaagaccgaggtgcaggctgctttgggaaaagagtttcccatactcctaacgggagttagggcaggccaggtgcagtgcctcacacctgtaatcccagaactttggcaggccaaggcaggtagatcacttgaggtcaggcgttccagaccagcctggccaacatggtgaaacctcgtctctattaaaaatacaaaaattagctgggcatggtagcgggtgcctgtattcccagctatttgagatgctgaggcaggagaatcacatgaacccaggaggtggaggttgcattgagctgagatccactccagccggggcagaggaatgagactgtgtctc

SEQ ID NO: 164658 - DNA, 149 bp, Homo sapiens
gcactaaggcccagtggggcctgccagggcaacagtcatggagcctccaggacaaaggggggccctccccaccaagacctctcccatacggaggccacagagaagctcctttgcagtctgccctcattctccccatgcaccccctcatc

SEQ ID NO: 164659 - DNA, 108 bp, Homo sapiens
tctaaaaacagtaactgcagttgattgtagcacattgaatatgtagaagttcatgtgttcctaatgatattagaaaagagagagaaagccagaaatttcatggatata

SEQ ID NO: 164660 - DNA, 278 bp, Homo sapiens
aggtgaagagagatgggctcagagagacggctgggatgttgactcgtacttctgtcagtaaccagcagggtggctgcttaaagatgaccgtgtggaagcaggtaggtgtaaaccgtcacagcactgtactgcaagcaacacacacagaaactcagggttcaaggccaggccatacccttggacgtacatttcacttaaccttcctgagttctgatctgtgcagtgggtctggtgcctggctcgtcagggctgctgggttctcctgtgacgcccttggc

SEQ ID NO: 164661 - DNA, 474 bp, Homo sapiens
tctatcgtatctaaggatcccgtggcgtgaggctaactgcagagtggctgatggagcaaacccagcacaagcgtggtcctctatctaccacaggggatgagaggaaatctccaggcactggtgtcagaagaagcaatgggagggggcctcccaattattaataatatctccttgcttggtgtcatggctgtcttgcctgcccaggggcacctatgggctgtgaattagactgcttctgggcatagggagcagaaaccaggggacaatttacatggagaacttctctgctggacaccaggagagccagagctcaggaaaatatagcatcatgatccagagggtttgctttttagtattcctccttctgtctcaatggccttgctgataggggtaaacacactactatcaagacgctaggaggccagggaaagggaacatttacatctagcacctaagtgctcagcattctgccag

SEQ ID NO: 164662 - DNA, 618 bp, Homo sapiens
ctcttgagaggaaaggcaagtctctcttttctgccataagccaaaacaaattccagctgaattacagaaaaatctgaggtagacacaggaaacatagaaacttaaaatgacataaccaaataaaaaattactttttccctatgttcaaaggacttaaaaagaccacagagttggaaaagtcacttaagatgcaagtagagttaacttcaattcaccaacagctcatgagaactgagagaggcccaaccatgtgctgtgtgccggctgtgtgcagcagagaaaatccaaatggctaagccccagggaggggaactcagagggaccagtagtcacgatggtggcaatttacacacccaaagatcggcaatgtcagcagtgacaggtgacacctattgcttgctggcaaggaggtagaagaaagcaagcccacattgctgaaatgttattccccttggggaaagcaacctggcaccctgacttacaataagatacaccctccgatttaacaatctaacttcttaagggctagctctaaaaataaaagcataaagacaacagggacagtagtgatggaagagaaaaactcagacagtgatgccaggcaacagggaacaggtg

SEQ ID NO: 164663 - DNA, 160 bp, Homo sapiens
tattttaggatgtttttgtggttatctctaaattcaaaatggatcccccatctgaggaaaccaaactgacttacgagcaaaataggaaaaataaatttgccttattacccaaatattctatgctcttctaaaaacttacaatctgtactaatacctttac

SEQ ID NO: 164664 - DNA, 374 bp, Homo sapiens
tcataatttggagatatgctgcacaacactgaacactgtatttgcagtaacatcatggagagattactctccaaaataaggtaagtatcattgtattcactgccttttggatatgtgccatcaagctgtgtaacagagtttactaagtcctatgaaatgacgacatttcagattaaaccctacatgtttcttctttcttccttttgtcttggtattatagctttctgccatttcctcttcttcatttattttacttccagaaacctaagtccctttccaccaacctattctctgtctctctactcaatatcttaaagtctgtatcttcttttatcttcgcactagtgatctcacttcctttatgataggtagaa

SEQ ID NO: 164665 - DNA, 227 bp, Homo sapiens
ctcggggaaggagaatctgatttttaaaaagcctcatttaagactcgttggactagaacactgacctcgttttcatgtctgactcaaagcagcacctgtgggtccccccatccttacaagtggtttgggaagactcccattttacctctaacaggcatgggcttgctgcggtttctctctgcctgtggtttgccctttaacccagcaggctacaaagatgaaaagca

SEQ ID NO: 164666 - DNA, 347 bp, Homo sapiens
agctgttcagcccaggaaaacaaagtgactaagaaagtaacaaagggccctgaatgggagctggggcctggcagcagaactctgctaaagctcccacccactcccctgagttttatgcccctctcccagctctccacccccagtctcctctcttactgcaagaagagctgtccaaatctgccatgcctaagggggcagcatggaagatgtgtctaaggtgccaggcatggtggcgtgtgcctgtagtcccagctactccggaggctaaggccagaggatcacttgagcccccaggagttccaggccagcctgggcaacatagagagacctccccgcgaccaatctca

SEQ ID NO: 164667 - DNA, 238 bp, Homo sapiens
ttggctgtgtccccatccaaaattcacctcgatttgtaatccaaatcgtaatctcacatgttgagggaagggcctggtgggaggtaattggattattgaggcagtttcccccatgttgatctcatgatagtgtgtgagttctcatgatatctggttgtttgataaatatctggtgcttctccctctcctctctgtctgtctctctctctcttgcctgctgccatgtaagatgtgcctt

SEQ ID NO: 164668 - DNA, 537 bp, Homo sapiens
acattgcatgcctatatcaaaacatatcatgtatcccataaatatatacacctactatgtgcacataaaaattaaataattgtttttaaaaatggctataacacctaccttatggtgaaataatgtctaaaagctctggcacacaagaggcctttattgatgtttaatttccttccattccttcttccatagttgttaattcggaaccaggcaagtttggtggctcataccaggttttttttcccttccaccttgtcagaggtatcctacaatgcagcactgagctgtagatgctggttccctgttcaaacctggggaagagtgctgtttaaatatctgcagacacactgtaggaacttctccaaagtgactttcctctcccaggcgaccctctggtcagtgagcggcatcttggagtcatcaggagaaggctggaccatgtggggagggtcgaggagcaagcagagcagaaccttctgtggctgcgatttgtccttcctcagggaaggcctccatcttctgctctggtggagcagc

SEQ ID NO: 164669 - DNA, 152 bp, Homo sapiens
aaggtttatgtagttgcctaccctaccccgtgccaaccccaaaagactagagacacaatcactttcaactctcttgtgtttgtgtagatgactaggttcttaaatatgaacttcggatattttctaaccaattactatgccataacgtaact

SEQ ID NO: 164670 - DNA, 308 bp, Homo sapiens
acactgtaccccataaatatgtacaattattatgtgtcaattaaaaataaaaacaggccaggttcaatgactcatggctgtaatcccagcactttgagaggccaaggcaggaagatcacttgaggccaagagttctagacgagcctggacaacattgtgagaccaccatcactacaaaaaataaaaaaaaaacctcagctgaggccaggtcccatggctcaggcctgtaatccaaacattttgggaggcaaagacgggaagactgcttgaggatgagagtttgagacaagcctgggcaacatagcaag

SEQ ID NO: 164671 - DNA, 516 bp, Homo sapiens
aatttctgtaaatcagaatattcagatgttgaaaaagtctttgccttcagatttaaaagatacctttgaaatgtagcatatcccaaaatgcaacccagaggctggcaatgtcaacatttttctgttttaaaaaacctcttatgaaaactattgccatactaaattttttacttgctgatgacttacagctggaaaggattctgtacatataagacatcaaatattgaggatactggaacttttaaattaatggcaaagaaagtcaacaaaggaagttcatatgaaatcaaactagtaatatgattacaaaaaaaaaagtttaaaatttttcttggccccagtcttatcatttctgagccaaatacaattctatcgaaatcacctgaaactgaaatcaccattctaggctggttttcccataaagatggactgctccaaaaagaggaatcaagaaagaatttggctcacagtgaattattcactttgtcttagttaactaaaaataaaatctgactg

SEQ ID NO: 164672 - DNA, 208 bp, Homo sapiens
gccacactgctctgcctgctgcaacaaagtttaaggggagtgttgtgtaggtggaatgaggaggtcagctatacacagaagaggaggcagtgcaagaagcggtagagtttgatcttcagaatcatttcactttccaaacaatcaggaggatgttgtgaggggttgggtaaaacttcctctaggcacagagctattaaatcacagcttc

SEQ ID NO: 164673 - DNA, 586 bp, Homo sapiens
aattggataaatcactgatcaaacaactctcagtttagcaataatgagggtattgctccaaagcaaccatggaatgtcatttttctggtttcctaatgtcatttgctccctgtgatgaagtctgagaatgagatgagctgaaactgtaaacccatttaaagaaaaacccaactaagcttatttccgctctttttaagccctgtaccttttactggtgattagacttcccttgggggatgatcctaaagacaaggttatcttcacgttattctttgtgggttttatggggaaaggttttttgctgagctgagaatgtgggaacgggataaagaaaccaacaaatgcttagttcaccaaaactttacaaaagcaagtagacaggagttaaataccaaatcagcaagaagaaaggaaaggttcttaataaacatatttcaacactggagtctgtgcccccaccaatgactagattgccactcctggtcttgaaggatggggctgtccttgtgaaaataaaaccacatggtattgtggagaccaaactaagtgataaaattgagttaatggtaaattataggataacatt

SEQ ID NO: 164674 - DNA, 497 bp, Homo sapiens
tgagtcaccgtgcccagctgaatacaaaataaagagacacttccacaggcaaatgcaaatctgttgcagcatattagtcaagaaatccccaagttaccaaaagttctgttctaagaaggaactctttttccatagaaacatgttacaaatggtagctgtgttctcaggccagcccatgaggtcccagcatagtatttcaaggggtacgtgaattgtacttaagacttaaaccatagcccagaacaggaaatgaattcagagttccaactcaggacccgggaacagatctttgctctccaagcaccatgggcagcagacacgggggctccctagtcttcaagctctgggtgagggcttgaatcaagaagacttgagccaggtgcggtggctcactcctgtaatcccagcactttgggagaccgaggcaggtggatcacgaggtcaggagatcgagaccatcctggctaacacggtgaaatcctgtctctactaaaaaa

SEQ ID NO: 164675 - DNA, 231 bp, Homo sapiens
tgcatctctagtagaggtaaggtttcactgtgttggccaggctggcctcaagctcctggcctcaagtgatccacccgcctcaacttcccaaagtgctggtattacaggcataagccacggcgctcggcctataccttctttcttaatttgcccagcaccatttgtttcctccactagtacatattccacggcttgccgtaatctgctttgatgcctatgctgaccactggg

SEQ ID NO: 164676 - DNA, 304 bp, Homo sapiens
ggtagtttgttttctggaaggccagtgaaatacagctccttaatttataatgaaatttactttctaacaaattaagtctttctaatgagaccaacattgagaattcagcccttacctcgggatggtctgagaaaaccaaaaggccaactgttttattgctttagatcagttaggtgatgataactatgagcatttataataatattttaaattggccctgagaggcttgaagacatagaactgaatgtactgccagatatttttgcaggagtcacagatgtaaaagagaattctgcacacacat

SEQ ID NO: 164677 - DNA, 278 bp, Homo sapiens
aaaagatcatcaaaaatgaatacatgtattatgaatttccaaaaggagatatggtttacacagcatcttccaacctcaggactctgcatttgcagagcagctcaggggtgcagcttcaggttctgctcccggtaaagcagatgggaggaggagtggggagtgtttgctggcacctctttaaggaagcagacccagagtgggaggagagttgtccttaattaataaagtggccattgcgttgatggctcttatgttgaactcaggcacaattgcattaa

SEQ ID NO: 164678 - DNA, 187 bp, Homo sapiens
tcccccctctccctttctctccccccctttttgagcacatgtgccaaggaaaggctatgtgaagacacaaagtgccacctacaaaccagggagagagccctcactagacactaacccagatggcaccttgatcttggacctcgagcctccaggactgtgagagaataaaattctgttgtttaaacca

SEQ ID NO: 164679 - DNA, 407 bp, Homo sapiens
tatcagagagagaaacagaagcatagttgtttctaaatattaaatatcaatctccaaattgtggctttttactctgaaatcttcaaagctagccaggacactgaaatgtacaaaacatcaaataatataatgaaagcatttcttttcaaagtcctaataagcgcttgggcaaagtaatgcattcctcctgcaatgcacctggtcccactggagcctgacccatccagaggcaagtgtctacgttacacatcttaccccagcaattaacacagggagtggcctgaagttgagcctctatgaacgttttggcacagattcattaacacggtaaatacttttcacataactggaactcttttctctgcccaatttaatcatcagattgaacaactgaagattacatgata

SEQ ID NO: 164680 - DNA, 172 bp, Homo sapiens
gctgaacagagtactgtacacaaaaagtcctgatgatgtaatcaatatcctccagcttctgctgggcagtttggactggaaaagtctcccattaagtgcccatgacaaatgttttctgagaggtagctttagattttctgagccttttatatattattcatagcttcatggt

SEQ ID NO: 164681 - DNA, 189 bp, Homo sapiens
aagatagaagtgtgtgcaggagattactaataaaagattactagtaggctgggtgcggtgatctgcccacctcaacctcccggattacaggtgtgagccaccaggcctgacctgaaattatttaaaaatgtcacagagaataaaaataatttagaatgaaatgatgatcaaacttcaaagacatctctt

SEQ ID NO: 164682 - DNA, 360 bp, Homo sapiens
ccattttccctatttttcaccatttggaaccaattctatgaactagaataatctctccagttatcactttatctgtatcacatgaatgacatacactttcttaagattatttcactttcctgagaaatagcctctaagatctttaaagatttttctctcttcagtgggcttttgccaaccgagcacttctgtatggatataatcttatattaaatatgttcaagaaagaactgtctttcctcaacaccaatctgtcgagattccctgcagttttgtcccagtcacacacaggtttactgttagagtgatcttgacctatgtctaccatatcctgtccccgagtttcttaaaagttactga

SEQ ID NO: 164683 - DNA, 303 bp, Homo sapiens
ctggcttcccatatgtctctacctatagaaagaatgtaaatgatgctctttgagtgttctactctgtatggtggcaatttcttattgtaaattataaagtactcattctggtttgaaacattaatctgtggattttgtctcatgttcctctaagcctaaagatgaagcatcccatgactatgaacagaattaagtttcttaaaatttaatgttgaaaattagaccttggatatgtaatcatcaaaagtctggactttggcaccaaatatccagagtatgaattccagatttttcattgaataa

SEQ ID NO: 164684 - DNA, 177 bp, Homo sapiens
taacttagaacaagctcagagagcaaggggactgacttagtacaacctcatgatctgtgggcatattttaactgtaatcttcaggaatgacttttctcctgaaagtaggaattctctttctgctgttaagtgacagcatgtgctggagacattggagaaattacccagtcatgctaa

SEQ ID NO: 164685 - DNA, 267 bp, Homo sapiens
cttcatagtttaagaaaaaatttcaactcgctaacctttcagaagccttaaaatgataacgttttaatctacaaatccataaccactccttttcttaggatatcaaaccagtataaacaaaagtcttttctggaaaagggcttttgacttctgtggcctttttatgagtatttctgagctgtacagggacagacaactttttcctgcctggtgtatagaagagatcttcaaagattaaatgccatcttttcacaagtagagtgttga

SEQ ID NO: 164686 - DNA, 481 bp, Homo sapiens
ttatgaagtgaaagggcttagcagcttcagacacctcactacattgcctgctccttccttgcaggtatgggatggaaggcttgctgtgggggaaggtggcttagtaatgaagggagcccatctcaactggggctcgtgggagagtaaattaggccctctaggaaaaagttcaagggagtctttgtgaattctcccaaggatggaacattctagataggagggatagaagcaaatcattctatacgttggaagcattggggcttcgtattcttgtggaaccttgttgagaagggcaggtgtcatccaggaaagaagggaccacagtactttgctgtgcagcatggggaaaagggagcatttatggacatcaaccaggatgaagctttcctcctgattttcagaggcttcacttttgtgctttttatccaagtcaggttagtgcccaaaacaaagcaaacaaataaaggcctttattttaagc

SEQ ID NO: 164687 - DNA, 396 bp, Homo sapiens
ctcctaagaaatccaactttaaaatataacaagcaagttttttgcaatgaaattggcagagtaagagttttataaccaaagggatctgtgtttaaattatgcactctctgccactttgtatctatgtgactgtaagaaactcactccatctctaagagtcagacaaactcataaaaatagcttatttggattagaaatgatacttgtttggatttcaaaggacagacacatattgaagcattagtatattcatttcaaaagtgacattcaacaccaacatttcgcaataataaaaacacagcttaatatgagactaatcattaacactatgaattctaattctgcaaaaaagttaaaatttaaaaaatttcaaattcagccgggtgcagtggctca

SEQ ID NO: 164688 - DNA, 346 bp, Homo sapiens
tgaggggatctgactccctgtcccttctacaatgggaaaaggctgcttcaatgctgcttttcgcaagtagagggtctgcaggggtcaaagggatcaccatcccaccttggaatccagaaagttcgtgggggcaggctcagagaccagcctgcaggacctgagaaagaggcgccgccttccctggatgaactccaagaacccacactgtgcgaggaagatgaaccatcttccaccagcttgggaatatcagtcctgcccaacccagaagagacctggaaaatggttctaagctagaaggcaccacggatgcccctccatcagaaagagtgggacgtgtcacccatgg

SEQ ID NO: 164689 - DNA, 437 bp, Homo sapiens
gacccttgaacttttggtgtgcatacttgaacaatacagcctaaagttcgtatctttttgccaatcaatacatagatattaagatgcttttattctgttttccctgtttttgtcttctgtgttattctaatatgtgacctccactcaattagtcatcattattttttatggtagattttttttattgtagtaaaaaacataaaattttccatttcaccctttgtaaatataagttcagttgtgttaagtatatgcacattgttgtggaacagagccccagaactttttcattttcaaagctgaaactctgtacccattaaatgactacctgttccccagtcccggcacccaccattctccttgcacccaccattctccttttggtttctatgaatgggactactctggatacctaatagaagtggaattagacaaca

SEQ ID NO: 164690 - DNA, 517 bp, Homo sapiens
cagtctctctcacacgatactaggtgtcaaatgcctcccatatgttttctgctcacatcctgaaccagctatccaaatgaatagatttaatgagttacgcttggttatgacagaaaactaagtaaaacataataaaaaaaaactcctcatccaaggattaaaatgatcagaataattttgtgtaattctgaattataaatatttttctggaagcatgaagttttactaacacagctacttagtaaaactggaataaatattatgtattaaatactcatagatcattttttatacaactgaataacaatatcctgtcgtttttagataagtttcaaagtgaaaatgtacttttagggtttggttttacaacgcttttttcttgtgttaattttaaatattcaccctttgaacctatgtgtttattcaacttacaagaattggtgaaaaattcaggagatgttcctacctaatcatgtacaaatgtttttttacaaaaattaaagctttcaaaatattt

SEQ ID NO: 164691 - DNA, 371 bp, Homo sapiens
gagatatagttgaaataatagtgaagtggaaaacttcactcttaaaaaattttgggagaggatcatttttagttctccattggttttccagtgaataaagattttttgttttctggtcttgatggatctggtttcattttgcttttgagttttttacgctaggttatattctcactttgtagttactaattggtcaactgcattttttttcaaacctttgccatcaaatattgttttgggctccataaaaagtggtttttaaaatgtgaataggaagggttatactcctttcttttggattgtacattctaagaaaaagattgcattatggccattgtgttatttaaatataaacctttcagaagaactaa

SEQ ID NO: 164692 - DNA, 210 bp, Homo sapiens
gacacactttgggaaacagcaaacctctattattcacatggctgtaaagttctatgcttttattcctagggtacccttggatctgaaataggggaagatattagtatttatctgactcccaaagatgtgccggatactaagctacgctctttgtagtccatatctcaattaacattcacggcaaccaggagctaagtgttataatattat

SEQ ID NO: 164693 - DNA, 270 bp, Homo sapiens
ccaggcacagccacatcccacactaaatatatatatatacacacacatatatgtatgtgtatatatatatatatgtatatactttccctttagaaaaagtagacaagattttgataattgtcatctttaaaattatttattacacaaatactgcatgttctcacttataagtggcagctaaataatgagaacacatggacacgaagaggggaacaacagacactggagcctacgtgagggtggaaagtgggagaagagagagatcagaaa

SEQ ID NO: 164694 - DNA, 544 bp, Homo sapiens
tcttaggtttctgactatattttgtcttatatgacatactgcttttatgcttccttctaaattttaattatgagaagagtagagcctatgatttacccatctgtaaatcttcccccaaaccacgacctccacctagttcagggctttgaacatgataggaactcagtaaacattgttgaaatgaatggaatatctttcaaatgtgtgaggaatcatactatgtttaaggcatattgaaactctgctatggtatgatttcttcctcgcaaccaccagcacaatagaaccaaactggtttgtccacacttcctgcccaggtaactggaggtgaaacttttgctcaccttaaaatatttgtcatattgccttaatgtctttgcccacagaattaatggaaatacttgggtttactgataattgataattgggcttaaaaatatttgtgtagtaaacatagccagactatgtcctatgtgcccaaaacatctctcagtgattaaaagtattctgttttgaaaataaataagcatgatgatgcatgctg

SEQ ID NO: 164695 - DNA, 483 bp, Homo sapiens
aggctgccccccaccccctgcccatgaatccagcactcttagagaagaggcagcagcacagggagtcagggaacccagatgctgggaagccgggtgacctgatggccacctcggaaaatgacagcctggcagatttgtgtgtaagagctcttccacccttgctggttggtacttgggaactctgatggcactatgcatggcatctctggcatactcacaccaagccctgtaaagctgtcagaggtggggtttatgggcctcatgctgcctcctagagcaactgtggccatagctagctgccctttatgagtttacaaagggctgtccccctcctcctccagggagcatgtttgagctggcgggcagcgggccaggggccaaggctggcgtgcaatgtttgggctgcctaacttttgccccacactcctatccaagctactgtggactcttctgccataaatgacagtttgtctccaagtgaca

SEQ ID NO: 164696 - DNA, 336 bp, Homo sapiens
gaatcttgtgggtataattggctaaaattggcctcatgggctctgagacatgacaagaccagggatcaaaacctggtgacttcaccaaagtttatgtttactgattgtggacctggtgtcaagcatgtactaaggactcatctactatggttgcttgtatattgaggtgaacagtgtcccccaaaattcatgtccacctggaacttcagaatatgacttttagaaatcggatatttgcagatgtaattagttaagttaaattaggtcatggccaggcatgagggctcacgcctgtaatcctagcactttggaaggccaaggcaggtggatgacaga

SEQ ID NO: 164697 - DNA, 622 bp, Homo sapiens
atcgtcatagcttgattcctatgatgtacaacctcgtcgagctggagcggttctcgtactctgccaacaatcctctcaaatcctactcttggcaactcatttatattgtgaggttcatttaactggctctcttcatttttcccagggtcttgaattctaacctactctgtactggaagaatgaaagacttagaaggtagggggcatataatgtcaaaaggtttagattcagtgtcaggaaatctgcttctcatcccagttctgctcctgtttaacccctcatagtcccttcccctgtctggacctcagtttctccatctgtaaaatgaaagcgcagaacataagaccacatgatctatcccatcccctcattctatgccttcatcccacccaagcacagggcagaacactgagaacagactttggcactggagagaccctgctcccagttctggctttgccacgtactagctgtgtaatttggggaaattacctaacttctctgagactcagttttctctcccataaaatggaaaataaaataaaaatcccagccagatgtggtggctcacacctgtaatcccagcactttgggaggtcaaggcaagaggatcacttgaggc

SEQ ID NO: 164698 - DNA, 612 bp, Homo sapiens
cttttttttctttagtgtctcttcatggcaaaactcctcaagagttgtctatgttgatgtatttcaattcctagtcccccaattctctcctaagccctctttttaagcagactttcacccactactccaaggaagccactctcaagagatcaccagtgacctccactgcatccatgtggacccacacgattcacatgtgcccactcagacacattctcatggctttcttggcagctgctgacactactcctcatttcctcacttggacacacttccttccttcacgcggctaccaggactccttcctctcacactttcccctttcctcagggttgctctttaggttgctttgctggttgttgctctgctccccaacctcttgacactgcagcagcccaagactcggccctcagtcctcgcctcttctctatgatgctcattttcccttggtgattctacgctggctcaagacatcatatagcacttctatcccacagtcttcaatgaatctctctcccaaattccatacgtgcatatctgactgcttactcagcatcttcagctgggtatctgaatgacatctcaaactcagtacgtccaaaactgaactcc

SEQ ID NO: 164699 - DNA, 464 bp, Homo sapiens
cttttttttctttagtgtctcttcatggcaaaactcctcaagagttgtctatgttgatgtatttcaattcctagtcccccaattctctcctaagccctctttttaagcagactttcacccactactccaaggaagccactctctggatgcaaagtgtcctctggatgcaaagtgtctcttcatggcaaaactcctcaagagttgtctatgttgatgtatttcaattccttcccccaattctctcctaagccctctttttaagcagactttcacccactactccaaggaagccactctctggatgcaaagtgtcctctggatgcaaagtgtctcttcatggcaaaactcctcaagagttgtctatgttgatgtatttcaattccttccccaggtatggagcacactcttcaccctaccctctaaccacaggacactttgcatccagacgggtatcctctagaaca

SEQ ID NO: 164700 - DNA, 3310 bp, Homo sapiens
gtttttgggcccaacgggcagaagtgcccctcccttttacactcacacttcccactttctaagggtgccaggcccccgcgccgccctcctgcgttctttccggacggtccaacgtcttttccaccagtcccagcccatgtcgattacgtaaattctgtccaagaggattcccatacgtgcccctccgtccagaactcgcccagcccggaccagttccgagatttaccaccagcccagagctgggcgggggcgtggaaaacgcgaggagccttcccgcccctctccttctccctccctccctcccaagccactgccggctcccagccgagctccgcccccgcggtggccccgcctccccgccgcccggaaagcgggctgcggccccctcccaaaacccggggaagtggattctactctacgctccgctccgctccgctccgcaccaccaaccccgggccgcagtcctgacgagcgggtcagggcttgtcgggcggaagcctggcctggagcctggaagggggagacggcccgagcgggagcgggagcggacgcggcctcagtcctgcgcggaatattgaaggatgtttgttccaagatctctaaaaatcaagaggaatgctaatgatgatggcaaaagttgtgtggctaagataattaaaccagacccagaagaccttcagttggacaaaagcagagatgttcccgttgatgctgtagctacagaagcagccacaatagacaggcacatcagcgaatcatgccctttccccagcccaggtggccagttggcagaggttcattcagtaagtcccgagcagggtgcgaaggacagccatccttctgaagagcccgttaagtcattttccaaaacacagcgctgggcagaaccaggggaacccatctgtgttgtctgtggtcgttatggagagtatatctgtgataagacagatgaagatgtgtgtagtttggagtgtaaagcgaaacatcttctacaagttaaggaaaaggaagagaaatcaaaactcagcaatccacagaaggctgattctgagccagagtctccactgaatgcttcctatgtctacaaagagcacccctttattttgaaccttcaggaagaccagattgaaaatcttaaacagcagctgggaattttagttcaagggcaagaagtcaccaggcccattattgactttgaacattgtagtctccctgaggtcttaaatcacaacttgaagaaatcaggctatgaggtgccaactcccattcaaatgcagatgattcctgtgggacttctgggaagagacattctggccagtgcagatactggctcaggaaaaacagctgcttttcttcttcctgttatcatgcgagctttattcgagagcaaaactccatctgcgctcattcttacaccaaccagagagttagccattcagatagagagacaagctaaagaattgatgagtggcctgccacgcatgaaaactgtgcttcttgtagggggcttacccttacccccacagctttatcgtctgcaacaacatgttaaggttatcatagcaacccctgggcgacttctggatataataaagcagagctctgtagaactctgtggtgtaaagattgtggtagtagatgaagctgataccatgttaaagatgggttttcaacaacaagtgcttgacattttggaaaacattcctaatgattgtcagaccattttggtttcagccacaattccaactagcatagaacagctagcaagccagcttctgcataatcctgtgagaattatcactggagaaaagaacctaccttgtgccaatgtacgtcagattattttgtgggtagaagacccagccaaaaagaaaaaattatttgaaattttaaatgataagaaactctttaagcctccagtgttagtatttgtggactgcaaactaggagcagatcttttgagtgaagccgttcagaaaatcacagggctgaaaagcatatctatacattcggagaagtcgcaaatagaaaggaaaaacatattgaagggattacttgaaggagactatgaagttgtagtgagcacaggagtcttgggacgaggcctagacttgatcagtgtcaggctggttgtcaattttgatatgccttcaagtatggatgagtatgtccatcaggaaaatacctacaagtctacttggaggaatccccagcattttcaacaggatgtcagaatgaccttgggctatgttggcaaagcacaatgggaagaagacaaccaattgaaggtcaaactaggccttaaaaaaaattgttcttcctaaatgaaactttatgtaagacccaagcttcctttatgtaaaaataggatactcactaggctttggggctgacaatggtttttaaatcttgctaatcttccctggaatgaaaccagcatgactcaaagagaaaaagagagtctataatattttctaatccctgagttcttttctttatatattaaaaaggattattaggctgggtgtggtggctcacgcctgtaatcccagcactttgggaggccgaggggagtggatcacctgagttcgagaccagcctaaccaacatggagaaaccctgtctctactaaaaatacaaaattagccaggcgtggtggcgcatgcctgtaatcccagctactcaggaggctacagcaggagaattgcttgaactcgggaggcagagccaagatcgcaccactgcactccagcctgggcaacaagagtgaaactctgtctcaaaataatattaatgataataataataataataatagggattacttgcataattgttcttttaaaattattggcagtattgctgaatgtatttagattttttcaccaagtgacaacaactgaattcataaagattcatcaacaagacctgataaaaaaaaatgtaagcatattatagtggatacttccaagactcttggtctaacatgtattagaaagcagaaggagcccaggcacaggggctcccgccggtaatcccaaagctttgggaagccaaggcaggtggatcgcttgagctcaggagttagagaccagcctgggcaacatggtgaaatcccgtcaccacaaaaaaatgcaaaaattaactgggcgtggtggcatgcacctgtagtcccagctactctggaggctgaggtgaggggaatcacctgagccgggggaatcacctgagcccagggaagttgaggctgctgtgagccatggtcatgacactgccctccagcctggacaacagattgagaccctgtctc

SEQ ID NO: 164701 - DNA, 2661 bp, Homo sapiens
gtttttgggcccaacgggcagaagtgcccctcccttttacactcacacttcccactttctaagggtgccaggcccccgcgccgccctcctgcgttctttccggacggtccaacgtcttttccaccagtcccagcccatgtcgattacgtaaattctgtccaagaggattcccatacgtgcccctccgtccagaactcgcccagcccggaccagttccgagatttaccaccagcccagagctgggcgggggcgtggaaaacgcgaggagccttcccgcccctctccttctccctccctccctcccaagccactgccggctcccagccgagctccgcccccgcggtggccccgcctccccgccgcccggaaagcgggctgcggccccctcccaaaacccggggaagtggattctactctacgctccgctccgctccgctccgcaccaccaaccccgggccgcagtcctgacgagcgggtcagggcttgtcgggcggaagcctggcctggagcctggaagggggagacggcccgagcgggagcgggagcggacgcggcctcagtcctgcgcggaatattgaaggatgtttgttccaagatctctaaaaatcaagaggaatgctaatgatgatggcaaaagttgtgtggctaagataattaaaccagacccagaagaccttcagttggacaaaagcagagatgttcccgttgatgctgtagctacagaagcagccacaatagacaggcacatcagcgaatcatgccctttccccagcccaggtggccagttggcagaggttcattcagtaagtcccgagcagggtgcgaaggacagccatccttctgaagagcccgttaagtcattttccaaaacacagcgctgggcagaaccaggggaacccatctgtgttgtctgtggtcgttatggagagtatatctgtgataagacagatgaagatgtgtgtagtttggagtgtaaagcgaaacatcttctacaagttaaggaaaaggaagagaaatcaaaactcagcaatccacagaaggctgattctgagccagagtctccactgaatgcttcctatgtctacaaagagcacccctttattttgaaccttcaggaagaccagattgaaaatcttaaacagcagctgggaattttagttcaagggcaagaagtcaccaggcccattattgactttgaacattgtagtctccctgaggtcttaaatcacaacttgaagaaatcaggctatgaggtgccaactcccattcaaatgcagatgattcctgtgggacttctgggaagagacattctggccagtgcagatactggctcaggaaaaacagctgcttttcttcttcctgttatcatgcgagctttattcgagagcaaaactccatctgcgctcattcttacaccaaccagagagttagccattcagatagagagacaagctaaagaattgatgagtggcctgccacgcatgaaaactgtgcttcttgtagggggcttacccttacccccacagctttatcgtctgcaacaacatgttaaggttatcatagcaacccctgggcgacttctggatataataaagcagagctctgtagaactctgtggtgtaaagattgtggtagtagatgaagctgataccatgttaaagatgggttttcaacaacaagtgcttgacattttggaaaacattcctaatgattgtcagaccattttggtttcagccacaattccaactagcatagaacagctagcaagccagcttctgcataatcctgtgagaattatcactggagaaaagaacctaccttgtgccaatgtacgtcagattattttgtgggtagaagacccagccaaaaagaaaaaattatttgaaattttaaatgataagaaactctttaagcctccagtgttagtatttgtggactgcaaactaggagcagatcttttgagtgaagccgttcagaaaatcacagggctgaaaagcatatctatacattcggagaagtcgcaaatagaaaggaaaaacatattgaagggattacttgaaggagactatgaagttgtagtgagcacaggagtcttgggacgaggcctagacttgatcagtgtcaggctggttgtcaattttgatatgccttcaagtatggatgagtatgtccatcagattggaagagtaggaagattaggtcaaaatggaacagcgattactttcatcaataataattcaaaaagactcttctgggatattgcaaaacgagtaaagcccacaggatccattcttccccctcagttattaaattccccataccttcatgaccagaagagaaaggaacaacagaaagataaacagacacagaatgatctggttacaggagctaatcttatggatattatcagaaaacatgataaaagtaattctcagaaatgattttctctgccacttgaatatttttttttattgtatatagtcagcaaaaaattatggtttgcataaatggaaatgtacatgaattttaaaaattttaagatatttttaatttaataaaatttatataactatattgtatttatttcccttaattcttataaattaaaaacatcagaaaatgaattattaaataaaagacagtgttttcttttttggaaaa

SEQ ID NO: 164702 - DNA, 2634 bp, Homo sapiens
gtttttgggcccaacgggcagaagtgcccctcccttttacactcacacttcccactttctaagggtgccaggcccccgcgccgccctcctgcgttctttccggacggtccaacgtcttttccaccagtcccagcccatgtcgattacgtaaattctgtccaagaggattcccatacgtgcccctccgtccagaactcgcccagcccggaccagttccgagatttaccaccagcccagagctgggcgggggcgtggaaaacgcgaggagccttcccgcccctctccttctccctccctccctcccaagccactgccggctcccagccgagctccgcccccgcggtggccccgcctccccgccgcccggaaagcgggctgcggccccctcccaaaacccggggaagtggattctactctacgctccgctccgctccgctccgcaccaccaaccccgggccgcagtcctgacgagcgggtcagggcttgtcgggcggaagcctggcctggagcctggaagggggagacggcccgagcgggagcgggagcggacgcggcctcagtcctgcgcggaatattgaaggatgtttgttccaagatctctaaaaatcaagaggaatgctaatgatgatggcaaaagttgtgtggctaagataattaaaccagacccagaagaccttcagttggacaaaagcagagatgttcccgttgatgctgtagctacagaagcagccacaatagacaggcacatcagcgaatcatgccctttccccagcccaggtggccagttggcagaggttcattcagtaagtcccgagcagggtgcgaaggacagccatccttctgaagagcccgttaagtcattttccaaaacacagcgctgggcagaaccaggggaacccatctgtgttgtctgtggtcgttatggagagtatatctgtgataagacagatgaagatgtgtgtagtttggagtgtaaagcgaaacatcttctacaagttaaggaaaaggaagagaaatcaaaactcagcaatccacagaaggctgattctgagccagagtctccactgaatgcttcctatgtctacaaagagcacccctttattttgaaccttcaggaagaccagattgaaaatcttaaacagcagctgggaattttagttcaagggcaagaagtcaccaggcccattattgactttgaacattgtagtctccctgaggtcttaaatcacaacttgaagaaatcaggctatgaggtgccaactcccattcaaatgcagatgattcctgtgggacttctgggaagagacattctggccagtgcagatactggctcaggaaaaacagctgcttttcttcttcctgttatcatgcgagctttattcgagagcaaaactccatctgcgctcattcttacaccaaccagagagttagccattcagatagagagacaagctaaagaattgatgagtggcctgccacgcatgaaaactgtgcttcttgtagggggcttacccttacccccacagctttatcgtctgcaacaacatgttaaggttatcatagcaacccctgggcgacttctggatataataaagcagagctctgtagaactctgtggtgtaaagattgtggtagtagatgaagctgataccatgttaaagatgggttttcaacaacaagtgcttgacattttggaaaacattcctaatgattgtcagaccattttggtttcagccacaattccaactagcatagaacagctagcaagccagcttctgcataatcctgtgagaattatcactggagaaaagaacctaccttgtgccaatgtacgtcagattattttgtgggtagaagacccagccaaaaagaaaaaattatttgaaattttaaatgataagaaactctttaagcctccagtgttagtatttgtggactgcaaactaggagcagatcttttgagtgaagccgttcagaaaatcacagggctgaaaagcatatctatacattcggagaagtcgcaaatagaaaggaaaaacatattgaagggattacttgaaggagactatgaagttgtagtgagcacaggagtcttgggacgaggcctagacttgatcagtgtcaggctggttgtcaattttgatatgccttcaagtatggatgagtatgtccatcagctgaatattatttgggttgtgcccttctctggaattaatatcaacgcatctcttattgccttgttatacagtctactcaccacaatcaatatgaagtttactccataaacagaggtatggtacaagaggtaacgtgtcatccaaggtgactttcctggcagccaccagtaaactgactccggacagataggactcttttgttgccgccaaggcatacttacaatgacctcagaggctctagggccacagtgtgaaaaccaaccaatggataattaagtaaacacagttctcttgttctactgttagtgtgagaacctattttatattttataatgtgttgcacgtgtgatgatataggacaaaattacaaataaagcataagacgagtgtttatttttgtaatgtttacaaatagtaacttacaaataaattttagctttgaaaaatttgcacatca

SEQ ID NO: 164703 - DNA, 2608 bp, Homo sapiens
gtttttgggcccaacgggcagaagtgcccctcccttttacactcacacttcccactttctaagggtgccaggcccccgcgccgccctcctgcgttctttccggacggtccaacgtcttttccaccagtcccagcccatgtcgattacgtaaattctgtccaagaggattcccatacgtgcccctccgtccagaactcgcccagcccggaccagttccgagatttaccaccagcccagagctgggcgggggcgtggaaaacgcgaggagccttcccgcccctctccttctccctccctccctcccaagccactgccggctcccagccgagctccgcccccgcggtggccccgcctccccgccgcccggaaagcgggctgcggccccctcccaaaacccggggaagtggattctactctacgctccgctccgctccgctccgcaccaccaaccccgggccgcagtcctgacgagcgggtcagggcttgtcgggcggaagcctggcctggagcctggaagggggagacggcccgagcgggagcgggagcggacgcggcctcagtcctgcgcggaatattgaaggatgtttgttccaagatctctaaaaatcaagaggaatgctaatgatgatggcaaaagttgtgtggctaagataattaaaccagacccagaagaccttcagttggacaaaagcagagatgttcccgttgatgctgtagctacagaagcagccacaatagacaggcacatcagcgaatcatgccctttccccagcccaggtggccagttggcagaggttcattcagtaagtcccgagcagggtgcgaaggacagccatccttctgaagagcccgttaagtcattttccaaaacacagcgctgggcagaaccaggggaacccatctgtgttgtctgtggtcgttatggagagtatatctgtgataagacagatgaagatgtgtgtagtttggagtgtaaagcgaaacatcttctacaagttaaggaaaaggaagagaaatcaaaactcagcaatccacagaaggctgattctgagccagagtctccactgaatgcttcctatgtctacaaagagcacccctttattttgaaccttcaggaagaccagattgcccattattgactttgaacattgtagtctccctgaggtcttaaatcacaacttgaagaaatcaggctatgaggtgccaactcccattcaaatgcagatgattcctgtgggacttctgggaagagacattctggccagtgcagatactggctcaggaaaaacagctgcttttcttcttcctgttatcatgcgagctttattcgagagcaaaactccatctgcgctcattcttacaccaaccagagagttagccattcagatagagagacaagctaaagaattgatgagtggcctgccacgcatgaaaactgtgcttcttgtagggggcttacccttacccccacagctttatcgtctgcaacaacatgttaaggttatcatagcaacccctgggcgacttctggatataataaagcagagctctgtagaactctgtggtgtaaagattgtggtagtagatgaagctgataccatgttaaagatgggttttcaacaacaagtgcttgacattttggaaaacattcctaatgattgtcagaccattttggtttcagccacaattccaactagcatagaacagctagcaagccagcttctgcataatcctgtgagaattatcactggagaaaagaacctaccttgtgccaatgtacgtcagattattttgtgggtagaagacccagccaaaaagaaaaaattatttgaaattttaaatgataagaaactctttaagcctccagtgttagtatttgtggactgcaaactaggagcagatcttttgagtgaagccgttcagaaaatcacagggctgaaaagcatatctatacattcggagaagtcgcaaatagaaaggaaaaacatattgaagggattacttgaaggagactatgaagttgtagtgagcacaggagtcttgggacgaggcctagacttgatcagtgtcaggctggttgtcaattttgatatgccttcaagtatggatgagtatgtccatcagattggaagagtaggaagattaggtcaaaatggaacagcgattactttcatcaataataattcaaaaagactcttctgggatattgcaaaacgagtaaagcccacaggatccattcttccccctcagttattaaattccccataccttcatgaccagaagagaaaggaacaacagaaagataaacagacacagaatgatctggttacaggagctaatcttatggatattatcagaaaacatgataaaagtaattctcagaaatgattttctctgccacttgaatatttttttttattgtatatagtcagcaaaaaattatggtttgcataaatggaaatgtacatgaattttaaaaattttaagatatttttaatttaataaaatttatataactatattgtatttatttcccttaattcttataaattaaaaacatcagaaaatgaattattaaataaaagacagtgttttcttttttggaaaa

SEQ ID NO: 164704 - DNA, 162 bp, Homo sapiens
taatttagtataaacatatttttccagttctcttgacattgtggtatagttttctatttaggaatttttaatttttatattgttaattatatcagtcttttttgggggtggttctgggttttaatgtcaaacaagactaactttaatacaattttattttag

SEQ ID NO: 164705 - DNA, 698 bp, Homo sapiens
gtttttgggcccaacgggcagaagtgcccctcccttttacactcacacttcccactttctaagggtgccaggcccccgcgccgccctcctgcgttctttccggacggtccaacgtcttttccaccagtcccagcccatgtcgattacgtaaattctgtccaagaggattcccatacgtgcccctccgtccagaactcgcccagcccggaccagttccgagatttaccaccagcccagagctgggcgggggcgtggaaaacgcgaggagccttcccgcccctctccttctccctccctccctcccaagccactgccggctcccagccgagctccgcccccgcggtggccccgcctccccgccgcccggaaagcgggctgcggccccctcccaaaacccggggaagtggattctactctacgctccgctccgctccgctccgcaccaccaaccccgggccgcagtcctgacgagcgggtcagggcttgtcgggcggaagcctggcctggagcctggaagggggagacggcccgagcgggagcgggagcggacgcggcctcagtcctgcgcgggtgagcgtgccccggaagcttgggcccctggccgccctggtgccccttctccgggacctggggcgctaggccgcggcggcagaactggtgcccctgcgcggccttcctcccatccttacagttccccg

SEQ ID NO: 164706 - DNA, 2743 bp, Homo sapiens
gtttttgggcccaacgggcagaagtgcccctcccttttacactcacacttcccactttctaagggtgccaggcccccgcgccgccctcctgcgttctttccggacggtccaacgtcttttccaccagtcccagcccatgtcgattacgtaaattctgtccaagaggattcccatacgtgcccctccgtccagaactcgcccagcccggaccagttccgagatttaccaccagcccagagctgggcgggggcgtggaaaacgcgaggagccttcccgcccctctccttctccctccctccctcccaagccactgccggctcccagccgagctccgcccccgcggtggccccgcctccccgccgcccggaaagcgggctgcggccccctcccaaaacccggggaagtggattctactctacgctccgctccgctccgctccgcaccaccaaccccgggccgcagtcctgacgagcgggtcagggcttgtcgggcggaagcctggcctggagcctggaagggggagacggcccgagcgggagcgggagcggacgcggcctcagtcctgcgcggaatattgaaggatgtttgttccaagatctctaaaaatcaagaggaatgctaatgatgatggcaaaagttgtgtggctaagataattaaaccagacccagaagaccttcagttggacaaaagcagagatgttcccgttgatgctgtagctacagaagcagccacaatagacaggcacatcagcgaatcatgccctttccccagcccaggtggccagttggcagaggttcattcagtaagtcccgagcagggtgcgaaggacagccatccttctgaagagcccgttaagtcattttccaaaacacagcgctgggcagaaccaggggaacccatctgtgttgtctgtggtcgttatggagagtatatctgtgataagacagatgaagatgtgtgtagtttggagtgtaaagcgaaacatcttctacaagttaaggaaaaggaagagaaatcaaaactcagcaatccacagaaggctgattctgagccagagtctccactgaatgcttcctatgtctacaaagagcacccctttattttgaaccttcaggaagaccagattgaaaatcttaaacagcagctgggaattttagttcaagggcaagaagtcaccaggcccattattgactttgaacattgtagtctccctgaggtcttaaatcacaacttgaagaaatcaggctatgaggtgccaactcccattcaaatgcagatgattcctgtgggacttctgggaagagacattctggccagtgcagatactggctcaggaaaaacagctgcttttcttcttcctgttatcatgcgagctttattcgagagcaaaactccatctgcgctcattcttacaccaaccagagagttagccattcagatagagagacaagctaaagaattgatgagtggcctgccacgcatgaaaactgtgcttcttgtagggggcttacccttacccccacagctttatcgtctgcaacaacatgttaaggttatcatagcaacccctgggcgacttctggatataataaagcagagctctgtagaactctgtggtgtaaagattgtggtagtagatgaagctgataccatgttaaagatgggttttcaacaacaagtgcttgacattttggaaaacattcctaatgattgtcagaccattttggtttcagccacaattccaactagcatagaacagctagcaagccagcttctgcataatcctgtgagaattatcactggagaaaagaacctaccttgtgccaatgtacgtcagattattttgtgggtagaagacccagccaaaaagaaaaaattatttgaaattttaaatgataagaaactctttaagcctccagtgttagtatttgtggactgcaaactaggagcagatcttttgagtgaagccgttcagaaaatcacagggctgaaaagcatatctatacattcggagaagtcgcaaatagaaaggaaaaacatattgaagggattacttgaaggagactatgaagttgtagtgagcacaggagtcttgggacgaggcctagacttgatcagtgtcaggctggttgtcaattttgatatgccttcaagtatggatgagtatgtccatcagattggaagagtaggaagattaggtcaaaatggaacagcgattactttcatcaataataattcaaaaagactcttctgggatattgcaaaacgagtaaagcccacaggatccattcttccccctcagttattaaattccccataccttcatgaccagaagagaaaggaacaacagaaagataaacagacacagaatgatctggttacaggagctaatcttatggatattatcagaaaacatgataaaagtaattctcagaaatgattttctctgccacttgaatatttttttttattgtatatagtcagcaaaaaattatggtttgcataaatggaaatgtacatgaattttaaaaattttaagatatttttaatttaataaaatttatataactatattgtatttattccttatctataattaactcgaacgagaaaaaaaaaaaaaaatgtgggggcggcggaagttaaacatggtgggggggccgaggtatgaaaggcaggtgcgagaacgcgggaaggggggtgtcaaaagggggggggtgaaacagggggggagtaaggggg

SEQ ID NO: 164707 - DNA, 1747 bp, Homo sapiens
gtttttgggcccaacgggcagaagtgcccctcccttttacactcacacttcccactttctaagggtgccaggcccccgcgccgccctcctgcgttctttccggacggtccaacgtcttttccaccagtcccagcccatgtcgattacgtaaattctgtccaagaggattcccatacgtgcccctccgtccagaactcgcccagcccggaccagttccgagatttaccaccagcccagagctgggcgggggcgtggaaaacgcgaggagccttcccgcccctctccttctccctccctccctcccaagccactgccggctcccagccgagctccgcccccgcggtggccccgcctccccgccgcccggaaagcgggctgcggccccctcccaaaacccggggaagtggattctactctacgctccgctccgctccgctccgcaccaccaaccccgggccgcagtcctgacgagcgggtcagggcttgtcgggcggaagcctggcctggagcctggaagggggagacggcccgagcgggagcgggagcggacgcggcctcagtcctgcgcggaatattgaaggatgtttgttccaagatctctaaaaatcaagaggaatgctaatgatgatggcaaaagttgtgtggctaagataattaaaccagacccagaagaccttcagttggacaaaagcagagatgttcccgttgatgctgtagctacagaagcagccacaatagacaggcacatcagcgaatcatgccctttccccagcccaggtggccagttggcagaggttcattcagtaagtcccgagcagggtgcgaaggacagccatccttctgaagagcccgttaagtcattttccaaaacacagcgctgggcagaaccaggggaacccatctgtgttgtctgtggtcgttatggagagtatatctgtgataagacagatgaagatgtgtgtagtttggagtgtaaagcgaaacatcttctacaagttaaggaaaaggaagagaaatcaaaactcagcaatccacagaaggctgattctgagccagagtctccactgaatgcttcctatgtctacaaagagcacccctttattttgaaccttcaggaagaccagattgaaaatcttaaacagcagctgggaattttagttcaagggcaagaagtcaccaggcccattattgactttgaacattgtagtctccctgaggtcttaaatcacaacttgaagaaatcaggctatgaggtgccaactcccattcaaatgcagatgattcctgtgggacttctgggaagagacattctggccagtgcagatactggctcaggaaaaacagctgcttttcttcttcctgttatcatgcgagctttattcgagagcaaaactccatctgcgctcattcttacaccaaccagagagttagccattcagatagagagacaagctaaagaattgatgagtggcctgccacgcatgaaaactgtgcttcttgtagggggcttacccttacccccacagctttatcgtctgcaacaacatgttaaggttatcatagcaacccctgggcgacttctggatataataaagcagagctctgtagaactctgtggtgtaaagattgtggtagtagatgaagtaagtaaggggtctaaaaccggtccgtatttctccattctgcgagcgacctcataaccacgcgtggcaaccgtcttcccccggggtagccggagcgccggctc

SEQ ID NO: 164708 - DNA, 521 bp, Homo sapiens
ttcacttatgaggccaaccctgaccactctacttaatactgccatctgtccccattcccaccatgctcatttctttctttctttttgaaacaaggtcttgctttattgcccaggctggagtacactggtgcaatcacagctcacagcaacttcaacctcccaggcttaaacaatcctcccgcctcagccaccctaggaactgagactacagctgcatgccacaacacatggcttttttttttttttttttttgagacggagtctcggtcgcccaggctgaagtgtaagggtgcaatcttggctcactgcaatgtctgccttttgggttcaagtgattctctgcctcccgagtagctgggattacaggcacccaccaccacacctggctaatgtttgtatttttagtagaaatggggtttcaccatcttggctaggctggtcttgaacttctgacctcgtgatccaccctcctcggcctcccaaagtgctgggattacaggcatgagccactgcgtctggcc

SEQ ID NO: 164709 - DNA, 587 bp, Homo sapiens
tagcctcattttacagaaaaggaaataggttcagagaggttgtcttctgccccaagtcacacagacactgggcagcacataaggagttccatctgagcagctccttggagaggggtggggtcctggcaggggaggcacagagaaaggtcttgattacccccagatcttggaccccacatctgctgagctcacctggtcttggagagctcctctgaggtggcctgacctctctgcagcccagagatggccaggggacagacacccgaacaaggaagggggttggagagacttgagggcatttctcttttatctgatggtggagagcaaatgggaggaaaacgctcggtgttatcgtggggccaatgagagccttaagatacaggcagtgaatttcagccagggccctggtgatttaagatgcatcacttcccttagtaaccatgccaagcagatgtcagggacatcttgatgagggatgaagccatcggtgccaataaaacatttttctattagccacgctcaggtcagccgcctgctgagccacaggggttgctctgacaggaccttcatccttcggaggtcgggcc

SEQ ID NO: 164710 - DNA, 184 bp, Homo sapiens
tttgggaacctcagggcaaattcacccacatggaacagtttcttttgctctgcagaaacttgagagacctaaatctttaggaagggtgggagcagagcccagatatggttcacagaaaggaagtattcagctgtgtctgctaatactaaatgaccagtcctgctcatcctgaggagacaaggaa

SEQ ID NO: 164711 - DNA, 353 bp, Homo sapiens
tttgctgtatcccataggttttggtatgttgtgtttctgttttcatttgtttcaagaaatttttaaatttccttcttaattttttcattgacctattggttgttccagagcatattatttaatttctgtgtatttgcacagtttccaaagtccttcctgttactgatttctagttttattctgctgtggtctgaaaaaatatttgatgttattttgatctttaaaaatttgttgagacttgttttgtagcctaacatatggtttatcctgaagaacacttcaagataagaaaaacgtgtattttgcagctgttggatgtgatgttctgtaaatgtctgctagatccatttgat

SEQ ID NO: 164712 - DNA, 240 bp, Homo sapiens
taagcaatgtttctgtagatccattcttagaaattataagtgttttatcaaaatatatgtgcactataaatatatacaagtgtcactaaattactctgcaacaacataaagataaatgagaaaatgtaaagagtggttaagttctaggcttatgatcttgtaagtatctgatcaactctgtaaagaatcagaaaatcttagctataattctagcttacaacactaaacaccaatgcaaca

SEQ ID NO: 164713 - DNA, 708 bp, Homo sapiens
  misc_feature (1)..(3): n is a, c, g, or t
nnnaggttttaatttgctagacaaagagaactcaagcagtgctgtctaggagtgttatgtaagctagattggactttagagtcaggagaccatgcgggaagatactgtgtgataagggcctgaaacatgttggttacagtgagactagaaatgggataaatccagagctgtttcaccagtagacttgcctgaatatcctgtctgactgattatggatcagaaagaaaagaaggggtgatgggaaacaagcctagattgactagagaaacctagaaatagaaaaatcgggaaggcaaagtgatttggatgataatgccatatattcagttgtccctggtggccagatattatagtatagatattatacaggcaaagaagaacagagggatagagtgtgaaggtacagattttgagtttaagcacattagggggcttagtgttctggatgaagaaaacatataaaagttattgtatgttaggtattgtttgcaaaagagtagaaaatggagaaataacccagtgggttaaagaagaaacagactaaataaacaaacctgagtaagttgttcctaaattttattttagaggcaattcctcattttgctttagttttctcaattattgcctcacttttctgtttctttctctgtcagcatacatggaaaaaggagttaattttagattcaaaacaaaaactggaaaaaaaaa

SEQ ID NO: 164714 - DNA, 550 bp, Homo sapiens
tggtaaagaacattttcaggaatacgccgtagggttacataattggaggggaagttacgtggagggatgtggcagcaaaggaggggctgtgtattttgacccaggccagtgagagcaatgggtgccatcaaggggctgctccctgcgtcccccagtgatggacgtaactcagtgtgaagctctctctactgctcccagcagcccccgccaaccaattcatgttggccccaaagctgaaatgtgcatccctgctctactgcaatggagagccactgaagggctgtgcatgaggatggccaagacggtaactgtagttttagaagatcacagacttagggagactcgacacagggtggcttggaaaggacgagagcggacacgccttgccagctgaggcgcatggatttcccacaaggctgagagcaggaccctggcctcctggaagccaagcagcgatggggttgagtgagacaggcactgccccctcactcagacgcgcactgaatcgtcctctggctgcacatgacaactgcggccacttccccttgtt

SEQ ID NO: 164715 - DNA, 227 bp, Homo sapiens
ttgtacttttcagtagggatgcaaccaaaccaatcccaattacacagtgtcactctgtaaaataatttaagtaaatgactctatagtcgccttacaaaacatagcagaatgtatccagcagaggatagtggttaagaacacagatcttggaactagactatctggtttcagatcccagtcctaccacttagtagatgtgtaaacacaggcaccttactttagaggag

SEQ ID NO: 164716 - DNA, 213 bp, Homo sapiens
aggtaattcctagcacagaagagctgtgccaggagagggtgccttccgtgatgtctgttaggctagtcggagagcagtggctttattatactttgtgttcccagagccaggatcaatgcctagcaccttgcattcagtagtttcatgacactgaggagattctagagggattagtaggagttgggaaagggggaagatggttttgacacaccc

SEQ ID NO: 164717 - DNA, 1366 bp, Homo sapiens
ctaagaatagacgtccaaagccacacaaaggaaggtgttatagaaaaacagaggctgggcacagtggctcaagcctctaatcccagcactttgggaggccgaggtgggtggatcacgaggtcaggagatcgagaccatcctggctaacacggtgaaaccccgtttctactaaaaatacaaaaaattagccaggcgcagtggtgggcacctgtagtcccagctactggggaggctgaggcaggagaatggcgtgaacctgggaggcggagcttgcagtgagccgagatggagccaccgcactctagcctgggcgacagagagaaactctgtctcaacaaaaaaagaaaagaaaaacagagcaactgggtgattgtattgaaaggaagggtctttggaaccttgattgacaagttctaccagttgcagcgaaggaggctttccattgagttatgtgctcatgacattcttagtcatggactgacttaactttcttgatcttaaataagtaaatcctttctttcttttctccctgttgtgttttcttccccactcatttgcccttcctctctctttcttataggtttgatgggatggaaattttatattaccagagtacaaaagtgggcttatatcttttcacaaatagaaggcctatctcaatggtaaagctactggttggaggtagtgatacatggcgtactctattctgttaaggtctagaagtcttcataggaaggataagtccacatgaggttaatcgcatacttcagattcaatattgagcttggttccatgcagtagaagaaggctgatgtagtgaaaagagaacagggtttagggtcaagccagcctgagttcacaaatcatctctgtcattctttaattgtgtgactgaaatcacataattagccagtacaagataagccttagtttcttcatttgccaactgagatactaatacagaccttgtgaggattaagagcaggcatgggatgcaggtgagcacttactcattctacagacatttattgagtactgctctgttccaggcatatttcaggacaggacgttaaaatcaaatatgggctggacacagtggctcaagcctgtaatcccagcactttgggaggctgaggcaggaggatcacttgaggccaggaatttgagaccagcctgggcagcatggtaaaacctcgtctctattaaaaaatacaaaaattagccatgtgttttggctcatgcttgtaatcccatctactcaggaggctgagatatgagaactgcttgaacccaggaggtggagtttgcagtgagctgagattgctccactgtactccagcctgggtgacagaatgggactctgtct

SEQ ID NO: 164718 - DNA, 116 bp, Homo sapiens
aggttgaaagatcttctaagcacacatgaaagaaacagcagggccaagactactttgaacttactgcatacgattcctttcatataagatgtgcttgacaaacattaattaagtct

SEQ ID NO: 164719 - DNA, 481 bp, Homo sapiens
cctcaatcccaagcaatcattgctctgctttttttcctgtgaattagaatacccttttctagagtttcacgtcagtgaagtcgtaccgtaggtactctgtgcttagcttctttcacttggcatgtttttgagatgcattcatattattgcatgtaccaatggttcattccttccactccccgagtggtgttttgttttatggatgtaccacactttgcttatgaatacatttactctactaaatgtatagttttggttgttatgaataccgctatgaattcatgtataagccttcatatagacacatttttattgttttggtgtgtattcctttgattattattcctttattaactcattaaaagtttgaaaactttttcaagaatgttaactttttttgtttttgtgagttctatcttttgtccgtgttttattttgtggttttatgttttctatgttttaattattgagatagtctaat

SEQ ID NO: 164720 - DNA, 184 bp, Homo sapiens
ctcgtgatcaggtattatcctctgattaataccatataccatgtcttatcagtggtccctgtctcccttcttgtacaatccagaggaatatttttatcaactattttgtaaatgcaagttttttagtagctctagaaacatttttaagaagggaatctcacctcatcccattttttaagtgtaa

SEQ ID NO: 164721 - DNA, 380 bp, Homo sapiens
cgtttagattcctattgtgatgtctttgcaccataccaggtgccacttcaaaagaagggtagctgctagtgatgttatatccctctttattttcagcgaaatctcagcttgaatcttacatggctcttacatagaatcaacagaagtgcttttggaattgcaatttataaaaaacatgtttgtgtactagagtgaatgtgatggcttatcctaggatgtggcagaaaatgacttcaccctcaagttctatattaaatacatagcttctcagaaagcacctgaccccatctgtgaatcacgtcctgagcttcactattttgaaaatattaccatatttcatatttgctaagttatctaattaggtatgaattctgtgagaa

SEQ ID NO: 164722 - DNA, 286 bp, Homo sapiens
atatgcacctcaacaaacacacctaactcataagtgacagcctgacttacaaagtgaatctctgccttcaaaagactcatgcttatacatgtgacagcgtgccccatgtctactgcctctccatcacagactttctccattcatttgtttgaaatccaaagacaaacgccgggcctacctaaagccacaatcagcccagattagattagaaaggtcacctgtgttcctttctcttccattaggaaagatgtactgcttctcaacaaagtatttgctcatcctgccc

SEQ ID NO: 164723 - DNA, 220 bp, Homo sapiens
cagagctagaccctgtctcttaaaaaataatgataaatctttggaaataaaaatggaaaaaattaaattgagataattctaatgaaaattgtccaaacaatttcaagggaaatctttcagtattcataaaatatgtattacatatcttcagcacttctagagcaagcatatatagaaaccttttttgaatttttctgtaaagagagctagttcagaatat

SEQ ID NO: 164724 - DNA, 530 bp, Homo sapiens
cctgtaatcccagctacttgggaggctgaggcaggagaattgcttgaacctgggaggtggaggttgcagtgagccgagatcatgccattgctctccagcctggacaacgtgaaacttcgtttcaaaaaaaaagaaaggaaggaaggaaggaaattcaatccaaagatttataaaacaataaatggaaggttctagtgtagagtgagaaacagaagcaatttagcattaagccatatgctattgattaataagagaatacatgtgtcctagctcatatgttgtctaaggatccatataataagaaaaaatgtgatgttttggtatgctttaaggtttcttttcagcagtcatgcaagaatgggataacaattttgtaattatggcttgccttgagtaagcagcttattgcattatggtatgacacaagtacctgcttgtctcaaaatatccactattgacttgacctaatatttgaaaatctcacaattaataaacatatggggttatgacattaaatgcttaagtagtat

SEQ ID NO: 164725 - DNA, 92 bp, Homo sapiens
ggccccctcccccatcaccacacccagcccccaaacgctaggcgccgggtcccggccgggacgaaagcggccggagagaggcaaaccgcccg

SEQ ID NO: 164726 - DNA, 576 bp, Homo sapiens
gataaaattgacaaacctttatacctacaatttttaaggccaaataccttaatgtgaaaattttaaaaaaggaaaaaaaaacatatttgcagtgcataccattgtgtttagaattatactctttataatttgaagatatattataaatgattgaggaaagagtaaataaatccataggagaaaagggaaagaacaggaataaatagtttgaccaaaaaaaaaaaaattacatctgaacaaatgcttagaagcatccataattttatattaaaattaaaacaactgtgaaataccattttaactttcatattcaccagaaaaattattgttgaagatgtggagaaatgaacattttcaagcaattttaacaggaatatacattgggatatttgcttgggagcataatttagaaatatctttccagtttttcaacatatatactatttgacctgacaatcccatatcaaggactctctcctatggatatgtctactgtgtaagcaaagatgcatgtccattgttattagtagtaacattctagaaatattttaaaaggctcattaatagaaaactgat

SEQ ID NO: 164727 - DNA, 447 bp, Homo sapiens
aataagttgtgacactgtgctgcttgacccacagaaaaggatgagaaaacttctaaactttcctttactggaaaattctataaatgttgtcatcaatctatattctgcagatagttaaaaccttttttttcctttaaatcaaagtgcacagaatttaacatgatatttgtgcaagagccaaagagataagaggtaaaaagtctattaaagagggatcaaaattcagtatttatgttagtacagggtacgtgagaaaaggggagggatgcacacacgaataatttcctattcgggaaacatgctaggcaaaacatagccggcttcctgtcaaatgaacaggggcacttatggttaaagcaccacatgtatttaatatgctatatttagtttttatcagtgaatgcaaatgaaagaaatattctgagatacttttatttctattttggg

SEQ ID NO: 164728 - DNA, 333 bp, Homo sapiens
aaggttggatacaacagatatctaactataaaggatcagttgcaaaaactatggtaaatcaatagaatgttaaacagtcattaaaaattatactgatactgcagttgagtcatgtgtaaattatactgaaaggtacttagtgacattgaaaaatgttttagaatattaactgtttttttaaaggttagaacatagtatgtacaatattaacccatttttataagcaataatatgtttatatttaagaaagacagtaaagatagtggattaggattttatttgcacttacatatttctgaattttcaataatatgtatgatgattaaaatgaga

SEQ ID NO: 164729 - DNA, 414 bp, Homo sapiens
gatgtttatatgagatactattggagtagttcacttgagcatttagtgataggtatgtagaggatgtatatcaaggtatagagaagtaacttatttaaggtcatacaacctataaacaattgagctcatatctctggcattaaagcctggatatagaacccccatcagaagatagggttcatttgttcctttaaggagctggagcttgggaggaaggagctacaatgtgcctggaaaaatttcatttctgtagtcttaaacagcatttgattcagtggagcagtctgtacttgaaagcttttttcttcattttgatttgtaatattatcatctactgcttttctctacttcactgactgtaccttttctgtgtcctgctcctcctcttcctgacatctacattctgaggccaag

SEQ ID NO: 164730 - DNA, 213 bp, Homo sapiens
caggagaatcgcttgaacctggcgggtggaggttgaagtaagccgagatcgcgccaccgtactccagcctgggcaacaaagctagactccatttccaaaaagaaaagaaaagaaaaaaagtccaaactataccatggcctataaggtcctggaaggtccagatttctttaacctgatctcggagtgtctctcttgctcactccatttcagcca

SEQ ID NO: 164731 - DNA, 510 bp, Homo sapiens
atttcagtatcagctgagactatgggggagctctgctgcggcacgtaacagctaacagcggttgtggcaggatgaggcctgacctttatggcaagatcatttatagaccttccttctgtcccagttagaatacgtcaatgtcacatctaacacactttcttcttagaaattcttggttatcaaaacaacttgagagaactgttatggtgaaaagaagcactggagttggcatttgagggtctgtttcagattctgctcttcatttaatgtctgtgtggcctttggcaattccgtttgcctaagtttcacttaactgttggtaacattaacagttgccttaagagtttagtgagtgtttgataaggcaaatatatatgtaaatgttcagatatctaggcacttaatgtcaattgaaaaggatttatttctaatattataacatctgctacaactttaaaaagctgttacataattaaatcgtgtcccgacttctcgctttgataccctgga

SEQ ID NO: 164732 - DNA, 213 bp, Homo sapiens
catatttcctcctctttatctcttgtatgctattatttttgagtagttgtttattaatgcctttatcactagattttaaatttgcttacacaacttattacttttattccccccagtgtcaaaaacagttttgtgatgtttaataaatgcttattgaatgaataaacaaatgaataaggagctacagatacaatcgtgatttttttggggggg

SEQ ID NO: 164733 - DNA, 177 bp, Homo sapiens
gcctaaaatgtttataataatgtacttgttttaccttctttatggagttgccctaaggatcaaaatcagctgaaaatgttacaaaatactttataaactcttagtacaataaaaatgttaagataatagtacagagaataacttggaagggcatgccagaagataaggcatgtaaaa

SEQ ID NO: 164734 - DNA, 347 bp, Homo sapiens
  misc_feature (2)..(2): n is a, c, g, or t
anccggacagaacacacccagcttagttcttttcttttcacataggcccaaaggttggatggggggtagcttaaagaactgattttccccctacccaggctgtactctggggtgggaggagccttttctggggaatgaggtcactcactggaccttgagcaagtcacactgctgctgcaggccaacgagcggggagtgctgcgctgtgcccgccgtcggtgccctgtgcatctcttcctcttggctgttctggagtagtgtcccttataataaccagtgataggaagctgagtgctttcctgagttctgtgcatcattccagctaatcatggagcctggggatgggg

SEQ ID NO: 164735 - DNA, 411 bp, Homo sapiens
tgaggcatgagcatttatctgtcagcttaacttgtgagaaacctggctgtcatgataagtgtctgtaatcaggagttaggcaaattaatattatttgcatttttttatgtctagaaaatatttataaacaaaaagccagtcatctgagactctaatgaaggaaggaagtcaagacaaggaagtgtttccttgtctcctcctgcttttgttgactgtgtgggtagccaggaaaggactacagtcttctttataggagggggatggcagcagaagcaacaggaccatgaaccaaggagaatgttctcacctgctgctgttggacctccaggccatgccatctgatgtgtataagaggatatggaaagatttaggttttttctttttgaagactagatatgcaaatgattgaaa

SEQ ID NO: 164736 - DNA, 435 bp, Homo sapiens
atggtttggctctgtgttcccatccaaatctcaccccattatccccacatgtcaaggacaggaccaggtggaggtaattggatcatgggggcagtttcccccatgctgttctcatgatagtgaatgaattctcatgacatctcatggttgcattaagcatctggcatttcccctgcttgcactcactccatcctgttgccctgtgaagaaggcacttgctttttgccttctaccatgactgcaagtttcctgaggcctcccaagcaatgtggaactgaaagtcaattacacttctttccttcataaatttcccagtcttgggcatttcttcatagcagtgtgagaacagactaatacacacacacaaacacatgcaaaaccaagggaaaaaatgaagtaggctgggcccggtggctcacgcctgtaatcccagca

SEQ ID NO: 164737 - DNA, 427 bp, Homo sapiens
ccagttcaccttagggaactgggggagcagaaagattttcctgaggctcttatctcaataaaggcaattggtaactttgctaatacatcctttatctatttctatattcattcttcttggggaatgcctgctagcaaatgtcatttggaaggtaaagataaaagctttcagagagtacagttgctggctctgaggaggttcctccagcacctgtgtataagcttcacaaggaattccttcttgttcacactctatgtagacggttccaggctgtgccctgctccacagtgcttctgactcagaacccagggtgaaagatgcacgctaacctcagacatgctcagacatggataaatcaagtttactcacttttcatttggtcaaagttaatggggcaaatatatttttctccagctacagggaagca

SEQ ID NO: 164738 - DNA, 117 bp, Homo sapiens
aatgacaatgaagtcaatgcaaattaaaatgaaatggtcttcatcaattatactaaaaaggaattaatgcccagtgctgtggagcattggtggggaggaggaagagcaccactaatg

SEQ ID NO: 164739 - DNA, 374 bp, Homo sapiens
ccctacctgcaaggtacccttaattctccagggagaaaccttttataaataaatgtcatgagtgctcatcccccgagttgaagcttatctgcagagatgcttcactccgggagagagggttggagttgccattgtgaaggcctgtgtgtgtagaggtaccatgctgccaccaggccatccctcttacagctgtgtggcatcctggaggcctgggtaggagacggagggtgccgcaagttctcttccagtgatggggagccacaggtggttttgtagggttcctgggtcttaggtggttatcaaaagcatttcacagacatatgtaagataaagaccctgtcctcaagcagctaaatgaatgaactagaacagtg

SEQ ID NO: 164740 - DNA, 404 bp, Homo sapiens
agcaaatggggtgatgctacacactttttttttttttttagctaatatgtacttatttatttgaattagttgaattgcttgcagtaaaaatgttatggactgaatgtgtccttttttttttttttttttttttttagttcaattgttcatccattttttatttgcttttataattgcctccttgttttggtatattgtaaaataatttaaataatgtatttataaatatgtataattatgatgtaaaataccgtgtgtatatgtatgtatgtgtgtttctgtatatgcacacacataaacggctttgcctagccaaggattttttttatctgtataaaactttttgtataaagtttgctttcaataacagtaatgtataataaaaccatgtaaagttttgttgt

SEQ ID NO: 164741 - DNA, 264 bp, Homo sapiens
aagcaaaaatgacaaaattttagcaagtaatgaaattagtggtaggtacaccagtcttcactgtatttttcttttcttttcttttttgagactgagtctcactctatcgcccaggctggagggcagtggcacgatcttggctcactgcaacctctgcctcccgggttcaagcaatgcctcagcttcccgagtagctgggattacaggtgcctgccaccacgcctggctaatttttgtatttttaatagagacgggatttccaac

SEQ ID NO: 164742 - DNA, 350 bp, Homo sapiens
gaggagactaatgacaaggggagggaaaaattctgcatgttacagatttaaaagcatattctctatcaattcatttacattaatgaaaatctggatttttttcatgagaaattatatatttctattagcccatattgattcagaaagaaggggaaaaacctgtagaaagccccatagaacttgtcataatagtctgggcagaagtatatgactgtcattccaaggcagtaacactttccataatttaataccctagtggataaacatttgaatttaaagtgtagatacattttggaaacactcaaccaactcaggaaacacatgtgctatggtgtcatcaggtcacactt

SEQ ID NO: 164743 - DNA, 270 bp, Homo sapiens
agaaagaaagacgcaagtgtggtggtgttcctgtagtcccagcttcttgggaggttgagatgtgaggattgcctgagtttaggaggtcaagtatgcagtgagccatgtttacacctctgtactccagcctggacaaaagagtgagaccccatcttttaaaagaaggagagaaaacggaatcagagggttctacctggtttggttttgtttgagacagggtcttgccctgttgcccaggctgcaccagctgagggttttggaacagcctac

SEQ ID NO: 164744 - DNA, 120 bp, Homo sapiens
ggtggtgtaattcagtctgcaatccaggagatggtgctctagagtacgggctggcatgcctcttttctgtttcagcgtgttggcagcagtgctctggggaagggggagaagtaggattgg

SEQ ID NO: 164745 - DNA, 711 bp, Homo sapiens
cttcattctccatttctttagacagtgtccattagttttctctaaaaccaatgggaaattagcatcctttcacttcctgccctgtaactccggccagaggtaagaagccaagctttatggtcattatattctttctttggtttatcaagacattctgctttcttctccactttcatttttagtccatcaaattgtaaaaacgtatacactatttgaataagcaatttttcaattacaagctgctgatttttttacacccaaaatgtgcgtatttgtgaaatacccacataattaaattaatgtattgtagacataataaaattacacacaaacagagcttttgaaatgataaaaatgttttcctacctgtcttcactgaatcacacacaccccctggggtataaactctaaattgaatacacacatttagatgaatagtcctcaatctttttagaattatgtttcctctgagagtcaaattaacattattcattctcagacaaaaatgttcacattttctcaggcaactcgcagttcagagatggccaaggaactcagatgctaagcatttagacattcaacattactggaattgtagacattgccaacttcagaatctcccaatcataaagtgagacatgaaacacagtggagacatttgacaagacataaccgacgccggtcgcgattcatacgcgccgtcagctgtta

SEQ ID NO: 164746 - DNA, 885 bp, Homo sapiens
cttcattctccatttctttagacagtgtccattagttttctctaaaaccaatgggaaattagcatcctttcacttcctgccctgtaactccggccagaggtaagaagccaagctttatggtcattatattctttctttggtttatcaagacattctgctttcttctccactttcatttttagtccatcaaattgtaaaaacgtatacactatttgaataagcaatttttcaattacaagctgctgatttttttacacccaaaatgtgcgtatttgtgaaatacccacataattaaattaatgtattgtagacataataaaattacacacaaacagagcttttgaaatgataaaaatgttttcctacctgtcttcactgaatcacacacaccccctggggtataaactctaaattgaatacacacatttagatgaatagtcctcaatctttttagaattatgtttcctctgagagtcaaattaacattattcattctcagacaaaaatgttcacattttctcaggcaactcgcagttcagagatggccaaggaactcagatgctaagcatttagacattcaacattactggaattgtagacattgccaacttcagaatctcccaatcataaagtgagacatgaaacacagtggagacatttgacaagacataaacagcatagtcaaattagccatgcttgattaaatatgtaataactcctttagataatctgtccaacaacagcatagttcaacaagagtcagatttcaaataattttctcatttccctccttctttgcctctcctctttttctgtcctgttctccacctcttctctctcgtttctccttcttcctcccagcactttttcattctccctccttcc

SEQ ID NO: 164747 - DNA, 696 bp, Homo sapiens
gtttaggacatgctaaatatatgttttccttttttctttctatttaaaaaaatctgagttgcagtcacattaacaggtcagtaacatagaggtttggttccctcatatgactttctgcatgtactttacatttttttcttgtttaaatgctaggcatattgtgtaccccacattggtttgtagccagctctatgtcatagggcccttaccctttacctatttattgttagtatcatgtccataaacaagccaatggctcagcatgaactgatgctaaagaaagctcatgcctgagtgataaattaagtgacctcagctatttctcttcagtgttgtgaaagttatttttaacagtaggtttcctggtagattctctaaccactcggtatttcacatggcccaacttggttaactcgactggttacggcaaatgctgataaaggcaagatcacaggtttgctccccatgaaaaccaataacttctcggagattaaaaaaaaaatctcccttctgtgaccacaagcagcatcactcatgcaaatgtcggaagagaggaattgggagtgagtgagagtctagcccagtgcaaatatttctactgttgaaaaaagaagtccaggcgcagtgactcacgcctgtcatcccaacattttgggaggccaaggtgggtggatcgcttgagcgagaccaacctag

SEQ ID NO: 164748 - DNA, 227 bp, Homo sapiens
tccagtaagtgttagtactgagccacagtggagtagagagggaaagtagtaacttgtgtcatatgtgattttagcatgaattcttttttcctttaacaatgccagaggagcccagagaatggggtgaatgtagcacaacttcagtgattgctagctgcagggtcacatgattatataagggaaatgtcaccgctgctgccaaagataagtgagccagagcagggcat

SEQ ID NO: 164749 - DNA, 107 bp, Homo sapiens
gaccagttagtaacagaactaggacctaagtatcctgttttctggttagtagtaataccagctatattgattcagatggcaatatccagacaatagctcccactcat

SEQ ID NO: 164750 - DNA, 552 bp, Homo sapiens
acaattccattgttgtgaacatcatagaatacttatacaacctagatggtatagcctactacacatgtaggccacatggtatatagcctattgctcctaggctacaaacctgtacagcatgttactgtatgaatactgtaggcagctgtaatacaatggtcagtatttgtgtatctaaacatagctaagcatagaaaaaggcatagtaaaaatacgatattatgatcttatgggaccaccatcatatatgcacccatcattgaccaaaatggcgttatgtggcacatgaccatatttcaagggcgaatggaatttaaagttctattttacatagaaaagaaggatgaaagtcagagtgcctgtgggggtagagaactggcctaacggaagaatggaagttagctacagaaatataatcaaggaatctggaccactgtggtatcagaagagtttaagtgaagagaccaaataccccaattatctaggaggtttcaagaaagaaaagagattgcaaatctgacaaatttcattccaaaagcagttaactgtcca

SEQ ID NO: 164751 - DNA, 401 bp, Homo sapiens
acaaagacagtgacaccaaaccgagctcaaatgttctctacgaggatgacataacctgtaaggtttctaagcagtgctcacattcgcgatacaggctctctagatatctatgccctatgtggagtcagcgcaccaagagtgtagcattttatttatttatttatttagaggcagagtctcactctgttgcccaggttggagtgcagtggtgcaatctcagctcactgcaacccctgccttccaggttcaagtgattctcctgcctcagcctcccaagtagctgggactacaggtgcatgccagcacaccttggttaatttttttatttttagtagagatggggtttcaccatgttggccaggctggtctccaactcctgacctcaactgatctgcccacct

SEQ ID NO: 164752 - DNA, 354 bp, Homo sapiens
tgacagccattgtgttagaatgaccacaaggtctgcagatcacagatgcaaagataagcaggagatgtaatagccaggtgtcagagcacccaaggaaaagtgctttggcattgcaataccctaaaatcagcagtagggaactaagaggaggccattgttaactcccggctctcatggttcatgagagaaccatgaactatgtgagaatgagtagcctgtgctgtaaggaactgaaagaaaaatggtttcttggtaaaacatcagtttcaaataagcaaggatatatggtgatggttgcctacaacaatgtaaggactgtaagggatacagtcaagaggattggcaggaatttga

SEQ ID NO: 164753 - DNA, 131 bp, Homo sapiens
gctggggtggttttggaaaaagcaacatttgggcaggaaaacagggataactattctcattttcgggccacaatttccaggctgcagaatggaacctttgctggggaaccatcctcttttaccccctattt

SEQ ID NO: 164754 - DNA, 262 bp, Homo sapiens
cactcttcatctctgtataattttttagtggtttctctaggaattacagtatatatatttaacttttcacagtttacttaaaattagtacctcaagtggaatgtagaaatcttactaccatataagtcccttgactctccattcttttttctttttgagatggagtttcactgtctcccccagctggagcgtagtggtgtgatcttggctcactgcaacctccgagaagaaatggagtttcaccgtgttagccaggcttatc

SEQ ID NO: 164755 - DNA, 425 bp, Homo sapiens
gcccaggctggtctcaaactcctggcctcaagcgatccttcctcttaggcctcccaaacaaaacactgggattacaggtgtgagccactgtgtctggccttgatatattgtttttaaatgaataaaatacttatttataaagaaaacctgttatatataaatagatgtcaaaatactaaaatgacaaatttgtgatacagaattatatgcttccttatcgatgcattaaatcaggtgtagtggcacgtcaaataatgtcatttgagagtaattatgactgaacaatattaatattgtaagatatctgtaatggcaggagagtgtgatctctcctggtaagtcaagttttgctaataccactgtgatttgttgccagtcaattgaaactgaaggaaatgctgaattagaggttaataaagatgtaa

SEQ ID NO: 164756 - DNA, 413 bp, Homo sapiens
tgtaagcctggaatttagtggggaggttcggactggcaatttgagtcagaaatcatctgtttgtaaagggcattcaaagcagtgagcttgtatcagatcatctgaagagtgtgtgtgaagaaagatgtggttgagctactgagctccaagttactctaacataaagaggtcaggaagaaaaacagaagctggaagctaagaagataaagaaggatatgcaggtgaaatgggaggacctatttaaataagcatgttttagaaggagttagtgctcaaaatgccagctgcatttgcagagtttaatttagatgaggattgagaattggccattgatttagcatggtggtcatttatttggactaaaaatggttttgttggaatgattggtctgaaattctgattcatatgggtta

SEQ ID NO: 164757 - DNA, 140 bp, Homo sapiens
tcacaacttgttttctgagattcatccacgttgttggcatgaactagttcttttttattgctaaatggtattctgttttgtgactagagcataatttgcttgtccgttctcccattaatggacattggggttgtttccag

SEQ ID NO: 164758 - DNA, 293 bp, Homo sapiens
ccattttatttatttttcattatattgtatgatctttgatgtcaaccaaattcctctagatgcattattatctggtgaaatcatactgagttaggaatgaagagtctggcatgccatttcataacatattgccatgctgcacagacctttttaaattcctctggttcatgttcttcattataaaattggcatgtgactgctgcacctatcttcttcatgctaacacagcaggttggaaagagattgtgtttgtgaaaatatttgagaaataaagggctaaatgcatgtgagtt

SEQ ID NO: 164759 - DNA, 507 bp, Homo sapiens
cctcgaacacatcataccccacactactaccatcttccagatatgcccctgcttctgtaccttctacctctatctcagttgtcagtgataccagctatccaggactctatggtggaaacctgggaatcattgattcctgcctttcatcaatctcctgtccaataactatcatagtctgctaattatttcatggtctcctaaatatttctcacatttttctgcatcttaactaccactgctgcaatttaagttctcatcagctttcccctagatcagtggtcttgaacctttttgacatcagggaccagttttgtggaagaaagattttccatgcaccggcatggtgggggtgggggtggtttcaggatgaaactgttctacctcagatcatcaggcattagattctcataaagagcgcacagcctagatcccttgcatgcgcagttcaccataggcttcatgctcctatgagaatccaatgagccactgatcttacaggaggcggag

SEQ ID NO: 164760 - DNA, 252 bp, Homo sapiens
ctcttctccactcatctcaagggaggggatggggaaggagcagagagtagctgaggaaggtagggagaggctaggctgtgtgccggaggagagagatttgtaagccattttggtaaggattttgagcagtttaggagggagcagggccagagactgtcacagagaagagaagagtagggtatttgggggaagtaatggaaatgattccctatggaattagagggtctgtgctactgttcatagaggagatgg

SEQ ID NO: 164761 - DNA, 507 bp, Homo sapiens
aggaggcagatgttgcagtgagccgagactgtgacactgcactacagcctgagtgactgagcaagactcagtctcaaagagacaaagaaaaagaaataaataaaatcataaatgcaattttaacatttagaaaacttactgggcacagctatggtcaatgactttaaaatatgaggagccagaccaggcatggtggatcatgcctgtaagcccagcactttgagaggctgaggtaggagaatcgcttgaggccaggagttcaacaccagcctagataacagagcgagatcctgtctctacaaaaaacgaaactagccaaatgcagtggcatgcacctgtactcccagctatgcaggaggctgagacaggagaatcccttgagcccagaagttcaaggttgtagtgagctatgatcatgccgctgtactacagcctgggtgacagagtgagaccctcactatactccagcctggatgacagagtgagaacctagctcaaaatagaaaa

SEQ ID NO: 164762 - DNA, 383 bp, Homo sapiens
ccgggctttaggattccttctgttttatttcccaagatgtgagtgtgacaggaaattttattttaaaacaatttatgatctacagacttactgacagaagatgttggtttaaaaaacaaagacagcgtcaatcttaagaaattgggtgcagctacactgatagtcaattgctgaagatatctcattcttattcatggagcttccatggagggttttttaacctattatgttttcaaggtctatacagtcttgctgccagtgggccattacccactgggattgagccagttaagatccttgcatagactcaacatcatctttaccaaaatgaaaacaatctcatgttgtcttttgaatctgtttgaagggagcagtatttttag

SEQ ID NO: 164763 - DNA, 337 bp, Homo sapiens
gaattaaatatttaactacacaatgtgtgatctctttttacagtaattcttaatgacagtaatttatgtctgatgtacattggcagtcatctaattttcttttttgtgctttttgtttatctgcctgaatgagaaccaccttttatgatcaagtgaatatatgccatgaaagaatgttcctaaaatagattcaaggtgtagcatactgttgttcaaacaactttcccgttaatttctacatatccagagggggaaaaaaacagcaatggttttctatccaggaaccattaaacataggagcttaaaatgcctattttttaatactaaaacttcttat

SEQ ID NO: 164764 - DNA, 258 bp, Homo sapiens
ccatgtacccccacgcccggctagcttttgtattttttgcagaaacggggtctggcaatattgctcaggctggaacaccatccttctgtgtggatacttgttcagtgcctgtcctcccgcttcccaggccctttgaaagggagcagcgcttggctggatgcgatggctcacgcctgttaatcccagcacttgtgagtggccaaggcaggcagaacacaagatcaggagatcaagaccatcctggccaacatggtgaaa

SEQ ID NO: 164765 - DNA, 196 bp, Homo sapiens
atgcattggggagtatagacacagactaccataacattaatgtcagttctttaacttatttgtaggatacaataattgcagcatttgtctctatttgattttctacatttaaaaaatgatggcactcttctttaagtgctgggcatgaaatatttaatattatgttccattgctcatatttacgattatgctgaac

SEQ ID NO: 164766 - DNA, 762 bp, Homo sapiens
caaaacttcatgcgctgttccatgacaaattttgatgattcagatttcaaggcaaattaaagcctcacaaaaagcaaaataggaaaaagaacagaagaagtactatttagattacatggattacccagtcttaggttctacgtacctgccagtccctacatgcagtactgtgttcccttggcactgccactttttaaagcagccattgacacactggaatgagtctagaggatagcagtcaggattttattaccatctctttgatttgagatatagtggaaggaacaacaaaagttaactgagagaactgaaattggaaaatagaataaagaaggggatgtggtaactttctttaaataattgtgcttattgaagaaaagtgaattttattctgtgatgctctagagagccaaggttggatccgtgggtggaaggcacaagaaggttcaaaataaaatgaaactttcaaatagtaagacttggagcaaaatgaaagcagctgtttgtgggatagccacaaattagaccatgtatgattagaccatgtgatgctgggctagaaatattgaagcaattcctccactggtgcaagctttatatagtagtcttaaaggcactcccttaccaccaaattgctagaaattttatgaatctgattactatagagacattatttccatttcaataaaaagtagattaagaagataattatgcaagatgtttgattgacattatacataagaaagccatttctactaagca

SEQ ID NO: 164767 - DNA, 546 bp, Homo sapiens
gtctagaaatgcaattaatttgtgtgtgtatgttgattttgtatcctgcaactttgccttgcaatgtttttgaccaatccctgcctcttttctgtcctgtgttggttccaagataggcaaacatagatgggtacctagcctcagtccttcagacagctccccagcaggttagaacagacaaacacagtaatttacaagtaaggtcagctctgcaccctccagaaccaggaacaagggtcccactctgggaacacaggctgctttctgcaagactgctacccagctgggggaagggataggacaaggacaaatgatgctttgctaccattataaagttgtcttttttgtaattcagcattttcttcattgctgtaaacctttgagtgttttccagaattctgacaatgttggttctgaccatttctgggtttttttttcatatgtttctgtggggggatgggcattttgagtttccaattttgccattttgctgatgtcctttttcaatagaaacttttaattgaaatataatctatataaaggggt

SEQ ID NO: 164768 - DNA, 387 bp, Homo sapiens
gcggggtcgctatggggaggtcatgcctgtgtaccggcgggacagccaccgagacgtgcaggctggcagccatgactaccctggtgagggcatctacctgctcaagttcgacaactcctactccctgctgcgcaacaagactctctacttccacatctactacaccagctgaaggactgctgggacaggggcaggctgtatttgctggctgaagcaggctgccagctggtgcctcttgtttgggataggcaagagccaaaggttcatggggggctgctgagcctcacaccctgtctggcatgcctgactgttggcccacgtagctttttccccttcttggcttctgcaggtggtggtgtagtgcccctgttctgtagtccctgactc

SEQ ID NO: 164769 - DNA, 310 bp, Homo sapiens
ggcctgtaatcccagctactcgggagcctgaggcaggagaaccacttggaccagggaggcagaagttgcagtgagctgagatcacgccactgcactccagcctgggtgacagagcgagactctgtctaaaacaaaacaaaacaaaacaaaacaaaacaaccacacaaatgtagctcaattaggataatttatggtcccagtcatgagcactccaccaggggtctgagggactgaagacatacctgggcaataacagaaagaacaagtcactctcggcacagcgactacacacaccctagagctgtggttc

SEQ ID NO: 164770 - DNA, 512 bp, Homo sapiens
cttatagtcattctgaactctactgacctgtctttcctcttcactcttgctacccttaagcaaagtcattgtcagcactacggttttcccaaacattcctccctaaactcttccacttctaagaatcatggatttcccttcaagtttcctttccatgaactaaatacattttttttttcttggccaatttctcagtcctactccctctctccaaatgctggcttcgtttgtctaactgccacaatgggtggctgtagtaatgtagtaatgaaggagaagaggatgttaaggcttctttcagtgacattaaaagctatggaaacacaagttatgatttttttcagttatattgaatagtcagcaaggctaactgaatttgcaaacaaaagaacagttcttcagtttatgagcaaaatatatctagaagttttgtactattagtgcagtgaaaaagtaactgttttttttagatggctgcagtgttcccagcattgagcccgtaactgtggcag

SEQ ID NO: 164771 - DNA, 441 bp, Homo sapiens
cccaaagtgaaaacacggctttttctgtaatgaatgctattatttctgttttcattggttgaatactctgcaactccttggacgaggggagcaatcattgtagttctagtcattcactgtccctctagaccattgttttgccatttttgcacagcttctgatttttcaaaaagtccttaccatctgttctctccccatttttattgctttttgtcttttgtcccattgctttatttgcttttgtctgatgacttccaggatccacatggatcagttttcttcttcattgcattctctagtatccagtacctcactctcatcagttatctttctctcttccatctacaccttcgctattgagtctttcttttcagactacaaatacagaggtcttgtctatcctaaaacaaataaaaattttctgccttttcactttgggct

SEQ ID NO: 164772 - DNA, 615 bp, Homo sapiens
tagaatgatttataatcctttgggtatatacccagtaatgggattgctgggtcagatggtatttctagctctggatccttgaagaattgccacactgtcttccacaatggttgaactaatttacactcccaccaacagtgtaaaatcgttcctatttctccacatcctctccagcatctgttgtttcctgacttttaaaagtttcatttctttgaagagtaatgatattgaactttttcccatgtctactgatccagtgacttttaaggtcccaggcacaattagtctgcagcaaagcaaatcaaaagaacaggtaaagaagacgacataccaggcaaggatggcaccttagttctacattttaaaaatttaataaagctctacacctattaaggtatccttgtgtttataatccatatatctttcacaaattttcatggggaagaaaaatagttgggagatgtcagatcccccctgtgaagctgggcagactccaccagactccaccatggcacttgggaggcattatataaacgtttgtggctaccacagagaccaaaaatggattgtgctgcctcttccctggtctatttcatagaggcactgggatgctgt

SEQ ID NO: 164773 - DNA, 844 bp, Homo sapiens
aacacagaaacctgagctgccctccctttccttagtttagtcatttccagcacagaaattgtaaccctgaataattactttcaaggactacactcaaacttcttaacttctctggctactctaaggaaaagctaaagagataatgtggtaaggaataaaaagtacatggagaaatttattttactgattgaactttagaaaataaagccttaggaaattcttaattcactaagattagtttggttacctagtttcaagaagtaactttagaaacaatacccactctctaaaagccagagggtttttttttcctttttaaaaaaaccttagtttatatgtatagccgtgttatgttgccagatacctagaaatccaaatgtctgttaaatcccaaatattggatttaacaatgcaaaatataaatattaatttcaacctctgttactttaagagctaacctgtattatgcctgggctaggaaaactttaaaaccctattatcatttattcatcagaatatttttcttgtgtgtgtcagaacagttggtagaaataaactttttttatttggaagtttgaagtttaattagaaagtcaagacaagctagaaagggggttaaattttttaaaaataataatgttatactttttatattatttcacataatcgatgcgggaaaccaagaatgtggtagacagaataataacactaattgctgacattattgacatttactgatttattcatagctctgctgtgcgcctcacatctattatctcttcaattctcccatcaatcctgtgaaataagtacgtttgtcacccccagctttaactaaagatgc

SEQ ID NO: 164774 - DNA, 183 bp, Homo sapiens
gttgctttgtgtgtgtgcgcgcgcgcatgtgtgtgtgtaaggggcagggtctctaagaaagaaagaaaaggaggcgagaggaggaaagaacctgtttcagtttcacaggctctggcaaggtgactgaggaagcgccaagccccttagcctctttgggctctggttacctcatcagtaacatta

SEQ ID NO: 164775 - DNA, 269 bp, Homo sapiens
ctggctgtctgagtattgattatagtctcccaagtctctctggacacaaatgaacaagtacctacagaggaaaaccctccaagaacaccaggagactgggcatgggggctcaggcctgtaatcctagcactttgagaggctgaggtgggaggattgcttgagtccaagagcccaagaccagcctgggcaacatggcaagaccttgtccctactggaaaaaaagaacagcagaaaattattttaagcttgatcaatacttactctttcag

SEQ ID NO: 164776 - DNA, 145 bp, Homo sapiens
cgatcatagagcatcccggtacgattctttgcactaaaaagtcaactaaaacaagccttccataataataacagaaatatgcacactgtagaaaattagagaatacagatgagcaaaaaatcttaaaacacttcatattcccatc

SEQ ID NO: 164777 - DNA, 376 bp, Homo sapiens
gagtgtttgtgttttatagctttccatttgtgcagcttcccaatatggatctcagatgggccatatctgtacaatcagggattttaagtgttacccgtccatgtttgcatctggatttgactatgggttgcaaaacctgggtttttgtgccatgtgaataattaagcactttaacaatgggaatgatgtttagattatcagatacccaaattccttttgctaactgagctttccgttcaaagggaatcacacaacgttgtgcataaggccttgggtctgaggctccccttgcttctgtgcataaaaggcccggtgtttacatgtctgttgagcagtgctgtgctggcgctgggaaggaggaggggtgttaatggtg

SEQ ID NO: 164778 - DNA, 470 bp, Homo sapiens
tgtgggccgctgcctaaaaggggtaagaggaagaaaggacagtgtgggtgcaactgagattggagagatgacggaaaaatcacaggggaccctctgaacagaaaccccagataatcttccctaatgtggctctttcctccctttctcattcactttcccttccagaaagctttccctgcacaaccccctctgtcttctgctgccttcccctgtagaacaatggagttaaagggacacagccaaagacattccctgatatcttcactttttggtcctttcccattggaaccagtgggggaaatgatggcatttctggttgattggttggcctgccctttctcccacccctcctttcccttcctcttcctcctcatcccatcccttcttccatttctctctttttaaattggcaaatagtctttccacctccatgttcctaaggattcttgaaatagaaagaatgtgttgga

SEQ ID NO: 164779 - DNA, 222 bp, Homo sapiens
gccatgttggccaagctggtttctaactcctgacctcaaatgatctgcccaccttggcctcccaaagtgctgggattacaggcatgacccactgtgccaggcccaatctcccattttcaaagcctggttcaacggccaatacagaacttcatttttctctaagacacttaactcttcccactgtatatcatagttacttacacattgcatctagtcttccta

SEQ ID NO: 164780 - DNA, 762 bp, Homo sapiens
  misc_feature (738)..(738): n is a, c, g, or t
attgctcgagcccaggagttagaggttgcagtgagctatgaccgcaccactgcgctccagcctgggcgatggaacgagactctgtctctaaaacaaaaacaaaacgaaaaagcaaagtcttgtcagaataacatttcctttttttgaggtagaagaaggaaatcctgtaactgggttgtagtaagacgtatgattgtttttcagtttatccttgtgaacatcctgggcaacaagagtgtaactccatttcaaaattaaaaaaaaaaaaaaaaaggaagaaagaacgaaaaaaagaagaaaagaaatttacatttaaggtagttaaatgaaagatgaacattaacttcttcacctactgattggacagtgctgataaagaatatttccagcatcatggaaagttttattggacagtgctgccctagagattctgattctgtaggtctggggtgttccagatttggcagtctctctagagatgacctatatagttggcagaattgtaactacttgattcttcaggttgtacctcctattaattccccactaaccctttgtttgatgagtggtttggttgaatataggattctagattggagattttctcttaattttaacatcattacttcgtggttttctagcttctattgttgctgttgaaaaatggatgccattctcattcctgatcctttgtctgtgctttcctccagcctggacatagtgggagactctgtctcnaaaggacaaccaaagaaacaagat

SEQ ID NO: 164781 - DNA, 283 bp, Homo sapiens
atttactgaggtaattgtggattcacacagtaagaaatactacagagagagcccgtgtaccctttccccattttcctccagtggtgacatcttgcacagctttaatagtacaatatcagagccaggatattgactttgatacaatccaccagtcttatttcgacttcccattttacctgtactcatttgtgtttgtgaagcattgcttttaaagtgtttaccttttagacatttttataaaatacaattttttatctgcataaaacatgtataatttgaatgg

SEQ ID NO: 164782 - DNA, 483 bp, Homo sapiens
agtagagcagtcatgcgggaggaggcactactgaaagtgcagctgacacagttgaaggagtcatttcaacaagtccaattagaaagagatgagtattctgaacatctaaaaggagagagggcccggtggcagcagaggatgagaaaaatgtcgcaggagatttgcacattaaagaaagagaagcagcaagatatgcgtcgggtagagaagctggagaggagcttgtcccaaatctcaaaagaccagatggctgaacccttgcccccggagcccccagcagtgccctctgaggtggagctgcagcacctgaggaaggaactagagagagtggcaggagagctccaggcccaggtcaaaaagaatcagcgcataagtctcctgaaccagcgacaagaagagaggattcaggagcaggaagagaggcttcggaagcaggaggagaggattcaggagcagcacaagagccttcagcagctggccaag

SEQ ID NO: 164783 - DNA, 298 bp, Homo sapiens
ggagtggattccctgggccggcccccttgctggtgtcctgcctgcttgacccccgttagctgccgccatcacagccacactctgacatccatcctgactatgggaagcatcaaatgaagatggccaggagcttcagaactcttaaaacctggtgcctgaaacagccaggaaattggagccagagcttaaaaaaaaaaaggaaataaacgagaagacgaaggccatcctgatgctcccccttgtgcacacagggcaggtggttggaggcatcttttctgcccctgagggtcccacctgc

SEQ ID NO: 164784 - DNA, 103 bp, Homo sapiens
tacaaacataggagcaaggtaacaatagtttaataaacatacattcattgttttgaggagactgagagaaaaggaccagaaataataaaccagagatcaaaca

SEQ ID NO: 164785 - DNA, 535 bp, Homo sapiens
tagatcctgtgttgacatttcatctctcctgatgtgtgctgactaaatagattccacttgttttcattttgtctatcaataaatgtttggatttcttgctgctgagaactcagttatggccatcggttttctatcttaacaattcaagaagagctttgttatctgggatgttgttagaacacaggataaaaccctattcacattgtcttgaggtgtcctcttatcagttcttcctttctagcagtggacctataactgaatggggagaccctgggcacctggtcagaagggagacatgtatttccagttgacctcaggctgtcctgcaatcagagacaagcagatgtcaacagtgaaatagttgactcagtacggttttaaaagtcttaacatgtgaacatttcattgaatgaagtaggaagtgacaatacagagaaaaaaaatctcatctctccttttgaatgacaatctgtgaattaaaattcagcagagtacatgagtcaagttaattagaataaataatcttataactata

SEQ ID NO: 164786 - DNA, 976 bp, Homo sapiens
tattccttacgtcaccaatcaacttgtacttccccatctagttttagttgctcattgcttccagacagctctgcctcttctcttaatctaatcagataatagacttctacaaatacttattgaacagaggtgggtatggagataagacagggacttcccctgataacaaacaagcatgcaaataactaacaataatccaaacacagttacgtaaatgccagggagaaaggcagtgaatgtgctgtgaatatggagagaaaggaagaagtttctttcaaacagagctttggggtaagggaggcctgctttagtccttgcagggtagatatctcacaggtagaaaatggggagaaatggtactgaaggtagcagcttgaacgtgggagatgttggggaagaccagaaacgtgtactaggttggtttctggcagcattaggagaaatctcagactagcggggcatgttgcccagagcatgtgcttctaagaagttcctcatgaatgaggtggggaggcttttattcctctcgccacaacactgaggtataacaactcttttcagaaaatgagattttatatatctaagcctagctttctaggcaagctgtataggcaagatcgtctttataccattttgtggattttttttttttttttgaattgcttccccaaatctgatgttgctcatagtgtcaccaacccagggccacattcatatgaaatatttgcctggccgctcaggctgtgccatcttgagtgatgtgttcctctctccccacaccctggttctgcttaacttccaggttccagtttaggtcttgctttttccagaaacttttcatgatcccttctgtcctctttgctgtctgtcatgtctgaaattcttcagcttttatagtctacagcaattaattattaatatatcatgtcttttaaatatttacttgttgattgggtgacgtacagggtggatacct

SEQ ID NO: 164787 - DNA, 980 bp, Homo sapiens
tgtacaacgcctggcacttcgacggcctgacttggaaaaccccttgccgagttgctcattgcttccagacagctctgcctcttctcttaatctaatcagataatagacttctacaaatacttattgaacagaggtgggtatggagataagacagggacttcccctgataacaaacaagcatgcaaataactaacaataatccaaacacagttacgtaaatgccagggagaaaggcagtgaatgtgctgtgaatatggagagaaaggaagaagtttctttcaaacagagctttggggtaagggaggcctgctttagtccttgcagggtagatatctcacaggtagaaaatggggagaaatggtactgaaggtagcagcttgaacgtgggagatgttggggaagaccagaaacgtgtactaggttggtttctggcagcattaggagaaatctcagactagcggggcatgttgcccagagcatgtgcttctaagaagttcctcatgaatgaggtggggaggcttttattcctctcgccacaacactgaggtataacaactcttttcagaaaatgagattttatatatctaagcctagctttctaggcaagctgtataggcaagatcgtctttataccattttgtggattttttttttttttttgaattgcttccccaaatctgatgttgctcatagtgtcaccaacccagggccacattcatatgaaatatttgcctggccgctcaggctgtgccatcttgagtgatgtgttcctctctccccacaccctggttctgcttaacttccaggttccagtttaggtcttgctttttccagaaacttttcatgatcccttctgtcctctttgctgtctgtcatgtctgaaattcttcagcttttatagtctacagcaattaattattaatatatcatgtcttttaaatatttacttgttgattgggtgacgtacagggtggatacct

SEQ ID NO: 164788 - DNA, 153 bp, Homo sapiens
acggaggatgtgcttctgagtggtccgttgggtgctgtgctgatgagcatcacccagcattttacgacacatgtgctgccccagagggctgggctcccgtcagagctcttttccactggctgggtgcggtggctcacacctgtaatcccagca

SEQ ID NO: 164789 - DNA, 283 bp, Homo sapiens
gaactgaataaaaagtctatgataaccggctgatgaaatagaagtatgctcaattataactggtataaccgccgcttaaaaaaatattcctccagtcctttcttcataagtgctacaaatcattcatccagtggagaaatactaaaggggccctataaaagcaccagtgtcttgacgaacagattaggaaactgttctagcatgccatggtaagtctccaaagcaatagaaaaaaattaacaaataccttccatccctttacacatcttcttctgccatcttt

SEQ ID NO: 164790 - DNA, 300 bp, Homo sapiens
agaaaacagatgatagagccctaagctggactgagatggagaggagggggaaagaaaatgagagacattaatgtcagaggtaagatggatgagacctgatgaccaattaaatgtgcaatcagcggctgggcacagtgggtcatgcctgtaatcccagcactttgggaggacgaggcttgtggatcataaggtcaggagatcgagaccatcctggctaacacggtgaaaccctgtctttactgaaaatacaaaaaattagctgggcgtggttgcaggcacctgtagtcccagctactcagg

SEQ ID NO: 164791 - DNA, 317 bp, Homo sapiens
tagattgaggtctcgcctgggcaggtagtctcgtcgctggggaggtgtagacgttacagtgattgtatgaactccctgtatcactctccatttagggacagttttcaacactgtgtatcaagatgtgttctcttacgtaagtcgcttgttaaagatttgccattttggtagcctgaagtaatgtgagtttcaactgttattttatttcatcttgcctttgttacttgttaatggatgaggaaaatgaaaaagtacaagtattagtgctggtggtaactcagcctcatacagttaataaaatacaaaaaagatgagaa

SEQ ID NO: 164792 - DNA, 470 bp, Homo sapiens
tggatgaaagccctagaactttctcagggacttctagtacataggattactttgctttctggaaaggctatatcaaatttcacttccccaggagcatacgtgagaatcaccgcccactgattagtaccatctaaacattttgccaattttgtacacaaaatatcctcttttcttatttcactttttattgccttggtctcatgtgaggctaaaattttcccttgtgttaattagctaatggtattttctaatctgtggattgtctcttcataccctttgccaagcttcctgtcacaatgttcctgttatgagtttatactaaatcttcataatgaggatagaaaaaatctagttctgatgttttctgtttgtcctttaatgttgtttctgatatttctgatatttttatgttcatagcatttaaatgtttataaagtcaaatcaatcttctttttccccctgtggaaatc

SEQ ID NO: 164793 - DNA, 352 bp, Homo sapiens
aaaagtaaataagtcagaggttttgtcctcaaggaactaaccatccagaagtaaatagaaataaacttggggaccacatgcagtgctcatgcctgtaatcctagcactttgggaagccaaggcgggcagatcactggaggtcaggagattgataccagcttgtccaacatggtgaaaccctgtctcgactaaaaatacaaaagttagcctagagtggcggcttatgccaataatcccagctactcgggtggctgaggcaggaggatcacttgaacccaggaggcagaggttgcagtgagctaggattgcaccactgcactccagcctaggtgacagagcaagactccatctc

SEQ ID NO: 164794 - DNA, 235 bp, Homo sapiens
tttgatcctcaccctcctcctaccctccaccctcaagtaggcccagttgtctgttgttcctctcttcctgtccgtctgtactcagagtttttaatatgagtttttcatgttcctaatttagctgttctattgtcacagctttctgattttgttttctttaaagtacaagagaaaattgaattttctaaaatcattttctattattattccagtaataaactgtgtagtagaaaag

SEQ ID NO: 164795 - DNA, 630 bp, Homo sapiens
ctcacatgggaggaaaagatatgccatgcaaacactaatcataagaaagcctgaatggctatattaatattcaacttcagagaaagaaaagtgtgggagataaagaaagacagtacataataataaaagggtcaattcaccaagaagatataacaatcctatatgtgtttgtacctaacaatagagcatcaaaatacataaagcaaaaactgacagaattgaaagaggcaaatctaaaattacagctggagacgtaaaaactctaatcagcaattgacagagctagtagacagagtcagcaaggatatatatagaagaactgaacaccattaactaacgggatcaaactgacatttatagaatactccattcaaccacaacagtgtacatattcttttcaagtacaaaatggaacatttataatagaaatcgtagcaaactgaaagggactagagtcatacgatgtatgttcctgaccataatggaattaaactagaaagcaatgtgaaaaaataacaggaaaatcttcaaacacttggatagtagacatcacacttctaaataatccatgggtgacagggaaggtctcaaaggaaattagagaatattttgaactgaaagaaaaaaaaa

SEQ ID NO: 164796 - DNA, 366 bp, Homo sapiens
aaatgcatcagaacaaacagttagtgcatgtggggcttcatacctaggtgatatattgacaggtgcagcaaaaccaccacggcacacatttacctaggtaacaaacctgcgtgttccacacatgcatccaggaacttaaagtaaaattaaattaaatacaaaagacgaagaagataggtctaacatgattctagagcttcaagcccaggtaactacaagactgtagtttcattcgcatcaccagatgagagaaatcttgtttgggaagataagaaaggaacagggagatgacacagagctggaagagagaaagaaaaaaatgaataaactaaagtgtaatatgcttcagttctgatacggttttga

SEQ ID NO: 164797 - DNA, 567 bp, Homo sapiens
gttttaattgataatttttattataaaaagtgtttacagggaaaaaaatcactgggttgtaataaaagttcttataggtttgctaaatatagtattatgaggcaatattgagggggaaacatagctaaagtaggaagtaaattaatcctcagttgcaccacgggagaacagtgtaaagcaatgattctcaacacttgtttcacatgagaatcatctgagtaactttagaaaatactgatgccagagccccacctgtagagattctgaaggaattgatctaggggccaggcaattggattcattatttcgccattggagattctatgaacaaagattctaaagcctcttggtttaaagagattaaaataatgagtacatatttttaactgacacattgtttctaaaattaaaccagagattttgtgttattttagttactgttttgtgatcatttttcatgatgcattctccgcttgtttctttcagtattttttatgtacaaagtgtcatgtgaaatactgtcatgaatacatagagaaataaaatatctctgcttttaaggggctc

SEQ ID NO: 164798 - DNA, 458 bp, Homo sapiens
ctcccaggttcaggcaattctcctgcctcagcctcccaaataggtgggattacaggcatgtgccaccatgcctggctaattttttgtatttagtagagacggggtttcaccatgttagtcaggctcgtctcaaactactgacttcaggtgatccatctgccctggcctcccaaagtgctgggattacaggcatgagacaccgcgtctgtcctcatattggctttaaaataaagacatttgtaaaaatctgtagtaaatatcctgagtagaacaggcatggagctaattaatatcataactcaaaattcccatgaagcatccaggttctttgatgacatctttcatccccaccattcttagcttgtctattttggcgtttcatctatcttgccccaagtcacaatatggtatagcaactccagtttgcgtgtccagataataaaatatccaaaagaaaa

SEQ ID NO: 164799 - DNA, 219 bp, Homo sapiens
gtcgcttgtatgctgaaaactcccaaatttgtatctgtagcccagcttttcctactaagctctacttacatatctttgcagacctcattacttcttgactaacttactggctccttaaatatctaaaattgaatccatgttctacctccccatacaaaaagttcctcctccttccctaccacagttaacagttaccattactctggccattactatcct

SEQ ID NO: 164800 - DNA, 204 bp, Homo sapiens
tttgaggtgatgtgatgagaaatctgttagttcaggacctgtatctgggccccagacaagggggttggtcctgagggcagcccaggagcatgtgccagcacaaggccacgcctccgtggacaccgcagcatgccagcacaaggccacgcctccgtggacaccgcagcatgccagcacaaggccacgcctccgtggacaccgcag

SEQ ID NO: 164801 - DNA, 667 bp, Homo sapiens
caaacctggtaaattgaaacataaattccattctttgatattaaacagcacatcacaaagcgttttgacagatagattggttctagttttcagggctggttatttcactgttcctatagaacctcaatgtgctcagaaatgtcactttgtaggttctacataaggagtgtttggaactcgacgaattgaaaaacaggttccatctgtgatatgaaacagcacatcacaacttattttcttgccagctctgagaatgaaaaacaagctaggtgagaaaacaatcagagctggatattcattgctttttaataggcctcaaagagctcagaaatattactttgtagattctacaaaaaaagtgtgtggaacctggtgaatcaaaacagatgctcccttcagtgatacaaaacagcacatcacaaagtgttttcacagatagcttgtttctaatttttagggctggatattcacatgttcttttaaggtctcaatgggcttagaaatgtcacttcagagattcttcaaacagagtgcttcaaatctggtgaatcaaaacacagtttccattcagtaatataaaacagcacatcacaaaagattttcacagttagctggtttctagtttttaggactggatattcaattttttctttataggcctcaatgg

SEQ ID NO: 164802 - DNA, 479 bp, Homo sapiens
caggctggtctcaaactcctggcctcaagtgatccacctgcctcagcgtcccaaagagctggcattacaggcgcgagccactatgcccgaccaaaaaaaaaacttttttttaattagccaggtgcagtcgcctgtgcctatagtcccagctactcaggaggccaaggaaggagtatcatttgagtacaggagttcaagactacagtgagttatgattgtgctactgtgcttcagcctgggatgacagagcaaggctgtctcaaggaaaaaaaaaaaaaaacgtaatgatgtacagtgttcactctgagagaacttgaaacattgcaggaatgttgtttagtaactgcaaggtaaaattcattgaagagtggctaggtgctcacgcctgtaatcccagcacaggaggcctaggtaggtggattgcttgaatccaagagttcgagaccagcctgggcaacatggcaaaaccacatctcttc

SEQ ID NO: 164803 - DNA, 554 bp, Homo sapiens
tgtttgcggcagaattgagtgcccttctgtatacttcccacttcatcccacaaagtattcacaacattcaacatttttaacaaaggctcagaagcgagactggtttctttcctctctctcttcctgtgggtgagtgctgtgaagatatgactattgccctggcactgcttggtgccatggcctcaagtcatagtgaaaccctgtcttcactaaaaatacaaaaatgagccaggcacggtggcacacacctggtaatcccagctacttgggaggctgaggcaggagaactgcttaagcccaggaggtagaggttgcagtgaacagagatcactccactgcactccagcctgggcgacagagggagactccgcctcaaaaaaaaaagaacatcatccgtgatgagaagccaggggacacaggccaagcgacaggtccaggctgtctgtagactcatccactgtgaggcaaaagcacaactcagcagcagacatgtcaactccctcttcgtgcctgcagtcgtatcttgaatccagcaagtttcgactgcattgtgg

SEQ ID NO: 164804 - DNA, 583 bp, Homo sapiens
caaaattggtagacttgtgtttctagactgagctctcctgagttcacatctctaaatactggtacaggtagcttgcaagcatttcaagcacctcaaaactgctcttctcgtttttgttaatgacatttaatctgcttcaattatctattactgtttagcaaaccactccaagcttaatgacatataaacagcaaccattttatcacattcacagattctgtgagtcagggattctgatagggcacagcaacgatggcttgtctttgttccacacacgagggcacgtcagctgaagactgcctcttgctgtttggggagataccatatctcccacacattactaagatgaagagtcggggtgggtggcagagaggtaaagatgaaagtaggtccttatttttgcttcttaggaatacattatttttaagcaccacactcacgttgaatagcacataagatcaagtacacattaaaaaacaaaaagtactttcatactgctataaagaactgcccgagactgaataatttataaaggaaagaggtttaattgactcatagttcagcatggctgggaggcctcagg

SEQ ID NO: 164805 - DNA, 560 bp, Homo sapiens
caaaattggtagacttgtgtttctagactgagctctcctgagttcacatctctaaatactggtacaggtagcttgcaagcatttcaagcacctcaaaactgctcttctcgtttttgttaatgacatttaatctgcttcaattatctattactgtttagcaaaccactccaagcttaatgacatataaacagcaaccattttatcacattcacagattctgtgagtcagggattctgatagggcacagcaacgatggcttgtctttgttccacacacgagggcacgtcagctgaagactgcctcttgctgtttggggagataccatatctcccacacattactaagatgaagagtcggggtgggtggcagagaggtaaagatgaaagtaggtccttatttttgcttcttaggaatacattatttttaagcaccacactcacgttgaatagcacataagatcaagtacacattaaaaaacaaaaagtactttcagcagaatttgtattaaggtagttttttggtttttggttttttttgagacagagtttcgcgccgtcgcg

SEQ ID NO: 164806 - DNA, 239 bp, Homo sapiens
attacaggcatgagccaccgcgcccggccctctttattagtattctttatgttcagacataattttcctaatttcctttagttctttgtccatggcttcccttagttcattgaacatactaagacagttgatttattgtttttgattaataattccaatgcctgggcttcctgagggatacttcccatcacaatctctttttcagccaggtgcagtggctcatgcctatgatctcagaa

SEQ ID NO: 164807 - DNA, 447 bp, Homo sapiens
agaatggttgctctcttggtaataccaaaggcagcaaattaaagaaagaacaaaatgaattgtatcacaaaggacagccaagattctggcagagtgatgctggcaagagagagaggacagtgggaacaaacaagaagaagagggtctgagtttggaaagggcagggctgaggtgcagaatctgtgctggacagcactgaaacaggcggaagcagatttcagagggctctgaaggccaggatgggaagttatgactgtatttgctgggctatgagacacatcaatgatctaaacaggaacatgacacagtgattcctcagaaggattactctggtagtgctacctggcataacttagaagggagcaggaaatgttacgtgtggaggcagctgcatttgtctagacatgaggtaatagggacctgaaacagaattggaagtgaaaaaga

SEQ ID NO: 164808 - DNA, 457 bp, Homo sapiens
cccttgcgcagagcacagctgggaggctgcacgagcgatggcctttcgaggaagcagagtggccggcaccctgcctgctgtcccggtccagctctgttccccctgggaagccgaggggcgtggccaacacccgcctgctgttccaacccaacccagctctgttcccctgggaagcccaggagagtggcccggcacccgcctgctactgctatcccggcccagctttgtttccccggaagctgaggggagtggctggcacccgcctgctactgctatcctggcccagctttgtctcccaggaagccaaggagagttcgctggcacgcgcctgctactgctatcccagcccagctctgtttcccaggaagctgaggggagtggctggcacccgcctgctgtcccaacccagctctgtctccctgggaagccgaggaaagtggccagcacccacctgcta

SEQ ID NO: 164809 - DNA, 509 bp, Homo sapiens
aagaaaataataataatgcctttgttctatttatcagcagtttctagaataaagtacacatgaacagaaaggaataacagaaattatacctgaaactctaattgcgagctagctttactcccagtctctttctaaggaaaagacccataggcaattcttctccatataaaagcatggtaccccaatcacaactaaccagactaatgggtaagccagaagtgatgaggtagaggtgaaagcaaccacctatgactacgccagtatcagaaccacctattccatcttctctccaagaactagaagaagagatatacatagagaagtaagcagtgccatgtaagaaatgaagatttattcttctgattataaaatcttgaactatgattatcccaggataacagctcaatttgcaattatgggaaatactggaacacagacaaaattgcactgctgttaaggtaagtattccatgcttctcgacttccctgtgtcaattaaagcactgcttc

SEQ ID NO: 164810 - DNA, 417 bp, Homo sapiens
tataaacattgttggtatttaactttacttcccattactgtggatctaaccaaataattatgtgttttgtgtccctaagtatgctctcattttttttggtctacacccattggaagcctttttaatgtgacatcttttagaggaattctgctggaataatttcatgttaacgaggctaaagctcaagtctcccaaattaagtggaatgttcattatcccaaggtgttcatagtcaaaagtcccagttgatagtgaagaaggccaggactgtaattgagcagtccttagcaccatttagcaaactaggtttacttactacataatatagctgcttattcacagcatatacagtgacaccttatctctgaaaaataatttccacggagccacttagaataaaaaaactattataactag

SEQ ID NO: 164811 - DNA, 245 bp, Homo sapiens
tcagagagcgcgatagcagggaagaaaatcaatcatccactgggggaggccacccaaaccagggggaaacttccccacctggggctgagctagccagcagcctcctgccagacctgggcatggggaggtccttcatagactaaatgccacctgtcacgtcaacctcctgctcacctggcactccttcttactcagtgctgtcattcttctctgggtcatctgttcctttgaaatccctgtgtcca

SEQ ID NO: 164812 - DNA, 522 bp, Homo sapiens
acaatcttgccacaggcacgtgcttggctgagtccctcatctccttctttgcccaaatgccacctctcaccgaggccttccaccacccgcttcaataccgcaaccggctggctctgcctcacactccctgcccggccctacctgactgccttcttcttccctcagaggacatcgcctcccactgtactacacggtttcctcatattcattgtcatctccttctaccggatatgtaagctccagcagggcaggcatctttgcccattttgttcaatgaaagattacaagtccctagaacagcgccagacacatagaggtgctcagtgaatagaatagaaatgcatgaagctgcgctgggcaccagctgggaggtggtggagctgggacttgaatccaggctgctggctctagaacccacgtcctgcagccctccgtgtgctggggccaggccatggggcaaagcgtgcagctctcctggccagggggccccctgggaggttcactgtgctgtggagggtctaa

SEQ ID NO: 164813 - DNA, 575 bp, Homo sapiens
cctaccaatattgccacattggggaacaaatttcactgaacaagatggtcactgagtgaacatactgtgtcattcggtctccagaatagtgttctatagaagaaaccgctcttaaagtttgatgccagaataacacttttattgaggttctcttttgtctctatttgaagctatgtgccagtttttctttctcaatatagtgtcaaaagctttgagcaaggttttatatataatcacatattatgtatactttcatcatatttgcttttctcttttatcactttactaaaccttatttttagtgtatgtgaacttctgttaagccacttcaaaaccaatagcaaataattgttccttgatcttttttctaatgttgttagttttccaatgttgttaaattgcaggaaatggaagggaaatggagggggaaataacagaaaatgtataatttcacttggctctaacactacactactggtgctatattagtaatgtggaccttgaggtataggttgtggcagtggcagttactcgaattggacagctgtaccacatagatgaccattgcatttcat

SEQ ID NO: 164814 - DNA, 364 bp, Homo sapiens
tgcttagtggcaagaggtgttgggaaagtaagtacctggcataggaaaatagaatttccaagactgttttaaaataatcattaatcatatctggattgggtccatcatcatcataaacaaagccaggtttctctgagcaaagaaggggagactaagttcttggatagaaatgtcaagttgtacgacacagtcacaaatcaatagatcatttcagaactcaatccaaaactcatatgttccaatagagttgggagggtgaaaaagcggacaagtgtaacgccattaatcatgatctggagggtgagaagagaggagacagatgccccagatagatataattagtattagtgcagtccaccaaggg

SEQ ID NO: 164815 - DNA, 342 bp, Homo sapiens
taatctatgaagccttttgaaatacactgaatatttcttttctccttgtttcatggtagtaatatcttctctaatttcagaagacattcatcataatttcttgtctctctgtcttccaagtttcttatttaatttggttcactctgtgtttttcgtaactgggaactgcaagaacattagagctgggcacccacattgctttgtagaccagccatcattgcttaatctgggtgggatttttttgtattagagtgaccaccgatgtcactatccttaaggttctagttgtaagctgattagataccaacaaaagtgtacgtcaaaacccatataaaatatatg

SEQ ID NO: 164816 - DNA, 406 bp, Homo sapiens
tgacacccaccaccaggagaacagaagcaacgtctaggtcagagattagcaactgccaaaaataaggtgaaagttgcccccaaagccagtgaacacaggaaaacctgggcaggtttccttcgcaaagaaagtgaagaaagtttaaaacgctcagaaaagcaagaaacgagtgctaagcattacttaccatatgagctgtatgttaaaagcttgtttttttatttaccagtgctagaaataagtttcatgccaaggttttacaagaaaaaatatctttgaaaaatattcatgagaaccaagtctcacaagaaaaattaaaacttgagaattactacaaacttttagacatcaaattttaaaaaaatgaaatgctttctgtgttaggtacggatcttcaaactcccac

SEQ ID NO: 164817 - DNA, 136 bp, Homo sapiens
acattcaaggggaggagaattcagctctactttctacagggggtatatctacatatgttatacttgagttctgtaaggaagatttgttccttctccctcatttatttatttactgattcatttttatcagtatgga

SEQ ID NO: 164818 - DNA, 257 bp, Homo sapiens
agaccagaccattaatctggatatcacactagaacaatatgcaatagaaaaaaaaagaatgaggctgggcgcagtggctcacgcctgtaatccccagcaatttgggagcctgaggcaggaagatctcttgagcccaggagttcaagaccagcctgggcaacacagtgagacccccgtctctataaaaaataaaaataaaagaatgaagaagctctgaaatgaaaagatcttctccaaaacaagatatagaacagtgt

SEQ ID NO: 164819 - DNA, 438 bp, Homo sapiens
caagcgaaagccaggcaggtctccccctgaaacctctgcacaggtccaggctcctgcgtgaagtgatgctcctctttgccttactcctagccatggagctcccattggtggcagccagtgccaccatgcgcgctcagtggacttacagtttgagatgccatgactgtgcggtcataaatgacttcaactgtcccaacattagagtatgtccgtatcatattaggcgctgtatgacaatctccattcagctttccagtggggacagagctgctgtgtgtccagggcctcatccaactttcttccagcctggagcatggatccccacacaggtgaccgactccaagcatcagcctctccctgcccacctgaccaggcgccaccctctccacgggccaggaaacatcctccccagtgccatcaaccgccccaccttgtgcc

SEQ ID NO: 164820 - DNA, 397 bp, Homo sapiens
gtgacttatccagagtcgcacacatataagatagaactgcgttttaacttgaaaccctttgcttttcacagtaggggagatggcaataatgaaatcaattccaatattgtttgctagaggtgataatggtggtacatacaaagtatagagttaaagcagaggagggagtgattgtttatttggtcagggaagactttcttgagttgggatttaaaagatacgtagcattttgagagacaaagaaaggaacatcttaggcttggaaactgatatgcagaaacatggagggatgaaacaagatggagtctggaatgtgtttgggatgttccaggcatttcattcctactgaccctgcaggggagtaggtgggagctaggctgagtgacaagtgctagtt

SEQ ID NO: 164821 - DNA, 498 bp, Homo sapiens
acagatgtaagacttctcaatcatcattgtcaagagaacatctgacccaaaggataagggctatacttagggaatggaatctgatgctctcagcattcagtaaacttggtcctgatgtcttcaaagctttgacaagtcaacaaacatcttgagacctgattttaaaaaatagccactatttgccttccaaagatggtctaaggatgttttaaaacagaaaagaatttcacgaccataaagaattaaagctcctattgcaacgtaccaattggcattgctgcttccactgggactaaacagactttcttgaagctaaccagtgacaaatggaattgaaacaatatgttaataacaaaacctgagtttcatcttctttttgagcttgtgagagctctagccttctgaacggcagacaattttgccaagttattgaccaacgtttccagctgcttcggtagcagcttctaaccagtccccacataaagcctccaataccgt

SEQ ID NO: 164822 - DNA, 176 bp, Homo sapiens
gggccctgttggggtattattgatatgctggtagtggagtaagaataaccttggaacctcaagtgccaaatcagtcagcgaacatttcgagcttttctttttcattaggcactgtgctaagcatttttcatgcatcattcttcatttgaatttctcaacagccctaggaggaatta

SEQ ID NO: 164823 - DNA, 122 bp, Homo sapiens
cttcctggcagcacaactctcctacccacagcagatggaactccttactccaacaagcacaggcaggcctggctttctgggcacccgagaagagctgccttatgacctagtaccagagccct

SEQ ID NO: 164824 - DNA, 260 bp, Homo sapiens
tgtatcagaagccactttatactaaattatagcacagaagggaataaagaggtacaaaaattttttaaaatactgatcaaagtaaaagttcagattttctctactaacttcattttctttctatgaattcagaagaaatttctagtattaggctcagctaatgtctgtgtcatgaggagtgttttacatgaaagtacccttgcttgaaaccattacaaagttccagggaaggagaaagcggcatgaggtagaggggacag

SEQ ID NO: 164825 - DNA, 441 bp, Homo sapiens
gacatattgtgatagttaattttttgtgacaatgtgactggattaagggatgcccagataactggtaaaacattatttctgggtgtgtctgtgagggtgtttctggaagagattagtctttgaatcagtagactgagtaaagaagagcttcctctccagtgtggccgggcatccttccaatcacttgaggccttggatcaaacaaaaaggtggaggaagggccaattctctcttttcttgagctgggacgtcggagctcctggttctccggccctcgtatccagactgaatctcaccaccagctttcctggttctccagcttgccaatgacatatcatgggacttcacagcctccataatcacacgagtcaatttccataataaacctcctcttatatatgtcttatatatcctactgattctgttcctctggagcaccct

SEQ ID NO: 164826 - DNA, 285 bp, Homo sapiens
gggtgtggtggcaggtacctgtaatcccagatactcaggaggctaaggcaggagaaccccttgaacccaggaggcggaggttgtagtgagccaagatcagagcactacactctagtctggatgacagagtgagactctatctcaaaaaaagaaagaaaagaaaatactcgcccagcattgtattttatatatatgtatgtaattttccatttgaacacagttcgatgagttttgactcacaagcaatcatgtaaccacctccacaacctctagaagcctgccaca

SEQ ID NO: 164827 - DNA, 292 bp, Homo sapiens
attggcacctttgctgtgttgtctgctgttacgtaattgtgcacacagtgtgaaatccgtggaagcacaatgaccatgagctgcagctggcagttcatctctgcctgaacaataaccagagacccccacttcctcctaaagcctggtaggacttttgggcaggtcttccttttcctggtagagctaccctcccacagcccccaccaacacctgccctgccctgaggttcagaacatgaacattttccagaagaaggattttcctttttggaaaggagaacttctggcttgac

SEQ ID NO: 164828 - DNA, 349 bp, Homo sapiens
gctggaggcgggacctggaggaatggaggccagtgctaccctcacactcccagcctcctgtcctggtgggatttggacccacagatccccatggtgcatatgtcaagtctggcctgttccacctctttctcaaaggaaggttctgagcctccctacccagtgtaggggtggcaacgatccctcattcattcaagcatttatgaaccaccctccctaagtctagctcatgcagcaccaaatttattcacttagctaatgattgacctactgctgtgttctaggcaccagggataccacatggaggcgtgcgccagagccctgtcccctggagcccttgggttcaaatact

SEQ ID NO: 164829 - DNA, 223 bp, Homo sapiens
ggctcatctcaggttccaaataaaataaatttacagaattccactatactctatgtagatatgtcacatacattcaaacagtatagacagtatagcctggggaaagagatgaccagtgaatggaaaaaaatattgactttagttgttccccactcctgcaactggaaaatatctctcctgaatatctaccacgtttttattccctacaggtggctcttacaag

SEQ ID NO: 164830 - DNA, 415 bp, Homo sapiens
attaatgtgatattgctgatgatggataagccaaagaggttatttgattacacatacatatgaaatgtttgggtggagatacagaggcatcagtaaaatgtacagatacaagtggcaataattggaaaatctgatacacaaagtcagactaagaaagttggtaactttagctttcagtaagtttggctttaatacaacctcatattggttagaggaagcaaaaaaatgggtttacaagtaccttttaaaaaactatcaacctggggctgaacaaaacactggttgggatcattcctaccacctgggcttttcctagcctaaacatcatcttttgaactacctacactttacgggaaatataccccaagagtaggaaaaaaatgaaaataacataaaatgatgcaaatattgaaaa

SEQ ID NO: 164831 - DNA, 354 bp, Homo sapiens
gcctcagcctcccaaagttttgggattacagacgtgaaccactgcacctggccataactgccagcattaatatagtgttactcactctgtggcagccactgttctaaatacctcccttacgttcccttatcatttcctcacaacagccctctgaagtaggtattctagctgacgacactgaagcacagagaggtgagcaacttgcccgaggttagttgctgattagtggtggagctgggattggattcagtgactgtcgcatacagccctttgctgacattgtagactctgttctgattcctgctcgccaatgagggtgatgccacgcggtgccactggggaggagggaagaga

SEQ ID NO: 164832 - DNA, 420 bp, Homo sapiens
ctggaacttgggcagtgccccttaacccatccatattcttctctcccgttctgtccctctgccttccccaccagagggagacattatcctaaattttggattattatccttttgctttaaaaaaatagttatatcacgtatatattggtcattaaatcatatttcattggcttttgtgatttataaatggtttttgtactgtatgtagttttgtaaaacatgttttttcaattcactgtatatttctatgatttatccatgttgttgcgtatagctgtgatccactcatttgtattgctgtacagtatttcattgtatgaatataccacaatgtacttatctgttctcctgtcagtggtcatttgagtgttcccagttccttgctatcataaacaacggtgatgtaaaaataattgtaca

SEQ ID NO: 164833 - DNA, 107 bp, Homo sapiens
ctggcaatatattgaaacaaagccacctttcaccacctcaaatgctatggtctagtctaagtcaccatcatctatcacctggaccactgtgacaacctcctaactgg

SEQ ID NO: 164834 - DNA, 436 bp, Homo sapiens
gggcaccttatccaaattggccaatgataaattcttttttggtaccttactatatatttgtatcctcagaacaaattctcctttctgcttaagctggcttgacttcatttctttcactagcaagctaagaggctttggccaacagaactactctaggggtagctgtaaaatttatctctaaggaaaggctgctcttttgaaaacacagtttaatgggtcttctgggtatatgacgatagtaaagcaaaattttgttctggaatgaagaagctgattacattgttgtattacaaacaatatattactcagtgaagtgaaaggccacactgtgggcagggtggtgactttgcagatagcatgttaatccttgcatgctttttgttgtttctctttttggagggggagggtcttaattttctttggccctcccccaccc

SEQ ID NO: 164835 - DNA, 374 bp, Homo sapiens
aaaatgatggacagatgggggaagatttgaatgagttttgttatacattcatgttattttagtaatggtaatattcttttttcaatttttgatagaaacaaaggagacatttttgtatgcctgggataccataattgttgaaatggaaatacatccacatccacacacatacatatatatgtacatatatgtaacatattactttaaagtaattttagactaacagaaaattttcaaatataatgcaaatcattcttatgtgtttgtcatcctgatttacctcatcagtcaaccaatcaagttctctgaaagtgatatctcaatataggcataatgtcacctagtgcttctgtcatagatttaatacaacttta

SEQ ID NO: 164836 - DNA, 231 bp, Homo sapiens
tcacccagaaaccctggctttggagtctgtcatcagggccctttccccaccctgactcaccccccatgagggtgccctgtctggagcagccaggacttcttcgtcccatgggatgccagctggcccctcccactcggtatgacacctgtgtcattcgagtcgtctgcgtggttgtgtgtgtcctgtgtattgcattgtgatgacgtctgtgtcattcgagtcgtctgcgtg

SEQ ID NO: 164837 - DNA, 319 bp, Homo sapiens
taatatgtgacgtatgccctgtaccattttcagtagtgtgaggtagggaagaagaaatggcattgatctactactgtagaaactttgcctatgatttacaagcatgagaatttgctttgcctgttttatgactctattcaaccctgaattatgggctgtttattttttctctctctttgattagattcatgagagagttgtttgcctggttcagtcaaaatacaaatccagtgttgttcctatacgtcttacagcttttccttttgacaaatacaagaagactgggatgtagcagacagagcatttaccagctgccagg

SEQ ID NO: 164838 - DNA, 459 bp, Homo sapiens
gccatcccatcttcaaggactgacggagttaatattgtcaggatgacactactcccaaaacagacttgcagattcgatgcaatccccataaaaaattccacctgttcttttcacaggaatggaaagggtgaccctcacattcatttggaaacgcaagagacccagatgattcaaaaccatcttgaaaaagaacaaactgggtgaactcacacttcccaattgcaaatgtcacttgagggatattctactagatcatgaccaatcctcgaaaccgtccagctcaccaaaaacaaggggcctgagaaactgtcactgccgagaaagaggagcccaggccgcgcgtggtggctcacacctggaatccccgcactttgggaggccaaggcaggcagatcttttttttttttttttgaggcggagtctcgctctgttgcccaggctggagtgcagtggcgtgat

SEQ ID NO: 164839 - DNA, 640 bp, Homo sapiens
gttctggggatggaattgtttcttggcaaatccagccatatagatctaactgctgtatgtataagacaccacctgtaggagcgggaaggtatcagtgcttcttatattgtaaagcattggcctaggaaggcaaacagttgtctttttgaaggatttttttctgctggtcctttgggttttgatttgatatttttatgctccctggttgagtgtgttgtcttcgtttttgagatctactgtatgtgttgaataacaagctattttcattgtactgtgcattttcccattaaattgtttgcttttaatattcaatgttaaatatgaggtgaccgtacagtagttaggagtttctttacttacaaaatcactggaaatgattaaattgcttttccccctccccagaggtgcatttttcttatttccatatagtaaagttgagcttttacagtgcataatgtgacatttggaatgcttatcaactgcatgtaaacattaataacctgcacttttttgtcttaaggtttgttgagctgttttgttcactgtactttaactgtgatatggaaaagactgcattctctgtgctgttactaattaggaaagagaattgctttgattttgtctcttgtttactatagct

SEQ ID NO: 164840 - DNA, 280 bp, Homo sapiens
gatccaaactacgttcattgaatgaatgaacgattacacagacgtctgcattgcagaaacggcctattctgagagttactccagacccacttcacgtcccagccttgtccccctcccccgccccgctgcctgctgccccaaactctcaggaactcagtctccccatctataaatgagcacttgactgtaatcccagcactttgggaggccgaggcgggtggatcacgaggtcaggagattgagaccatcctagccaacacggtgaaaccccatctctact

SEQ ID NO: 164841 - DNA, 158 bp, Homo sapiens
gatgacttagtatgttgcatggcatttcagaattacaattataaaaaccaattttcacagtgcagttttgtaaaacaaactaattttccatttttaaatgtgcatgttgtagataaaaggaagtttactagatgcgctaaaaagagaaatgctctcct

SEQ ID NO: 164842 - DNA, 261 bp, Homo sapiens
caaatgttagggcttgtgctcaaaatgtaagtcttgttcacagcagtgaattattctctatggacaatgaaattagtactcactggtatgaaacgcagaacaaagacaagtacagtaatttttcagggataaggttcttggagttgaatgtttaagtcatcataaatctaatcagtgctgattggaaaatattaaataacatgacgattcattaacttcacaataatatagatttattgtcaaacgggtaaaaaatacaga

SEQ ID NO: 164843 - DNA, 496 bp, Homo sapiens
agcaatcctgagcaaaaagaacaaagctgtaggtatcacacagtctaatttcaaagaatacaacacaggtgtagtactggcatactatagcatagtactgacataaaacagacacatagaccaatgggatagaatagagaatccaaatataagtccatgcgcttatacccaaatcatttttgacaaaggtaccatgaacacacattcaggaaagggcaagctctttaaaaattagtgttggcaaaactgggtatctatatgcaaaagaatgaaactagatccctgtctttaactgtgtatgaaaatcaactcaaagtgggcaaaatacttaaactaagtcttgaaactatgaaattactgaaagaaaacactagggaaacactatagaaaattagtctgggcaaagatttttggggtaaggcctcaaaagcacaggcaacaaaagcaaaaatagacaaataggattacatcaagcagaaaaactctgcacagcaaa

SEQ ID NO: 164844 - DNA, 523 bp, Homo sapiens
tatttgatccatacaactcatggatcaaacatggaagtatggattacattgtgaaagagaaataaagaactaactttttggaaggtttgggaaatctgatctgaaaagaaatcactaatttttattaacattcagctcatttttctttttttattgatgtataatagatgtacaaagtttcagggtatgtgtgatttaatacattcatataatttgtaaagatcaaattagtgtacttgggctatctatcaccttaaatgtttatcttttctttatgctagacttattcaatgtcttctcatctagttatttggaaatgtacaatcaataattgtaaactatagtcaccctactgatctaatactaggtcttatttcttttatcaaactgtatatttgtacccattaatcgacttcttttcagctaacatttaatgagtactatctttgtgtcatgaagtactgtgttttcacaaggattatctcattcagatctcacaaaagtcctgcagaacagcatctgg

SEQ ID NO: 164845 - DNA, 110 bp, Homo sapiens
tttgcagtatttatgatacaccatgaattttgaagttgtgaatgtgttaccattcctcccaaaagatgattcttaaaattcatatattcaggagaagaggcatatgtttt

SEQ ID NO: 164846 - DNA, 361 bp, Homo sapiens
gtctaaatcttcctccacttcatttcctggagactttgatctgccccactctgccctggttgctctctgagcatgctgtcatcatgaaatctccctttatcaccatggtagtaattctttttacacatctcttatgttaaatgtcctgtcccctggtttctttgtctgacaccttgatttactggtacattttggaggaacacattctccaggaactcagtgagagaaagctcatggtaggtaaatattttgtgtattgtatatctgaaaaggccttttattctacacttgcccttgattaatatttgactgatatggaaatctatgttggatattatttttcttcagaagtttgagggca

SEQ ID NO: 164847 - DNA, 233 bp, Homo sapiens
ttagcagtgaacaaaaaatgacaggttattagtgtcacatcttgcccatcttagttttctctgtatatatgatatacttggggctagagatatattggcaagtgaatgaatctctgttgccagaaacataatcttttttttcttttttagtcagggtttcactctcttacaggctgggattgtgccactgcactccagcctgggcaacagagagagactctgtgtcaaaaaaa

SEQ ID NO: 164848 - DNA, 114 bp, Homo sapiens
agtcagacagtttctggcacttagtagctttagaaagtgacttaagccctctaagccctcagttttcacatctataaaatgaagtaaataatataagcctctcagaagtggggt

SEQ ID NO: 164849 - DNA, 499 bp, Homo sapiens
ttctgtggacacagagcctcagcctaccctcccacttccccagccttaatctgaccttcagcaagcagagagaattaaacacaaactcgctttgatggaccagaactccctgctcatagggtctgggtgcccggactctgggtgacctgagcaagtcacatgctaagattcaaagactcagtttccaaggaagaggcctggcctcacagccagaccagcccctgacttttgatcactcctgccctccatgcatccctcagccacccgcagagaagctgggggcagagtaaagcaagcctggctcaacctccacccagaaacacacaagcacccgacaaatgccatatctgaaagctttctccatccttttcctttccttgactccctcagtagtctccatggacagtcatctccactcccagcctcctcgctggcctcccacggtctcaggctaagcccagagggtttaggggtttgccagcaggcacgcagtgtgtgg

SEQ ID NO: 164850 - DNA, 676 bp, Homo sapiens
ctgggattatagtgaggagttacattatctcactcataagcagcgtagcaggcatccgtttgaattctacaaatgtatatgctcagctttcagactcatctttcattattttcagtaaaaacaactccaaattctattaattggagaaggtatacaggtggtgagcttgcctaaaagacaatgcacatatcctgatagctgttagtactgccttattctcatattataatggcttacttacttcataccaagagaaactcatagccccagaatcacaaaaaattatataatcatttctataacaaatttactcaaatagcagagaagtagattcacaactactttaaataaaggttttaaaagctccataattataactacctttaactattataactttaggccttaaatcacatctctaaatttttacagtaataagacaagcatcttttaagtgcctactgcataccaggcactatgcaagacacttcacttggactatcttaataactatcctatgaaagaggtatgattattatcactttacataaaagaaaagattagagagggtaagtaattggcctaatactacacaggtaagaaatgggagagacagagacggacagagagacagagagtttgttcaaactcatatctgccctgattccagtggtgc

SEQ ID NO: 164851 - DNA, 315 bp, Homo sapiens
atacttcaggctcccaaagtgctggaattacaggcatgagccattacacctggacacagttcttgtttatagtttttaaaatgagaatatattacttacaaaatcaacaaaattctttaagatatttccattttggaagaaaaaataacttttttttttttaaagtaataaagcactatcctgagaaatactggtcagtatcaaaataatgtcattaatatttcttctctgaatgagttacctctcactctcagaatgatattttatttgtagacttttttatcctaaaattgaatcaaattaaagaagttggtg

SEQ ID NO: 164852 - DNA, 192 bp, Homo sapiens
agcccccatagaaaattacccgttcttactcaaggctgggttcctgtttattttccttaccttctggcaactgattctcaatagacatccagagatatctagcataattattcactctgctcaaatgcctagctatttggaaataattctccatcagccgaggatgctggccctcagaagctctgtaagatt

SEQ ID NO: 164853 - DNA, 290 bp, Homo sapiens
tatcaaacttaaggtctgtgttgatgttaaatgctggtcagcttttcctgaattccaaaagggaggaggacatgaggcatgtctgaccctcccttcctgtctgggtctgaaccagtttttcaggttaactttggaatgtcctggccaagaggagggatcctttcagttggctagaggggccctagaattttggttttggtttacattctcccacttctggccaagattttttccagaggcaacatcaatggccaccaaatttttatattgtcccatgatgttaccggggt

SEQ ID NO: 164854 - DNA, 509 bp, Homo sapiens
atcacatcctggacactggaaatgagctcttctttcaccctggggcttctcaaagtctatattactttccccaaatgaaaagttgtaatagatgcctatttacagagaggaatggaaaaaatttagagaatattttggaccatagatagtcatatgcaggcttctatttctatttgaaatacaatataacagctatgttttcctgaaaagacaagtaaatggaaacatatctgaaatgaaagctagggctacgccatattcataactcacaaataattttaaacaacataggtcagtttataattagcaacaaagtagcatggaatatggggcagttttccaactggaagagaaatgctaagaggcaatagtgccatattctgggtcggccacatttttaatttgtttttcagaacagtgcagattagactaaaatttggctcttaaaccatagaaaatagattctggttctccaaatatctccaagccaaaactgacctcagatctgt

SEQ ID NO: 164855 - DNA, 712 bp, Homo sapiens
tgggtgacagagcaagactctgtcttaagaaaagaaaagaaaagaaggaaaggaaggaaagggaaaaggaaagggaaagggaagggaagggagaaaggaaaggaagaaaggaaaggaattatgttaaaatatataaaacataaaaatttagcatcttaaccattttttagtgtacacttcagtggtgttaaatacatttacattattgtgcagcccatctccagagcccttcatcttgtaaaatgaaaactctataccacattttgcttattcatccatcagtggacatttgggttgcgtccaccgtttggctgctgctgttaatatgggtatagaaatatctcttcaagataccattttcagttcttttgtgtatatacccagaagtaggattactagatatatggtaattcactttttaatattttttgaggaacttctgtattgttttccatagtagctgtaccattttacattcataccaacagtgcacaaagttttcaatgtctacacatccctgccagcagtagtgttgttttttttcttttttgatagtggctgtcctaatgggtatgaggtagtatttcattgtgcttttgatttgcctttctctaatgattagtgatattgagcatcctttttgtgtgcttattggccatttgtatatctatctttggagaaatgtctattcaagtcctttgcccattttaaa

SEQ ID NO: 164856 - DNA, 530 bp, Homo sapiens
aggtatggctgtcttctgttaatcataagaaggcacagggctaaagggagggtagggaaggtggactagcattatatcagtgttgccttcaaacaagtcaatttcaggaaagagtataaataaaatatagagaatctggaaatttattctcttaaaacagtccaagcctagatattcttagacatgtcctccagtttgagatcatggttctaaagcaccagacttggttcatttatcggaactcagtaaatacttgttgcattaaaatagttcagggccagatgtggtggctcatgcctgtaatcccagcacttcggaggccgaggtgagaggactgcttgagcccaggagtttgagaccagcctgggcaacatagtgagacctcatatttacttatataaaaaatagtaacaatataaattaaatgaaattaaattgtttatgaaaaaatgttattcaatgagaacatctagatcgtactgatttttttctaatcaaatgataaagtctgttgtgaggatgaagcaaga

SEQ ID NO: 164857 - DNA, 349 bp, Homo sapiens
agatttggaaagggtacttgtttatgaggatataatgatgtgggacatatagtaatgaatataacaaataattcctaatatgggataaggtcccctttctcccagtgagagaactcatactggctgtttagtacccatactgactgcttgatgtttcatgatgtctgctttatgaatacagtaataatatattcaccttgatactggtgaaagatcacttgtaaggaatttttggaagttaaaatttaacttccagatttcactagcttaagtcctgagtgtgagggaaataaccatctatgctgtaagaagagcagacactgttactataatgatagtagcaaaacca

SEQ ID NO: 164858 - DNA, 360 bp, Homo sapiens
tctccaagcagaaaaaggcacaacagtagagcaatggacatgtccaaagtccaggatgtggaaagtagggtgtggctggaaggaagggtgaggaccagagatgctgctggaaatcaggcagtgccaagtacactaagactctaattggccagtctgaatgagccgtcctttttaacaagcttttctgaggtttcaaatgggtagttcaattttcaacaaataaaagggtggccagattataaagaaaattaggtatttaccaatcatcctcatctaataagtaactaattcaataaaaatatattgattatcttctaggagctaatgaagacagaagacctgctccctgtggttaaagac

SEQ ID NO: 164859 - DNA, 233 bp, Homo sapiens
ttcaatttctacaccatgcaccgtgggtatgcagaccgtcctttttaacaagcttttctgaggtttcaaatgggtagttcaattttcaacaaataaaagggtggccagattataaagaaaattaggtatttaccaatcatcctcatctaataagtaactaattcaataaaaatatattgattatcttctaggagctaatgaagacagaagacctgctccctgtggttaaagac

SEQ ID NO: 164860 - DNA, 698 bp, Homo sapiens
cctgtaatcccaatactttgcaggaggccaaggtgggtcgattgctggagcccaggagtttgagaccagcctgggaaacatggtgaaaccctgtctctacaaaaaatacaaaaattaactgggcatggtggtggtgcgtaatctcagctacttaggaggctgaggtgggagaatgacctgagcccaggaagtcaaggctgtgctgagccatgatcacaccagggctctccagcctgggtgacagagtgagactctgtctcaaaaataaataagtaaataaatagcccagataagaagccctataataaacttactgaatgttgggaatatcactggataaaattctgcctttgttcttagttttccagcctttcctgatctagaaacagaagcctactttctcccttatcctacagccaacttggactttaaaacaaaacccccgaggtagtcagcaaaggaaggtgaccaagctgacttgcttttccatattgttctgaaagtttcagccaaagcaactaagaaaagacaagaaaatatgatggataagtaacaggagatatatgttgtttgcaagtggtgatatgattgtcagagtagaaaatatattagaaccgtaaggtggtggagtaggtgtccacatataaaatatagtgggatttgtctatgccggcatgaactagccaggaagtaggatg

SEQ ID NO: 164861 - DNA, 429 bp, Homo sapiens
taaaatggcaatattacccaagcattttacagattcaatgtgattcctttcaaactatcaatgacgtttttcactgaattagaaaaaaaaattgtaaaattcatatggaaccaaaaaagagcccaaatagccacagcaatcctaagcaaaaagaactaaggctgaggcatcacattacctgacttcaaactataccgcaaggctatggtaaccaaaacatcatggtattggtacaaaaacagacacatagacccatggaatttgccttatctatccatctatctgccacctatccaccagctagctagctatccatccatccatctatacatcaatctatcaacctatttctttggcaaggctatggaaatgtcatagagaagatgaccctgtaatcattgcctttgctgccaatggtatatttggggt

SEQ ID NO: 164862 - DNA, 496 bp, Homo sapiens
ccccaaatcaactaaactgccaaaaaagaaaatcagtccaaaggaaactgctttccatccctccaaacactcaagccattgatctgttactaacagctgtaagacctatgaaattcttaggccagtgtccaaaactgtactcaaactgaaatggaaaacaatctgaattgctctaaaatagcaattgtgaaattcttaataaccgtaattgagtcactcaagaaaggccatttaagtgaattttagaactttgttgtttactcagggaaaaaaggactgcaaaagagccccaactcaggagctgccaaaggagatcttcacggggtgcctgcctctctgtgctgagcattggctgctgggcacctggcatgtgctgtctgtggtcctgacacagtctactgaagacagagtgggtaagtaatttgcttatgggtctaatgcagagccaggattcaaaactaagcctgtatggcaaaacaaaaaacaaaaaaacaaa

SEQ ID NO: 164863 - DNA, 641 bp, Homo sapiens
gtataatctcttgaggtgcaatttctaggaaaagattatttgcatttaattttacttgacattgccaaattgcccttcagagagatgacatgatttttaaatgcatttttccagctgtatgagcttattgtatttcactgatcttggctacatataccataaacttaacgtggaattaaagtctagtaaaattttaaaccttgattgtgcttcaccataaacctgaaacacaagttaatctatgatcactaatatcatactaaatagtcactccttcatataagcagtgattctcaacaagggcagttttgccccctaagggacatttgacaatgtctctagagacttttggttctcaaaacctaggaggagggtgctattggcatctagtgggtagaagtgaggaaagatgggaaatctcccacaatgcacaagaaatcccccaacaacagagaactatctggcccaaaatgtcagtaatgtcgaagttgagaaaccctaatttaaaacaaggtaaatgtataatatctacatgattacatgctaaatactgagaccataacacactgatccacacacactactatactatgtagcatggaaggaaaaacacaacaaaaaggggggaatataattaatgt

SEQ ID NO: 164864 - DNA, 550 bp, Homo sapiens
gcagggagccagttaagagacttccacagaagacgacagttatctatctggattggagatatagcagaggagacagatgcaaaaggaacatatttagacatgttttagagatggagttgacaagactagctaacagtctgatgtaaggtgtaaggaaaaaagaaaacaaggatgaatccccaattggggacctgactacctgtgccatttagtgggaaagacagagaagaaaagcaagtctgggggtgaaaataaaggttgatttgggatatgtcaagttgaggaatctgtaaggggagattttaagtaggcagttgtctattataatgtctggaatttcagggaaaggtcagggctagagatataattttgggagtcacaggcatctagataacgatttcaaaaccgtatattgggacaagattacttagtagaaatcaacaaagaaccctggactgagggttgcaagtagggtgaaaggaaaaccaagagtgtggtccagaagccaaaacaagggtttctaacaaggaaggcatgctcactttctatc

SEQ ID NO: 164865 - DNA, 108 bp, Homo sapiens
taagttttatccacacaattctaacttctggtatcacgtaggagggcacgccgagcctagcagaaatcttattcttaagcccaaatctcacgtacagatactgcctat

SEQ ID NO: 164866 - DNA, 557 bp, Homo sapiens
tcactgtgtcttgccccacagcagtagaatgatcattaaaaaaacaaaatcagacctttcactcccctgctgaaaactatgtaatctttctattacatttaaaatgaaagtcgagcctttaacctggcctacaaagcggtctgtgaactcaaccctgcctgccacttggcccgtgtgtcacacacctcacattttacccagttttccaggctggggcctttgtactcaaaatttcttctgcctggaaagctcttacccctgattttggaggatcagggctggtttttgttttgttttgtttttaatctttttaagtctcagcttaaatttactttgtcagacccttcctgaatatctgatccaaggtacctattctatccattaattctctgcataaagctatcagaagttttaaattttgctttatcttcgcactccaaaagaacataaagtattaagagagcaatttgttcacttctgtatctacagcacccagaataacgcccagctcgcagtaggtatccaataactttgtgaaactgattggaaggatgatg

SEQ ID NO: 164867 - DNA, 402 bp, Homo sapiens
ggacaaaaccatcctaaaaatattctaatcacactcagagcaattcaaaatgataaatagctaagagaaaaatagattctaaaacaattaaacagaggaaacaaacagagaaactagaactaagacaatggctcattgtcttactgtgtcttagttcactgtgtcagttagtggcaggaggaggaagctgggctgggcactggagactgagaatctgggaaaaggagtactcagatggatgctgtggctgttgcatagacggagagcttgggccagcccaccagtggtgctggtggaagattgcctagtttcaaagttaccattcaaggtcacgaacttggaagttccataatactgagtttcaaggttgcccagaccgatactttctattcttagaacggg

SEQ ID NO: 164868 - DNA, 457 bp, Homo sapiens
cgtttctcagacttgcccaaggacatcctcgaggcagcaggtggcccgccctgcctttgcaagagcttgtccagccataggcacaggttgaatcaatcccacctatcacagcacatggcacgggtcactgtgaagacactagcagggtctgtgtgtgctgagaaggacgaccaggacactaaggacaaatgaagggcaatgcacgggatgccacccacacaagtgtgtacccaccgccatacacacgtgcatgcccccaaccacacaaatgcacaaccccccccacacacacgtgcacatgcgtcagacatggaggaagctcccgggatgtgtgccagctgtgagttcctctgggagacagagtgtgtggggacagcgtgtgtgtgtgaggccagagtgtgagtgagggccagagtgtgtgtgtgtgtgggtgaggacagagggtgcgtgtgaggac

SEQ ID NO: 164869 - DNA, 192 bp, Homo sapiens
tgtactgagtttcctcatctacaaaaagaaaatcagcatctcccaggagagtcagtcttcatggcagttaactgagattgcacccataaggccctggcatgcagcctgtgtagttctcaattggaaggctccttatttttttgtttttgtttttttttttttgagatggagtctcactcttgtccgcccagg

SEQ ID NO: 164870 - DNA, 841 bp, Homo sapiens
  misc_feature (723)..(723): n is a, c, g, or t
  misc_feature (759)..(759): n is a, c, g, or t
  misc_feature (805)..(805): n is a, c, g, or t
  misc_feature (809)..(809): n is a, c, g, or t
gttgttttattttgggttgaaaaatagattttgagataattataataggtcttactgaaagatatcagtgatcaagtctaacaaactactttttgtttatgaccattcaaatcatagtatctttgttaaagaagtaatccctccccagcccacacacatagcagttggggcagagggatgtatgcagagagaaagatttataccaagtcatgcatacatgactctagagggagttagcaagtcacaagtatggggcttcagcagttcaggtctctcgtaccacactccagaaaggactttaacagtgatctagtccagtccttttgatcggctcacaaagagactagaactcagggagctggggtgacctgcctgaagtgtctgactggacacttctcccctctgccaagtactgaacaacccttttagattgcaggagacaaattacaaactaggggcagggttatacatagtgcacatgagaagattgtttttcataagcctgatctatacatgctttcccaaaccactaaagccttcatactaggttttagccacagccacctccttgtatgttacctttcagctctggccaagagtgggacagggttttaaccacaaataggagcagcatgcaattcctagtgacttgctgcacagtattgtatcataattacaggaagtttttatttttaaaactggatctggggtatattcatttgncccatcaactctgtctaaaggcccaagtcctagggntgccatggtcacaaagcacactggatggttccttaagattgttttntctngggcccacataagtgttgggaccaaaaagtca

SEQ ID NO: 164871 - DNA, 106 bp, Homo sapiens
tagctggaactacaggtgtgtgctagagtgcctggctagggactccattctagaatcatggaatcttaggggtcccctgggttgcatcttgactcagtgagtgagt

SEQ ID NO: 164872 - DNA, 433 bp, Homo sapiens
cccttaggagaatctacaggtctggggatgttcaggcaagaatgggcttgcaacatgtgggagctgggaggccgcagagatcatgcaaccctctcattttgaaaatgaggacacagaggcccaggtaggggaaggtgacaatgggctggagccacacccagactaagagaagaggctgcacctggccctctggctccctgctcacaactgtttttgctcaccatcctcctccttgatgggaggctgaaataggcttcaaagcaggcacttgcctgaccccagctctctagacacaccacggaggccaccttggaggaggctgcagagccagaacaggggaacagcagccagcggacaccaggatgccaggacgccagacccaggccagcgtgccattccccaccatgcctgtccatccagggcaagtgggcag

SEQ ID NO: 164873 - DNA, 463 bp, Homo sapiens
agcccctgatgtgaagtacacgaatctccctgtggacagttggaaaccactgaaggattctgagggcaacagtgcctttggctaaagagcctggtgggttggagaggatcaggcagaagattgagcttgtccctcctccatatcgctctgaaggaaggacttggttcccttccttccctgccccacctctccccccacgtcaaggagagtattttgcggcaattaggaacacaggctttgaagaatgatcagctgggttcataccctgagcttacacctttccctgtctcagcacatttagcctcttgaagcctcagttttctgatctgcaccttgggaataattatagctgtgtcaaaggttttgtaggattgaatgtgatcgtggatatcacatgttgacattcagtaaatattcagtggtctagtaactggtcactggaaaaaaatattcagtggatgcc

SEQ ID NO: 164874 - DNA, 229 bp, Homo sapiens
cctcctggtgtcctcccaaagttgaagaaaaggatagtgctgttgagaattgagcaagccttctggactttcatcctgccaggctttacatggctttattgtgccatgagattaggttaattcatcattgccttgggcagggtaacacaagccctgcctgcccacttcctagtcaaattacatttcagtggcctggtctgcttttggtatagtggttactgaccagtac

SEQ ID NO: 164875 - DNA, 443 bp, Homo sapiens
aggtcaggagttcaagatcaatctgaccaatatggagaaaccctgtctctactaaaaaaaaaaaaggaaaaaacaaaattagccaggtatggtggcacatgcctgtaatcccagctacttgggaggctgaggcaggagaatcacttgaacctgggaggtggaggttgcggtgagccaagattgcgccattgcactctagcctgggcaataagagcaaaactcatctcagaaaaaaaaaaaaaagaagaagaaggaggtaagtgtttggccacctatggccaagatgagggatagctcgccctagaaagctttctcagggaagggaatgttgctctcccagccaaacattcttgtatgtggaaaaataggtttgcaaagctaaatcatttcacataatccttttataataatggggccaacacttatgtaaacacactttgaag

SEQ ID NO: 164876 - DNA, 273 bp, Homo sapiens
gaattagcacaatgttacttccccctcattcaattggccaaaataagtcatgagggtagtctagattcaggaaatgaagatgtagactctacctttggttgaaagagctggatataaggtgaggtgcagccattttgcaatcaatctagcacagtcctcatttgctattttttcctttattcactagataccacctgccttatcctagctttgtaaatcatttaactcatctaatgaaaaattttgtcagttccagaatctagtgcaaacttg

SEQ ID NO: 164877 - DNA, 132 bp, Homo sapiens
gctgggcgacagggtgagacccagactcaaaaaaaaaagaagaagaaggaaacgttggtaagagagacatatcgagaacaggctgctggggaacaccaatatttcaaggaaaggctgaggaagaggagccag

SEQ ID NO: 164878 - DNA, 414 bp, Homo sapiens
gcaatggtcagttccatgtctatctcctccagctctctgggcagctcagaaagcagagctcacccgcccacaggaacgggaaggaacctctggggataattctgggtgacttgatctttccatctgcctactgcctccccagcagatgcacacagcctcccacccactcaacatttccttcacctggcatagaggtgacacccgagcttcccctatagaccttgccttcccgaaccgcccctccgggctctgctctgactcatggtttctgtctattttcgagtctctgttgaaagcctcatctgtttctgtgtctctggatttcctgctttcatttttcagcttcactccatcgctagcctactctcgtgggacttaaaacgtcatgtggggatggaaacagcagcattgggt

SEQ ID NO: 164879 - DNA, 529 bp, Homo sapiens
aggagccttccatagtaaatggagggaagtgaaccacacggggcgaacggtaggggaggtaggcacaggccaggccacgttccagcgcgtcatgcgtgccttaggcgttcccaccatgagccccgtttcctcttcagcacctcatgaatcctttaccatctgtaggagactgagtatgaaagtgctttacgttcttgatacccaaggtgacactggctgcccacatgcctattgctgacatgaggatttcatcttctgtctgcagggagtgaagtgctggtgccttcagtggaggcctcattccttttcaagccattccattaacttgagtctctccacttctgcttcaccccaagatctgggttcctctgggagaccacagttcttgagattctagagattagatccaagcacacaaacctctcttgcagaagtgatataatcctttccccaactaagggttttgttgcggatatgacagaagatttatggaaaatgtctagctcagggtctgcaggcactgttagct

SEQ ID NO: 164880 - DNA, 461 bp, Homo sapiens
caccctctacctgttacccagttccagtgttgcttccacattttcagttatctttatagcagtgctccactcctcagtaccaattttcgttaagccgttctcacattgctgtaaagaaatacttgagactggataattcataaagaaaagaggtttaattggctaacagttctgcaggctgtacaggaagcatgatgcaggcatctgcccagcttctggggaggccttgggaaacttacaatcatggctgaaggcaaatggggaccacacagtttatacatggcagaagtaggagagaagaaacccattttcaaagaagaaaatatgttccattataacttagaattgtttttagggtatactaaatcttttaaatgcttttgttacccaggcagaggttgcaatgagctgagatcatgccactgcactccagcctgggcgacagagccagactctgtctc

SEQ ID NO: 164881 - DNA, 376 bp, Homo sapiens
acaggcttctgtttctgtacccacctgtgcctcttgggcacttttaatatggctagtccaaactgagacatgcagtggagtataaaatgcactctgggttttgaaggctcagtatgaaaaaacagaaagtaatatcctttaaataatttttaggtttttgatatgttcaaacaatatttttgattatatgttaggttaaataaaacattatgaaaataaaaaaagtaagtgggaagagaaaggaagctggcactggatgaaaaaagaaactcttgagaaactgtaatgacccaaatctacagtcttttttttttttttttttttgaggcggagtctcgttctgtcacccaggctggagtgcagtgacacaatctcg

SEQ ID NO: 164882 - DNA, 351 bp, Homo sapiens
gacttgcagatatgaaagaacattcatttattcatttattcaacaaacatttgttgagcatctattatatgccagacatatacaatgtaatactgccttggggacatattagaacatagaactagacacactcctgcctttttaggcatatgaagagaataatacaataatcacaaaaaattgtaaaaactatagttgtgataaatgcagtgaaggagaagtccagggtgctgtgagaatgtgtaatagagtggggattggggcagtattccctgaggaagtaacactaaacctgacaactgaaggatgggtccataaacaaagattatacaaaattgtactgatttcact

SEQ ID NO: 164883 - DNA, 454 bp, Homo sapiens
caaagtcgctaagatttagagtgagtcattggctcagctgcgaagtgccacagacccctcaggaacactcgtgcacacacactccacccccagtgctggtcactgctgctcatcattactgaatcccgactccaagcagtcaaagttgggtctttttcccacttctcctgataaaggctgcttcctcacgcacatggttcctcccctctccaccttactcggagcccagccccgactcggccgcatgaaaccaagatgggtttgggggaagctttaggagtctgggatggaggagacccagggaaagggaaggagcttctcatcctacagaggaatgtaaataggaaactggaaggtcttcgtatgttccagtctccctaccctagcctgtctgcttcccctcccccaatacagttgtatttgcagaagaaataaatgagtgtcatggaaacat

SEQ ID NO: 164884 - DNA, 500 bp, Homo sapiens
  misc_feature (36)..(38): n is a, c, g, or t
  misc_feature (289)..(289): n is a, c, g, or t
tggtggttgttgagatggagtctagctctgtcaccnnnaggctggagtgcagtggcacaatctcagctcactgtatcctctgcctcccgtgttcaaccaattctcctgcctcagcctcctgagtagctgggactataggcacgtgcaaccatgcccagctaaattttgtatttttagtagagacgggtttcaccatgttggccaggctgctctcgaactcctgacctcgtgatctacccgcctcggcatctcaaagtgctgggattacaggcgtgagccaccacacttnggccagactgcagttgttattggaggctgtggtgaggctttgctgaggatggggatgccaggaagtcttgtccttcagcatcagtggtagtggcggtggaccaggtgtgtcaatactagggaccatgggcagcgtttgtgggcactgatgatagcctgtctgtgtgggccaatccctgggactccaggtggcttctttggttgctggcagt

SEQ ID NO: 164885 - DNA, 547 bp, Homo sapiens
ggatcaatactttgtatccttcaatccaatcaagttgacactcagtgttaaccatcacaacattttttttaaaattcagaaccccaacttttcattagaattaaatggacagcatttgaaaaatacaaggatggggctccatcccagaaaattaaataaaagccactgggttgggcctgagcctcttggggcttttccaaagccctcgtgtgggcagaaatgagaatcacaggtttggggaacaatcctagttgcttgggaaagtatcacacagtcaactcaaatcctggagattaaattcactagaagtgcagctagagccctgtgacacccacaaagccagcctgagtccctgctggatacagctcaccaggggggatgaaaagccagatacaaacttccccagtctcgctcacagttaagaatgaccaaatgaggctgggcgctgtggctcacacctgtaatcccagcactttggaaggccaaagcgggcgaatcatgaggtcaggagatcgagaccatcctggctaacacggtgaaaccccgt

SEQ ID NO: 164886 - DNA, 185 bp, Homo sapiens
tggagttgtggaagtagacgagatctgtcttggggaatgtacacagcgagaaaagcaaaggcccttggcgaataatgatgtttaaagactccacagacagagtagctcataatggtatgtagagaaggagaagaaactaccagatggataggacagtttgttgtcacagaactcagggaagagag

SEQ ID NO: 164887 - DNA, 180 bp, Homo sapiens
cagccacgtttggggtctggagtgcaggaccacaagagcctgatgtgatgtgtccagactgcacttcccacctgggccctgggcctcaggttcacctgatgtgaatacagttgttgtgacaggaatgtttctactgcaaatgggaaacttcaaataaaattcacctgtgggattcttcag

SEQ ID NO: 164888 - DNA, 435 bp, Homo sapiens
tatttcaaatggctacccaattgtcccaaaaacctttattaacaatcaaaatcaaccttgactccactcaactattattccaacttcacctaaaactaaattcacaagtgtatttgggtctatttgggaatctctgtcctgtcacactggcctgttattcctgagctgagcactgtagcatggaccagaccccacacacctctcttctttttccagaggctcatggcacttctgtaggtcattttttttcttttttgaatatacccttggtacgagatctctgtatattttttcatctgaacttcagaatcagcttgtattgaacaagagagaaacggatgggcattttaaaatttgggattctgttagatgaataatctgaggaatgttttttgaatttgtcttctcttcctttatatcttacaaccaactact

SEQ ID NO: 164889 - DNA, 563 bp, Homo sapiens
ttatttctatcttcagcatgccatctccagggcagtggggaccttgtctgtatctacccggcccagcacagtgcctggtgcatagactgtgctcaataaatattttagtgaatgagcgaataaattaatgaatgtgggttccctcttcccaatctttggacactgggtttcttctattcctcggtacctggcctaggggatagaaaagactccacccaaacccgggaaccctgggtgtactgtctccaagccctttacatggtcccaggggcccgtctgcctctgtgtaagttcccccggggccgaagcactctccaaagaggtctgccggggctaggactcggccggctggggccccgcgcctggaagagggcctggcacacagtgggccttctcaaagtgttagaacaaatgggtgacaggccagcagactgccgatcctggcacccgagggcacccagctgccctgcgcgccttcccggcccgggcgcgggagcggcgagggcgggaggcttggctgtgcttctcccgccgcctggatgccaaaactttcaaaagatgcg

SEQ ID NO: 164890 - DNA, 669 bp, Homo sapiens
cttagaaaagccatggagtttatccctagaaaaatgaatatgcctatatgcaaaatttgtttgatggcttcataggatccaaagaccctgaagccatccatggctcatgtatttctgcttaagaaagcataatcttgttctgctctctcattttacaaatgattaatgcatcccttttcaactactccagcgctgttgctgctgcaatgttagcaaatgcaagccagagagaagcacttgaaaatcctttgatgtctaaaaaatgttcaaatagtgtggatgtttacatatctgaagttttcagcatttaagcaaattaatgatcatttcaacaaatactagcatatccggtttcccttaatagcctgtcagcagtgctgccttgtcaatttgtgtgtgtgtgtgtgtatgtgtgtgtgtgtgtgaattcataaggagtgcttctgatgcttagtccttgaaatggaacttcaactgtctttcaaaacactggcttcaaaataggatgtgttttcctaatgaatcagaagtgggcaatgagcattgttccacaggaataatttttaatttaatttctataaaactagttgagaaatgagagcctgtccacccaccatttgtgtatcagtggccaattcattagtaaaaataaaggaggggaaaggagaa

SEQ ID NO: 164891 - DNA, 419 bp, Homo sapiens
atagcagcagtgtccagatggaaaattgaaaaatggcttgacctagtgaaataagatcaagtgcagagtctaatctgatgctggtgttgttctgccttcaccttctgtctactctgaaggaatcaccatcagggtggtgaatgcttatcatgaacataacatctttattgactgtctctatcatgacaatttgtaattagctttgaatgatttttgcacagctataaagtatttaggattcaaagaaatgcattttggctcaggacagacatgttgaacaagaaaacagcttttattggaagtaaggcagaaaaggagcactaaaatggaaatcagagaaattttttaaaagaaaggagactgggaaggaattagaaatctgaagagaaacatctggtttataaagattgtgagaatga

SEQ ID NO: 164892 - DNA, 336 bp, Homo sapiens
caggatgatacatcatgacagagttggttatatccaggaatgcaagatccgtttaatgttacagagtcaatcggtgtaattaatttaccatggttaacaacaggaaaaaaaggatcatcccagtgcataagatgggtttgatcaaattcaatgtttcttcatttaaaaaaaaaaaaaaaaactcatagaaaactaagaataagaggggcagttcttaatctggccaaaaggaaaaaattcctatagaaaacattatacttactggaattgtaagccaccttctctttgagacagaacaaaacccaaatgactgtttctattcagtattaaacagga

SEQ ID NO: 164893 - DNA, 235 bp, Homo sapiens
ttgggaggccgaggcgggtggatcatgaggtcaggagattgagaccattctggctgacatggtgaaaccccgtctctactaaaataaaaattaaaaaatctctacccatgagcctctttccacactttttataagtgccaccagatatgtagtgttcatagcatttatgaggttccaaacaatactatgtcactagtgtatgaagaactttattttacagtaataaaaatgttag

SEQ ID NO: 164894 - DNA, 536 bp, Homo sapiens
agagcctctggctccagtatcaccaactgtctttagccccaacactggtacctgcaggcatgaagagaaccatccccatacctctcaggcaacaggaattcattccaggctccttacctcacttcctcattgttgccctactaccaaaccatctgtccacactgccctttaccctgctccactgggtaggtgggaaagcctgacggctaagcagacatccaactaggaaataaatgcagtccactcttcttaacatccccaaactttataagaatctctcagcatctctttgcagaagaaaaatattcaggcacttcctctcaccctcaccaaatgtcaaattcatctcagtcctctaaaatcatctggagggagtaggggtatgagtgatgttaccatcactgtaggttccactaaacaatggcctctcagcaagccctggtgccttcaatatcgggtggttacccaagtctacagggtagggtccttagcaaacttcttctttctgtgagctttaatggtcaatcacagggaaa

SEQ ID NO: 164895 - DNA, 248 bp, Homo sapiens
tctctgccccaacgtgttccacaatccctgcctttcacggttgtgtcagctgccactggggcttccgggggattatattttattttcttcatatctcattctgttcttgttttgattgctgtagttagaatagttcattttcatagcacttgtcttttaaaatttggagtgtcactggctgctctcacctcttcacatggactttggaatcattttgttaaattattttttaaaacctgtggatttga

SEQ ID NO: 164896 - DNA, 506 bp, Homo sapiens
tcatgggctgaggtaaaaattctaagtcctctaattttaaacaaaataggaataagctagatatgcattctcaactcggacaatgtcacgcccaaatgagccacaagtggtttttggagtgatggcaaaaatatcttcactattacgttttatgggttaccaaaacacaaccctacctgacaaaaaacttattcctttgtatttatcttctcattaggtagaattttttttaagacttagtgggtacatatgcaggtttgtcacatggatataacggtaacaattatagttatataattgttatattgtgtgatggtgaggtttgggcttctattgaacccatcccacaaatagtgaacatagtaccctattatatagagattattttcaaattaattaatttattgatttatttaaattaaattgaaatgatctctgtaggggagcaatgatgaaaaaaggctgagaaacaccgacctagatagttttacaaggcatctactcag

SEQ ID NO: 164897 - DNA, 386 bp, Homo sapiens
ggacttaagccagttgaaggaaacataaacgcatcaaagcttaagtccaagatgacataacattggaattttaaatgtatttgctctttcagggaacaaagaccccttcatgtccctgtctgttgctttataatggtactttcttaggaatgaattaagttcaaatgcagagaattgccagcatataaaacgcaaggatcagaaccctgagtttgaactcagcccctgtgtacagcctccgtgtggcctctgtttaattagatcgtgctgctatagcagttccttctagctcagttgctttgatgtagtacccaaattttggcctaaaagtgatttaattagtaataatttttaaagatataggatgttgaacaaagtatagcaca

SEQ ID NO: 164898 - DNA, 479 bp, Homo sapiens
catcctccaccagtccatggaaaaatcatcttctgtgaaaccagtccctggtgccaaaaagattggtgaccactgccttaaggcatttagttaactttctgaataaaactattttaattaaagggacggaacaaatcttcattcttgattctctttcattctagagcccctcgagatatacaacctggaaattaatgtcctaactcggccactcacttctgagaacccctgtgttctgactataatttgcattcttcacatgatcacaggcctcccagagtgtgggtgcagaaatagaatatttatgtatcattaatagccaaagtgtgaaatacagctggtgcaattacagcttgattaatgatcaaaacaatgatttctccagataattttgattcttatgtgtgttggttcttggaggagattagccattacatttttgccttttatctttcttgaatacaaacaattcatacatt

SEQ ID NO: 164899 - DNA, 158 bp, Homo sapiens
ggctgatctcgaactcttaggctcagccttttgtgagtatctgggattatagatgtgctccaccatgtccagcttgcccctttgttgacataggcaaagtagaacatcttactgtcattgccatataccatatatggttcagcccctgtatttggaag

SEQ ID NO: 164900 - DNA, 172 bp, Homo sapiens
cccgactagcccgacagtccccgactagcccgacagtccccgactagcccgacagtccccgactagcccgacagggcctggggacaactgagattagacatcatggggtcaaggctctctgtgctggactctgggagagtggagactggtgggcttgctgtgggagttgggg

SEQ ID NO: 164901 - DNA, 386 bp, Homo sapiens
gggtgaggaattgggcacaaggaacagtcaacacacatcttagcctcagtaaaggagaaatgtgagatcccggccccctcagaccttcagtggtggccttcccttcagctgcacctgaaaaccacccacgttgctcctctaccctcctctctcactctgctttatcctcatttcatttggaatctgcaattcagagaaaattagaccaacacctgattgtgagggcagggaccaaaccaggtgtgtgatctcgccttctttctctttcttagttcataatatatttatttctctaattattcctcataaaatatattcctgaaactgcttagaaccaattcagttatcagggattacccagaaccatagcatcagatgctgttatt

SEQ ID NO: 164902 - DNA, 406 bp, Homo sapiens
tggtacatagtcagtgcccatcgtatcatggctttggccatagtccctcgatgtgaagtgaagttcccatagattggaaggcctatcgttgacttagaaactgctgcccaagggacaaagaagaatgcaagcccactatgtgaaatggaagcacacagaaaaggaagggcctcactctgctctctctcttctgtgtgtgtgtgtgtgtgtgtgtgtgtgtgtgtgtgtgtgtgtatgatgagaagtttgcacagagaagctggtgtttaggccaggtcctgaatggtagatagcagtttacaagagaaaagggggaggaagggtgtcagagataaaaggaacatcaatgcaaagtgatacaaggatgagaatgagtgtcatccgccttgtcagatgcctggggaaa

SEQ ID NO: 164903 - DNA, 346 bp, Homo sapiens
ttagccaggcattgtcacgggagcttgtaatcccagttcagttacgtgggaggctgaggtaggagaattgcttgaacctgggaggcagaggttgcagtgagccgagattgcgtcactgtactccagcctgggtgacagaaacagaattagtctcaaaaaccaaacaaaatgctgagattacagatgtgagctatgatgcccggttctgtttttcatttatctgttttctttttcctgccttcctgtggattaactgaacactttttaggattccatttttattcatttataatgtttttgagtgttatctctttgtatagactttttagtggttactctaggtatt

SEQ ID NO: 164904 - DNA, 322 bp, Homo sapiens
ccaggagttcaaggctatagtgagctatgagcatgtcactatactccaaacttggcgacagagtgagaccctgtctctaaaaaacaaaaacaaaattctgctgtgaagttcttctaatccacacactcattgcacttttaacaattctgtgtatcctctctagcccactaaaccaatagatgtttcttactctgaatataatcactcccctttgccctaggttttgaatatagcagaaaataagcatagtggtggagaaatagtttaatctcagttcagcagacctttttctcaagagtccttagaaactcttcccattcct

SEQ ID NO: 164905 - DNA, 665 bp, Homo sapiens
agtggccatgtgagtctacagatggtggtgctggcagaagcattataggtagagaaagcaaatccatatgcagaacatgctactagccctgtgagaatatatctttgccccctccatgatggaagaggtccaatataatcaaccactagcagatggctggctggttcctcagtgaatggtgccatatcagggactcaatgttggactctgcagttggctgattaggcactcagcaataacagtagccaatcagtcttgtaaagggaaagaccttattgttgaacccatgaagagctcccaaccctgccaatatagccaccttttcatgggtccactgagcaagccctaatgtgggtgaataaaaggctgactgacatgcacacagcacgttgttctgtccagctcactagcaagtatcctttgcagtagatgccctttaacaggcattcacatggcactcaattttcacagtttgtggacattcagagaggtctatccacacacctcttccctagacttccttgtcaccagtcttcacatcctgtttgttccaggtctctgaccaccaagataaaacattagcaactatacaaaaattagccgggcgtggtggcaagcgcctgtaatcccagctatctgggaggctgaggctggtataatggcgt

SEQ ID NO: 164906 - DNA, 577 bp, Homo sapiens
caaaggtcacacccaagacccagatatgatcgcgtgtgttgacacatagccttctggaatgcgactaccgttgtgcattttattaggaaaaaaaaaagttaacacccttaggctcatgatttggcaggtgtgtatccatcaccaattgaaatgggaatatgtgggggaaaccaacaaattacgttagtttcattcttagctctcatgtaaatgagctcctttgagcttaacaactacccggtaggtagatattattcttcgcatcttgtgcatcaagaatggtgctcggagaggtcaagagactgagcagaccatggtgttagttctgttgaaaagaactcaggtcttctgagctcaatctctggtctctccctgcagttttcttagccatccagttcatccagcaagaccctcagggctgcatcatgtgtttctctacagaaggatgtgctcctatgtggacacacttaaattgaacgtgaattgcctaggatggtatgataatgcagaggagattaaattcatgggtttcaagaggttttttaaaaaaataaattttagctcattcatacattca

SEQ ID NO: 164907 - DNA, 341 bp, Homo sapiens
tggcctaacggtaggaggtagaaggcagaaggaaagtaactgaattgagaagctgtttctgtttaataaggtgttgctgaagctagttaaaccctctacctgtctttaaaccctctacctgtctttgggttaatttacatgtttgtcatccccttacctggatatttatagctgtacccaggaaccttgtctatactgagaatatatagtgatgagggtttttctttttcccaggtattcctgattgtcatcaagcttatagtagatgaaccactaaaataatactacaatttgacattagtgttcttgtactttatgctattgaaacttctaaaactagg

SEQ ID NO: 164908 - DNA, 321 bp, Homo sapiens
tagtaggtgctcagcaaatgtggggccagtgtgcagtgggtgctcagtaatgctgggtctgtgtacagtgggtgctcagtaaatgctgggccagcatgcaataggtgctcagtaaatgtggggccggggcaggttggtgtgcagcaggtgctcagtaatgcaggactagtgcacagtaggtgctcagtaatgctggggttgtgtgcagtgggtgctcactaaatgctgggccaggatgcaataggtgctcagtaaatgtggggccagtgtgcagtaggtgctcagtaaatgtggggctggtgtgcagtaggtactcagtaa

SEQ ID NO: 164909 - DNA, 373 bp, Homo sapiens
caaattaaggccagacacggtggctcacgcctgtgatcccagcactttgggaggccaaggtgggcagatcacttgaggtcaagaaagtatccaatcattgtttcctttcctcctcttgctccaaatctgagctggttattctccaggcctgctgcacagcttccatccaggcccttccctttgtaacaatcctgcaaacttccatgcctctgcctgattaagatgccctatgtggtttcctcttttggtttttcctactatctgtctcttccctcatttcatttttggatgacaaaaatggcattttaatacattaaattttaagacattttaagacatcttaatcatttaagaaagttccttcagaagcatt

SEQ ID NO: 164910 - DNA, 287 bp, Homo sapiens
aactacagtgccctttagaaatgtactgctatattataccttcatgggaaagtcatgaatatactctcaatggcatcagaaccaaatgcatcaattcagattaacttatgaatattacaggtagttcttaaggttcttaaggtgttagtatcattatgatattaaaacacttgaaatagaagaaaatgagttttccaatggaaaataatgtttcaaactaaaatacataatggacccggacagatcgagtcttccttaagagtatgtctcatagggagggatcctca

SEQ ID NO: 164911 - DNA, 333 bp, Homo sapiens
agtcaaacgcaatggctttgaggcagcaggcaacatgacaggtcttagcatcatcaaggaactggagtgcagagacaaggtcacagccagccagcaaggactcaaagtaggatcctgaaagcccaagtagggattttcacactcagtgacaagggcagccattgtagagatttaagcagagtggcatattctgctttcattttttttttaagtcagtgttactgagatatagttcatatagcatataattcacctgtttaaaagtgaatatgtcaattagccaagcatggtggtgtgtgcctgtagtcccagctacttggtaggctaagacag

SEQ ID NO: 164912 - DNA, 272 bp, Homo sapiens
ctgatcagtgagggcaagtctctaacttttagccccagtcctttactcttcttctagaggccatctctttcaccggtttcttttgtaccatccagagatagtctatgcatgtaggcagaaatatttttccgttttctaccttgtagccagctccctttttaaaatgttctgttcctcctcttgattttttcacataacagttaatttcgtgatagttccttatctgcataggactctgtctcagattccatcgtatggatgtaatttattta

SEQ ID NO: 164913 - DNA, 154 bp, Homo sapiens
atcctaacaacagatggtcctgttttgaattaaaacaatttaactcaagatccatcaactgccaacatcaaacacccttaaaagaaggaaagaaactcattatcaagagtatttaagcaaagtaggtatttaatctatcttaatcatttgcatt

SEQ ID NO: 164914 - DNA, 498 bp, Homo sapiens
gctcaggctatgggactagcttgaggtctgttccatgtttcttcattttgagaccaggaccactgtggggcaggttgttctcacgacagcagaaatgcaacaggatgagcagaaacatgcatattatgtctcttaaagtcttagctaagaactagcacattttttttttagaataacaaaaaatattttactaaaacgtaagatttacagaagtttccagataagccatacgaaatggtcacaagattttttgaagaggggaatctacacttgacagcaaagtcacaatgttgttagtgagggctgtgatatttgtttaatgttcccattttagttcaaacagtcaagcttgtccatctacattgtctaaataaagttagatttggttagagagcgtattctaaagaactgcttagctgcttttaaccaatgcagttagatcaccaaaaaacgggagaaaggagcccataaaattaaaataaaaccagctcccttctc

SEQ ID NO: 164915 - DNA, 418 bp, Homo sapiens
cctgacacatctgacccagaccaactccaagatctggagaaagagggaatggcaagtccaagggtctgcggctggagggtgacatcagagagaggggcagagagttgggggtgaggccggagaagcagcagagggtcagcctgtcattaaccaacaccgccatccctcgcccaccatgtccagccctttgctgggcgcaggggtcccaaggaggatcagctttcggcaagatgatgacagtggagcctggagggcaatcagaaaagacttccagggggtgacatctaagctgaacagcatatgccaggtcagacatggaggagaggcagaggcaaagccagaggacagagatggctgcgcagggcccattcccaggcactgagtggactcatggctgggcctgggggcagagggcccc

SEQ ID NO: 164916 - DNA, 703 bp, Homo sapiens
tgtaatcccagcactttgggaggctgaagcaggtggatcacctgaggtcaggagtttgagaccagcctgaccaacatggtgaaaccccgtctctacttaaaatacaagttagctgggtgtggtggcaggtgcctgtaatcccagctactcaggaggctgaggcaggagaatcgcttgaacctgagagatggaggttgcagtgagctgagattgcactgctgcactccagcctgggcaaaagagtgagactccatctaaatgaatgaatgaatgaatgaatgaatgaatgaatgaaaagaaaaatagtctcattcattagccaacagtaccctgaggtaccttgaaaagaacctcatgacgtgtacaagactttatgaagaatattaagaaacaataaacatacaaaatgtaaatgtagacctgatgaaatagcaaaatataccatattcatggattagaagactcaatattttgaagatgtcaacttactctctattgatgaattgcacataactcctggcaaaattccaacaggaatttaaaaatcaacttgagaagtaaatgttagaattcatatactagaagaaggagccaagaatagccaagataaactgaaggatgtggccaagttaaggggtcttggcctattagatattaaggcttataaagcaatggtaattaaaatagtcttatacagattatt

SEQ ID NO: 164917 - DNA, 890 bp, Homo sapiens
atcccgtctctttctccccctccattgcagagacaccgtcactctccacgtgatttccacatggcgtgtttggtcatcagagccaccgtctttcccctgccgtcagtaccttcctttaattactgagatggaaccgtccaatgagatggtttttaaaagaagcaggcagcttataggattctcctttccacagctgctgggctgatgccatcacagggtggttcttgtattttgtaacctttgacattttcttgggccctttcagcaaaaaaaaatatgatgcacgttttaacttctcagctgtcgccccagttttttcaggtaaccgctgatgcatagcaggtaaggtgttcaccgcctgcgggctgtggtgtcttgtggctcggcttggggccctttgttggggacaggctccaaaaatttcaaagctgggcacaccactgagtgatggcatggccagagtcggaaggcagagcatcggccgccgtccgtgaggccatccgaagcgtgacctcatctcttaaggggcaagaaatctttactgtgtcaaaataaatacaagccaaagtgtctccctgaagcaggaactccttcccttggttccatttcttccctgtgtagccacctccttcctctgccatggtcctcccaaccctcctacagtttcacatttaatctgcaacttttaaagaggagccttcgttccacatagaatccgtatcttgttcttaagctgatgacacttggggctgctcaaggcccatgcagtggtgaaggtgtgtagaggagtttggtttttcttaggtcctgagatggccacatgtagccccttcacccctcggtttccaggaggattaagggagccacttggcttgctgagctagagggaa

SEQ ID NO: 164918 - DNA, 381 bp, Homo sapiens
tagtctcctagctccctgcctttgacggcaaagtgggcttgggtgtgtccctgaaccaaaaggctcaatgcctgaccaggtgtctcctcacacagccctctctgttcatatcctcctaacttaactcttccattgttctctaaagcctaggggcttcagaagcagcgctgaagcaccccagggttctgtaatatcctttgttgttgtactataccctgcctaatatacaaatgggagagtgctacctgcttcctatccagtctgaaatggaagtttttgagaacaaagtgatcacttctagctgttaggaacaattttgttatctttgattatgtagtatataatggttagaatagaaaactgaaagttttttctatactc

SEQ ID NO: 164919 - DNA, 523 bp, Homo sapiens
gcaggtgacctttgcagcccagccaccattgacatggcagaactgtcgtgggtcagataagatagattattagattagagaattatttctttttgtgcgattggcatgcattttacaaattaagtctttagagcatttaaaattcatccctggccaggcatggtgctgcactcctgtaatctcagcactttgggaggccaaggtgggtggattgcttgagctcaggagtcgataccagcctgtgcaacatggcaaaaccccggaagtgggttgcagtgagctgagatcgcgtcactgacctccagcctgggcaacagagccagaccctgtctttaaaaaaaaaaaaaatttatccctgatgatagaaagctgttcacctctaggaagcacgaagccctccctgtggaggagttcagtgttgatacttgattaatgagcccatatgttaagcagagtttccttatttatgtacataggaaacaagattgttgtggctttggggtcaggttagggaaaccacaaa

SEQ ID NO: 164920 - DNA, 567 bp, Homo sapiens
aactaagtataaaagctaaacaagtgaaattgaagcagttttattgtaaggtttggaagagtacaggatgtttatcatagcacattattaatatttattactcttcctatgtagataagtaatgtcctagatttacaacatagaaaaacaggtagagacgtttagctgtgagtgtgcaagtataaatcaattaagtgccagattttgataatcaccagcctctcattcaactcctatgttgcaaagttgctcttatgcttttcttacattacttgataaaggcaatgtttaattacatatttcctattaactagctggtagagttcatacctaaagtcagtaaatgttaagaattttttccagctgagcaaatgagtatgtatctagttgtaagaaatcaagaagaggatataaaatgtaatcaggatgtggactctaaaacggaataacctctatgtcctgtaacttttatcactcgtaataatacagcattctcaccctattaaatggaaatttaaagcacccttaaattccagaataattaaaattgctatttggattgaaaaa

SEQ ID NO: 164921 - DNA, 488 bp, Homo sapiens
taacccctgagaaccactgatttgtcctccatttgaaaaatttgtcataagagtgtcatataaatggagtcgtagaaatgtaaccttttcgattggcctttttgctcagcgtaatgttcgctctgttttgttgctgagtggtctccgtggtgtgggtggactcagcttatttatccatggtgagaaacacacattcacccgtccacacccaaagactgggcttggagacacacagaacagcagaaatgagacttttttctttctctctcttttttttttttgagacagagttttgctcttgtcacccagcctggagtgcagaggtgtgatcttggcttgctgcaacctccgtctcctgggttcaagtgattctcctgcttcagtctcccgagtagctgggattacaggcatgcgccaccacgcctggctaattttgtatttttagtacagacggggtttctccatgttggccacgctggtctcgaact

SEQ ID NO: 164922 - DNA, 323 bp, Homo sapiens
cactgggattacaggcgtgagtcactgcaaggctgtctaaaatggctttttttttttggagagggatgtctcgctcttgtcacccaggctggagtgcaatgacgtgatctcaactcactgcaacctccgcctcctgggttcaagcaattctcctgcctcagcctcccgaagaactgggattacaggtgcccgctaccatgcctggctaactttgtatttttagtagagacagggtttcaccacattggacaggctggtccttaactcctgacctcaggtgatctgcctgccttggcctcctaaagtgctggggttataggtgt

SEQ ID NO: 164923 - DNA, 895 bp, Homo sapiens
cagggggaggaaagagatattattatctgggggctgatgcaggagtaccaccactggagaagcaccaaacaggtagatccaggcagacggattatatgcagccttgcaaaaggtttttggttctcacaggtgacacaaagtagcagaaagctaagaggacgtgaagaggcattcagaactagtcatctcattggcaacttgtatgagacagggactagagcagatggcccatctcccttctccctcccaatgtccagacactgtggaagactctagggatagagcagaaacctagtgtagggccacaaagggaagctctgcattagaaactaaattaagctacggagcacttaagaatatttctacttcatttgagtttgtggactaagacttatgcccacaatagctcttatattctccttactttggttaaggattatatcaaatccatcaccccttgaaaaagctttataagagatgcgatgcattttaagtactttgggaaatctgacagaaaaaattaatgcagagtcatatagctctcacctttcttcttcaggattatttaattgtggctggaagtcctgaggctctgtacttgtaagcactttcagtacaaagggtgacactttgattaaggcagttgaatataatggttaagtacatgaattttgatgctgtcagaaataattgttgtaaacagaagcttgcctaaattcatatctagggtccacccctttcatatgctgtgggaccttggggtatctgtgcctcaatgtcacatgtatcacagaaataaaacaggggcagtaacagttcctatctcacatcattgttatcaagattgggtgcacgtttgcaaaatgctcagaatataggaaactagatgtaaatg

SEQ ID NO: 164924 - DNA, 222 bp, Homo sapiens
tcctgtcaagggaagtggtatcagtgagcaatgaaggtctgtggaagttaggtaatgtgcacaatgtgagtgatagagctggcaagagccgagctagtctttgagtgaagggctgctctaaagcccatgtgttttcattataccatgaatgctcttatcctccaggatataaagataatctcatcctttttgttttttagacagagcaagactcagtctccc

SEQ ID NO: 164925 - DNA, 465 bp, Homo sapiens
cagaaatttgctttcttctcatcaaaacaaagaaacattgttggagaagactagtggaagacttaaagggtgttttcaattgattttagggtcagcgattttttaaggaaatagtaggtagccattttttaaaaattaaacttttcattttgagataattgtagattcacatgcagttacaggaaataatacagagatttggcatatgcttgaaccatttctttccaataataacatcttgcaaaactatagtacagtatgaagacaggatattgacatttatacagtcaatgcagaacaattctgtcaccataaggaccccttttataaccccactcacttcactctttatgctccacaccctagcctgtttgtaaatcctggcagctgcttatttgttctccatttttgtaattttatcatttctaaaatgttgtataaatggaatcagacagcatgtaactt

SEQ ID NO: 164926 - DNA, 480 bp, Homo sapiens
ctcaggctccaagatataggtaaatgcagagataactggaaaactgagagaggcagattctacactctaagaggactgtagaagtatcctaccaacaaatactctcttactttcatgaaaacagagacccattctggagaaattgcaagaaacagaaatagacctaagcaaagcaaaaagaatgagaaccctccaggagagataagattcacattctaggtgggcaggaggtccaagtgacacagatctcagaaagttccacaacagtaaaatacatttaaaggggtctattcagaaagcaaaatacctggaaaacataaaggtgaaaagctttactacatctcaaaagtgcaattaaaaaaaaaattcacaaatgcggcctggagccacacagctcaaaaactgcactggtctatcccctcctcctacagaagttcttccttctaaaactacaggaaaaccaacttgtttaaacaatag

SEQ ID NO: 164927 - DNA, 525 bp, Homo sapiens
atggtagttgcatatatagtttttaaagaaacttccaaactgttctggagtagttataccattttatagtcccatctgcaatgtatgagtgatccagtttttttgtatcctagccaggatttggtgttattactgttttttatttaagccattctgataggtgtatagtggccttaatttgcatttccctgagggctagtaatgttgaatatattttcatgtatgccatctgtatatcctcttcagtgaaatgtattcttattatttgcccattttctaattggatttttaaaaaatgtttgttctttcatagaaaaatgtttttaattttgatgaagtccaatttttcccttacaaaaattactcaggcgttgtggtgcacacctgtgatcccagctacttggagggctgaggcgggagaatcgcttgaacccaagaggcagaggttacaatgaaccaagattgtgccactgcactctagcctggatgacagagtgagactccatctcaaaaaacaaacaaaca

SEQ ID NO: 164928 - DNA, 390 bp, Homo sapiens
cagacacccttcaaaattggatattgtcgtcaaagtgtccaggaactcttcagctctgagtctttgagaactcagcttgtaagctgcgtcctgcctgtggaactgccgatcctggctcagccgagggcagtgtctgaaggatggcggagggggtagcgtttgcagaggctgagaatgctgtgttagcagtttccaccggtgtcttcccaacagcctctcggagcctcctgggaactcttgatctctttggccctgagtttgagaaccatagatttatttagactgttgatttttaactttctcaaggctcagctcattatttgtttattcccaaaggagagccttctgccccatggaataaacagcactaagcatccttcccatttgcct

SEQ ID NO: 164929 - DNA, 658 bp, Homo sapiens
aaacatggtgcttagattttcagcccaagtattattttatcttagagttggaaattctcaagaagcctttgcaaagccccacaaagggaaaacttgatgtgttcaggactcagatgccattctgatgagctctttggagagatacggagggggaaagtggaacgttgtgaaatcaaaccaacaattacaatgtctcggaacatcaacgtggttggaaattattgattcaagtcacgctctccaccaggccactgtctgtgagcagtgttctttaaaaagaattatacagccacttactaagtatctataagtcagatttatttccagctactcccatatgtgtcctctccgccccaaatggctggccgtcctccctgctcttggcttagcctcatttctgtggctttgctgaagctgctttcttgccaagtaggccgtgcctgttctccagtctagggacatccgacgcagcattcaaatccttcctgagtcctcctttctcacgtcttggtctctccttgttcagaggtgcaagtttggtcttcccaattacatatcactgaaggtgaaccacagtctccccttttcttccatcccttaattcccagcaaagtttaacgaagaagaaagagcttcagatcagtgtagtcaaaacccc

SEQ ID NO: 164930 - DNA, 440 bp, Homo sapiens
tgatgtgcctgactctgcctcccagagtgctgggatcacaggtgtgagctaccacacccggccacaatcattaatcttaaaacaaatttaggagagccagggcagaggtaagggatatcaaaggagggcagagattcttccttcttggtcctcaaccatcctgaagatggaattccctcgaggctgccacctggagtcccatggaagaaacggggaacggaaggttaatctcacacaggaaggccctggacaagttggggtaattctcaccatgttgtccttgccagaggagcacggaaagtcctggaaggtgaactttctcactcagggtttggggaatcccaaaggctccagaactttggaatcaaacaaatctgggcattaatttcaactctctcacttcttggcaatgtggcttcaacaaatttcttgacctcaaa

SEQ ID NO: 164931 - DNA, 192 bp, Homo sapiens
tcctcatccccatcccaggggagaacgtgaatgttccaagggacttcggcctctggggcttccacactctgggtgtcaggggtacagctcacaggctttcagtttggccacagctgaatgattgagaattaccagataaatcctccaaatccatttctccagaaacctcttcctagccacacagtgggagcc

SEQ ID NO: 164932 - DNA, 582 bp, Homo sapiens
attccaatctagcctcaatttcctcatctacttaataggcttgttttgaggaagaaaggagattaggtaagaggtttggtttggtttagtgcctagaatacagcaatcgtggtgccaaaggggagggaaatatttccctcaaatcgctttttctcagttttttgatatggccaactggtattttctaccttaatatagagtactatgcaaaagcatcttcaagtcttccttccagattactcctctgtccccatctatttggaaattctggacctgccacaggattacagtaagataaccataaatgtagctttttaaaaattgattttctcctatgtgccatggagaaagggaaagggaattagtaaaagctcctatctctttggttattttcagtcttggttaacgccgtccttttagttggccctcagtcattgctataacccaaatggtcttccacaggctctcctcgaggcttctcgcttgcttccatggcattgtccctatatgccaaccatgtccaaaccttattcttttcatttccaaaccttgttcttttccaaaccttatttgctctgtcgc

SEQ ID NO: 164933 - DNA, 399 bp, Homo sapiens
ccctagggcaggaatcttctagggttataaacagaactttaatcaacctctccttggttattttactggttccatgatacagctttttctgtgcaaaagatctgaacagaaactcacagaggatacaagagtggcaaaaaagaacatgatattcagcattgttagccattacagaattgcaaattaaaaccacaatgagatcccactagacttgttagaatggctcaactaaaaatcactgataacaccaagtgctaacaaagacacagagcaacagaaacgtgacagattgtcagcgggaatgcaaactaaaacagcctccagtttaccaaggtagacacctcgagtcacagaatacagagtagaacccagccaggaacacggctcaggtgagaacac

SEQ ID NO: 164934 - DNA, 217 bp, Homo sapiens
gacttaaggggtgagagatgcaaaactataatagtgagtcaaagaggacaagagcctaaattctgaaaaaagcctattgaacatagttggagagaaaatgatgtgtatgtgtttgtaagtttggtgtcagtgcactggtggaaatggagaaatataaaatgactcagaaggtgagggatgcactcagcaagttacagaatacaagaggaggaacaga

SEQ ID NO: 164935 - DNA, 307 bp, Homo sapiens
agaaagcacagtccttatgggaagttccaaatagttctaaatgactgaagtataacatttgaggtgagggaatagtgaatgatgttacaggaaagacaggcagagacatatatatgtattatataaatactttatgtatacctatagcactatatgaagtcctttaatattcaaccattctgattaccttcttactccaattttccaattaggtgcataacatgctgtgagtgtagaatgggtttcagcttcccaatatcagtggagcctccattctatatggtaccataatttgtcctgactacca

SEQ ID NO: 164936 - DNA, 502 bp, Homo sapiens
ggtgctgctccaggctgtcagatgctaacctgggattgtgggcgcctgctccaggctgtcagatgcccacctgggggtgtgggcgctgctccacgctgtcagatgctcacctgggggtgtgggcgctgctccaggctgtcagatgctcacctgggtgtgtgggcgctgctccaggctgtcagatgctcacctgggggtgtgggtgctgctccaggcagtcagatgctcacctgggggtgtgggtgctgctccaggctgtcagatgctcccctggaggtgtgggtgctgctccaggatgtcagatgctcccctggaggtgtggggtgctgctccaggttgtcagatgctcactgggggtgtggggtgctgttccaggatgtcagatgctcccctggaggtgtggggtgctgctccaggctgtcagatgctcacctgggggtgtgggtgctgttccaggctgtcagatgctcacctgggggtgtggggtgctgttccaggctgt

SEQ ID NO: 164937 - DNA, 402 bp, Homo sapiens
caatcagatggctgacctgcatggactccttatcagaatgatttgaaattattctgctgggatctttggttgttcagaacccactgagttgtaatctgcgtcagtcttagatgacagagccatacctagcttctctgagttagttacaatctactctgtaaagcgttctaaggtagcacttgttgttttcaggttttcctcccgtcactcgtgcacattcggagatgacatggtctacttaagcttctgtgtctccttggtcagcaccatcattagcccaaggtcctaaaagtgaaataatgaagactttcccaattctgtgccttattgctgacactcagagtcccctcaacctgctcctaattgtccctacaagacacccgttcacctgcgaacctatga

SEQ ID NO: 164938 - DNA, 546 bp, Homo sapiens
ttagacctcaacaagaaaaatataaataacccaatttaaaaatgggcaaaggatttgaatagacatttctccaagaagatacacaatgtctcctaagcacaagaaaagatgtttcattagccatttaaaaaatgcaaatcaaaatcacaagatgccactttagaccgagtaggataactgcaataaaaaaaccccagacaataacaagtgttgacaaggttatgaagaaactggactactcagacatggctggtgggaatctaaaatggtgcagctgttctggaaaacagtcttgaagttctttaaaatgcaaaacatagagttaccatatgactcagtgattttactactagatatgtatgtgctcaagagaaactgaaacaaatgtgcatacaaaaaaacttgcatagaatgtaacagtgttcataatatccaaaaagtataaacaacccaatttttccccccctgaggaatagacagattacatgtggtatcttacaatgtaatattgtttgataataaaaaggaatgcggtactgacacaat

SEQ ID NO: 164939 - DNA, 179 bp, Homo sapiens
agcaatacatattaaaatattttttaaagttttaggctctcatttagctaaatgaatgcaaagttaaacaaacattttgtaggattttaaagaatagttccttttcaaattgttggcaagagggtgggttagatagcaatgataggcactgttgtctcaaccacttcttttataaatgg

SEQ ID NO: 164940 - DNA, 577 bp, Homo sapiens
tttactcaataggtgtaataataactacgtatcagattgttgggaagattaaatcagggaatatctatccttatcacagtgctccaatatatagattttgttgctcatttcttctttccagctctatcccatggctcagaaagaaacaacaatgtctagaacatataaaaatagagactaactctccctcctgttatctgaagggtctttggctgagattcaggaaatcttggagaccaggcaccaaaggattttgtaaaggaatctgtagtgggtctaagtaggcactttttaaagcatcagccatcttcttgaatgtcatagtcacattaaaagagcctagttaaatgtggcttagatattgtttcacaagtggccttagtggaatccctgtaaataaatatgttagaatattaggttgggaaaatattgttttgtttaatctcatgtgattctttaaataattgtcacattgttgtgtttagaattatctagctatctggcctagtaaacagatgagcaatattcactgagaggggaagtatatacaatttggtttggaacgtggaagagaacc

SEQ ID NO: 164941 - DNA, 135 bp, Homo sapiens
ggaaatctggtatctgtaagtccatctgggatgggttatagccagtttgccttcagaaggaaagacctccaaaggtccttttaactaagatttactacacttctcagagctacatccttcttcttggcttgattc

SEQ ID NO: 164942 - DNA, 542 bp, Homo sapiens
ctgcccactatgaacccaactgtcaatcaggcaagtccccttcacttccatcttctgtgtctcctcccatgcctgtgctagctcaattttcaccactgctccagtctaacaaattgccatgggtatgctaccctttttcaatccattcctacagtgtggttaagcattgctagaaacaagcaaataacatacagattgatattccctgatgttttttatcaggtttgatataaatcagcctcttacattttatctgcttttccatttatctttaatttcttttatcccatctatgggaatgaggtcttcctattccttctaaggccaattttatgtccttggctccattccctccagtattctgtgtgtcttcattttatgaggtaacttgtttttcttcagtctttagtatcttcttttctacaattacttgactgtcaacatatggctgtacccaagatttttctgttctgtaaaaagatgctttatccctcaaatttatgttactgttatcaattcccctattgtctaatttttttaaa

SEQ ID NO: 164943 - DNA, 362 bp, Homo sapiens
gtgcagggggtggaggtgggcccagcgccgcagggcgaggccttcagcctggagagctgccagaactggctgcccggggagccacacccagccacagccgagcactgcgtccggctcgggcccaccgggtggtgtaacaccgacctgtgctcagcgccgcacagctacgtctgcgagctgcggcctggaggcccagtgcaggatgccgagaacctcctcgtgggagcgcccagtggggacctgtagggacccctgatgcctctggcacggcaggacggcctctcagccccgcacgagcccgtggaggtcatggtattcccgggcctgcgtctgagccgtgaagccttcctcaccacggccga

SEQ ID NO: 164944 - DNA, 381 bp, Homo sapiens
ccagaccctgggtagatggagccgccgttttacagaggtaaggacaagagtttagttttgaacattccaaggggagatgtccaggacacaattatatacctaggctgccattctgggaggagatctgagtgggagaccatgatttgggaattatcaccacagatggtaatttaagccttgggagaggatgagtttgcccccaaagagagcataaagtaagaaaattgggctctccgtgtttcaaggttgactaaagatcctgtcatttgactaggctctgctatagtctgcaaaatctgcccagggacagaatattgaagtaaataaagtgtattccaaaaacctcaaatagattgattcaaaactggagttagaaaaact

SEQ ID NO: 164945 - DNA, 400 bp, Homo sapiens
ccgactctagagcagccccccccctccctgggaaaacgacccactaccacactgagtttgtgccatgagtttagttttgaacattccaaggggagatgtccaggacacaattatatacctaggctgccattctgggaggagatctgagtgggagaccatgatttgggaattatcaccacagatggtaatttaagccttgggagaggatgagtttgcccccaaagagagcataaagtaagaaaattgggctctccgtgtttcaaggttgactaaagatcctgtcatttgactaggctctgctatagtctgcaaaatctgcccagggacagaatattgaagtaaataaagtgtattccaaaaacctcaaatagattgattcaaaactggagttagaaaaact

SEQ ID NO: 164946 - DNA, 170 bp, Homo sapiens
gtgtgagccaccaagcctggccttaattaatgtttgttgcatagagtggcactgataactttcatttttctagaccctatatatatatttttttgtttgtttgtttctgtctcaaaaaaagaaaacaaaatatctttcctgtgtccaaagtgtttacagttaggtggggg

SEQ ID NO: 164947 - DNA, 314 bp, Homo sapiens
tgaatatttatttctggaattttccatttaatattttgggatggtggttgaccacagggagctgaaaccgtggatgggggcattcactactgtaatcccgtgcaagagggtgggaccctcctgatgtaatcccctcctccagaccctaccttctaatgccattaccttgggggttaggtgtcaacataggaagtttgggggaacacatacattcaaaccctagcacctcctctcttgttttctttttctccctaacagaacccttctaacaaaacacatagatattttaaatgtttgttttctgtctgttccat

SEQ ID NO: 164948 - DNA, 122 bp, Homo sapiens
agaacacaagtgcctggggctgtggggcagctgggttccggccacactcacctcgagggctgcgtcatttctatcgggttctgatgccccacatcatcggggccagagcgctgccttggcca

SEQ ID NO: 164949 - DNA, 376 bp, Homo sapiens
gcctcgtcgcccacataggaatccttctgacccatgccctcccaccacgccctgctgcatgaagcgcacctcgatggaggtgaagaccaagtagaggtcaatggagctgtctttcccaagccctttgtggagaagccagtgagtgcagaagaccacaatgtttacatctactaccccagctcagctggaggaggaagccagcgtctctttcgtaagattggcagccgaagcagtgtttactctcctgagagcagcgtccgaaagacggggtcgtacatctatgaggagtttatgccaacagatggcacagatgtcaaggtgtatactagtgagggcctagattatgccctataactgaaagctaggttatctccag

SEQ ID NO: 164950 - DNA, 687 bp, Homo sapiens
gcctcgtcgcccacataggaatccttctgacccatgccctcccaccacgccctgctgcatgaagcgcacctcgatggaggtgaagaccaagtagaggtcaatggagctgtctttcccaagccctttgtggagaagccagtgagtgcagaagaccacaatgtttacatctactaccccagctcagctggaggaggaagccagcgtctctttcgtaagattggcagccgaagcagtgtttactctcctgagagcagcgtccgaaagacggggtcgtacatctatgaggagtttatgccaacagatggcacagatgtcaaggttatggtggatatagggatttaagaggttacaaatgtgtgggtggggatggggtacttgggaagcaggtggaagtatatggggaggaggtcctagaaaataacatgatgtgaatgtgattggctttcatattcaggtgaagataatgagtggaggatacagacattcacattttcactatcagagcaagggcaaggctgacttagaaaaatggtataatgtttgtaaattattttttaataaggactacctgacagtagtggagtcccgaggagaaattcataatgatacttcagtaaggctcagtaggaaaaatgttggtcagtctccttaatgctcaggatttgttttgtttttgttgttgttgtt

SEQ ID NO: 164951 - DNA, 461 bp, Homo sapiens
agttatgtgatttctattttttacaatattatacttttgatcatagagagataatattactgccactttaataacagtgttcaaatacacactttctttgaaaggtacttcagatcccaatgcctgactgcaagacttaaatgctctcagatacagacacaaattgggtcaaagccatattgaatcatcaaatatgacagcattttcttacttctgagtataaccaacagctaacaattttcagattcttttctaatttctgcttttaacaaatacataatgcatttgtaataccagactgtgtgaaatatgctgagtactgaaggagattctagtagcagctctatgacaatttgtgagaatctggacaaattccataaattctacacccatctttgctgttattgaaaatggtgaatgcagatcaaatgtattaaaatccgtttcaatgctgatttctg

SEQ ID NO: 164952 - DNA, 320 bp, Homo sapiens
ggctggaagtaaatggtatctttctaatctaaagcaatgccttgcatataatctactctttataaatgtcttgaaattcaataacctcataatcccaaataaagaacgcagcaaatatgcacacttatggcatatccaaaagacttacaaagttaagcaaaactcaaattagatctgtgattctcctagaacaccaagagtctgtagaaggcacatggtcattaagtatgagcaacagcctaggtactgtaaggaatcattccttacatttatgtccagctaaggaggcttttcaaagatttatccacatcctttcatag

SEQ ID NO: 164953 - DNA, 496 bp, Homo sapiens
acacttctagatactttctagctactcttatgctaagattaattgattaactccacctctccaattcccataacttattacacaatacttaagctatgactaataataaaatacatactcatgtgccaatgtcccagcttaagaaataaaaaatgacctaaacagtcgaaacccctatttccccttccctgatggtatcctctacccatccctccaatggaattgtttttcagtattagggatttgtaattctcatgcatgcctttatcatttccttcatatgtatgaatcgctaaatcatctatattgttgtttggcatattttaaaactttatatcaatgtcatcatattatgtatgtattttgttttcttccctgagactaattttgtactatgttggtatatgtagctctgcttcattcatttttgtggctatataatattgtattttatgcataattataatacaattcatttatccattccatttttgtt

SEQ ID NO: 164954 - DNA, 163 bp, Homo sapiens
tgggtaggtcacttgagctcaggagttcaagaccagcctatatagcatgtttttaagaaattttagttatcttgtcaattacttgactaatctgtcctctccaatgtagggttttagccagctgcagtggctcatgcctataatcccagcactttgggaggct

SEQ ID NO: 164955 - DNA, 499 bp, Homo sapiens
ctgtatacctacggtggagggggcaggcgggggacagatgctgctgggccaagactactgagtctctcctgcctgctggaggtccctagctcaggacttattccatgcacactctgatagaatatttacgcccaacactaactgtttggcttggcaaataagcaaagccataaagtcacagctggcctgtaggctcccagtcaccatgtgcagctgagtcacaaccacttcccccaccccctggggagcaagcgcctatgctcatgcctgcactcagacacatatccacacagatacccacagatgccgcgtgccactgagtcatagctacctcctcagagagcacgtgcctgcatgtacttgcacacaggtccccacagatgccatatacacctgagtgtgagtcatcatcaccactgaaccctgagggagggcacccagagtgtgttctgccatccttgcttagagatacccatatacacacatatacagatatgtg

SEQ ID NO: 164956 - DNA, 323 bp, Homo sapiens
atacatcttaaaatcagaacactgttccctaacagtcacatatatatcagtgaaatcgaattcattttaaagaaatttaattattcactgtagtttaatttactatatctcttaattctaaggtgttgaatataaattaaatttagatgttagccagatatcccattatttcacttatcttaatatgatacatgtaaataattctttagtcttagcttctttctttgatagtaaactcacacatatttgtggggtatttttatttaaaatgtgttcaatttttaattatataaagtaccacctctcttttcagccatgtaagt

SEQ ID NO: 164957 - DNA, 259 bp, Homo sapiens
aataaaatcccaagagagacgttacaagcaaagaaaatcatggaccaatatttttcatgaacataaatgtaaaattcttaggaaaattttagttaattaggaatatattaaaaggttagtgtactatgactaagtggtggtttattctaggaatatatggctagtttaacatttgaaaaaaaattcagtgtaattcaccatgttaacagaatgaaggaggaaaaccatagatcatcttagtaagtgaagaaaagcatct

SEQ ID NO: 164958 - DNA, 571 bp, Homo sapiens
catcattattcttaataacatgatgtatactgtataatgaatgtaattttaatttttcttaaaaaggaaaagaagaaggcttcttgaactttgtacttgagactcgagagcttaaaatttgtcactgcttagaagctttatatctaaaaaacgtgagtggaaaattacaggataatagtatgagaattattgaaagaatctttgataatgtcagttactggagcttttaccgaaatcattaaaactcacttaagaagaagagaaataataatagtattactcaaattaaaataaaaactaaagagctactgaatattttacagcattaaaaaaatcatgttctctagaaaaaggggaaaacagaggtggcatatttttttcagattattagtggatgatgtttctgccatttaagaaaccaagtaaatttatattttacaaatttgattgattgatttacacatcatagtaattttccaactcctaggaggaaagattacaaagtgagaggggcatatagtacactctttgccacagaatgtgatacatccatccccctccatgtattaac

SEQ ID NO: 164959 - DNA, 451 bp, Homo sapiens
ggtccaattaatcaatcctttcctttatggttcctgctttttggtacctttagtgacatcaaaaaatccttcctatcttgagatggcaacaatcttcctgtaagattttctaaaggctttaaagacctttcacatttaggcctaatacatctggaaccgatttttgtctccaatgtcatgtgtttcatatatggataaagaactatgccagcaccatgcctgccacaccaccattcccatgtgcaaagtccgcacacatatgcatttgtctgagctgtccagtctgtcttagtgacaacggctttaataataactcttcatatcctggttgggccaatcctctcacctcattcttttttgaaaatattttgggtctcttgaccttttatacttggatatacattttagaactaactcgttaagttacacacacacacacacacacaaaacc

SEQ ID NO: 164960 - DNA, 285 bp, Homo sapiens
cagagtgggaggaaaagcccgaatctcctgttcacctgccaacagctctttgcaccatggtgccatgtttcctctgcatgcctccgttcatcctccacacccggaaaacacagagaagcaggagaatcagccagatacatgaaaactcttgtttcgaacactgagcattgactgtttacctggcccttggttcttgtctttctttcgttttagcagcagcattacgtactgctgccaggtggagcgttgctggttcctgcttccccttcctccctgcctgtcttc

SEQ ID NO: 164961 - DNA, 215 bp, Homo sapiens
gaactgctgtagcattatccttaagggagacaacatcaattgaaatacagaagtgagggaggctggccttagctaggagaacagatataatttatctctagtaacagaagagaagatgtacattcatagatgctggtagatgaatagatgtttcagagacagagcttatgaaaattctcttatttatcttctcagcgcttcaatttttttcagag

SEQ ID NO: 164962 - DNA, 275 bp, Homo sapiens
agaaattctactttctactcaattttgctgtaaacctaaaactcttctaaaatatagtctattttttaaaaaggtcgtttgaaaattttaagtaaaagaacagaacatcagaaagactgagataaccagcttagctgaagataactaaaacatacctactccttatcaaactctgaactaagaaattcttcccatggatatgaacttgaacttgaatataagctctatggggataaatacctactgtttctttgtattcgtacagcaccacggtt

SEQ ID NO: 164963 - DNA, 313 bp, Homo sapiens
tctccctccagctccttgagatggtgggtttcagaagaaaaatctgacagcaaaaaaacatccatgctacccaaagcctgtcattttataggtccatgccggggcctggggacttcctcttaggtccaatgagatcaccacgtttcccttgttttaagagctgtttgtttatcaaattaacagaaatttataagtctctacctactctgatagctggctgactccaaatccaggctgtatcagcagaaaaagatgtcagtgaaccctgtgcctgacttgaggaaactctggacaagttaccagaaaaggtgat

SEQ ID NO: 164964 - DNA, 666 bp, Homo sapiens
gtgaatggctgaagcttggaaattatatcagactaaccctttctgagactctgagaggtgaagtagcttgcccaaggtcatggaactagttggtagtattgaaccaggatgaaacccaggtcttctgatttcttgactggtactcttatcatttcacactggagtgggcaaagtttgattcagggcatgaaaattaaaacagtttcttcatatttctttctgagagtaaagactgcaaaatatggtaggaaaagctatgagttcagagacattagttgcaggtctggtactgtcgctgttacaggtctggtactgtcactgactagcagtatgattgtaaataggtatatttttctgttgcacgtggcctcaaataaatacatatacatctaaaaaaaaaaaacaacaacacaaaccaaccccgtgcggcgcccccgggccccgcaaaagggctcccaaacccacccgggggcgccggggcccaacgccccgggcaactggccaaagcgcgtcccaaaaaacccgcccccaaacacacggccggagccccccagaaccaaaagcccggcggacaccgaacggccccacacaaccccagcgggcctgagaagacaaacggagctaaacggggacccacccagccgaatcaaaaagcgcacgggggcc

SEQ ID NO: 164965 - DNA, 509 bp, Homo sapiens
catacctaagaacccggttctggagcagaaggaatggatttaaatcccggctctgccacttcctagctgcctgacttgggacaagccctctccgctctctgaactggttttcccatttgaaaactggtgaccccaattcccaccttatgggtaatcatcataatgtattgaccttcctgtgtcacacctcctccctaggctggtggcgaggtgcccaggatggcaggctgtagagcatgtcggacagtaagcgctcagtgtggtggctgaggttatggttgtgggcgggacggggctctgatgatgccggctgaaggatgagctgcagttcacaggagctaggcgacaggaccctagacactctgggggtcacggctgctgctgctagagtcagcctgtcacttagagagggagccgcccggcctcctccctgccggactcgctgacatctcccccacgtgcctgccgcgtccttatcattccgggcgtagctgttttttattttgaga

SEQ ID NO: 164966 - DNA, 353 bp, Homo sapiens
acccaaaacgtggaatttccccggatttttctgattggaccctaccatctaaaagtactgaccaggcacggtggctcacgcctgtaatcccagcactttgggaggccaagctgagtgaatcacttgaggccaagagtttgagactagcctggccaacatggtgaaaccttgtctgtattaaaatcagccaggcgtagtggcgcgtgcctgtggtcccagctactcgggaggcttgaggcaggagaatcacttgaacccaggaggcagaggtggcagtgaaccaagatcgcaccactgcactccagcctgagtgatagagtgagaccctgtctcgaaaataataatcataataa

SEQ ID NO: 164967 - DNA, 254 bp, Homo sapiens
agaattgaccagcagagggcaaccaacaactatgttgtgaagggaagaaggctccatggtttacaaaatggaggatctggaccaagaagggaaatatggcagaggtagtttgctacttgaagttcatcccttttactctcaaatgcttctcttgtaacttttgtgggtgagaggccgaggcttcaaaccttcatatacaatagatcattttaaatttctaccatccccatgtacccaccccatctccccaattc

SEQ ID NO: 164968 - DNA, 297 bp, Homo sapiens
atgtgtaagcattacacgtttcattgaaactttaaaaatgattttctagaaagattaccttaattaaccaagaactatgttctttatcaatgaatggcttttcaaaggatgatcatacttaggagtaacattaaggttttatttattgcttcagaaatttatattcttgacagaatttttgtgggagtttcttctaacacatctcttatctggatcttgctacgttaattcataaaacttcatctttagcaatcttacttttctaggcaaagatgacagttaaaacataatttggtg

SEQ ID NO: 164969 - DNA, 343 bp, Homo sapiens
cttacccagggtaatgggagagaagaaaattctaatgtaaatacagggagctgggtagatttgctaatgagaacgtggaaattgtcttctgactgtttctctttcttgatgaaataatgaaggacagtatttggctcttagggggaggaagggatgttttgagaaaagaaaagaaagttgagttatggctgtatggtcaagaattgcagacattgttggtgggtttttttgtttttttaagttgttctttctttcccctggaagttgtacaataagttaattttattccactggcttaaagtaagtttgttgtaaagaaaaataaaagagtattttatttaaa

SEQ ID NO: 164970 - DNA, 536 bp, Homo sapiens
aaatcctttaaaaataaaaacagtctctgacttagaagcatgtgatatcccaaaaatgtaacctttctgtatgtaataacctttctggaactcaatataacctttctgtaaataacctttctggaactcacaacgagtttcagagaaataatgttctaaatcaaggagtgggatcaggggtttttctgtaaagggccagattgtgagtatgttcagctttacccaccaatctctgtcatgtcttcttctctgggttttttgttttgttttgttttgtttacaatcctttaaaaatgtaaagaccaatcttagatctcaggtagtgccaaaacaggctgtgggccagatttggcctttggactatcatttgctgacccctcttctaagtggtggttaggcccacagcttagctcccagaagcacaattaatccataatattactgagatgccaaataagataatatattttaaattgcattgtaaagtctatactaatatgaagaattatgtagtttttcagtgtttagcacgtgga

SEQ ID NO: 164971 - DNA, 327 bp, Homo sapiens
aaaataattctgaaattgtatggagcaacaaaaatcttaaatgaaaaaatattaaagaaaatgaggagatccagggtaattgaagtatctggctttaatatagactacaaaattatagtaaccagaacagcattgtctggcataagacagacacagacacaactggaacagagtagaaaggaaataaactaaagctcctaaacataactgattcttcacaaagttgccaggagcacacttcagggaaaataaaacatttaccgtgtaaatggtactgggaaaatttgataattacatgcaaaagaattagattagaagtctacatct

SEQ ID NO: 164972 - DNA, 425 bp, Homo sapiens
ccaaatcctataattctgtactaaaagtatctctttcaactccaattaggatttattccttcccacttatatgtggttacggagggtgtccttattaaagaatgcaaatgaacagccaggtgaagaggcccagaatggttcccaatgcaggagcttctgttccatggaattgggggtgtgctacctcccagcacatggaccaaatttaagtgtgcatcaacctggctgttccccaaaacccatcatttagagttgtttatggaggttttcagttatggaggaatgatttattaaatcaggccatattgattaattcagtctttagctccctctcctctccctggagtgaggggaggggctgaagtttctaaccctctattcatgctttagcttttccagtgaccagaacccatcctatctggggg

SEQ ID NO: 164973 - DNA, 271 bp, Homo sapiens
tgctgggattacaggtgtgaactaccgtgcccagcctaagacattattaatatatttttaaggcaaatatctctttctgcatggcttttcagataaattcttccctgagtaaatagttttcttcagcgtatttccagagcaccttgttcacaaggctatttaatttttgggtgcattgtaatactctataatttgtgaaccctttgagaccaaatgccgtgtcttaaccagttgttaattttttgtctccctccttccctccatagagctc

SEQ ID NO: 164974 - DNA, 383 bp, Homo sapiens
gctaccgccctggtccaagccatcatcatctcacataggctactgcaatggcttcccaaatcacatctctgactcctctttcatcttcctacaattccttctctgcatagcagccaaagtgtttttagaagagtatatactgaagttataaaacaggtaaaaacgaattaatgttgctttaaaaattagaacagtggctgcccatgtggaggaagagttacagcaggtatcaacgggaatggggaatgagggaacttttctgaggtcatgttaacgttctatatcgcagtagcaagttgagtgacaaagggatgtgtttgtcaaaactgaataattaggattatgaatttattgtatataaattttaaattaaaagaaaaaac

SEQ ID NO: 164975 - DNA, 452 bp, Homo sapiens
agaaatggagccctcacacaggagagaatcctcagggtgatggtggagctgggtggctggtccagccagcccagatgaggacagaggaggtgcacaaggatatacaagaagcatatgtgtctcagggagatcgtaagtgagagctacatcgtgatattttatagtacataatgctgtataaaattacaaaatcaagacatagaatccgcatgaggttttagataccaaggaactaaaagagttctaaggtgtctcgaggtgagcaggggattcctgctttatgttataaactttgtaggacagttacccttttaaaacctactatatttcatgtataacaatgaatttttatggaaaaatacacatcaaactgctgacaaacccacagggcggggggcggcggcagtgagcccagggccatagcagatgagtgagtaaacacctgcctggca

SEQ ID NO: 164976 - DNA, 781 bp, Homo sapiens
agcggacctgagactgtgggcaaaggtaccatgaagtgttgtggagaggagggtcaccaactccaggcagggctgctaagtttattacaaacaggcaagactagaatatgtttccactttagtgagtggaaacctaatcattcataggtatcctgtacacacagaacaactatgatgaagagtgaggcctaaatcagaggagacgaggacaataatagtagtagtggtcatgatgataataataactaccagacatgaagattaaccatgcctaacattgtgttaaacgtctcacttctttcatttaatccttacaataatccaatgatgtagctgctattatttttattatacagatgaagaaactgagggcttgaggggtatactgctttgccaaagtcgtacaaatggtaagtgcagaaccaggatctgaattccgtcagtctgactgcagagcccacgccgacaccgtggaagctggtgatgcccattaggccctgtctgggcatgaagaggatgccctccctcatgagctggaacacagcatcccctgttgtgggtgtggctctcttaaagaccatctggtgaattttgcttgtgctggtttcttattaaacaaccttcagatttggcttcacgtgcaactcacatagagggaaaggagaccatgatccgccaacatgacagctgtatttttcattagtaaattagcaaactggctgcctgggtcaccatgcatacctgttaaggtgagcccgccccagagctaaaggctaccatg

SEQ ID NO: 164977 - DNA, 437 bp, Homo sapiens
ggtataaagaactgaagcataatcatgtttgaatcctctatgacagcaaatgttctgcaaataccaaagagctgtgtccaaaagagatcggctcatatataaagaagtgctctcaactggtctagacacacccacacatttgctttctgatctccaagaaaatgagagtttacacctgtaatcccaagtgtactgggaggccgaggcaggcagatcacttgaggtcaggagtttgagaccagcatggccaacatggcaaaatcccatctctactaaaaataaaaaaattagccaggcatggtggtgcacgtctgtaatcccagctacttgggtggctgaagcaggagaattgcttgaacccaggaggtggaggttgcagtgagccaagactgaaccattgcaatccagcctgggcaacagagtgagactccatctta

SEQ ID NO: 164978 - DNA, 432 bp, Homo sapiens
ctagtcccacacaccagttttacaaatgagaacctgaggcctggggaggggggtggcttgcctaataccacccagccaactggagggggaatgggcccggccccggggtctcccatctcagctccaggtggcctcgaagggcctttggcaaagtgatcaactgctaaccagagcgtgagagaaaaagcccaagtccaggctgttgctgtggaggaaaagcttggttctcaccatggctccgtgttcctgggcagaagggaacctctctgggggcttggttctctcatctgtaaacccctgatatactggtgtcaggtgacatgcttgtgaaagcccctcagagcaaccaggtgcaaatatgagtatcgtgtgctgtgaaagagcccatcccgcttcattggtgggggctgcagccttcggcatgtccaccgt

SEQ ID NO: 164979 - DNA, 478 bp, Homo sapiens
ctgtgacccagtaattctgttcctgggtgtgttctctactcatgacatatcctgcaggaggcagaagtgtttctatcagcaaaaatagtaacaacataaatgtttgttgacagaggaaaggataattaaattgggatgtattggaatgctgtagtagaatagaatactatatgtactgaagataaatgaaccatgttccatggttcatttcattcatccatgtcggcatggatgaacttcagaagcatgatgttgatttacataaaagaagcagattaggccgggtgtgatggctcatgcctgtaatcccagcactttgggaggccgaggcaggtggatcacctgaggtcaggagttcgagaccaacctggtaattgtatacagggaactgatatccagtggcgacttgaaatggtgaattgggataagcaggaaatgagttcattgtaaagctatcacctagacctaggcgtctata

SEQ ID NO: 164980 - DNA, 378 bp, Homo sapiens
ggctgagacaggagaactatttgaacctgagaggtggaggctgcagtgagccaagatcgcgccactgcactccagcctgggcaacagagctagactccgtctcaaaaaaaaaaaaaaaaaaatcagacaaaatagactttaagacaaaaactgttattatagacaaagaatattttataatgaacaaagtgtccgtccctcaggaggctataccagttatagacatgcatgtacctaacaacagagccccaaaatacatgaagcaaaaactgtcagaattgaaaggaaaaaatgaacaactcaaataacagtaggaaacttcaatactctactttttttcatgttattttatacatacacatgagagagagaaaacac

SEQ ID NO: 164981 - DNA, 495 bp, Homo sapiens
ctggtcctactttccacagggatctgagacaggttgtgaggacttgatacggagtcataaggttcaagccaagacatctgaatgggcgaaatgaacgtgaaagcagtacatgttcttcctcaaactttcttggaagggtcagaaaacagaagattgaaaaatacccaatatctaacatcgggccattgagttcgtccaaaaaaagcagaagagtatttctgaaccaaagaaacagaatagaaagagaggatgagaatggagacctgctggccgtgcatcagctatttaaaggaagaaagggctggagcccagagttaaccaaagcttagccttagaccaaacagggcttcccagcacaggtttccaaggaaccctttctgctccagtcctctacagtgagaagagcccagaataacacagaaatatgttcacttattacagacacccgtcaccatctctgatgtcagagaattctattctcttaacttgtgcctc

SEQ ID NO: 164982 - DNA, 339 bp, Homo sapiens
ggccatggagaaaggtgacccccagctatgcgacttcctggagagccacttcctgaaccagcaggtcaaggccatcaaaaagctgggtgactacctgagcaacctgtgcaagacgtgagccccagaagcaggcctggcagagtacctgtttgacaagctcaccctgggcggcagcgaggaagacacctgagccaagatgggccccacagccacggtgtgccttccctgggtcaggccaccaggcgggggcgtgcatgttgccctttcagaacgttctcttcaatttttttcctttcagtgttaccattattggcaataaagttatctgttctcaaagca

SEQ ID NO: 164983 - DNA, 139 bp, Homo sapiens
tacttgggggaaatgtctcctttctgtacctaaagtaagtttgtgattctatcctttgccttaactttttcctctgccaattcatcttttatgaatttatccacttccaaaggtttcacctctctcctggatataggag

SEQ ID NO: 164984 - DNA, 436 bp, Homo sapiens
ccaaaaaaccaccgtggatgcagcggggcctctgcacatcacccctcggtgcactggaggcctcagcggtgctcctggctgagcatggggacttcactaccagtctgccctgggtcacgtatggaagcctcagccggaggcgtgggagctgaaggcccgacgcttcctgttctgctcagctcctccttggaggaagtggggtttgcaccacgatggcccttcacccctgccccctcctctctacacctgcactgatgtcagacagcaacctctcaagacaggtgggacacgccattcctcctgtgaggtcacagcgagaagtgcatcagcttgaaatgagaggcagctcttgggggcaggagtcagtggcagcaccaagcgacccacccaccacgtttgggggttggggacctccaaagcaggcaggggcttgctt

SEQ ID NO: 164985 - DNA, 300 bp, Homo sapiens
gcagcagatgggtatgagaagataggaatccatatcataaggggaaaaacaattaaatagtactcaaaaaagtaaaatcttcaaaaatttgagatcaaaaaccctttctgcagcgctgaaagagtaaaaataattttctgctgctataacagaatatcacagattaggtaatttataaagagcagaagtttatttggctcacagttctggaggctggaaaagtccaaaagcatggtgctggtatttggccagggtcatcctatggtgcaaaggtggaaggtagaggcaagcacagaacat

SEQ ID NO: 164986 - DNA, 619 bp, Homo sapiens
aggctgttgtcagtggtgcatccctgtaatcccagctactcaggagcatgccactgtgactggctaattatttttatttttactttttttgtaaatgataagtggttgcccaggtgagtcttgactcctggtttccagcaatcctcccaccttggtggcctcccaaagtgctgggattagaggcgtgatccaccgcgcccggcctctggctagcgatttttaaagagcactagggatgtagactgaatgatttattatttgtagaatttagaacaatgcctggtacatggtagtcacataaattatgtcattaagaccaaaactttcagccagccactgcgttccagccggataggtgctatatttaaacatacccattttataaggtgaggaaaatggaggcacgaaaggaaaaaacgattaaaattagctaaataacctgatccagactacctggctgctgactggtggacccagggattcaaacacaggcattctgactctagaatcaatcaatctatctatctatttttttgaaatggagtttcttccttgttgcccaggccggagtgcatgggcgcgatctcagctcactgacaatggctcgggtaccgagctc

SEQ ID NO: 164987 - DNA, 721 bp, Homo sapiens
atgtcaatcgagctcggtacctactttccacagggagggaaactctgagaggaaggaggatggagatttcatgggagacaaagggtggttgagactacaggtttgaacaagcacaggacccttggtagtctgatgtgaaggacattataaaaacacattatgaaggttttttctgtcacttcaagctgggtcttgttaaacctttgaaaattctctaatacctcatttgtttttgaaagaaatctatagcaacatcattttgtcatgtggtaaatattgctgagcagtcactaaatacctatagtcttttagtttgttcagattacatctaggccatttgtttactctaatagctaatagaatgtacagctgattttggtttaactgtgcgtgcatatttgtaatttttaaccaagaagtggcatatgtccacaaggaacttgttatctctgaaatactcacccatgagagctggattaattttttaagatgtaaatctatgctcatgtagaaataatataacaaggtgatattttgatgatcctctcaaatgattatctaactcttgcctgggcacctgactctgagtcagtatactcttgaatactttccatccttaatcaaatcaggagaaagagatggccatgtaagaaaattggccacggcagggttttataagagttaagcaagaagataaaacaacacatggccctgtgaaata

SEQ ID NO: 164988 - DNA, 120 bp, Homo sapiens
ccctaaaccagtattgcaagggactcccaaaatattgcaaacctgaatgaatgaagttgctttaaaatacggaatgaaaactctgccatcaaaattaaacattcaactaaatatctacta

SEQ ID NO: 164989 - DNA, 317 bp, Homo sapiens
aaaaataggtaacaggtgtgtttgtaagtttgtcaccctgggacatctcctccctcagaatctcatcaacagggtcaggagctgtgggaggtgttggtggtgtgagcaagctatacatagtaatcatctctagcccagtcctcaaatatatacatccagtccagactcatttctgagcttgagttctgacttcctatggcccattggacctttactcctgtgtgttgtagagctgtctcagtagcagtatgtctaagactgacttcattatggttaccactcaacaaatggactctacttttttattctctattttg

SEQ ID NO: 164990 - DNA, 474 bp, Homo sapiens
ttgatctccctcatggttgaaaattaatttatatgttgaaacccttaaattaaaattttccaatcttaacctcttctctgaactccagaaaacatatatacaattaccaatttgacatttcccttggatatctaataaatgtcaaattgaacatgaccaaaactgaactcctcatcttctccccaaatttacttctccagtgtcttccatatgtgtatacatacatatccttccaggtgctcaggccaaaaaccatgacattatccttgatgccctctcttttcttcacatccacagcaaatctgtcaaaatatcctgttagctttgccttcaaaatacatccggaatctccacagctacagtcctggtctaagccaccagcacctctcacctagattactgcaacagcctccttacgtgtctctgcctccatcgttaaccccctacagtctagtctcagcatagcatctagag

SEQ ID NO: 164991 - DNA, 396 bp, Homo sapiens
tgtgtgtgagtcactgtgtctgagtgtggagtgtgtgtgtggtcttctgagtgcatatgactgtgtgcgtttctctcctgttgcagctgtgatcaggccagtggcatgaagcaaagggctatcctgtgtggcacagagtaaactgggggaaaggctggtggcagggagacgagctgagagggtggtgcaatatgtgaaatgaaggcccagaggatgctcacttggctagccatggagaaagaaaagactacatcgggcaagtcctcttatttattttactctatagttgggaagaatgagatttaggagtgaaaggtaacttcataaaagacgtcatagtctctttaaattaggccagtttgatcacttgctgagtattttaccagccttattaaa

SEQ ID NO: 164992 - DNA, 315 bp, Homo sapiens
attgaatctcatttcggtaccagatactgcacttcacgataaactaatgtggccttgcccagcgagcgcagtcaccaggcttcagacactggtacctgttaggaacttagctgtacgggaggagatgagacagtggcccggatgggtagcagcagggaagggtcagatcttttcttcggctgtttgcaaattcagcagctcctcttctgtcttttctcagagacccgcccctctcacctgccatgagttatctctacctgggaaagagatgctagccaaagctacctccttcctggaaacaccagttgttaattt

SEQ ID NO: 164993 - DNA, 553 bp, Homo sapiens
tcaaaagaggaaaatatgaaaaagaaaacaaatgagttaagtgtttacagaagctaataaaaagtaagataataaatccaaagaaatggggaaaatggaaatataagataagaacaaatcaatgaaatagtgaacaaagatcaatatgaagattaacaaaggaaaaattagttctttgaaaggagtaataagatagcaaacctttgataagactgaataagataaatcagaaaaagaataagtaaaacacatactgaaaaggagatctacgaacaagtaattttttaaatactttttaaaaatatgaacaaacatgtaacaatacatttgaaattcattaaaaaaggattaatttatataaaggatataaaatattaaaatggcagaagaataaatggaaaacttgaatagaatgtaaaagttaaagatactgaagtggtaataaaatgtctccttcaacaaaacccttgggaaaatgatagggaacccgagaaagaagcaaataggcaatgaatatgaaaagataattcacagaatagtggagaaatacaac

SEQ ID NO: 164994 - DNA, 104 bp, Homo sapiens
gcaggcccagatgaagtgcgtgcacggaccatcaggaaagggactaaggctcctcaggctgcaggaaagattcacacagattttgaaaagggattcattatggc

SEQ ID NO: 164995 - DNA, 234 bp, Homo sapiens
actaggcttctggaagccaaggacagctattcctgcttttgactctggatggcacctctagttctcactaagcaagagaaggactgataaaatggcaaagagctgttaaaggctaactacctgtaatgtcaggagcatggcaaggcaaggattatgtatgtgtctaatctaagagtgaatcacagggctctgcttggtaagcctagcctctaattcattcctatattgcatggc

SEQ ID NO: 164996 - DNA, 484 bp, Homo sapiens
atctagtagtaaaacattttttcttctatttaagcaaacctatagctcaatcagttaaagagtatgaagaaccaatgaaaaacctaaaggacagtaaatattttggtactaacattttttaaaaattaatttgtaagtctaagtaccattacaattttactcatttaaatccaaacaaaataaattccaaatgaagagttagtcttcaattctcataggcaacatggaaatatagttactataaaacaaaagagatcaccattctgaagacatctaacacttgcagccaactgattggacttaatagcagtggtgcatagtggtcccctaacccattagattttcaaagtgtagactacatatctttcagtaatttggaaggcaagattattttcccagaaatcttacagtagtcttattgaacataattattctaaaggttgtcagagttctacaaaaatgacatatataattcacattcatt

SEQ ID NO: 164997 - DNA, 1102 bp, Homo sapiens
tgtaacctgccctttcaaagttttcatgataaaaactttaaaggttgatatgctatggaatcattacatattttatttttggtgaatatattcacctgattttacagaaacccttgatctaacaggccttgtcctctaatgaacacactagtgggactataaggtattaccataaaccatttaggggtgcgattttggagaatgtttcaaatattaaacaaactaaaggtaacagcagctaggcagattccaaccacagctccatgaaggtaaaactgtaacgtagtaaaatactgcctctggaactttccaagtgtctttggaacctttctgcagcatctctctgtgtattatgtccactcctgaacctcacataatctgccctgtcctgcagtctccactagttgattctctactctaattagtattttacctatgattaggtcacagtcacacaattttctagctatgatattagattggtgcaaaagcaattgtggtttttgccgtaataataactggagaaattttaaagaatatattaaattaaaaagcatgactaaaatgtaatctgactaaaataacattttcttttttttttctcttgagacagggtctcactctgtcacacaggctggagtgcagtagtgtgatcttggctcactgcaccctccacctcctgggttcaagtgattctcccacctcagcctcccgagtagctgggattacaggcatgagctaccgtgcctggcctgaaagtgtcttttaaaaccttgaagtgactctctgacaaactgaggaactttaactttgcctccatagattgacagaaaagtatgagtagtagcccttttgaaaatgatagaccaaccttatttctctgacagccaacagggttatgatacttattttataaatggtaacctccctctgacccttacttggagtgagttttcaatagtatgcattcaataaacattcaccatttttattccagccattactgtccttgtgcctcttactggaacctgtactttcatgctcagcaggtgtccagcattaaaagaagtaaagattactagaaagactcctcactatatac

SEQ ID NO: 164998 - DNA, 1047 bp, Homo sapiens
tgtaacctgccctttcaaagttttcatgataaaaactttaaaggttgatatgctatggaatcattacatattttatttttggtgaatatattcacctgattttacagaaacccttgatctaacaggccttgtcctctaatgaacacactagtgggactataaggtattaccataaaccatttaggggtgcgattttggagaatgtttcaaatattaaacaaactaaaggtaacagcagctaggcagattccaaccacagctccatgaaggtaaaactgtaacgtagtaaaatactgcctctggaactttccaagtgtctttggaacctttctgcagcatctctctgtgtattatgtccactcctgaacctcacataatctatgattaggtcacagtcacacaattttctagctatgatattagattggtgcaaaagcaattgtggtttttgccgtaataataactggagaaattttaaagaatatattaaattaaaaagcatgactaaaatgtaatctgactaaaataacattttcttttttttttctcttgagacagggtctcactctgtcacacaggctggagtgcagtagtgtgatcttggctcactgcaccctccacctcctgggttcaagtgattctcccacctcagcctcccgagtagctgggattacaggcatgagctaccgtgcctggcctgaaagtgtcttttaaaaccttgaagtgactctctgacaaactgaggaactttaactttgcctccatagattgacagaaaagtatgagtagtagcccttttgaaaatgatagaccaaccttatttctctgacagccaacagggttatgatacttattttataaatggtaacctccctctgacccttacttggagtgagttttcaatagtatgcattcaataaacattcaccatttttattccagccattactgtccttgtgcctcttactggaacctgtactttcatgctcagcaggtgtccagcattaaaagaagtaaagattactagaaagactcctcactatatac

SEQ ID NO: 164999 - DNA, 772 bp, Homo sapiens
ctttcagtcagatggctcttaaatctcacccaatgctgccatctaatggttgtagtctcagtaatagtgtttctttaatttagaaagaactgaaaagtttgtaaatgagctgccccctaatttacccatatttttgagtttggattgtcatatcagatttaccaataatagtatgcattgacatgttgtttttaagtttatgaacacattctctaattgccaacttttacttctttaggattacatcatttatttcacagtttatgtaccctttaccaatgttatattagaatcaagtgttttaacatatcattttacaatttgctgtgatagtaattgcttataactgcccataaggaagatcagtattctaatctatatttattagacaaggaaactaacccactagaaagtgtatgttcttaactgcagtatttagtggatatcgaataaataataagtaaatattcaaaaaactgaaagtggaccttatttatttatttatttatttatttatttatttattcattcatttattgagatggagtcttgtgatggagtcttgctctgtgcccaggctggagtgcagaagtgtgatctcggctcactgcaacctccaccccctgggttcaagcagttctgcctcatcctccctggtagctgggtttccaggtgtgcgctaccatgcccagctaatttttgtattttttagtagagacagggtttcaccatgttggtcaggctggtctcgaacttttgacctcaagtgatc

SEQ ID NO: 165000 - DNA, 531 bp, Homo sapiens
ttcagtctccatgctcatctttagtttattcttgcctgtgggtaggtaatggtaaagacatatcctaatatgaatctattatgaggtcttcagaggaaatattcagtaacaacccagagtactacaatgtttcattataattttgcaatatggacaagaaccataattttctaagtaccttcagagtaccaagactctcctagagatttcatatcaattcactgtaatcatcacaccaacagtggccaactatattaatccattttcacactgctgtaaagaactgcccaagactgggtaatttagaaaggaaagaggtttaattgactcacagttccacatggctggggaggcctcaggaaacttacaatcatggtagaaagcaaaggggaaacaaggcacattcttcacaaggcggcaggaaagggaatgagtgcaggaggaactaccaaactcttataaaaccatcagatctcatgagaactcattcactatcacgagaacagcacgggggaactgcccccatgattc

SEQ ID NO: 165001 - DNA, 436 bp, Homo sapiens
acagagccacctaagctgaagattcccttgagaacaagtactgtcctgcggtttcatggcctttcttccatttgtggttcttgcgaagtggaatttaaatgacatcttatcaagatcgataaatactagtttcccagtgctggaatatagaaaatggatggacaagtaaatcccactcagcacccatagtccaggcatggggacctcaacacacctgagccccaaacatcacctttcattctggacctaccatgaaagacttctgaatccaggaagagaaactgactgggcaacatgttattcaggtacaaaaagacttggactgtaactcaaaaatgatcaaataatagtgcatgcatcaagtgcaatgggaagctcttctggagagggagagaagcttccagttaaggtgacattgaagccaagtcctgtaaga

SEQ ID NO: 165002 - DNA, 400 bp, Homo sapiens
atattaatcttggtgtattcacacagtgaatgttcagagcaatagtgaacttaagcttgcccagcaatatggataagtgttttaaacacaatgttcaattaaaaaaaagtactagaagaccacctgtaatagtttgccattttggtagagctcaaaaacaggcaaactaaaccatatgctttaagcattcatgcaattataataaaactgtattttaaatgaatggatcgttaaacaccaaatccagaatgactacttctggttggggagaggtaagggcttaggctaggagagaaacacatgtactgggatggtttcataagagttcattgtgagtgcattcattatatactttatgactaacatactgtgttatgaatatgtataaaaatatagtaaa

SEQ ID NO: 165003 - DNA, 586 bp, Homo sapiens
ttgattaccacatctcccagggctgattagcaggtcactttggtgtgggtgtcccatgggtcaccccttgggtagcaggtcttcccttttcactaagcctctgttgcacagctccatggacattttgtggcacagggactcccctaagggggagccaaagcccaggcctcccctacaagggaaagggtcccagtctggtatgcccccttggtcagcaagtcttcctggcatcagttagagtatgtctctctcccctcggcctgttcactgtcattttcctcttcttcattggtcaacatgtgtgtcctgttgctgattttaaacatctctagtttgtagtctgtatctcccttgcactggcctttatacaatctttcccctggtaactcctggagcatctgtccagtggggccaggaagaatgcagagcaggagtggagctcctctcctccatatctgccaggtggtcctgggtccgcagcccgccctcacaggccctcctcactcccctaggtagatggccccctcagggcaggcccggcggacacccctccctctggctggcggatgcagtgcctagcggccgc

SEQ ID NO: 165004 - DNA, 187 bp, Homo sapiens
atcacccccagtttttacttttcttaaaccttaaagcgcggcagtcaccatgggcgttgtccatgctatccctggtgattctattttggaattgttgacgggcttccttcgtttgtcatatggagaaaataccttaccctgcagaactgccagagttcaatgacgtggcgtagctaagtacctccta

SEQ ID NO: 165005 - DNA, 623 bp, Homo sapiens
ttgctctgttgcccaggctggagtgcagtggcacaatcacggctcactgcagccttgaacacctggccttaagcgatcctcccacctcagccccattgagtagctgggactacaagcctgtgccactaagcccagctaatttttttttttgtactttttcacacagatagtatctcagtatgttgcccaggctagtctcctggcttcaaacaatcctcctcgccttgagctcccaaagtgctggggttataggcatgagccactgtgcctggccagcatggttactttaaatgctatcttggtgaacttaacgtaaatggaaaaatataaagttgtctcctaagacatcttttcatcgcatcctttcctccatggctgacaatgaagagaaagaagaaatatataactaagactctaatgggtttaaaaagaccaatgcaggtgcagtctcgccaataactgtaccagcttcgggagattctccagcccctttctctttatactcacctggggaagaatgattttggtgagaatttactcagtttaggctgtaatttaattttgcctataagaatcttcccctttctatgtctaatcttccctgatctagtaaaaagaccctg

SEQ ID NO: 165006 - DNA, 295 bp, Homo sapiens
ccagttgcctgcgtcatacagcctggcatctcacagttccctgtcattgctgcgtgtatttctgtttgatcttactgactagatttgctgcttactgatgacagagatcctcatgttttcctttttctcctttaaagcctcaaaagaggctagtcacacagaaatagcaatgatgatcatattgcatcaccgttcatcaaatttgagcaagtactttcaaccatgtcatctcattccatgctcacagtaagtgctcagtggaaaatgtgtggccccaagatggtaaagaactctg

SEQ ID NO: 165007 - DNA, 447 bp, Homo sapiens
ttaatataatcaacagggcatttagcacagtcaatatttctaaatgaatgaataaataagtgaataaataaaaccttatttagtatcctctgttctgaatgatccttctccaaactcaactattatccttaagctattgcctaattctctgcttcctttcatagaccgacacctcagactagggtcaggaagatgactcccagataggtttggaagaaatctgagaatatcaggacatgtgttgagttttctttgcaagcctgcaagcccctcagagaaatccaacctgtgggactggagtagtaaagtagtgtctcaaggagatgccttggaggtagatctgggcagtctcccagaatcctactcactatattgtggtacagagaaaggagctgagaatttgcaggcccagaaggaaggcaggaaaaggaagggttaagagaatta

SEQ ID NO: 165008 - DNA, 322 bp, Homo sapiens
taactttctttcaatccaagtttgccctgaattctatccacagatcctctgaacctccagttaatgctccctggacttcagtggggaaagtctgggcagctctttttgcctctagagcccaattcaattccaaagcttcgataccatttggaatcattttgaaatttaagaagttcttctacattcactatgcaacccagagcatcatgatacatgttcgaggtcacctgtttattcagagttcctgggaaatcaaaactctaggaaccaaaaggaaaacaaaaaaaagcaaccatcaccttatttaaaaaaaaaaaaaatc

SEQ ID NO: 165009 - DNA, 348 bp, Homo sapiens
tggccattataggtgagtactgaagaccaggaacttctgaggcagaggcctaagctaggacctcagtttcaccatcgtattcatttatatgtgaccatatgacctagaacaagtcacagcttgctaagactccatttccttctctgtaaaatgggccgctgtgagatctcatcaaatcacatgtgcaaaaccctgagcctggcacagtacagggcttaagaaataggatcttgggctgggcgcaatggccaacgtctgtaatcccagcactttgggaggcagaggcgggcggatcacaaggtcagatcgagatcatcctggctaatgtggtgaaaccccgtctctact

SEQ ID NO: 165010 - DNA, 545 bp, Homo sapiens
ttagtgggtaagtgtccaacagaggtctaataaactatgaccaggcaattgataatgccaagcggtagagacacagtgatctctcttcaaaatgcagtttccttcatcagaaagctatgtgtggggagccatttagaatcaagtttcaggcatagcaaatgtttttgatctttcctatccatacatatgtccaaataaatatagtacctggcagaatgtattattatcgtaagtaaagtacataagtgtgctcttaattgttattggtgttcagaggaagacgggctacttttgcctgagacatcctaacaggcctcttgaaaaaagcattggagcattaggtctttgaaggttggctagaatccaaacaagttgaaggggagcaaaacattttaggcaaaggaaatggcatgagaaaaatcacagaaatagaaaatttcatgtggaggacaaataatacttatggtcagatattgaaagcaccatccatcaatgttgaaatcctacacttttgtacagaaccatggattgaagcagttaggagt

SEQ ID NO: 165011 - DNA, 613 bp, Homo sapiens
caaggtttttctctgattaaactgtttgagagcaggctggcttctattcctttttcaggctgttgagcagttctctatgccaggtgctaggctggactattttctaatatttgttcccttatttaacctcttagctgctttgtggactgatgcttattatctgcatttgtaaaatattaataggaaagtggcttatgaaagccaatcagtaaagctatttcaaaaagaggagaaaaactgaacccgtttaccacctgttagctctgggaccgtgggcaagttctttatctgctccatgcctcgtttcccatgtctgtaagatgggagcattattattattattatttttgaaatggaggttgcagcgagcccatattgcgcctctgcattccaccctggaaaatctgtctcaaaacaaatttaaaaaaataaaaaataaagaaaataaaaggtaagaacataacttggggtgcatgaaagaagcagaacgctgtgttagacttctggaaaatacttttgtgtaccttagcctgggctgaaaaagcaaacagcttctcaaaatcagacattttaaatgaactcatttctgtgtggaaaatatggcttcatgatg

SEQ ID NO: 165012 - DNA, 579 bp, Homo sapiens
agcggccgacctattttttcacaattctataatgcacaagttacttttataatccaacaaggatatgttttcaaaatgacaagcttgcgcgggcgtggtggctcacacctgtaatcccagcactttgggaggccaaggcaggcagatcacctgaggtcaggcgttcaagaccagcctgaccgatatggtgaaagtccgtccctactaaaaatacaaaaaaattaaccagacatggtggcaggcgcctgtagtcccagccactctggaggctgagacaacgctggaggggcaggcaggagaatcgcttgaatccgagaggtggaggttgcagcgagcccatattgcgcctctgcattccaccctggaaaatctgtctcaaaacaaatttaaaaaaataaaaaataaagaaaataaaaggtaagaacataacttggggtgcatgaaagaagcagaacgctgtgttagacttctggaaaatacttttgtgtaccttagcctgggctgaaaaagcaaacagcttctcaaaatcagacattttaaatgaactcatttctgtgtggaaaatatggcttcatgatg

SEQ ID NO: 165013 - DNA, 501 bp, Homo sapiens
taaaatacaataatttcttgaacttcagtcacttatgcctataagcgggcatacaacaggggcacaataaatgtttgttaagtgaatgaattctttcagaactagatgggatcttagtccaactctcttatttaacgaggtccacagaggttctgcgattgtctaagaaagaaggctgtgttcatggcctttgttgtttacgtggccctgtgattctcttggctccgtgaaagtcctgatgcagacattccggccatctagaaaggcatgcagacaagccatccagctggcatgatcctgagtccagctttctttaaaagagcttccaaaactgcttaagctttgactgcacaaaacctgcatcacctccagttgagaaactcaagagaataagtaagttatggagttggagaccccagcttaactactagttttaaaatagtgaaatcaacattttcaaatctttgacttcactaagatttaataaagtttattaatcat

SEQ ID NO: 165014 - DNA, 581 bp, Homo sapiens
  misc_feature (198)..(198): n is a, c, g, or t
  misc_feature (204)..(204): n is a, c, g, or t
  misc_feature (285)..(285): n is a, c, g, or t
  misc_feature (299)..(299): n is a, c, g, or t
  misc_feature (335)..(335): n is a, c, g, or t
  misc_feature (344)..(344): n is a, c, g, or t
  misc_feature (359)..(359): n is a, c, g, or t
  misc_feature (363)..(363): n is a, c, g, or t
  misc_feature (368)..(368): n is a, c, g, or t
  misc_feature (370)..(370): n is a, c, g, or t
  misc_feature (391)..(391): n is a, c, g, or t
  misc_feature (406)..(406): n is a, c, g, or t
  misc_feature (416)..(416): n is a, c, g, or t
  misc_feature (476)..(476): n is a, c, g, or t
  misc_feature (494)..(494): n is a, c, g, or t
  misc_feature (502)..(502): n is a, c, g, or t
  misc_feature (512)..(512): n is a, c, g, or t
  misc_feature (515)..(515): n is a, c, g, or t
  misc_feature (535)..(535): n is a, c, g, or t
attggattaagtgaggagttgggctctgaacccatggctatccagctctaaagctcttctgtggagcattgagaccacgaggacaccccctaaagacagaattccccagggctttttttttttttttaaaaatggattttcgctcttattgcccaggcgggggtgcaatctcaactcattgcagcctcagcctcccangtagcngggactacgggcttgcaccaccacacccagctaatattggtattttaagtagagggggggttctccatgtgggtctcgaantccccacctcaggngatccagccgctttggcctcccaaagtgcggggatnacgggcatnagcctccgcgcccantggnaagantncagattatatggccaaaattncagtggctatctgtnaattttaatncttctcgctgtccccagcacaggctttctcagcctcagcgctactgactttatgagctanataatccttggtgggggnaaggaggncctgtcttgngcntggcaaattgtgtgcagcanctctggcctctacacactaaattcggttagcaccccaagcagcgac

SEQ ID NO: 165015 - DNA, 394 bp, Homo sapiens
tgttgctacttacagctcgggcttggagataagacccactactctgcaggtccacttgaacttctttgtaagcccacttgaactaatctggaagagtttcaagctttggtaccctatttgccaacagctgggtacaaaaccacctattgggtatgattttagggctattgtcaaggtccctgaaggtggatagactgaagacatctcttctactggtagctttatctctttaaaacattcttttattgtatctcactcaaaagactagctgtttatttatactttagtatgagattccatttgtttctttacaaggttttgataagggtctaagactactagatgccagtttagtgagggagggcactctgggggaagtaagcaggtatatggg

SEQ ID NO: 165016 - DNA, 485 bp, Homo sapiens
aggagaaagaggagggagagggtgatgctagtagtagtagtgtagtaaggatggcaatgttctgaaatgtctacttttctatgtaataactgaaatttttcttggaggctgagtcattctcatgaatatcaaagattgagcctgttattcattgaagagctcttgcaatataatatttgattctgtttgccccctaaacaatgtcttactcctatacaatcagcacggccactgagttcaaaagttatgtgctgtccccattggcagacaggcatccgcaccacagactagactgcctgtcccctgccctcactgctctcgccccactggccttttctcgaggtcccggccctcacttcatcagttccattcagtatatcccccaaacagcatttccactcagcctgccaaggagaaggaaagagagtatttagaatacgtccttcactttcctgagagaacagctttaagaaaagaaaacgtca

SEQ ID NO: 165017 - DNA, 120 bp, Homo sapiens
ctgggttttgccttgcggcttaggtctttctatttctctctctatccctcactgtcggtaacgcctaagaaccaagtttacttaatggtgtgtgtgtgtgtgtgcgcgcgcgcgtccgtg

SEQ ID NO: 165018 - DNA, 306 bp, Homo sapiens
ggtcttgaactggatcctggttggaataaagcagcagtgaaggacatctttagaacaactagagaaacgtgaaaatcaactgggtattcaatgacgctagggaatcgctataactctgttcaatgcaatgttattttgctacatagaaaaatgttttgatttttttaaaaagatgcctaggccaggcatggtggctcatgcctgtaatcccagcactttgaggggccgagatgggtggatcacttgagcccaggagttcaagaccagcctgggcaacatgatgaaaccctgtctctactaaaaata

SEQ ID NO: 165019 - DNA, 688 bp, Homo sapiens
aagtagacattattgtccccattttgtaaaggaactgatgctcagagtaacttcccaaaatcacacagtgcatatggcagtgctgaaattcaaacccgcatgtatctgcttcaacacctctcttcctgctatcataccagcattcctcctcatagaaattttgtgaaaaagcacagataacctccttgatttaaactagaaatttttgagagtcctgcattgtttctcttaataatccactacttatcatttatcatgagttgtgagatcctgctaggttcaggagagtgactgggaccagagctacagactcaggagtcataagaccttaagagctcctgggtgctgtgggcattggtgaggtggtcctgggaagaacttgcagagtaagagaagtagtactataggacctaatgaaacatgagctggaggtgggttagaaagagacagagtggtttttatttggtagaaggaaaacctgaataggaacctgttaggggagcccaagagcatagttgaagaaggaaagtgtggttgggagccaggaaccaaaataggataaggtggaaaataagccattggagtggatggccaagcgggaagttatgctcgcctctgtagtttgaaatcaaatttgcagaatctttaccttctctgtgagtatgccatgaggtgcggtgatagaacc

SEQ ID NO: 165020 - DNA, 333 bp, Homo sapiens
aggtaatggagagcgaaagatctgggatgctaatgataaagtcactaggaagttttgggggattgctggaagtgttatcagcagtaaggaaggcatttactcccttggagaacattgtgaaagaaatacaatattaggaaaagagcttaggaagctgaaagagcgcagaccaaaccagcagaggatggggggagctacaagtgtagagagagatactaggaatggacacctgtgagttgagtatggatccaaggtctgaactaaatagtatcccgagcagtttacacacagagtgacaagttagcaaacagggattgaggaggcagatggtat

SEQ ID NO: 165021 - DNA, 605 bp, Homo sapiens
ttggaaacctatcccagggagtcatctcagaggtctttaagctggattttaaaggatggatagggatttgttaggttgagtaggacagggagaaggaacagcatatggggaacaacatgggctgtgtagcataagacacagggatgagagggacaggaagagtggtcagaaacagcttgtgaatagttgtagggtcttttcttaaagtgttgagatttcctgtatatgatagaaatccagtgagagtttaggtggatatgggtgagcaagtggttcatgtaacatactttttcaggaggcacataatgaaaatgtagaagctggattaaaggagttagagttcatttacgtcctgtgagagctcaagtacatcagcataggggatagaaaagcacaggataccagaattagggacagactagccatgagctataaaaataggaaagagttgagtatgattcagaacttgtttagcttagagaactgttggtatgatttaacttgggaaatagaagaacagatttggacgaggaaagtagaatagtttgactttttgatcctgttaacgtttgacatacctcctggatacttaggtggatatgtct

SEQ ID NO: 165022 - DNA, 201 bp, Homo sapiens
cctgaagtaaagacataatatgcagatcacatttaagtaagggagcctaagggccacacaggtgatgctgtacccatgacaaagacagagtcttaaagaggttagagaggtggagaaagagaaaggaaatgaagtcccagttgcctagagcaacagatgctgactagaattttcatgcttgagtggaatgcgtccctgcat

SEQ ID NO: 165023 - DNA, 631 bp, Homo sapiens
ctgctaactgccccgtggacagaggcagaccctgtgatttgggcttaatttaagcacgtctcttccccacagggagcagccacatggcagtcctagtgctccagcctggccctgtggtcccagcttcttttctttcccagatagcctgcaggatgcaccttcccaagagtggacagccaggatgagcttattcagctctctcccagcaggataagtgcagctcaggaacccaagcagaggactgtgtgaataaccctgagtttccaggcaatctggctctcagcccccacactgcgctgccccttggacagtcagggagttggcagtcagcagacgctggctgagtttggatttgtttgctgatcctgtcatgatatgtcattaaacattcctggctggaagtcagacatgagagtgctggagggtgttctcacacccctgtgctgtggggaggccttcccttctttctggctgccctggtaccctctagagcctcctatctgctgctcggaggcagtgcctgcagcggctggactcctgcagcagctggaggtggaggaaagattcttaggccgtgagtcctcttcttccgacagcgaatttgagccctggtggagcaatgtccggcacg

SEQ ID NO: 165024 - DNA, 573 bp, Homo sapiens
ccccctccccgggtatagggttagaataagaattctgattatgaaagagataaaaagattcatttcaggagacgggtggtccccagtaacataatgtcaactgaaataagctggtaagaaattccctacagcaaagatggtggtgtcattataaaggcagtgagagtcaatatgctgtttggcatgctgcaatagaatgccttttatttctttcaaaccactaatgcttgcagcacacacacccacacggtgatgaaactcttgagtatttggcagtagaagggaactcaactgcagaatgggaggaaggcccaagagggtcagagcaaataccttctgtacactgtgcacaattgtgccttctttgttttgtcactttgtttctatagcctgagatgccctgtccaactccagaatcatatcttctgcatccctcacaaaccagctgaaatcctatcttaactgtgaagtcagttcctgcctactctagctcacactgaacttttgtcttctctgaacagctatagtactactcattttcctacctaatctcctattgttacttaaatgttt

SEQ ID NO: 165025 - DNA, 349 bp, Homo sapiens
tcggctcactgcaacctccgacttccgggatcaagccattctcctgcctcagccttcggagtagctgggattacaggcgagcgccaccatgcctggctactttttgtatttttagtagagacggggttccaccatgtttgtcaggctggtctcgaactcctgaccttgtgatccgcccaccttggcctctcaaaatgtggggattacaggcgtgagccaccacgcctagccaatcaattcttttaacattttttttacgtggcaggtctcctgtcaacaaatttttttttttttttgagatggagtctcgctctgttgcacaggctggagtgcagtggcgcgatctctg

SEQ ID NO: 165026 - DNA, 467 bp, Homo sapiens
cttaataatggtagaaaactggaaaatgaaagcaaaaacataatgttcacaatagtgttgctctttataatggtagaaaactggaaacagcctaaatcttaaaaaatagaggactgagtaaataaaatacagtaggttattactgtggaataccacacagctatcaggcatcatgttggaaaaggacatttaatcaaatggaaattgctcatattttgttaattaaaaagcaagtcagtgtctttgttcttaaaagaattaaggagttttttctttttatataaaacagttgagtttgtaattgataatgtaaataattaacatcattctaatttcatgagtatttgatctacaataatatattaactgattacaaagaaattcagaactaaataagggttatttaagcagtaaactgttctgtgtgataatttggacccacatttaagttaacccccaaagacagc

SEQ ID NO: 165027 - DNA, 468 bp, Homo sapiens
gtaagtctttgtgccaggaagttaagttagaaaaatgaataagataatatttaaagtagagacccctatactgaacactaaactaattggggtaagagtgaggacaataataatttctaggatagaggtaggatacctagccagcttgacataatcaagaaaagctgagcaatctgagatgggacagggagcataagcagggattagcctggtgaatacaagagaaaaagcattcggagagagagagcactatgagcaatggcatgatgttagaaacagcatgcttccatgattttgatgctttgactgagtgggtttgctttaagaaggaaaaatggccaattttataaaaattctacaggtagctgcaaaagaagaggctgctaaaagaagcatcatgtgataatgagaaatattctcagaagctgtacattttctgatttggtagataatttttttttttttttt

SEQ ID NO: 165028 - DNA, 292 bp, Homo sapiens
aggcaacacagtgcaacccacaacagatacacacttcgctgcaccttatcattttaggactcaagggggcagtgggtttgctgccacactcaagctggtcaacttggcagtgtcatgtgttcttcgtgagcgctaggaagctgcctggacctagagtaagtaatactagcagctcacttaagtaattatgaagggaaggtgcacaggacctaagcagcaggctgtggagaactgaccaaaaagacgagttagggcgctattgcaggtgagaaataaggggaccttaagtaag

SEQ ID NO: 165029 - DNA, 226 bp, Homo sapiens
cattatgatggtggaaatgactggccagtcaagcattggccattaattttgaatacatccttgaaaatcatgttgaaaaataaaatggtcagcttcttttaagtatctgatatacctctggactgattatggggactactgattattttaaagctttattttgtcaatggaattttacaggttttgacaatgaccttaatatatttttaaataagaataaatatga

SEQ ID NO: 165030 - DNA, 524 bp, Homo sapiens
aagtagctaaatttgaaagggaagaaagatacttacttctggatgaaagaacactggttctgacaaagaacaccttttgggaccccggaaacaggttgaataagaaacaagagtagtttatagtgaggtgttgagggatgtgtttagtagtaagtgtggtaatcagggcagtttgtgatcactaattgacagtcaagttcaaggaaaaggaacaatgagtgtggcaaggaagagacaatttatttgaatgaaatgataattgagagtccaggtctctagctgagggaaaggtgattgggtaagaagagcggatgggagtggtgctagatcaggaggtggcatttgagacagctggagatttacagggctggctggcactttaaaatgaagcatgtcagcatctatggtatgcatgagaactgtgaccagagactgtgatggagaagacaatgaaagagtaaaggtactgtcagagaatatatgctaataaagcatacaccagttggtccagatgtcatatttgt

SEQ ID NO: 165031 - DNA, 297 bp, Homo sapiens
tgtgtgacccccacctgtgtgactctgactgtgtgacccccacctgcgtgactctgactgtgtgacccccacctgcgtgactctgactgtgtgacccccacctgcgtgactccgactgtgtgacccccacctgtgtgactccaactgtggactgactctaactatgtgactgactccaactgtgtgactaactccacctgtatgactccaactatatgattgacttcaaccgtgtgaccccacctgtgtgactccaattgtatgactgactctaactgtgtgactccaactgtgact

SEQ ID NO: 165032 - DNA, 403 bp, Homo sapiens
gctgcagagtgtgtgtgtgtctgtgtggccacatgtgtgccgtcaccacgtgccatgtgtacacacgtgccaggcgctgtcttgagacattcgcgcagtgcacggcactggggacacgtggcactggctgaactgccacacagccccgttccagggcctcttgtcaaagccaagagggctcgtgtgtcgcatgtctgtccctcttgggtgcctgtgtgtggcttctgtctcatcggggtacggccgccctgcgtgtctcacatcaccacatcctggccgtccgtgtgagcgtccatgtgaccatcggtgtgagcatccgtgtgagcatgtgaccgtctgtgagtgtgcgacggtccatgtgactgtccgtgtttccgtgtgtgtccatgtgagtgagcgtcca

SEQ ID NO: 165033 - DNA, 192 bp, Homo sapiens
ccccgccatcctcgaggagaaaaacaaacatcctgttcttagaaaatcgtgttaagtgctgttcattcttttcccagaggaagcccattgcatgcgacagtgaacaatcacaggctttcactggggacaatagctccctagcttcctaactgacacttcatttccctcctaacctgaaactaagaaccttgt

SEQ ID NO: 165034 - DNA, 126 bp, Homo sapiens
tcttaatatttttaaaagttaaatattccaatcatgaaacaaatatttcaatcatgagaagttaaaccagtaaaataataataatttcctgtcttaggatcgtgtcccaaagttattaaaacttgt

SEQ ID NO: 165035 - DNA, 298 bp, Homo sapiens
tgcaatgtcagaactcccttctctctcttatttcttatggcaggtatgttttcatttcattttgttttagaggtcttttatgatagatcagaacttaaaagatgtttctgacatttgataaagtgaagatagttgtgaaactgttaaggaaagacagtagccatcaccttgtgtattagagccagagttactctttgaaagactgtattctgtataatatctacaattaaaatttttaaactttttttgaggccaggcgaggtggcctgattacaggcacgagcctgtaatcccagca

SEQ ID NO: 165036 - DNA, 643 bp, Homo sapiens
attctgtatttgtcttgattggctagcaacttagaactttttaaaagaggcaaagatagaggagaacaaaggaagtaacttatggaatgctgagaaaggtaagaacacttttaaataaggaagaggaatacgctatgacctaatgcttgcttggaccagtataagcatgccagggcaaatatttaggctaaattgtgggagctaagaacataaagtacactgatttgtttattatggctagcagatatttaagaatgtttgcaagggtctttgaataaattttgcttctaagagaagttactatttattcctaattagacggggaggaaagtctttgaagaggaatagctactttactttttacagctggaaacaccaagatagcttaaaaccacctggaggtagtcaaactaccttgggaaaaggtgagtcatagttggcacagtcaattattcttagatcaataataagaactgtcagaaaaggtaaaatgtaaaattataatttacaacaaaagaagttgaaaagccttagaacagtatggatctgggccccttccacactccctaatctgggagttactatgtgggtttgattgactattgattatttatttatttttagagacacggtctcattatgt

SEQ ID NO: 165037 - DNA, 170 bp, Homo sapiens
aaactgttaaagaatgttttgccactaaactattgttttacaacatttcattatgaaaaatttcatacagaaaagtggaaataattttatagtgagtacttgtacactgattgccaagattctgtaaacaatatttccctctgcttgtgtcatctttcatttgtcaattc

SEQ ID NO: 165038 - DNA, 310 bp, Homo sapiens
aatggtgtcaagaagtagatgacaggagatgatggccttgaatggggggaccaccctcagctaaacacatcggtgctgacaacagggaatgtggagtaggcggggacagaggtgtgtgcatggggtagagggaattctcctctggctatttctattttctcagcgagacagcagcagggctatcagctgagagtaagcgtggaggggaaggggctgcaggctgaggggagggaaggaggcatgccttctgggagaggggtgaacagagaaatgcagaaagacgtcaaaccacatcataggctcactgtgg

SEQ ID NO: 165039 - DNA, 369 bp, Homo sapiens
tgagagcaagatgaggaaagttgaggagctgatggcagagcccccgcgagggaggccgagctgatggcggagcccccatggggaggcccagctgatggcagagcccctgtgagggaggctgcatacttcgtagtgataagataggaagggggacggaaagaagacaggcggcgctggtgtcctgggaagactgtgagcgctggcctcggactctgcaggttaaacacaggcagcaggggcaggaggctgtgctaaccaagaggagaatggccctgggtgctgcggggagaggaggccccgcgtgaatggctctgccccatcctgtgggcttttgtctctgtggtcttagagacccgccttctttcctgg

SEQ ID NO: 165040 - DNA, 324 bp, Homo sapiens
cagatagcgtggttggcatttaggtatgaccatagggttacttaatcttgaagtagtacaagtcttcttgtggtgggaaaaagtatatttttgggaataagaaggaaggatggtttatacaataaaaaaattaggaagtcttccttgagggagtcattcattcattaattgatccattcactgcaatgacaaacagtctgcttagtgatagaaatcaaaagttgagtaggaatccttgtcttcccttgaagggtttttggtttgtgggggctgaaagaaagtcagtgaagaaaaaagtcttgtgtttactttagcaatgtaaaa

SEQ ID NO: 165041 - DNA, 443 bp, Homo sapiens
atccatactaacttgcccagtaaaactttctttagtcctttactgattccaagacttattttaatttttgcctttcaattcttatttcctttcccacagatggtactggctaaaacagaagcctgtaaaagtaaagcttaaaagacgttctttcctttttttggctttaaaatgtttcacatgactacatgatagtcccacctcatccacccacacttacatttttcctcttcctagcattaataggtctaaacatgcagttaggcaggaaatttagaataagaaactttattattttcttgcctcttagaggagttttcaaaaaaatattggaggggttctgattccaggtacaacggagtaagtgtactcacaccaccctgttcctcccactgaatgcggctaaaaaacctgggcagaataagtggagcatctgaggactc

SEQ ID NO: 165042 - DNA, 392 bp, Homo sapiens
agtgccgcaataaacatacgtgtgcatgtgtctttatggtagcatgatttataatcctttgggtatatacccagtaatgggatggctgggtcaaatggtatttctagttctagatccctgaggaatcgccacaccgacttccacaatggttgaactactttacagtcccaccaacagtgtaaaagtgttcctatttctccacatcctctccagcacctatttaattttcaacctccttttcaaacacataattttaaataccattataaatgagctgtttaatatctgaacatgtaaagtcagtaggaagattgtgttatgaatttttaaaacctaatcatttttagtcattttcgtaatctattttttcatttgttacactggtttctgga

SEQ ID NO: 165043 - DNA, 350 bp, Homo sapiens
gtcaaaggggccctggggacttaccgagcccctgcctattggccaggcactgtgattgtcctcggtgccatgtgccatggaagccctctcagaggtcgaggggaggcaggtggagacagagcctctgtaggcctttcaagctgtagccccagagcccagaggcagccgaattcatgtgtgcagtcagagagcacttagtgggcactgtagtcaatcagtgagcgcttactggacaccacaggcagctcgcccctgagttagcggcagctcgtccctgagttgagcagctccccctaagttagcagctcgcccctgagttagcagcgcgcccctgagttggggatcctcta

SEQ ID NO: 165044 - DNA, 447 bp, Homo sapiens
aaaattataaatggaaggcaggtgaataaacacccccaaatccccagctctcttctggtttcccataatattaacctgacgtactcacttatttactattgggggagagaggaagaattttagatctctttaaaaatatcctttttagtatattgcactattttcaagacttgtaccaaatgcatactgtggattctcattatcaaaacattaaaatgctggtttttaagaacctacgaataagaaagcaaggtttaccaaaactctgtaaaaataaaatatgaatggtcagagaaggagccaaagttttactctagacgtgagttacttaaaaatctgttacaactggaatttttggatgtatgtagaatttttaaacataaaaattaatatataaaacatagtaattttaaaaaataaaacggtactgtttttactaataccata

SEQ ID NO: 165045 - DNA, 374 bp, Homo sapiens
gtttctccgtcttttccagtacttgatgatttttagacttcagatattttgccagtcagattgtttttctaacatatttaccttttctctttgttgttttttaaggttgcctcgatgatactatgtgttctagatagcaattgtctatatatgcatgggtctctcttgtctatatatgcatgggtctctcttgttcttatctttaatttttccatccctggttaatgttacactgtttttaactactgtacctttggagtaagtcctgccatcttggaagacaagtgacctgttctccgtcttcctcctcctttgtcagaagtttgataattttcttcataaaggttttacaccatttttaatagatatatttg

SEQ ID NO: 165046 - DNA, 117 bp, Homo sapiens
acgaaaaagagatccaacacaagagagagggaaagggaatccctagaatgatagtaaaggaatatggcaactctatactgggaaccgacagaagcaagttcagattgggatgtaaaa

SEQ ID NO: 165047 - DNA, 707 bp, Homo sapiens
agccctccttgattcacaagccctggccaagaggtcttgagtgtaaaacagaggaaaggtttagaggtggggtatgagctgggtggtttgtaaaaagatgtaataagacaaaataacttctttcaggagatgactagttaggagacaactgagtacttactatgtaccagttcatgtgctgagagatttgtgtgtatttatctaatttaatcctcacacttacactttgaggtaagttttattgttatccacacatgtaggttgatgaaagcttgcccccgccccacttgctttaatgttttctcctaagcattttcagacttatgggcacatgtattcacagggtcagtgatttaggtgttttaaaaggataaaattgctgagggagagcctgagttgccagaactgtagtcgtcaaaagcttgtgtaaggctacttgtttcactgtggaagatgtctttgcattggggcagggcagctgaaagcaattatttattcatttaacaaatgtttattgagtctctattctgtgtagggtatttgggatgcaagataaaaatcccttcttgaataagtttattgtccagtgggagtcatacaaagtgaacattatatcagcatgataaggccttttaaatctatatgttagtgaatggtctgaatattagaatcataattttggagaagaaagggtattcgaatttttt

SEQ ID NO: 165048 - DNA, 416 bp, Homo sapiens
aagacgcatcaggagacagtacttcaagtgtaagcgatgcggcgaaaatcctcgcttccttgtcgttgccatgcgaacatagtgtaaatatataatctcatctattcttagagtgccaccaaccttgaaatataccagaagctagttagaaacacatttcccagttcatcacaacattatatttagtttatcaataaaaccttatctctacagacttactttaatagctcacatctataagttaaaaggatatcatagattggacatccctaaaaagtagatcctaaaatgaggaattgcattgttatgggatctttggggtgctgcttttctggctagaaaactctgtggttagaggtgtctttgcctgagttcatgtaagggcctgaagggactcacgccaacgtaggagtgag

SEQ ID NO: 165049 - DNA, 509 bp, Homo sapiens
tttctcttccccaggggcctcaccttcccttcatgggctttctgcccgcctttgggtacccctagcgggcccgaggctcaccctggtttcgagccagggatgctagtgtccccggggcccagcgcagtgctgatgggaagggacttttgtccgtggggaacccaggacccacttctccgaggtgagctttttttttttctgccgcaggtgcctcacctctcctccctcaaagctcaccttcccctcatgagccctctgtccgcctagaggtaccgctagcggcccgaggcacaccctgtggctgaaccagggactccagggtccctgcggcccagcacaggcgctgatgggaagacacgttcgttcgtggaggacccaggccccgtttctcagtggcgtggttttttttctctgcccgggtgcctcaccttcctctaatgggccttttgcccgctttggggtacccctagcgggccctattcgcaccctgcgctcgaaccagggtcgca

SEQ ID NO: 165050 - DNA, 860 bp, Homo sapiens
ggggaataagcttccaagagaagttttgttctatgactacacaaaccatgcattctttagaatgattttctaagcctgttagttcacaaggggagtctgggagccagtgattcaacgtaagtaaattgcactgaagccccaggcatggtactagaagctgtcttagtggagcagtatatatgcttagtggagcacatttacaaacaatgacaccaatttatactgcaatctacttctcctcattgagagttcttcggtttaatcatgaataaattagcaagggtgatgccataaaactcaggggtgtaaaatcttacatcttggtgcattgcaacttttaccaaataataaataacatctcgacaaatttttaaatgcttactttctaaacagtctatgcctggctaaaaatgaaacaattcaaaccaaaccaaactaaccttactctggataatgtgaccgtactataaatttattttataagtagcctcttttttttccttttatctcacagcttcattcaaattaaatgattcaactagaactttctcagtatctacttctggggccatctcggtgcaacgtgctctacaggataaagagatggagaagacatcaacatttcttgcttcaagagtttacaaatcacttgcctggttttcctcataagaagtcaacagtatttcttgctgaaatttaaattttacatgtaatttttagtatacatttgtctatgcctgtaacaagaagcacttgtggaattccaaaggaaaagttcaccaacgattcctgctaaaactttcagcactcaatgttgtggcatctcagtgatctcagcagaaatcacgctcaatcccggc

SEQ ID NO: 165051 - DNA, 808 bp, Homo sapiens
ggggaataagcttccaagagaagttttgttctatgactacacaaaccatgcattctttagaatgattttctaagcctgttagttcacaaggggagtctgggagccagtgattcaacgtaagtaaattgcactgaagccccaggcatggtactagaagctgtcttagtggagcagtatatatgcttagtggagcacatttacaaacaatgacaccaatttatactgcaatctacttctcctcattgagagttcttcggtttaatcatgaataaattagcaagggtgatgccataaaactcaggggtgtaaaatcttacatcttggtgcattgcaacttttaccaaataataaataacatctcgacaaatttttaaatgcttactttctaaacagtctatgcctggctaaaaatgaaacaattcaaaccaaaccaaactaaccttactctggataatgtgaccgtactataaaaattaaatgattcaactagaactttctcagtatctacttctggggccatctcggtgcaacgtgctctacaggataaagagatggagaagacatcaacatttcttgcttcaagagtttacaaatcacttgcctggttttcctcataagaagtcaacagtatttcttgctgaaatttaaattttacatgtaatttttagtatacatttgtctatgcctgtaacaagaagcacttgtggaattccaaaggaaaagttcaccaacgattcctgctaaaactttcagcactcaatgttgtggcatctcagtgatctcagcagaaatcacgctcaatcccggc

SEQ ID NO: 165052 - DNA, 263 bp, Homo sapiens
ggcattttctattgtgctgctattgaccaaggaggaactaatttggagcatggtgagtctgaggtgcctggaggaaacctgagtggagactaccaggaaggaataggttctgaaggtctgaaaccccacagtgggatcttggctgtagatgagccatgcaattactacggggctggttggattcccaaaagagaatctatacagtcagaagggattagactatgaggagcaaaactgaaaaggaactgatgggagaaatatga

SEQ ID NO: 165053 - DNA, 243 bp, Homo sapiens
tttagaattaatggatgagttcctcaaaaaccataaaccagcaaaactaaaccaagatgaaagagataattcgattcatcctataatcattaaagaaatttaatttatattttaaaagaaccccaagagaaatattcatgcctagatggtttcactttagaatcattccaaaaattttaaaaagaattaacatcaactttacttaatatttgacagaaaatagcagaggaaaagcattttaag

SEQ ID NO: 165054 - DNA, 602 bp, Homo sapiens
gcgggcacttatggcggtacattcctggcaggccctgttccatggaaaactacagaaacccactaaagacaaggccatccaagactcactctccataagaatcaagatttgggttacactgcaggtaacaaataacatccaaaggaggttttggaagtgggaagacaatgtggaatgtactggaagaaagcagctctaagcaccagcagccccgcccccaggacctcagcagctgtattggaagccatctcctccccatctttctctcattgtgggtgaagaactggtgcccagcacaatgggaggaggacatcactgtcaccatcacacactgttactgtgacagagggaaggactggaattgtgtgtcatctgtacggaggactctgatttatttttcccccttgagacagggtcttgctctgtcgcccaggctggagtgcagtggtgcagtcttggctcactgcagccttgacctcctggactcagccttctgagtagctgggaccagtagagggagggggcgcacaccaccacacccggcttatttattgtattttttgtagagaagcagtttcactaagttgccgccaacgaatggt

SEQ ID NO: 165055 - DNA, 601 bp, Homo sapiens
gcgggcacttatggcggtacattcctggcaggccctgttccatggaaaactacagaaacccactaaagacaaggccatccaagactcactctccataagaatcaagatttgggttacactgcaggtaacaaataacatccaaaggaggttttggaagtgggaagacaatgtggaatgtactggaagaaagcagctctaagcaccagcagccccgcccccaggacctcagcagctgtattggaagccatctcctccccatctttctctcattgtgggtgaagaactggtgcccagcacaatgggaggaggacatcactgtcaccatcacacactgttactgtgacagagggaaggactggaattgtgtgtcatctgtacggaggactctgatttatttttcccccttgagacagggtcttgctctgtcgcccaggctggagtgcagtggtgcagtcttggctcactgcagccttgacctcctggactcagccttttgtgtagcgacgggccagtacgagggatgggagcggcacacacaccaaactccgggcatgatttctctttgtagattttgcggtagagatatgcatgtttcatctat

SEQ ID NO: 165056 - DNA, 301 bp, Homo sapiens
agagtaacagtggtagtcacaaaatagcctttggaatttgatgatcctgattttgagttcccttttgatcacttctaaaaatgtgattttgagtaagttatttactgtgtatgtctcggtttctttatctaaaatgagtacattcataacatcttttttcataatattattatacaaatttagccagatattcatgtaaattgtctggctcatgttaaaaaatgatagctattattatcggctgttacgcaggtgccaaaacttgtagcagaaattgctattatttgacaacaccaaaaag

SEQ ID NO: 165057 - DNA, 805 bp, Homo sapiens
atggggtttcactatgttggccaggctggtctcgaactcctgacttcaggtgatccacccccttcagtctcccggagtgctggaatttacaggcatgaccattgtgcctagctctaattggttttttgaagttccttctaacatggattctactacctttagaggatatttgggaattatttctgttaaaaacctatacaataaaggatattttaaaaagttaaaatatattttaatatatataattttatgggcaattatagtattacaaaatatttttaaaagatacagggttctttaatttggaatacaaaagtaatcgtaatctaatataggtatttatgcattatgcagtctgatttaagagtttcctttacctttgcctttccagggttggagatgcctcagagagtaagaagtatttgcttgagccataacattccttttttttttttaagcttcaatccacaaagtttttctttgattagattgatttattttaataattgggaaaaatgaattatgatagtgttgaattaaaatattttctcaagggtgttgggtaaaagagcaggactatactaattgactggagaagccaatttaaagctgatccacagtagtatatgccatttcatatgtaaagggtaagttttacttatactattgcaaaggaagatactggaccatcttgggttatttggcatttcttccattctgtctagttttatccaattttcaatgttaataactttttctagagactatcttgaacataaggaataaagccaagaagaaaacaggg

SEQ ID NO: 165058 - DNA, 305 bp, Homo sapiens
ctacaatcccagctactcgggaggctgaggcatgagaatcgcttgaacccaggcggcagagtttgcagtgagccaagattacaccactgtactccagcctgggtgacacagcaagactccatctcaaaaccaaaccaaagcaaacccttttttcagtactgaaaaacaaaaacaacaacctctggttactgcctcatttctctgtttctcttcaaggagttgtctattcttcctcttcctgttaattcttcacttttccttttcgccttaatctgtgctgatacagttgatgcctccctctttct

SEQ ID NO: 165059 - DNA, 271 bp, Homo sapiens
tccatacctgtgttcattagtttacataactgaattgattctaacttacatataactagttattgttaagaaatgcctcaaagaggccaggtgtggtggttcatgcctgtaatcccagcactttgggaggccacagtgggaggatcaccaggtcaggagatcaagaccatcctggtcaacatggggaaaccatgtctctactaaaaacacaaaaattagctgggcatggcaacgcatgcctgtaatcccagcaactcaggaggctgaggca

SEQ ID NO: 165060 - DNA, 369 bp, Homo sapiens
tattatattgtagaggtctaaggttctggagtcaggcccccaatatccatcttatgataagtctgtgcccttgcaaaaatatttaccttattgaaccttggattttatcatctgtaaaatcaacatattaatagtacttaacctcccaggttgttataaggattaaatcagataacctgtgtgcctgccacacaacaaatgctcaataaatgttggcttttgtagttatttccagaaactgtatttgtctagacttatactcgagaacatagaccagttattgtacttttggaaagtttaaaattcattattgtatcataacacataaaactcaattcttagttgccctatttagctttgtgttcttta

SEQ ID NO: 165061 - DNA, 300 bp, Homo sapiens
tagccatagaatgttccgttactcaaaacttattaaatgtattgtttttgcttaaggacagaggaaataataaggctgcctctattaggacatcgagatctgtggtcaagttcccgagatagaaaaagaaagaaaaagcatgctagaacttgagatgtcccaacttccatcttcaaaatatatcagcaaacacttatatcaaaacatttaaaatcaaagatcacagtaaatttaaaggtttagtctcttgtccttaatttttgaagttagacttgcatgactcccatttagcattctatg

SEQ ID NO: 165062 - DNA, 567 bp, Homo sapiens
tctaaaaacatatcatcgagaattctatgtccacttgctgtaagctgtgaatctatcccagtagtcctcactagttctacagaaatgcatgcctagagtctgaggtatgtgtcatctccagaaacaggttgacttttaaatgtgaatagctatttttaatgctccccaaaacaaaacctattaaactaaaactaaaaacagtttccctagatgatgtggttaggctatttacatttaggttattaaaaaattgcattttcccagatagttcaaaataaaattatgtaatgtagtagagatttataacaaaaaacaaattaatatattatttgtaatctaatgtttgcaatgatacttttgatataaggcaaagaaacataagcagagcagaagcccatttttgaaaatatttcacccatcactctggtggaagtaacagatcataggtacaattaaggattagctactaaattaaatgcaggaagtacaaagatgagcaagtcatgctcttgaaatatatttacatttcaattgtaaataatatatatggttaataaagtttccaaa

SEQ ID NO: 165063 - DNA, 333 bp, Homo sapiens
gtaaagacgaggttttgccatgttgcccaggctggtctcgaacttgtgagctcaagtgatccgcccacctcagcctcccaaagtactgggattacaggcgtagccactgtacccagccttggcccccctttttcagcacagcccatacatgggttcctcagtgtggcagacaaacattcgttagttgttttctcaatatccattctttcttccctactggcagaactccaggcagtgtgaccacctgaaaacttacacttcctagcctcccatgcaggtagggatcgctgataatataggtgaaggcactgggaaatgggcacatctttttgc

SEQ ID NO: 165064 - DNA, 214 bp, Homo sapiens
tgtttttaatattaatagtagaagttttcattacatgttaggtgacctctgactgtccaccagggcaggatgctaaaacaatgactattaagtgttttgcccagtggtaaggcttgtcaactatgagcttactttgggtgctctggccatttctttgtggtacctctaatcccaagtttcttcaatgttgtctcttgtattggcagaatcctct

SEQ ID NO: 165065 - DNA, 175 bp, Homo sapiens
gtatgtacaaacacagaaaggttcacctgtttacagaatacgtaggaggccaggtgcaatggctcatgcctgtaatcccaggactttgggaggccaaggcaggagtatcacctgagcccaggagttcgagaccagcctgggcaatatggagagatgccatctccacaaaaattaa

SEQ ID NO: 165066 - DNA, 296 bp, Homo sapiens
tgctctagccggcctcgtcctcaggctgcagccctgaggtccctgggggctcaggcgggattctggagtctttcctttccacacacactccagaaagtgggactcactcctaatcatcgggatggctgttctggttcccagcactcactgggtgccaggctccaggctgggccctctcctgcagtctttctctcagctccatgaccataaccggcagctgggctctaggtgactccccagcctgcagagtcagttcagagatatctctgccaccctgagaagcccagagcataagg

SEQ ID NO: 165067 - DNA, 640 bp, Homo sapiens
ttagtaaaaattgatatgttttggtgggaaatgatacatcatctctagcctttaggcctgatttaagcaaaatcattgttctgttcattgttcattgttccttgtctgaattattttgcaacttcttgtaagttgaaggtaactgatatataaattctactctgtctgttagacatttggttcatccacttcaccttggaaaaaccagttttgtctccatttgtcaacattcctttactccataaaaattttagctcttttgacttttattttgaaccagttataatatctgcctggttccctcataccatatgaataaaataaatccttaatcaatttttgtgtctgtatgaaagtcatgattttaccttgttctgaaagtgaactttctgaaagtgaacttttaacaagatatttaattcctggttacctttctgagtttaaatcatagagctagttatgttccccctagtaaggaactttatgatttaacaaaaagtatttacaaaagaagtgcttgatctgccatgacatataacttggattataacttaagtagagcctcaagtgtcattatagtatcatagcttgttgttcatgcatctttcattatgattccatatagcaaacaagtctaggg

SEQ ID NO: 165068 - DNA, 456 bp, Homo sapiens
  misc_feature (443)..(443): n is a, c, g, or t
gcagattttaacagtcggcagaaacccagagctgaaatgggttccagccagtggcatacaaaggaggactgtcttaaagggacagagccctctttccaagccagaggacgatacatgagcacacggcgggctctagtctaaaatcctgcaacccgcactccaccggccacaggcagatgcccggggatatgccataaagttccacggaaaacgcagctctctgacagcaggttctgcttggcagacacatagcagctgccaggaccacactgtcctaaatctaccgtcagggtggtgccattcatcagagccatcgccagcgcggaggtgaagcggacccaggaccccaacaccatgttccgaggaaactcactggcgtccaagtgcatcgacgagaccatgaagctggcggggatgcattacctgcatgtcaccctgaagcncgccatcgaggag

SEQ ID NO: 165069 - DNA, 565 bp, Homo sapiens
gcagattttaacagtcggcagaaacccagagctgaaatgggttccagccagtggcatacaaaggaggactgtcttaaagggacagagccctctttccaagccagaggacgatacatgagcacacggcgggctctagtctaaaatcctgcaacccgcactccaccggccacaggcagatgcccggggatatgccataaagttccacggaaaacgcagctctctgacagcaggttctgcttggcagacacatagcagctgccaggaccacactgtcctaaatccccgtgggtaccgtcaaatgaacgtgtccaaggcatgctttaggaccaggatgtctctttgaggtcatccagtataatgattaaccagcatccttcttacagcctctgcctttcaatggataaaaaggtccatatttaaaccaacaatgcggggaaacattttataaagtaattaaggagtgagccctcatttgcggagaaggtaaatatacaaaaggtaactaccttagtcagagttgctcccaggccaaggaggtcattgccatttccttttcatccctcca

SEQ ID NO: 165070 - DNA, 320 bp, Homo sapiens
atgaacgtgtccaaggcatgctttaggaccaggatgtctctttgaggtcatccagctggcaccagacccctctgcctagctttcaaatacatcacttgccttatttttttccactataatgattaaccagcatccttcttacagcctctgcctttcaatggataaaaaggtccatatttaaaccaacaatgcggggaaacattttataaagtaattaaggagtgagccctcatttgcggagaaggtaaatatacaaaaggtaactaccttagtcagagttgctcccaggccaaggaggtcattgccatttccttttcatc

SEQ ID NO: 165071 - DNA, 585 bp, Homo sapiens
cctccctcgctctgatccagccacactggcctccactcttcttcagtgtgccaggtgcactcggggcctgtgccctcagagaggcagctccccccacagcttcacaaatacgactgcttttcaaagtgtcatctcctcagggaggccctccctgaccacagtatctaaatcctgagccgcaaagccccttcacttccttccctgcctgttgtcctatgagctggtcttgcgcattccttgatgcaggtctctgccgtgacttggctttgctcacgtggtgtccttggccgcgagccagtgcctgctaggtggtgggtgctcaacattcatcataagccttttgctggctaagcatcctttgtgctgggtaacggggggcataggggatgattgcccctactgccatcccccaccccagtgaagaccatgagtgatagggatgctacaagccagtgctctcagggctggggtgggcctcccaaggcccctccagctggccagggaagagggcaggctgaaaggcaggctcaggtgtgtcagccccctgacctccccgcaagggcaccatcaggagcccccatgcta

SEQ ID NO: 165072 - DNA, 121 bp, Homo sapiens
ctcacattcagacgatttgtgttttccccataaccaccgtcctagattcaggtttccattgccctacactcaagttgtttaacaaaataactaacttacgtctccatttccaatccccttt

SEQ ID NO: 165073 - DNA, 496 bp, Homo sapiens
atttacaggaataaagaggctttctcctcttcctctttttctctttatctctcaatgagtacgtttgtctgcagttttataaagctgtattgtgtgtgtacactctttggtgttttgcctagcattatttaatggtagttatagcagcagcattaacacatcttgtacttattaatgtgccaggcataatttttatgtactttatgcatatattatttcattcagtccttagagcaaccatgtgaaataaatattatctccattttcggatgaagaaacagaacaaacaggttaagtgactgcctgagatcacatagccagtcagtggcagaatcaggattgagctgagacactcttattccagcatctgtgctctattttcatgtattgctattgctctcaaacttatgtggtgtgatggaaatcaggaaactttgattggatacttgattctgccactaatttatttgtgaccttggtcaagtcacttgtcgtc

SEQ ID NO: 165074 - DNA, 363 bp, Homo sapiens
ctggtggcccctcctaacctttagtaccactgtcctgagctctacaagccactcttactgagccagactctgtctgtccagggaggagatgaactcttgttttgtttctctttctgaagaaaacagtttttgttggagggggatctatacagtggtgagaatgcagtatgaaacgtgcttcttccatgggccatgaggaagatgactcatgttcccttaccatttaaatccggagacggatgaaaagaatttctcttctgactctgaatagctggcacatggaatcaagttgtggatgcattaagccaaatgcaacgtaatggataaaaattgtaaaatctttcagtggcattccatgccttg

SEQ ID NO: 165075 - DNA, 382 bp, Homo sapiens
agaaaatggcagccagtgggcagggcagccaccggcctcttcttgctaatatatgcagcggatgtggcatttctgacaatattgcttctgcctcacttgccatttaatgttaagaggcttctagaatctcctgcatttaaagagtaatgactgttttcagggtaaatgctctgttaaataaccctggattattgtgtcgtgttattacatttataaaatggcatttcaaaaaataataattgttttagagttaattgatgtttttaaccatcactgtgtggagaatttttattcagaagacagggagtgagcaagggagaaagagatttccatcgagagagtcggtactgaaaatagaaacctttcctgcatgtgaaatcct

SEQ ID NO: 165076 - DNA, 795 bp, Homo sapiens
ggtatcgcccatggaaaacagaatggaggttcctcaaaaaattaaaactagaattaccagcaattatatgaccagcaatcccattccttggtatatatccaaaagaactgaaaacaagatctcaaagagatatttgcacatccatgtatacagtttgccaggggggaaaagggaggaggggcagcaggagaaaagaatcttgtcctcactccagatgaaaacaattgcaggctcctgcctgctgtgtcactttcaagtaatgacagtctgatggtcacatcaagtcacaaacatggtcttactagagtaattcagtgagtcagttcattctattcatcaacaattccattttcactcaaaagatttcttccccttctttgcgagagctggcagttcccagggaggtgaggggaaagtagtcattttcttctgtcttgcaccatgcgccataatcctcctccactcactagctactggcttggatcccatgcccaaatggacagacggcaaagaggtaagtggttatgtctggagctactttaattggcttctgagtggcacagttgtaagctgacttcctgctcactgggctttgcagctatataaagctgcctctcacttggggcacttttcttgggatctttggtgattcccatctctgggaacctctccagttgtaattctcagaacaagggagaagcattccattccagctgctattgccctcagcccctggttctctggcaatcccgtccactcagacttcactctttggcttcctctcaccctcccaga

SEQ ID NO: 165077 - DNA, 542 bp, Homo sapiens
tactgaggctgctcaccctcagaccctgctggacctgggggcttcacctgactacaaggacagccgcggcttgacacccctctaccacagcgccctggggggtggggatgccctctgctgtgagctgcttctccacgaccacgctcagctggggatcaccgacgagaatggctggcaggagatccaccaggcctgccgctttgggcacgtgcagcatctggagcacctgctgttctatggggcagacatgggggcccagaacgcctcggggaacacagccctgcacatctgtgccctctacaaccaggagagctgtgctcgtgtcctgctcttccgtggagctaacagggatgtccgcaactacaacagccagacagccttccaggtggccatcatcgcagggaactttgagcttgcagaggttatcaagacccacaaagactcggatgttgtaccattcagggaaacccccagctatgcgaagcggcggcgactggctggccccagtggcttggcatcccctcggcctctgcagcgctcag

SEQ ID NO: 165078 - DNA, 435 bp, Homo sapiens
ccccgactagcccgacaggcaaaagtatggcagtgaatcataaggtgacaggcgcatgctggcgatggaataacgattctcgggtaatagcctgattctttgaaatcatgtgcatttgtttatcatcgattataatgtttggtttgatattcatctatgcctgccgctttgggcacgtgcagcatctggagcacctgctgttctatggggcagacatgggggcccagaacgcctcggggaacacagccctgcacatctgtgccctctacaaccaggtgcgactgtgtgtcctgcacatgcctgcaccagcgagtgtgcatatacttgcctcttctgggggtgtatgtgtgtgtgggcacacaggtgaccctgtacggtgattgcatgtgtgcaccgagtgtggatatacttgcctgttctgggggtgtacgtgtg

SEQ ID NO: 165079 - DNA, 271 bp, Homo sapiens
ccgcgaagactccaaagcacctgggatgtcgaaaacattgctcctgggattttaaaaagcagagaaagcagaaaaagatgccttcatggtgggctcttcaaattctactagcagaggcacaagttaagactttcccaagtggatcctgctggttagattttattaaattaaccacaatttatatgttttataatatattctcatgtgtctgtttaggtataacatgttacagtttccaaatacagaaaaaaaaatcttatctaatttatct

SEQ ID NO: 165080 - DNA, 455 bp, Homo sapiens
aaccagaagattaagaaggatagcttttctgagctgtatagcacccttgtgtttacattttctggaggaaaggaaagctgctttgttttattaggaacgacttgatgtcacatttggaaggcagactgtcataattgttttttcccgttgccatctttggcatagtactctttcttccctttccttatgtaataaatatatgcctggaaagttttacatagatcaagacatattaaatgttttcaaagcatctgtattattatgttaagacatggtgatgagtccttttgtaaaatgaaccctatactttggatggtttaaatatacagtgggttaaactgagtgtatatattaacaggggaacatgtagcaagggagtaatgtttttttaaaaggttaattacaaaaggatttgtataggtggattttaaggaattctaaaggaacaacaaagg

SEQ ID NO: 165081 - DNA, 468 bp, Homo sapiens
ctgcgcaagggaaacggcctgggcacacggaacaagtaaatgtatctggttcaattgaggcttctaggccctcatctcagccgacttactaaagcgcaggttacttccagatgtcactagaatcccggagtttctaaggggaagtgtgagaaggtgttgcctaagatgagtgcagtggcgcaatcacagctcactgcagccttgaccctcccgggctcaagtagttcccctgcctcagtctcccgagtagctggaaccacaggtgcataccaccatgctcagctaatttttgattttttgtagagacgaggtttcactgtgttgcccaggctggtcttaaattcctagactcaagggatctgcctggctccacctcccaaagtgctggcattacaggcatgagccactgcacctggcccttcttcctactcttctcatcatttgatcccaacaccagcctgtaagtgg

SEQ ID NO: 165082 - DNA, 468 bp, Homo sapiens
  misc_feature (18)..(18): n is a, c, g, or t
  misc_feature (22)..(22): n is a, c, g, or t
  misc_feature (464)..(464): n is a, c, g, or t
ccatgcgagctcggcacncgcncaatggcagccggcccaatggcagccgaaatgtccattttgtacctcaggagcacatgggaaagatgcagaccattggccatcagaggctttagactaaggagttttcaaagagctcaggctgccttgtagaagcaaaatacaaggtaataatagagtcaagataacaggaagtaaaagaactctgcaaagcacagttagtaccactctgaaaatcactgtttcctgtttgctaacaaatctcattctcctgaaggaccctggtcaatgtgaacaggtcccatttgccagtggctgtaggtcaatttgctgaatgccagttgtttccattttacatgtgtagtccctgccagtcccaccccttctcttcctgtccctctaagtttcttcagttgtttccaatctctcttgttttttttcctttgccgggttggatttccggnggga

SEQ ID NO: 165083 - DNA, 426 bp, Homo sapiens
gtatgcctaagctcagtgcacctgcctcagaccccatctggaatcccccactgcaccatgaatggaggacacaagcagaatactaatcggattctctgaagactaagatccaggagatcattcagacagcaaagaccagaccccagattcagatccaaaagatctggaaaggctggctgaggcaaagggctgaaaggaagagaccactagtgacgtggctcccgagagagccggctcagctgtcccagcagcacagcccagggccacctgctccttccacatcagcaacacctgcccctgcagctgggtgactggggcagcttcaggaaggaaacatggagccagaggggtgcagaggtcacatccccagcacaacgtgaaagaaaagaacaatctcagaggggaggagacggccgcctgcaaagg

SEQ ID NO: 165084 - DNA, 561 bp, Homo sapiens
gctggagtgcaatggcacaatcttggctcaccgcaacctccgcctcctgtgttcaagtgattctcctgcttcagcctcccgagtactgggattacaggcatgcaccaacacgcccagctaattttgtattttcagtagagacagggtgtcttcatgttggtcaggctggtctcaaactcccgacctcaggtgatccgtacgcctcagcctctcaaagtactgggattacaggcctgagccaccgcacctggcccacacatttttacataccaagagatcctttaatccacccaaaggctgacgttagctgcatctgtaacacaactttttcctcaaatatatggagttttttttaggcttccacttctatacttccctattctcactccctgttttaatttaacatagacatgcaatgctagataatagaattgctctctaccagctgaacatttgggagcctgtgcagtttctggcccttcttgttgcacatagataaatacatccggtgttatagagactcagttgtaaaaatcaataaatgtgctgcctggttaaaat

SEQ ID NO: 165085 - DNA, 320 bp, Homo sapiens
gaataagtcaatgaatagatgaatgaaatggacatttttttttctaggcaaggagtaatacagagaggaaacactgactctgagaatgataaaatccagtttagaagaaatcaggagtgggccaggcatggtggtttactcctgtaatcccagcacttttagaggccgaggcgggaggatcagtttaggtcaggagttccagatcagcctggccaacatggcgaaaccccatctctacaaaaaacacaaaaattatccagacgtggtggtgcacgcctgtaatcccagctacttggggagctgaggcacgagaactgctt

SEQ ID NO: 165086 - DNA, 653 bp, Homo sapiens
ggataactcaaacaggggattccaggacataggtgaattctgtaaaccaaaagtacctgaggtctcaatcaagttagaaatttattttgccaaggtttaggacatgcctagaagaaaagaacccagaagcacggaaacagtctgtggcctatgcctttctgcaaagatgattttgaggtcttcaatatttaaaggggaaacgtgcctggaggggaaagaaggagggtatggtcatacactgtgcaagagaaaaaaagcaagtagggaacagtacattatgtactggtctcgtgctcagtaaatcagcattttacataaggtgaagatgtcccttttctgcactgtctaatatggtaatcactaccaagtgtggctactgaatacttgatgtgtggctaataaagctgaagaaattttaaattttaaatagtttgatataaagtaacacataaaattaactctgttaataccaaagtagtatgtctggagtaaacaaatttattgaccatatttcatagttttctgcctcagaaaacaatatattatttagcttgattgatgcctgctgtcatcaggaaactcagttatcatgtacacaatgacagactaatgcctctaatatcaaagtcactcaaagagaaaaaaagaaaaaa

SEQ ID NO: 165087 - DNA, 441 bp, Homo sapiens
ccttgatatttatggtgggcaattaacccgaattctcaggttcccaaatatggaaagaatgacatgttcagatagaaaggcactgtgggggacattacccaattccctagccctgcaaggatgtctatagcaaagactgccagttgcctatccaataccccttctgccatcttctgccttttatggctcacagctgcccagtccctcatagctagatgtgaccttgtgactaagttctggcctatgagaagtaagacgtatctcatggtgttttgagaaatctacttaaaaatgtaacatgacaggaaacagtggctcatgcctgcaatcccaacacttttggaggccaaggtgggataattactttgaggctaggagttcaagaccagcctgggcaacatggtaagaccctgcctctacaaaaaagaaaaatgaaaaaaa

SEQ ID NO: 165088 - DNA, 201 bp, Homo sapiens
tataaagtaaacccctcccaccaaatatatccaattttatgagcagcatagctattgctgctgacaaatattcgtaaagctcacgtatcgcataacgcagaacttctctatttaaggaatagatactattggggtaggaacaagtacagcagaagatgagcaaatgtcttaaataaaagtttacagtttattattatttct

SEQ ID NO: 165089 - DNA, 513 bp, Homo sapiens
gtcccgtttgggggatgggcagatgatgagagttgggagaaggaggagctgaagtaaacacccccatccttgtcagtctttggttaaagactctcctaggggtatgtaagtcaccaggcgaggctgggctctacagctacttggtaaagtttctgagcagtacagcatctgttacaggcccatttcagaggagttggttctagagtctattttattaatatctaagcatatgttaggttttaaacagaaagcgtcaagtctctggtggatgtgcaataacatcacaccatatttaagttcttacaaagatgtagaaggaagatgtgggtttcagaaatgttctggaaactagaaacacttccctgtgtgtcatgctgcgacggtgccatgtcacgcagcccactggagtggcgtgtgaggtaatgacattgacttcaggtcctggtgagaagactattgctaggaggcatctggctggctggtggctgctcatatcctacgcatacccacctg

SEQ ID NO: 165090 - DNA, 352 bp, Homo sapiens
gcacagaaagatttgggattagtccaagatggcccagctaggttgttaagtggcagagctgggattcaaacacaggtagcctggttctccagaatccacatacatcatacatccagagtccagctttaccgctgtgcaaggcagcctcaatcttcacagtgtcttgacttccccaggtgaggaagcccttctggttcagccctttgattctgtctaatggcaccccctgcatcctacctcctcccgtgagattctgaagttggttgctttggccttatcctcccctccttccctcatttcctcaagcccatagctcatatcaatcattaccttacagttgagtgcttttaat

SEQ ID NO: 165091 - DNA, 403 bp, Homo sapiens
gagcgagactccgtctcaaaaaaaagaaaaaaagaatattcttaaactgagacattaagtaactgttttctcttttgtgtgttttttctttattcaaattttctaagtgaacatacttttatagttcggaaagaattaatgtgatacatactttgaaactggcaggattgttggaatagttttatagcctctcctaatgactactgatactttaaagggaacagtattcatttttatctgtggtcagcacttggcatttgtggatttaacattatcttctaagcttctagaaccattctaaatacctgtcatgagtagtattttgtaatagaaatcattatttctacctcataagagtttttagaagatgaaattggataactttttttaagcctccaggtgg

SEQ ID NO: 165092 - DNA, 341 bp, Homo sapiens
accctcatctctcttttaattcttaagtttataaaattttccctcttcccacttctctacctttttctagtttacttagatttcttcttccttagccttttactttttgtgacaacaaagtcagattttctttcttagagagaaatttaggtcatcctttataattcatcttcttcccgtgttattagaaaatccagaactccatttaaatttgcagagagagaacctcactaaaaacgattgtggaaattacctcatgagcttaggtctcttcttttggcaataggtacattcaaaatataagaagagaaaatgaactaacatataaaaactcctctggg

SEQ ID NO: 165093 - DNA, 254 bp, Homo sapiens
tgcacagggctattgaacactgggactcattcctaaaccctggtgacactgtgggaagagaaacaaacccagtcaactgaatccaccttataccacagtgaaatccctaacggcatgacagaagataaaagcaaagcaaagcaaaacaaaacaaaacaaaaaacatggaaagaatagcaactccagagactgaaagaacatcaacccacacagatgacaaagaaccagcataataactctggtaactcaaaaat

SEQ ID NO: 165094 - DNA, 348 bp, Homo sapiens
cctgtaatcccagctactcgggaggctgaggcacaagaatcgcttgaacctgggaggcagaggttgcagtgagccgagatcttgctactgcactccagcctgggcaacaaagcaagactcccatctcaaagaaaaaaaagaacaagcaataaaacaaaacaaaacattaccaagagataaactgtgtgtacaggggaagagcgagaatcaaatgagattctggatgtgaaaagctttcataaacagtgctgtaaggctgggtgcggtggctcatgcctataatcccagcactttgggaggcccaggcaggcagatcacctgaggtcaggagttagagaccaacctggc

SEQ ID NO: 165095 - DNA, 671 bp, Homo sapiens
gcagtgtttggttttttgtccttgtgatagtttgctgagaatgatggtttccagcttcatccatgtccctacaaaggacatgaactcataagatggatttttttaaatgacaaagcagaatcagaaaaatggctaaagagaggatgaatggctgccttcttttccatgcatggtgtcaccttataaaggatgtgaaaatgtcaggcagggcagctggatctttatttcatggtttcatacagagtgacctggccagaagcccttgggaaactgggtggtacagggtaatttattctagcaccttcaaaggagaaaaggccagtgtcctcccttctcaactggcattgcctagcacctagtgcataaccgccacagcccaagcatcagcctgcctggcatcccctgcccccagaagggccatgccactgtctccacaaaaacctgcagcctaggccactaaagcacttgtaggcacttcttacactgattacagccaaagaaatcacatggagactacactgctgcatccacctaccaccaaagccaaagcacctacccagccaacgctataggacacatctacaggaaaaagtctttgcctatgaatataaaattggaagaggcaactgtcccaccagatgcacagatatcaatatagggacacagaaata

SEQ ID NO: 165096 - DNA, 609 bp, Homo sapiens
ttgctggaacccaggaggtggaagttgcagtgagctgagatcgcaccactgtactccagcatgggcgacagagcgagactcttcctcaattaaaaaagaaaaaagaaaaaagaaaagaaagtaaagaaacaaaagaatggctactccatagacagagtagccctgaggactgttggtttattttaaggtggttttttgatcagttgctaagcaagggatggattttttaagagttttctggaaaaggagcgagcaagccccagaactgagggttcctccctttttaagcaatatagggatatagggtaacttctgggcattgccacggcatttgtaaactgtcacggctctagtgggagtgtctattagtatgctaatatgttatacttagcatataatgaggttgaggatgactaaagttccctttagtcgctgtgttggttttggtgggtttgggctggctctttttcttttacagcatcctgttgtatttattatcagggtctttatgacctgtatcttgtgataccagtcctgaggacctcctgtctcatcctgtgactaagaatgcctgacatcctgggaatgcggggcagcaggtctcagccc

SEQ ID NO: 165097 - DNA, 307 bp, Homo sapiens
gagctggcccggcgttactgactgtcctgcctgcaagtgggtgggcgcccggcttgctgcttcgaggccccaggagtgcttgggagaagggagtcatttccctgttgacagtctcctgggagaggctattcttgtctgtcaaaccctctccgcttgtgaactggagtcggcagagccggtccctggtggagaaggtgggccgggtgggccctgtgggccaaatgccgcttctgctgcactttggccaagctgagcctctgcttccgtctcgtcatccatgaatgaagacagtacaacctgccggtgg

SEQ ID NO: 165098 - DNA, 613 bp, Homo sapiens
gtattttcagttgttgtgggaaatatacatatatcagaaagttggcatgtactaaggaatagatttatattgaacaggccactatccattacataacatcttgggattagtagcataaacacagtctgtatctggatatacttttaattgagaatctggaagtgggattgagaataataaatagctctttcttctgcaaatctttctagtagtaatggtgttattatgaggaaattgtcaggtttttgcagaaattactcataatgaaataccagatctaggaaatgatgatcagtagtttctagtgtcacaacccccaccacccttttttaaaaaacttttccaattgtatctattatcatcccaagtgaaaagtgttgggatgaatacttggttaggaaatgctgacttctccagtcttataatcctattatgattatccactgtttcctatcatttccacactggaatgataccaaatgttatacatctttgaacatatcttgctgttttctctctgtctggattcctctcttcccccgaccctccctgagagtatctgtttatgattctttgaaaacttttttgagcatttgggactacacatttaccc

SEQ ID NO: 165099 - DNA, 496 bp, Homo sapiens
gaggaggagagtagctgaagccaaatttctcctgggtagtgagacttacagccagagacagctttgtgacctgaaacccggtctgcatgtatcatttctgggtgctctagtctgttcccttggtgagttagggaacagtgtcccaccagctctgaggagcaagagaaaggtggaacccactcctctaatctaactcttggtttggtttgcccctaagggagggtgaagtgcagcccactaaagctcctgttagcacaataaaaatgcaagcatggcaccagccactgacagcagctccaccgaagcccaggaatggatgtagagacaaggttatctcttaccccttgccatgtgtcctcaatgcactgttgtggacttagcagcagctactcccttaagggcccagggagcatgggcagaaagagactgcttcttgggcttctccagcagctccacccccaacgaaggcaaacacacactggagaagggtgctttt

SEQ ID NO: 165100 - DNA, 1116 bp, Homo sapiens
  misc_feature (665)..(665): n is a, c, g, or t
  misc_feature (668)..(668): n is a, c, g, or t
  misc_feature (671)..(671): n is a, c, g, or t
  misc_feature (674)..(674): n is a, c, g, or t
  misc_feature (677)..(678): n is a, c, g, or t
  misc_feature (765)..(765): n is a, c, g, or t
ataatcgcctggtcgccgtcaggtgccggcccaggtggcaggcgcgcccgttgggcactgggggacgcgggcgcgtcaggtgaagactgggggctgcaggcgcgctaggagaactatgccatttttgggtcaggactggagatctcctggatggagttggattaagacagaagatggctggaagaattgtgaatcttgtagtcagaaacttgaaagagagaataaccattgtaacatcagtcacagcattatcttaaatagcgaagatggagaaatactcaataatgaagagcatgaatatgcatccaaaaaaagaaaaaggaccattttagaaatgacacaaatactcaaagtttttatcatgaaaaatggatctatgtccataaagaaagcacaaaagaaaggcatggctattgcaccttgggagaaacctttaatcggttagacttctcaagtgcaattcaagatacccgaaggttcaattatgtggtcaaactgcaggacaaattcgagcatcttaaaatgattcaacaggaggagataaggaagctcgaggaagagaaaaaacaactggaaggagaaatcatagatttttataaaatgaaagctgctctgaagcactgcagactcagctgagcactgatacaaagaaagacaaacatctnacnatntgnacnngacagcaaatgctattgtcgaagttttctaaagaagaatctgaagtgaaatgacatcaagagacctatcaagacctgtatccagganaagaccaaaccaatgcagaccaaaccaatgcagaactcctatgtgctgatggtgggtcttaacattttcccctaaggtttctggcggactaaactgtgcacccgttctcagggacctccctggaagctgggtccccgggccttaatccaaggacccacccaagagtttggcttttctttcgcctggggcttgtggtccaagcgttcctggtggaggccaggttggggaacaacgctctcccatggccgacgctggtctgcggtctccagggggtttgcccctgctccggcgttgctggccctggctgggtccgacggggccccctccccccttgggggcccgcgggggccc

SEQ ID NO: 165101 - DNA, 963 bp, Homo sapiens
  misc_feature (512)..(512): n is a, c, g, or t
  misc_feature (515)..(515): n is a, c, g, or t
  misc_feature (518)..(518): n is a, c, g, or t
  misc_feature (521)..(521): n is a, c, g, or t
  misc_feature (524)..(525): n is a, c, g, or t
  misc_feature (612)..(612): n is a, c, g, or t
ataatcgcctggtcgccgtcaggtgccggcccaggtggcaggcgcgcccgttgggcactgggggacgcgggcgcgtcaggtgaagactgggggctgcaggcgcgctaggagaactatgccatttttgggtcaggactggagatctcctggatggagttggattaagacagaagatggctggaagaattgtgaatcttgtagtcagaaacttgaaagagagaataaccattgtaacatcagtcacagcataggcatggctattgcaccttgggagaaacctttaatcggttagacttctcaagtgcaattcaagatacccgaaggttcaattatgtggtcaaactgcaggacaaattcgagcatcttaaaatgattcaacaggaggagataaggaagctcgaggaagagaaaaaacaactggaaggagaaatcatagatttttataaaatgaaagctgctctgaagcactgcagactcagctgagcactgatacaaagaaagacaaacatctnacnatntgnacnngacagcaaatgctattgtcgaagttttctaaagaagaatctgaagtgaaatgacatcaagagacctatcaagacctgtatccagganaagaccaaaccaatgcagaccaaaccaatgcagaactcctatgtgctgatggtgggtcttaacattttcccctaaggtttctggcggactaaactgtgcacccgttctcagggacctccctggaagctgggtccccgggccttaatccaaggacccacccaagagtttggcttttctttcgcctggggcttgtggtccaagcgttcctggtggaggccaggttggggaacaacgctctcccatggccgacgctggtctgcggtctccagggggtttgcccctgctccggcgttgctggccctggctgggtccgacggggccccctccccccttgggggcccgcgggggccc

SEQ ID NO: 165102 - DNA, 544 bp, Homo sapiens
ttgctgcggcgactctagaggacccctataggcgctagggttcatgatagtgggtggttggtgtaaatgagcgaggcaggagtccgaggaggttagttgtggcaataaaaatgattaaggatactagtataagagatcaggttcgtcctttagtgtggtgtatggttatacattgtcattctcatgccaagatttgaggttatagttgtataaaagaaatacacagcacattcttgttgtgtgttggattaccttccatattcttcctttggccttctctacatattttttatagtccctcaacatgcacacaactttttaaaaacatttttattcgggaaaggtggagtagatgtatgatatggtttagctgtatccccacccaaatcccatcttgaatggtagctcccataattcccacatgtggtaggagggacccggtgggagataattgaatcataggggcagtttccctcatagtgtactcatggtagtgaatcagtcccacgagatctgagggttaataaggggaaacccctttcac

SEQ ID NO: 165103 - DNA, 261 bp, Homo sapiens
ctctctattgtaacacatcacaaagaacacttgaaatgttacattaattgtgattatttttttgaatctttccgtcagtttttgcacccaataaatagaaattttagaaagaggccagtctgttgagacactgatccagcatatagaaatgaaatcagtaaaggtgcttagaaccatagctggtgtgtggtaaatgctgttgtattagctattactaccaattctacagctactactatgcagttccaatgttaatactac

SEQ ID NO: 165104 - DNA, 169 bp, Homo sapiens
ataggatatgaaggaaggatgattatattctacccaaatacaattttggctatgttatataaccattaaaatatattttaaagttaggcattgacttattatgccaaaaagttagtgtgatcatggcaatttcatgtgtttaaacctaatatattgctctgaggatttt

SEQ ID NO: 165105 - DNA, 277 bp, Homo sapiens
tagctggaattacaggcacgtgctaccatgcccagctcatttttgtattttgtatttttagatggggtttcaccatgttggccaggctggtcttgaacgcctgtcctcaagtgatccgcctgcctctgcctcccaaagtgctgggattacaggtgtgaaccactgcgcccggcccatttcaggtttcttggtgctctctgctgtcccgtctgggcccctgctgccactttctgcactggctctcacggctcgaagcaccaaatgaagcatcacctcc

SEQ ID NO: 165106 - DNA, 142 bp, Homo sapiens
tctttcactagctctgggatcctggctactaagtctataagatctgaaggggatggatgcaactgatgcttctatgtatctaaatttaaacattattggtttaatgttgaggcttattccttcattatagctatttatgcca

SEQ ID NO: 165107 - DNA, 469 bp, Homo sapiens
ctcccaccagaagagcatgaggattcctatatccccacacttggcatttctcttttttgtttttttcccattctaataggggaaaagtgatagttcagatacgcatttatctgattactaatacttttgaacatgttttcatatgcttgttaacctttcagatttcctcttttgttaattacctgttcatactgtttacccatttttaagttgtgttttctatcccttttttggtctatttgcagtgattcctcacatagtccagatatttaatcttttgttggctttatatatttcagataagttctccccactctgtcctggtctttcaactttttcttttcttttcttttcttttttggtttctttttgagacaggagaatctcttgaacctgggaggaggagcttgcagtgagccaagatcgagccactacactccagcttgggtgacacagcaagactgtctca

SEQ ID NO: 165108 - DNA, 598 bp, Homo sapiens
tctcagaggctccggcgtcagtacattgagaggtaagtgaagtcagttaaaagtttaaagtatatataatcagctttgttttgctgaactttgttttattgagagttttgtgcaatttataatattgtttcattgattttctttcttattgcatcttatatggactgttgtaacattctgtgagtatattttgttcatgtcatccatttttggtgttcagtaattttaaaaatgaattttaagtagggacaggagcttgaatatgtaatttggttttatgtaccagaagatccatcagaaactgagtagccaaacttgtaacaacctgtattggtgcatattctgccagactatgaattttcttaagtaatagagaacagaggtctttaaaaaattgtgaactgagatttttttaaaggtgaaatgaaagcagtactgtacaggaaattaagtttttgggtaaggaagtggaattggtttgattgaaattgttaatgtctctttaatgaggggttatatgaaaaatgttaggcagaaagtgtgatccagttaaaaatcctaaatatgaaattgattcagtttgaacaaacagtatttg

SEQ ID NO: 165109 - DNA, 460 bp, Homo sapiens
gtggttctgggtggcctgagcgctgcccagcacccactccccaagccctgcaggtggtgactccaatgagcaaaggccaatggctgttttacagaaaacagagggcaccttcctggccatcacccggcctcctgccttcacacagaatcccccagctcctggtgcagcagtgctggcctggcctgtggctgcccactcccaggcactgccgttcccatcatggtcagacctctgcgttttgctgttggcctcccccgcgccctgttccagcacagcgctcttgatggcccgcagagaggctctggggagcactgagcacccacggccagggcagctcaagaatccttttgtgtctctggtggtgccaggggcagagtcgcttgggtttcaccccgcacaggccggcctcgctgcccctgtggacaggttcgtgtgtaaggtcctgcccacgccacaccag

SEQ ID NO: 165110 - DNA, 825 bp, Homo sapiens
agcctcacctccacagctttgcttgtctcagttcactcctgagcagctctcacaggttggagttttgtgcctatagatctcccagactggttttgtgaggcagcacagggcagtgaatgctgaggtctttcaggcacctctctggaagctttgaccttaaggtcctaacttgcgtaacttctggtcctaactccatgatctcggaaatatcttccaggtcattctccctttgtcttatgaatagaacttggcttccttctagccagattaatattttcagcaaatgaccacttggccaaacccttcttattctctctcgaacatgcttttttattctttatatggccaggctgagagttctccaaatttttctattagtcttcacttttcattataaattccatctttaaatcatttctctctcctcaacattttactatatgtgcttgaaagaagccatggagcccactgaatgttttgctgctgagatgtctcttccatcagatatcgtagttcacctctcttaaattctgccttccataaagccaaagggcatgaacagaattctgccaagtttttttgccacttcataacaaggatgatccttactccagtttccaataagacatttctcttttccacctgagacctcatcagaatggcgtttactctctatatgtctaccacatctcctcgggcctaaagttactcctagaaaggcgaagttcccgacaagttcccactggacccgggacccttaaaaagtcggcgcatgggttagcggccccacacatcgttaacggggggcccacaaccccgcggtac

SEQ ID NO: 165111 - DNA, 202 bp, Homo sapiens
ctgtgaagaggaaccattcaagggaccagtaatgaccttgggtgggatgtttgtgggctgttcttctggactaaatattgtgcagcaaaaaccaaagtgttattgcctccagatgcccacattcatggctttcttcttagaagatgacagtcaagtttcttttactccctaagaccatcaaagtggaaacactaacttcagc

SEQ ID NO: 165112 - DNA, 543 bp, Homo sapiens
catactttcttcgtttgatttttaaaatacttcactggctctttgtggggactaaatgggatatttaatatttcacttactgtgctctacaaaattcccgataagttctcagtaagggatagccatttacattcttatcctctgtaattttcttccctgtgttatgtttaagtaatttttttttctttcatggagaaggtactaggaaagtaagatgtgggaaaatgggactatttacatatcagaaaaggaagattagtaaaaaattaatacgtgtttatttcctctgcttgtccatgttgatttctcctgcaagaatgaacttgtctctttttgctcattgcacccaggagggacaaaaccatgtccagaggtccccttgttgaggctctgacatgcgctatttttttactttgttttggggctcaccaccccctgggaacactggtcttgcagtctactgggaggcggaggttgcagtgagccgagatcgtgccactgcactctagcctgggtgacagagcaagactccatctccaaaaa

SEQ ID NO: 165113 - DNA, 372 bp, Homo sapiens
gcgatcttgttttctttatctttacccagcgttttcatactatggtacttgaaaacatccgaggcatctgtcatttcacccaaaaatactcagggccgggcgcggtggctcacgcctctaatcccagcactttgggaggctgaggtgggtggatcacgaggtcaggagttcgagaccagcctggccaacatggtataaccccgtctctactaaaaacacaaaaattagccaggcgtggtggtgggcgcctgtagtcccagctacttgggaggctgaggtgggagaattgcttgaacccaggaggcagaggttgtagtgagccaagatcatgccactgttctccagcctgggcaacagagaaagactccatct

SEQ ID NO: 165114 - DNA, 506 bp, Homo sapiens
gcttcctagtacttgtcttaattagcacagccaatagttctacccagaaccaagacttgggcagattccagtagatctctggcccaggtttttaccatctgggggctaactcaggctcaaaacccttggggacaccctgtctcattttctgcccatgcacgcccagatccatttctggcatgtgacacaagagaaaaaataatttattctttaattttctaagaaatctagttttccttggccataagagtagtcataatttccagacctcagaagtttggccttgcccaattatcttatgaaattgaattttcaagatagatggcttcctacaccgaaaatagcctaggctcaagtttgcataacaatgatcatgctgactactagatcaaggagcagctaaacatttaatgaagtgcctcatggagtcatggaagctcctatacactggtgatatattgtcaaagttctgctctctgtttgcaagcaatgctagcaatgatgcc

SEQ ID NO: 165115 - DNA, 226 bp, Homo sapiens
acctcggtcatctttcccaaggtgctggccaacatcctcacaggatacaagaccattccctcccaggctgcttcctgcaaagtttgctctattttttcttgggcaccacagagttcttcctcctggcggtgatgtcctttgacaggtacgtggccgtatgtaaccctttgcattatgccaccatcatgagcaaaagggtctgtgtccagctagtcctctgttagtg

SEQ ID NO: 165116 - DNA, 332 bp, Homo sapiens
gagatcatcaagtccagccctgttgcacttcagctgagagtactgagagtcagaatggctggtgacacagctgcggtcacagattaaagtgaaaaccaaggccagcgttcaagtctctgtctccgcagtcagtctttccactatagactattcagaattccttagctagctcactctttcactaaggcagctcctctctttctaacactggagctttacagaatagacacatggtggagaagagcaagcccttccttggtggtctttgttggaggataatctgcttctcagcactgccctcatcctcttttcaaaaactcctcgaaccctga

SEQ ID NO: 165117 - DNA, 386 bp, Homo sapiens
gtaagaattacatcttgcagcaattagcctttgccacaatggtgtattacaaacaacttcaaaattcagtgactgaaaaaaattattttgtttctccagatgtttgagtcagctgggcaggttttgcttcacattgcaggtctgcaggtctgggtcttcctcacatgtctttcatcctttttggtcccattgagttattcagggtacattcctctcatggtgatggcagaggcacaccaaatggcaagcccaaccacgcaagcacttttcaaactgctttttgcatcacatctgctaacattctattagccaaagcaaaacacatagtccagcccaaaattaagaggctgagaaggacattccatctttagttgcagaaaatgcaa

SEQ ID NO: 165118 - DNA, 150 bp, Homo sapiens
aatgtgagaattagtctttcaggtatgtaattttgttttgttttctaaaaatcaattactctatgtgttcacttagaactggtgaaaaaagttagctaacacagagatagtaaagtctttaaacttacattaaattctaagtatttccgc

SEQ ID NO: 165119 - DNA, 1118 bp, Homo sapiens
gggattacaggcgtgagccatcacacccggcctggatgctggtagttttattttctgcttagaaaacgcaaccatgttgatgggaccaaaaacttagttgaaagaagccatggcaaaagatgttgacgtacaactggctcctgaggctgtcaattgtttagagctcccaagtagtactgcattacggaatctactacttagaagaatgtacaagatgtaagttcccatcggcaccgtcatggtaagaagaataagaaactctcaaaggaaaagaaacttacattcactttttcctggtccattttggttcctaagaatagataggccattaagaaggatattaggtttctaaggacaattttaacacaatactgctttaaaaatctgaagtttaaatagtttagctatttctgtaggttaattcaggcactgactaaaatcagtctcattatcatatacaaatgtaaggaagttaaattttaaaagcatgtataggttgtccttaaattatacaaaagcttttagtttcatcaggattatattccagttaacctttcatctttttttttttcccaaatgaactagggtctttaaaattcctaagtagattcttttgagtggtaggggagtctgtatagattacagatataatttattgtgataacaaatggcttcctgtttgacctcatttccaggtgtcgcatccgtggctgatttatttcacagatgtacatttgcatgtacttgttgaactttgctaggaaggactcaatttttgaaaaatctgttattttcactgtgggccttatgaggcaatctactgcaatggaaaaagggttccttggtcatttcaagttttattttctattagagtaatatctaacttcaattattttgccaggtttaaaccttctctctgtgtctgtggttagaatttgaaaataacaatgctctgcttaaagtaagagtcacagtcagcaaaaaaagccaatggattttaaaaagacatcttagttaaagctagaggaagaaaacttcaaataagcaaagaagtattgaaggatgcccacgaattcctttgcattaaaatcaagatgaggtaagaggtagaatataag

SEQ ID NO: 165120 - DNA, 1151 bp, Homo sapiens
agttccttggggtcagtacaggcctcacttagataccaaccagggagtcagcttaaaccttggtttcatctcctttggaggcactttcttgcagatgtggatggtgagtgaatcaacattaactcaggtgagggggctctgatcttaaaggtctactgtgaagacaagtaacacagcattggttcttctggctaaagacagccaaagggagttagattgctcctggacctggcacagtcttggggtgtcacaatcttaagaggctgagggcagagatccacgaattttagcttgcttctccctttccttggtattacagaaggactgtctgtagcactccctgtgtgaagctgaggaccactacggcatggagctggcccagctgcagagcctcatcagcagtgtagaagagcagctgtccaagagttaggctgacctagagtggcagagccaggagtaccaggagcagctggatatcagggcccaactggagggtgagatcaccatgtactggaaccttctggggaacaaaggctgcaagtatgtgtgatgtcaagtagtgtcttcatttatgagtatcagtgttgcagtgtctccaggtagaacgatgagggactgatgtttgtttcacaactgtccttactatgtgaggttggcatttctgacgctgttattgcagacaaggatatggggctcggagaataattagtttgccccccgtcagagttagtaaggggggagggacataaactaaagctgggtctgtggatgaactgtctccatgtgcatctgctgcaagagccatgtaatccatgtaccacacctggaggtcacgtgcaagagtgctcacatgacctgcaccccaagccccacatagcaacactttcttgagctcaccctacatacccaccagaggctgccagggcagcagcagattctgcgcacagggtgggttggaaccctcctctcattgcagatgagacggaggcaagggaaagagactcacctgcggctgaggcccaccttgtaaatggcttaccttcgagaagaggcgggtaccttgtgactctgcagcttctcacaacttcgacttgtgttttcattttcaaggagtttgctcagtggggccacttcctttctttaatgcttag

SEQ ID NO: 165121 - DNA, 523 bp, Homo sapiens
gttccagagttactgactgagatttctgagcttttttccccttttctgtttggtttcagagtggagagcagcccaaaaatatgcaggtaactgaagccaggaaactgatttgtgttttggtttggccggatcttaaacagaagggaggtggagagatctgagattagaggacggggctttataggagccaagtatggggcctgcacacacaagacacacacgcacacttgcaaacacgccacacgacacatatgcctgcatgtgtatgcacacacatgcacacgtgagctcccaaacacatcgctccttggggttacactaggtttgtttccatctggcttgaggctatttgcaggcgagagtgcagagtctgtaatgaacctcccagattctctgacgaaggggtcccctaggttcccatctgtcaaatggcatggggtgttgaaatgtggggcactggactagatgatctcaaaggtccttttaaaatccttttaaaaacttttctgaaggactgtatgta

SEQ ID NO: 165122 - DNA, 228 bp, Homo sapiens
aatcccaactttgacatccaaggcttcatcaatacagctctgttctttcccacattttttatctttccttaacacagaccacgggcttcggcccaactgaactgctattttctacttctttgctcatgcttttgctccacttaaaaggcttcctggctcccatttcctctggtctaaatcacacccaaaatgaggaaacaaaatacatttgaaagagcaagaacttag

SEQ ID NO: 165123 - DNA, 357 bp, Homo sapiens
ctgagcctggtagcatgtgctgtaatcccaactacttgggaggctgaggtgggaggattacttgagcccaggaggtagaggctgtagtgagccctgattgcaccactgcactcagcctgggtgacagagtgagaccctctctcaaaaacaaaaacaaaaaacaagtataagccaaggtgattaatggcctgctaatagaggtattttgtttggccagctcagtggtttaaaaactattttttaattagaatgcttttaggcaagacatggactcttctgttgccactgacctaccattatctattgcgttacataaagctgcttcacatgtttagttatgttgcctgggcctctgaa

SEQ ID NO: 165124 - DNA, 349 bp, Homo sapiens
gagatattttaggaggtaaaatcagcagaatttggtgggtgttggaacttgagtaaaagcaattaaggactgacttcctctaggctgggtagctggctgaatggtggcactgacttcaagggaaaagaaggcaggaaaagaagcaggtttggagaaaaacattacatgtggtgacatctacaaaagctgactagatttatatactgggctgtgttatcagccccagcttatctcatgtcaatatatagtggtatttaagttctcagccctggctcattcaacccagtggtccctgttaaggttgtcactatggattctcttgtgaatcatttcaagaccataggagctt

SEQ ID NO: 165125 - DNA, 258 bp, Homo sapiens
cattgtctgcgctctgcctcttccagtttcttcaacaggtcatgcactttcctgtttcctatttctggagtgttccccctcactcctgcctgccagttatctttcccatctcatctcaaaggtgacttcctcaaacaggccttccctgagtggccaacctccctttaggcatgctcagagagattcttcttctgaggcttaccacagccataattaagtaagtgatcatctaatgagtattttagtttgccttttttt

SEQ ID NO: 165126 - DNA, 128 bp, Homo sapiens
tttctctttgatcctctatactgtccctggattaaagagaaaagcaagaatctctgtccaagtccaatcagaagaccctgcaggcatccccaacccatcagcagctggtgagaaaagagtgccctgtg

SEQ ID NO: 165127 - DNA, 307 bp, Homo sapiens
atcataagttctgtttgggttagggaactttgatgctcatattcatggttcagccttccctctgtagaagtgctaataatttttactatccctgtgattttatattgagagggctcttaggtatgaaattttcaaaagatttgcctcctgtaattttcttaccctttcttctggcattctcttttaatctaggacttttccactttattttattttaagttgcagggtacatgtgcaggatgtctaggtttgttacataggtaaacgtgtgccatggtgggtttgctgcacctattgacccatcacc

SEQ ID NO: 165128 - DNA, 383 bp, Homo sapiens
tgactgtggcaagaggatccatttatatgatggtcacagagaaaaaataagtttatttcagctttctaattttcatacactttgatgatgagatgtaattacatgtgaaagtccaaggcaaacagaataagcgcacaaactctttgtgtaaaaccacactgaacattaaaaagctctccaaatgataatttatttagaggattcacttatcaagttttcatcaaatcatgcattttacttattaaaagtagtacactgcccacactgccccctaaaaaagtgatgaagtgaagatattattttctatgtacatacattacattgtgtgttcaggtcatgccagtggtgctggtgactatcttgaggaagcctcaaggtgaagc

SEQ ID NO: 165129 - DNA, 477 bp, Homo sapiens
  misc_feature (386)..(386): n is a, c, g, or t
tcagctatggattgacaacagtccagaagaattagacatttagaaagggatcaggaggtgggtttggccaatgggaagctagaaaaaaaaaatttgtagaaagaaagggaacagaaggaactgtccacaatccgaatgactcagtaacccacaggctttaacactattacaaacctaagtgtcaatcaaaatacaaaatacatatagtcccagtataggaagtctgctgactatccacattacatcttttattttattacacagtatttttttttaaaaattttaagagacagggtctctgtcactttggctgactgcatcctcgacctcccaggcacaagccatcctcctgcctcaggcccagctactcgggaggctgaggcagnaaaaccgcttgaacttgggaggcggaggtttgcagtggccgacatcgcaccactgcactccagcctgggtgacagagtgagattccgtctc

SEQ ID NO: 165130 - DNA, 548 bp, Homo sapiens
acaggaatcaatgattcacctacaggacaacaggactcatgataaccattccacaggaagtatgggcgatgcagcctgaggccaggtgtctgaacatcaaagccaggctcttcccacaacctagaaccactcatttagactctccttcccctaaaaccctgaagacacagaaaaggcatcagccaccccataggtggctgtcaaccgtcacggaatgttgatgcctgtcatgagatttcccacactggacttgcaggtacttgcaggtactaggtacttgcaggtaccaggttctctgcaggagtctatgctggaagacgtgcctaagaagccacaggactggcacagggcatcttcccagagtaccaattttttggaagtcttggtaggtagaagagtggttctcaaagtacggactcccgactaccagcatcagcatcacctggcaacttggaagaaatggagattcccaagccccacttcagacttccagaatccgaatctccagaaccagagtccagcaatctatgtttgtaagcacccagatg

SEQ ID NO: 165131 - DNA, 327 bp, Homo sapiens
agagctgtatctaaataaagtgcccctgaagtcttcaacagtgataattgagcacccagtactataaggtgattcaatgatgaaaaacagatatcgcatccaggctcatggatctatagtgtaatcgaaattagagttcaacaaagtgaagtagaagagacacgtggatgcacgtaaaagcaaagacttccctcggaggagacaggatttgtccatgagcacaacagcatggtcagattttcatatatttattttgacaggattttttctagtcattcattcactattcaaaatgatcataaaataaactttactttcttattttta

SEQ ID NO: 165132 - DNA, 420 bp, Homo sapiens
atttatattttcctaaattattagaagattttagaaaaagattctgtgttatgaatgcccaggtgagagttaattactgtatgcattttgacacctatgctgttaaaaagctgttgttgatagctgaaccaagaattggtctttgaccttctgggcacagttaatgagctactaatcttgtagggcatgtttctgttggacctctgcctgggctcattgtcagtatttattgacactcatccatgtatgcatggagggtttaaatgcagtcaagactggtgttctccagccaagctgttgctttcagcattcacaaaaacaaggtagaaaggagacctggacaacaagcacaggcacttggacttttaaaaattattttattttctgttttcccctgatatgataaatagtggtctaaag

SEQ ID NO: 165133 - DNA, 175 bp, Homo sapiens
cctgtccctacagtgatacaaccacccctcaataaccccgggcaccacctggcacccactgggggccaccagggagcccaccaagcccactccgggcttggacagagggcaggcctggaggaaggcacatccaaccccactgaccggcatgcacctggggccaggggcctgctgc

SEQ ID NO: 165134 - DNA, 255 bp, Homo sapiens
cgagtagctggggttacaggtgcctgctaccacacctggctaatttttgtatttttattagagacggagtttcaccgtcttggccaggctggtcttgaacttctgaccttgtgatccacccaccttggcctcccaaagtactgggattacaggcatgagccaccgcacccggcctcatgagtctttctaatgaccatctaggtcaagaaatagaactttgccagccttgccagaagacacttcatggtcctagtc

SEQ ID NO: 165135 - DNA, 422 bp, Homo sapiens
agcattaatccctgaaccacactagctctggcaagggtataaatgagcagtgattactaactgacttaaaacacaataggaattatccccagtgaattccaacatataaagggacactaattcttgccatagaaaatctatttgataagtatgaacaagaattcccaaggttatcaaaaataatttctaatagtttaattctttaaaagaaatggtgtatctcatggacacaggaaggggaacatcacactccggggactgttgttgggtggggggagcggggagggagagcattaggagatatacctaatgctaaatgacaagttaatgggtgcagcacaccaacgtggcacatgtatacatatgtaacaaacctgcacattgtgcaaatgtaccctaaaacttaaagtataataataata

SEQ ID NO: 165136 - DNA, 1888 bp, Homo sapiens
caagtgggaagtagccgagcccgctggtgtcggggaagccacagggcacgcggaggccctgctggatgatgtctggcttcagccctggctcatggttctgggcacctgtgttcttcctaactaggatgtccgggttgagcgccatcctgcgcttcattttgtcccatgggagttggccccgtgggatttccaggctgtgctcctgcggccctgccattggccgctggaatagggtcagtcaggcagttagggaaagtgcatggactttttcattctcctgaggctgtttatttttttactgggcccatgaagcaactttgacataattattcaggacatatcctaaacgccgtcatatcctggattttccaggtaaccaattgctaaactcacaggcatctttgccaatgtatttttaagaatgatatttgctaccctagagttcagagtgtttattgtgtattatttcatacaatacttgtagaagcccagtagaaggattatatccccatgcttacagatgaggacattgaggagacgggtgttggcgtccctgctttccttcagggagcacaggtcaggttgctccctgaagtcagtgatgggtccagcacgttccacacggcaaggggacaggccctctcccagggcggcccttctgccgcctttgctccttctttgagacttaggggcggggcatgggcaggagggagagtgctggattgtagctgaccctctcgggacttgtaaatactgtcaagtgattgggagtcctagacaaacacgagtggccgcctcggggccggcggcgtggccctgtgacagcaagaacttcaggaacaaatgctctctacacccactggccctccagggtcagacccttctagttcctgcctgccccttcagtagcgaagagagaagccgttgctcttagggcagggctgggtttggaaatgacagcatgtgttcaacaacctgaaaaccaagctgaatgtcgcctgagatgtttctttcttccctgaagaggaggcggtgtccatcacaaagagcctcttctgttgagttctgagccatgctgtatcttgacttgaacagctcttattttcacagttcacgtttttgggcctccagagagagacttggagttgaccttcaactgagggaagtgtctgaaggcactgttgtgatttctcttgggagtagaggtgccaggaaggacactggagattcccagaatttaaggctgccacttatttacatgaaatcaaatattttgactctactctggatcacaaaggcagtttgctggagtttaagaaccaacccattaacattaggaagtaagcagtgttgagatcagaataacttaggataggctttgaaattgcttttctggtacaaggttatggttgaaataggaaaacagcacagagaggacagtccatcacggtgagacttgggaaaggcacacagagagctagtcgtctctgttctggcctcgaacagtaatgattatggtctgatgattgccctgtgtatacataactgctctcagagcatttgaatcacctttcttcaaaaggaacccgggccgggcacagtggctcacgcctgtaatcccaacactttgagaggccgaggcgggcggatcacttgaggtcaggagttcaagaccagcctggccaacatggtgaaatcctgtctctattaaaaatacaaaaactagctgggcatggaggcaggggcctgtaatcccagctactcgggaggctgaggcaggagaatcgctggaacccaggaggcggaggttgcagtgagctgagatcacgccactgtactccagcctgagcaacaaagccagactccgtctcacaaaaaaaaaaaaaaa

SEQ ID NO: 165137 - DNA, 242 bp, Homo sapiens
agattcgagtgaaggatggacctgctgcccttccccggagctgtgggtcgggctgaaaattgaatgggctgtggggttgatgtttttctttttttctcatcccccaacctcaattctcatcatgacattttccaaacatacaagttaaaaatgagcataatgaatatctgcaaactcaacttccagaggttttaattttttttttttttttttttttgagatggagtttcactcttgttgcc

SEQ ID NO: 165138 - DNA, 533 bp, Homo sapiens
ggcgccggattctagtgtcttaactgtgaccaccctaaacattttacaaacaattgtcttgtttgaatcctcttcaaaaaatgatttataatcaactataagactttaataaatactatcaaatacaggtttctaataacagaaaaacatacggaactcataaaaaactttaaaatatttacaaatatcaaacagaaccaaagttaacaaaataaactgaactaataaaaaactgaaagaatgtttttaacttttacttagaaagttaaaacttttaacaactaagcaaaacatactcctataaacaaaatttagaacatatttatttctctttgcctggttcctctagaattcagaaactgattatgaatatttttaacttacaacaatatacttatttacatcaatacaacaaaatccattttattttacaacaggacacaattttaaaaactggttattttacaagacttttacttgaaagatgtatttccctttaaaaaatcaaactggattcacaaaaccaataaaag

SEQ ID NO: 165139 - DNA, 462 bp, Homo sapiens
ggcatggtagcaggtgcctgtaatcatagctactcaggaggctgaggcaggagaatcacttgaacccagggggtggaggttgcagtgagccgagattgtgccattgcactccagcctgagcgacagagcaagactctgtcttaaaaaaaaaaaaaagtatgcgagagggggaaaatgtcatgcactttaaaacaatcagatcttaatgagactcactattgcaaggatgacactgaggggatggtgctaaacaatttatgagaaatccaccccttccaacaggcccccacctccaacatggggattacatttcaacatgagatttgaaagggacatctaaactataccattccacccctggccccctgaatctcatggtcttctcacactataaaagacaatgatacctgcccaatagtcacccaaagtcttaactcattccagcattaactgaaaagtctc

SEQ ID NO: 165140 - DNA, 197 bp, Homo sapiens
tgctaggattacaggtgtgagccaccatgcccagcccatatgttgaatttttaaacactgagtactgcagaacccaggaattatttggacatagggtctttacatgggagttaaaatgaggttgttgtgaagggaccctaatccaatttgactaatatctttgtaaaaagggaaatttggagacagacacacgtaga

SEQ ID NO: 165141 - DNA, 469 bp, Homo sapiens
attctattccttttgtttcttcaataaatgatactatacaacagaatattcatatgttaaaaaaaaggaacactgacctatgcccatattatatgcaaaaatagtaaaaatggatcatatacctaaatataaaaccaaaaacaataaaacttctaggaaaaagccttgtctttatttgtctttacattgggtaaagaattattagacaaaagaccaaaaacatattccacaaaagataaaattgataaattgacatcatcaaaattgaaaacatctgctcttcaaaagacaatgttaaagaaatgaaaagccgcagactgaaagtttgcaagagtgacatcagcaagacagcagactaggagacatcagccttcttccacccacaaaaaacaacaaacagacagctatacacaaatacagctctggaagaactcactagcccaatcagcctacagcaataaagggaaaa

SEQ ID NO: 165142 - DNA, 522 bp, Homo sapiens
ggtccaggcacctgccttggagccgtagtcccggtgggcatgggcagtcaggggcttagacagagctctgcgtccctgtgggcggaggggaggaggactgcccccttcttgggccctttgattaggcgggtctggctgcatcagggaggaacgagaggaacttggcttgcctgggagggtgctgcaggtggctggggctccagggggcctccaagcagttctggggaagtggtttctggcatcaaggggtccaggcagggggccttggcagggggcgttgacaggtgtgcagctgtaggggggccgccggccctggcacccgtctcctccgctccgtctaggctgcctggggtgaggagtgtttaccatgctgaccacggtccagggctgagaggcccgcagtggctggagcgaaaggcaggctgaggccccgggagcgagggtctgggactgcccggccgccagcgcagggagtcgccgagtgccgggaagctccgggccggcccgcgggcgccccctgct

SEQ ID NO: 165143 - DNA, 236 bp, Homo sapiens
ggctcattcttccaaactttggctgaaatctcagaggtcccatgacctttccggtgacattagacatgtccttcagttgctccctcaagattcatttctgtaacttacatgtgcaatgccatgaataattgaaaaccgatttaaagttgaccctgtcctctcatctagctcgagagggcagtgctggtggcttgtggtggggaaggcacgtggtcagcgtcttcatacttctcacc

SEQ ID NO: 165144 - DNA, 189 bp, Homo sapiens
acagttgcctattgcctcttaaatgtgtcctagacacagcatgaagttggggcactggtggtgagaggcggaatccaaaaaaattcagaaatgacttggcctcattttggatttcataatgtgaagtattcatgattttgaactggtaatataatctaaatcaagattaccaaaataatttcagaggtt

SEQ ID NO: 165145 - DNA, 436 bp, Homo sapiens
tctctcttcctctttcttttctctctcttcctctttctttctttatctttcctttttctattatctacctattgatctatctatctatgtatgttggtggttctcaccccctgccacacacatacctgggacatttggtagtatcaccagacactgtgattgtcataaccagatctagtgggtagagattggtgatgctggtaaacctcttagaatgcacagaacagcccctcccttcacactcccagcacaaaattatccaggctaaaatgtcaaaagtgccaaggttaaaaaagtctgagctacatccttggcatttcctgtgggtaacttacagaactattatagttatgctatagctgatattttagtactttttactttatgttgttctaaatagtatgatttgattaagtgggttcatatgtctccatag

SEQ ID NO: 165146 - DNA, 456 bp, Homo sapiens
gagacattgctcatagccagcaaaaatggccttggaccacagccttccagccatatttccttttagaagtcctgctcccagcaggcctccataggatccaagatgatgggaagagctatttttcttagtaagttgagaaaatgactcggtgctttttgttttatactgtgactggccactaaattagtagaatgatagaattttggagtctgtaagatttttagatgtcacgtaatgctccttcccaagcagtatagtagtcctctctatgcttctgctgttactatcactactgttactattaataatatgggtgatttttttaaaacagactgcatagtactttatcttattaatcaatatcctcagtaggaggttatgcaaacttgacagacccctcacttgcccctatgatacttctgtgcaaattagagaagggcacccctacttgactta

SEQ ID NO: 165147 - DNA, 464 bp, Homo sapiens
cctgggtgacagagtaagactctgtctctaaaaaaaaaaaaaaaaaaagcaaaatatatatatttcaaagttcagagcatatagctaaggacaaagaagataattaaatgatcttagaaaccaagaaataatgacagactaaaatatttttgaatacattgatttattctattcatttgattagctctattcccattcctctccctttttctctcttctgtattcccctttcccgtgccagaaaccactgtcttttcacatgtttttggtaaacagatttattacctatttttgtgtgacaaactactccaaaacatttattttctcatagttcctgtgagtcaggaatttgggagcagcttagctgggtggttctggctctgggtttctcctgagggtgcaactaagataacagctgaggctgcagttacctgaaggcttgactcagctggaacattttcttc

SEQ ID NO: 165148 - DNA, 431 bp, Homo sapiens
gtgaacgaggcatgcagcttgcttcctgtcatgtctgactctatagtgatacccattactccttgacggtcagccttgatattctggaaaggcaacctcctcagagagagggcactggcctgcccacgtcacacagcagagggtggaaggaaggcagagtccgtcatcaccagcaacccccagggctgcaggcccaggcttccagctcctgctcaggctgtggtgcctgctgtctcttgcgccctcgtctggccactgctcagtactgcactgacctctcagccaggaacccacagcggcaaaccgaacccctgacccagcctggacttggtcttggcatctccggactcagcttcctaaccggcccgtggggcacgggttgcaggggaccaccccccccaagagtgcactcagctcagcactttgctgtt

SEQ ID NO: 165149 - DNA, 502 bp, Homo sapiens
cccaagactgtctaatcagtttccaaatggatgtggcccttctcggtgtctgtggggctcaggaccacagggattagccaggatctcacagcttagtaagagactaaccaggatttgaacccacctgcatggctccaaagtcagccttgatattctggaaaggcaacctcctcagagagagggcactggcctgcccacgtcacacagcagagggtggaaggaaggcagagtccgtcatcaccagcaacccccagggctgcaggcccaggcttccagctcctgctcaggctgtggtgcctgctgtctcttgcgccctcgtctggccactgctcagtactgcactgacctctcagccaggaacccacagcggcaaaccgaacccctgacccagcctggacttggtcttggcatctccggactcagcttcctaaccggcccgtggggcacgggttgcaggggaccaccccccccaagagtgcactcagctcagcactttgctgtt

SEQ ID NO: 165150 - DNA, 307 bp, Homo sapiens
attataggtgtgagccactgtgcccggccaacttttttctttctctgcctcctactatgagagttcccatctttgatggatgactcagaattcaaattacacctagaagcaaacacatcaggcttgagggtagagagggagagaaaagaacaactgtcccatctgtgtttcatcctgagtgggaggttcaaatctaggtattggcagaatgagataaaggaaggagagattgagaaagagtggaagtgggatggaaagttattaagggaagtcattccaggacagttttcacccactcagtagatta

SEQ ID NO: 165151 - DNA, 144 bp, Homo sapiens
gtcctagtatcccctgtgctcaaaaaagccacttccaaatagcccaacagacagaggtcccccaaatttataagcctgttaaccgctcagcaggcaaaaagggtgtagagaggtattatgaacaaaagcactggcaaggtgggc

SEQ ID NO: 165152 - DNA, 430 bp, Homo sapiens
ttcttgtatctccttccagaaatattttaagaatataagaaaagacacatattatttgtctataggaggaggcattctctaaccccacagctgatgttcagctgtcaacatcactgtggtgataaaaaaaatgtgaagcaatttctctattggttcaaaagttccggccaagtgcagtggctcacgcctgtaatcccaacagtttgggaggccgactgaggtcaggagttcgagaccagcctggccaacatggtgaaaccccgtctctactaaaaatacaaaaattagccagacatggtggtgggcgcctgtagtcccagctactcaggaggctgaggctagagaattgcttgaacctgggaggcagaggttgcagtgagccaagatctcaccactgcactccagcttggagcagagcgagactccatcc

SEQ ID NO: 165153 - DNA, 129 bp, Homo sapiens
atttagaaaacaaataactggtgtgtgtgtgagtgtgtgctttcttcgcataagactttgtctttttatccagttagcttctcagaatccccactagccagaactgtgtcacatagtcattccagttgt

SEQ ID NO: 165154 - DNA, 402 bp, Homo sapiens
ctccacgcctgtgcccgctggctgcccacctgcagaagcccactcacacacacgccccacacgccctaaaacaagtcctgtggctccacatcagcacttcccaaaccctgggtccgcagaggtcatctggcgcccttgttcaaacataggtgatgcattccatgctccttggtcaagggctcatactctgaggaataagactccagagagcagtggtcctgaaacctgtttgctcacgcaccccctgtatatctacttgtttgctgtgtgtgtccatgtactattgtaactaacacatcatcctgtactgagagagacaaagtggaaccttaaaggatgagaaaaaaaagctaccaaaaatgcaaataaaagttctaatactgccgggcgcggtggctcacg

SEQ ID NO: 165155 - DNA, 181 bp, Homo sapiens
agtgttaagtgaaaaaaactaagatataaattgtaaatatggtataaactaaattatgtaaaaatatgcatagaaaaatctctgaaatacctttaggattatctctgagtaatgggggttatcattcatttttaatcttttaatgcaaaatttaaaatgttgttactatttttaagtattt

SEQ ID NO: 165156 - DNA, 536 bp, Homo sapiens
caaacaatcaatgaaaataaggaaaaatgttcaaccttacctaattaaaatccaaaaaattaaaatgaggaccattttcaaagcactaaattttaaattctacttctcagaattgattatacacagacttgtgcaagtatagaaagatgtctataaataggttccacaattaactttgcttcaaatcactccaaaaaaggaccaaagcaaaccaaacaaaacctcgggagactttaaatgtatattaataatagggacttaagataaatgtgagagcatcacttgggtacacatatacaataaaggaataggcagtcactggaaaaacagagctgtctgaatcatgctgtttaacaactcttaatggcacagtctctatcccaaattatcataatttactgtaaatcgtgtttcaagacttcttccgtatgaccaccacttaatatctacactgagtggaaagatttctgaattaatttgtcatagtttatttctatttatcagcatccatagtataaaaactttcactatacgct

SEQ ID NO: 165157 - DNA, 462 bp, Homo sapiens
aggttcatggaaaatgttcattatcaaaaacaactatgcatggatttccatttttcaccaaaataaactcacactaactgattataacatgtctgaacaggatctagtttgaggcactaagaagggtaagacatcagtttgaaaaagagcccctatcagggcaatatgagttctgctaaaactgaagcaagaacaaacatcaactttatggttaagcttgggtaaaaagaatggtgaaatcactgatgcttcagcaatagtttatggggataatgtcccaaagaaatcagcagtttacattttaagaagggacaaaatgatgttggagatgatgcccatagtggcagaccacataaattttcaaggaagaaattaatcttgcccatgcccaggaccaacaattttgatagtagagacaaaagccaacaccatagacatctcagttggtttggcttacacgat

SEQ ID NO: 165158 - DNA, 560 bp, Homo sapiens
ggtaagataactaacatttgtcgggtgtccactttgcatcaggcatagctactttatacacactattgcactgaaatcatcccaataacttatgaggtggatgttattgttccaatttgtacagttcaaggaactgtggcagagagaagtaagattgttgcttaagatgacaaggtcaagggtacagtcaggattaggatcctaggttcatttggctccaaagcctgtcatttctccactaaaactaccatgctgaatttttttttttgaaaatatggctggagtgccagcgagggggttttcagctcagtctttccattccagaatttttaagtgttcttgcagttgggtggtagggggtggagggagcaacccagctaaatcctgtgatttctgtgctccacaaataagtcaaacacgaggctctcaactgagaactttgaagtctgaaacctggggccaagaagtcttctgtttttattagtcaaagaagatgtttcaaaaaccagatttatcatgactggatttcagatgtgaaacccaatatacacacagacacg

SEQ ID NO: 165159 - DNA, 501 bp, Homo sapiens
cttctaccttggtccccgtggtcaccccctcagaaaagaagatgcatagtgtgaccccagtggagatttcatggcctctggacctcaaagtccctctggaggaccacagctcaactagggcctaccaagccacagaccccagttcagttgtctctgtaggcggaggctcaaagactgttcgcgcagccacacaggtgtgatcagagccagtggtctgccctgcacagggcgttttgggccagaacttcctatttcactccagcagcagccagggcctgctatgactgagggttggaccctgaaagtgggactttctgtctccctctcttgctgcagaagaagagtcttcctgtatttgtgcaagtaaggagatgtgacttcttggctgggaaactcttgctgatctaactgtgtggtttgcacaacctccaagcctctgcagcagacaggcagggcttgctgtgttgctctgagctagagagggagcttggccatgttctc

SEQ ID NO: 165160 - DNA, 653 bp, Homo sapiens
ctgtttacagtgactcaagaccctcttaggaacttcttcactgaactcaaggaggagatcaggcaagatctgtgctgtgcagatcctttggattgaggctgctgtgcacaggaatatgggtatttcctcttattccttactccactgcacctaatcaataaccaagaaccatgtaaccattgcttagagggacttgaacaggcagatgatgctggtgaattaaaggaagacagcctccaaaaaaaaaaaaaaaaaaaaaaaaaaaaaattttgggggggcctgggccccagaaaaatttttaagaacaccaatccgtgggggcggggggccccattacgagttgaaggtcacaactgggggtcctacaactgtggcgcccaaaggaaacacccggggtcagagaacgaagcgggcggtggagttcccacccccaataaaaaaaaaccgcgccgggcggggagccacccgagggtgttctgaggaaacaaaatccccagaaggggagtccccagaggcgcaaacacggggagtcaataacaagcagggtgtcccaaagaggacctctatattaaaataacgccccggcctggaggtcatcgaaccacaatcacgacgcacacccaacacacgaagtacacacatcaccacacgg

SEQ ID NO: 165161 - DNA, 150 bp, Homo sapiens
cagctgtgcagtataagttatgtgctctttcttttcttcttgacaactattatcaactcattcttaccgaaaaatgacttaataaacttctctcttctagcctcttttaaaagatctatgtagtttccaaaactcttaaacactgtagga

SEQ ID NO: 165162 - DNA, 142 bp, Homo sapiens
taattaggattcccattatacagatgaggaaactgaattttggagaggttaatttgtatcagggtctagcacagtcagagacctcttctgctatacacattgccttcctgagacccagttgtgggcttgctcttaacagtgt

SEQ ID NO: 165163 - DNA, 264 bp, Homo sapiens
tctcatggtgcagtttcaccatgttggccaggctggtctcaaactcctgacctcaagtgatctgcctgcctcgacctcccaaagtgctgggattatagtgtgaactactgtgccctggcctccctcagcagactcttgaggctggtcctgacagagccttagtctttcctttgatctcaaaatggagaagaaaccttgggattatttaatctggctcctcttgtggttatctttgagaaggcaccgtggtcctagactctttgc

SEQ ID NO: 165164 - DNA, 345 bp, Homo sapiens
aacttttaattacatagaatgtttatgctccctatacaagctttctgactcaacatcatcatcgagatgctcagcatcatcacaaacatcatatctgtcctcctgtacctttagtacaaacggctttaaagattaacttgtcattaatcctgttgactgggcacagtggctcacacctgtaatcccagcactttgggagtctgtggcaggggaggattgataccagcctgggcaacatgatgagatcccatctctacaaataatttttagaaattagccgggtgtggtgaatgcacctgtggccccagctactcaggaggctgaggcaggaggatcccttgagcc

SEQ ID NO: 165165 - DNA, 471 bp, Homo sapiens
gatattttagggtgggaaactatttttttggtagtgtcataaacaatatatgacagtatgtatttgtcaaaactcacaaaactttataacaaaaagagttagccttaatgtttgccaattaaaaaattatctaagtgactggtggatctcaggataaaatgcggaatgttgcaaaagactccaagtgtattagaaatgtataaaacaaccataccgcatggagagggagaaggtgggatctacataatgttgcaaatatgtggagtctggaatactaatggcaaaaggaactgtgcagaagaactgcactctggttggtaaaggtttttcacaatgggttatggatccacaattctgaaagcagcatacgtgcatagtgcttttgaacaattaggtacttaaatggtgagtggtgaaagtcaactttctcactgctggagtgggaggctacaagtaaggaagggaagagac

SEQ ID NO: 165166 - DNA, 516 bp, Homo sapiens
cccaccaagggggaaatctacttccccgtccttcaccaccagccctgtgacttgctttgaccgtgagaatgtgacagaagtgttgatgtgacagttccaggcctaggcttcaaggggccttgagcactcctctctctccaaacactgcctccactgggaacacaatcctggactagctgctggaaatgagagactgggtgaagcagggatgaatcattccagctaaggtcatcctagaacagccagctgcgctgacagctgacagcagaggcatgagaaagcctaccccaaatgactcaagaccagaactccccagctaattaaactcagcctaaattgctgatccccaaaatcgtaagctaaacatatggtggttgttttaagccactaagttttggggtggctttatgtagcataattctggtagtaggtaactgtttcagaagacaggaatggttctgataattagaaccacaatgactcccatatttatgtcaccagccaacacttctctcc

SEQ ID NO: 165167 - DNA, 664 bp, Homo sapiens
taactcagtgtgcttgtataactgtgctttcacataattagaaaaattatgtattgcctgttatttttatgatgtttctgaaactttcattcttgtatttaggtaatttttaaaactcttcatataccattgaatttcaggaaattatgtaaagaaaatagagctaatagtaacataatagattaacattaagaataattactttaacataaaacagtatgtaaatatgtttgatatttttataataataatgatattaataaattatgttattacacaatatattttaggtactgtgttaattatcttccatataatgactcaatctttattaacactgttttaatatatgttaataagcccattttgttgatgcaaaaattgaaccgcaagtattttaagccatttgctaaagttaacaaattcactgctgtagtctgaatgtgtccccaaaatttcatgtatttaaacttaatctccaatgcaatagtttcaagagaggaactttaagaggtgattgggtcgttagaacttctctcctttgaatgagttaagtccttcatgataaaaggcttcataaaacatttggccttttggccttttctgtctcttctaccacatgaagatacaatgtttggtttgtccccctctggaggacacatga

SEQ ID NO: 165168 - DNA, 346 bp, Homo sapiens
gcaatacttctgaaaactttagggctcatagttttgttgaagtgatagatgatggctatattctttgttacataacagcaaaacatttttgtttttacatttataaataccaattagaatgactttcagtggattggttttcatttttcacatcatctttaccttcctgttactttgtgtacatatctgtctttcatacttgtccacttacaaactttttcaagtaaattctggtgttacaagcataaaagatgaaagaacgttgtcacatggtcacttgtccttttagcaattatgcgatgattcaactgttctaggtacaactagagggagagtatcccaggca

SEQ ID NO: 165169 - DNA, 504 bp, Homo sapiens
taaattaagaatcttcagatggggagtttatcctgaaatatctaggggagcccactgtaatacagagagtcctcataacaaggagacaagagtgttaatgttagagagaaggctatgtgaggaaggaagcagccagtgaaggagatataatgacatcatgttggtggctctgaagacgaaggaaggagccatgagccaagaaatgcaggtggcttctagaatctgggaagggcaaggaaaccaattctttcctagagccttcagaaggaagcagccctgctgacacctagaggttagcccattgactatgcccggaaaacactcaacataccatctgatcccactttaaattcttgcctactgacttccagtgggctggaaggggtccctatctccgccaacactacaataatgcaatatttcccaccaatttaccctcctactctcctagacagctattttacagcttctgagctttcctcaaatctcccaacttctcttttg

SEQ ID NO: 165170 - DNA, 460 bp, Homo sapiens
caggagcctggagagaatggctcggcacagcagatgcagccgtggtggccatggagctgaccagcctcttgggagtgagctggccacctgagcacggtccactcagcccacacaagcagcagcaccacctcgctgacaggagcttcgtcaatgcctgccgcctcctccttccataacgagggaccacctagcagggactttcacttttatttccacagagaaccttgtggttagaagtccaatgggtctaggctgtgggaatcttcttattaaccacaaacagatgtcaaaaggatctttcctaatactgtagatactgcacttggctcgtgtgggagtccactgtctgtggaaacattactcgtctatttttcaggtctgcagagcccagactgaaaaacacattaaaaaaatggttttgtgaaaaataacaattcagacaccctggagcctaaggaaa

SEQ ID NO: 165171 - DNA, 236 bp, Homo sapiens
cttttgggggaggtttttgattactaagtcaatctcctttctcattataggtctgttcagattttctatttcttcatgatccagtcttgataggctgtatttttagtaatttgtcaatttcttctaggctatcaaatttgttggtatataattgtttatagtagtctcttataaacctttgtatctctttaagttgcaatgtctcttttatttataattttgagtcttctcttttt

SEQ ID NO: 165172 - DNA, 287 bp, Homo sapiens
tgttggacaatcactgcagtatgtgactttatagttttatgctccagaaaaaaaaaattctgtttggttggtgttaaagatacttgcatggaaaaggcccacctatcaaagtttgaagcagtgaaatagaatataacaaggacgtttacatttcttttggcacaaacattttcacacctgtctactcaggcatttattggccttaccattatctgcttgactgcaaaaaaggttttctgtgtacctcgctttcccattaattagaaataaaagtaacagatatctgc

SEQ ID NO: 165173 - DNA, 382 bp, Homo sapiens
cccaattgttttaaaagttagatagctattctccagaattcctgtacacaactgctcccactagttgagctatccactttcaagaatcatttatatttgtacaatgacctatttaagtacttgtatttttttaaactaataatgtatatatttataatgaatttatcacagtaaaatactatataaatggtaacatattagtctgaaacctgtctatagaagttgaatactttggaatggcacaataaatatgagcagcaaaaaactgtcaaactaattaatcaattataaaagattcaaaatgtattaaaaatgtacaattctgcacttacattacttcacaattgtttttaagcactggttccttaaatcattcaaaatg

SEQ ID NO: 165174 - DNA, 140 bp, Homo sapiens
gcccttgctaggctccagcaggtattagaaactgtcacaattgtccggcaggtaacagcataatcacattttgaatcaaaagtgttgttcaagctgaaatcctagtattcaccctcaattcctctgtttccctcacccgt

SEQ ID NO: 165175 - DNA, 350 bp, Homo sapiens
gatcaattgtcaggatttgcggtgaatatctattcaccttttctagtatacactgttatcattaccctccaatgacggttttctaaaccacctggtgatctaagagaagaccttcactctgctgtcaagtccttccatttttctaggaaacagagcactaaatacattatcttttttggccttggttggtgacgatttgaatgctactaacaaagcccttttgtccatactcagactccttgagtatatgacgggccagttatagaagcaggaagacatggttgccccaccatggtaacagcagttcaaagaccaactgcctccaactttcaaaacttagcatatttggc

SEQ ID NO: 165176 - DNA, 184 bp, Homo sapiens
aacagaaagcctcctcatcactagagcaactgcttcctggtcccttaagtgcttctaatgtttttcaataaaaaaattaaaaaccagtatatattaattttttttttgagataagagtctcactctgtctcccaggctgaagtgcagtggcgtgatctcagctcactgcaaccttcgcctccca

SEQ ID NO: 165177 - DNA, 224 bp, Homo sapiens
tttttgtccacagttgattttgcactcctgttctctgattcactgtgattgattttacagtttagctctcaaggtgaaatttatcttcctgccactcaaaatcctcaattcttatagcacctatttcagacatcactagttttcacataattctgagaaagaatgagcaattctaaagttcagtcaagactgattatgtcttttgagtatatttataaatatga

SEQ ID NO: 165178 - DNA, 262 bp, Homo sapiens
  misc_feature (14)..(14): n is a, c, g, or t
tcaaggacacaccntacacccctgtccccatactagttattatcgaaaccatcagcctcccaaagtgctgggattacaggtgtaagccaccacgccaggcctgttctgagatatcttaaatgatatagatttttataactggggagaacaaaggaccaataccagtcatgtgcttgagaactaccatatcagtgttgatgactcatttgctttcacccaaacgccctcttgagtcctttaaacttttttcccttcaacttta

SEQ ID NO: 165179 - DNA, 793 bp, Homo sapiens
attcctgggtcagagacaaagggtagttgattactcatggcacaataagcaacatgtacttcttgttggtttgtatcctttttctgagtcaacctaaattccatgggggtgacactggtgggcctctacattagcctgctcatgcagtacattgcatgacatacaatgggcattaggcttagggaatctactttaatagtggcagaaacaagcctgatattggtccaggaggagtcattgccttatctctccaggtggttatctgcaaatacaactctgagaaatggctcaggtaagaacatcacggtcttgcattggtggcatacgcagcaaggatgctcagggctgatgaagaagtgcctcttccaacacagggatatttttgaaatgaatttattacaatggagatgaataaagcaaacatttactcatcatatgcctgagaaaatgtcatgtcccaatgccaggatataagttgtctaagttaattttaataatcctgtgaggttatggttatttttgtcctattgcagatgatgaactgagggccagagagattagggagctggacagagttcaaccagccaggaagtgagctaggactggtggagcagagattctatcctggtttatctggccccaaagcagatcaccttgaccgttattgaatatttgacaggtgggacctagaggagggcaatatgttgaccaagggcacatagagcataggagacagagctgagacttgaatgcaggtctcttgactccaagccatgggtcttcatctcctata

SEQ ID NO: 165180 - DNA, 559 bp, Homo sapiens
ggtctcagatctgctggctgcttctggctggttcagtcatgggaggctttggtgggaaaatggatgatgggaggcagggaaaagctaaggtatttctcctcccctctctctgttcctagaagcgtctctgccaggtaaatccagcccctgggctccaggaaccctgcctcctcccatggtccctctggcctataggcagctgcagcttcctgctgctcccattctatggatgacctcactgctacctatgtggcttctcagctttaccatcttctgtataagcagcccctggattaaatccctgcagttcaaatacttaagagtagttcccattttctgggttggacctaacagacaacagcaggctaagttgtcatataactaaaatgtagccgcttgttcaacttgatgccaagagggtttccagaagttccttactggtcctctctgtgggacaaactcttcatttgacccctggtttagcagcagtcaactctagaagtcttgtaacagggcttaccttcaggagtacagaaagccaaagacaaccccttactaa

SEQ ID NO: 165181 - DNA, 315 bp, Homo sapiens
catgttgcaatgtctggggacagtttagtgtcacaaccaggtgaatcgtgctactagcatctggggtcagagaacagagatgctgttaaaatcccatgatgcacagaacagacccgaacaataaagaacaatctgtccagaatgtcaacagtgccaacgttgagaaactctgttttagattaactgccaaaaaagtacagaagataagcacagaagtaattacatatacaacataacttgaacagtaaattacaaataatgcttttttttttttttgagacagagtctcaatctgtcgcccaggctggagtgcag

SEQ ID NO: 165182 - DNA, 177 bp, Homo sapiens
ctcagaggggccaggaccattgagagggaaggcataggggatagaagttcacttcactgcatgtgttcacatgcctggcaatgtgctacgcacttttcatacaacattctcaatctcatcttcacaaacctctttgggcatctgtattaacaaaaacctattttaaagatacgaaaa

SEQ ID NO: 165183 - DNA, 220 bp, Homo sapiens
ctggtcttgaactcctgacctcaaatgatctgccggcctcagtcccccaaagtgctgggattacaggtgtgaggcatcacgcctggcctcttggcgtcttttggccctttggcagtgtccccaaccaggcagtctgctctgccactaccacacaggcatagctgaggacaaaagatacccagtccaggccaggcgcggcgtggtggctcatgcctgtaat

SEQ ID NO: 165184 - DNA, 697 bp, Homo sapiens
tcaaattttaccttgtgatgtatagataataaatacatttacatatatttcacttcactttagcaattttgtgagttagacaaaaattagtttttttccattttacatatgccacttaatgatgttaaaatatttgctaaagccacatagctagttaaaggaagaaccaggactggaaccctgaaggaaagatagccaatctccttctctacaaggatgaagccagatggatcatgtatctattaccgcaacactgccacataacaaacaactacaaaagctcaacagcatacagcaaagcctcatctttgctcatgtgtgtatgggacatatcaatggttctgctgatctgggcccagctcagctgaatgcagcttcacgggctcaaataccaaaaaaaacagttcttttttaaccagaagagtcatatttgtggttattctaatagttagttaaggatatagagtcaaattttatctcagtggctgcaaataagataatcaactgtgcagccaggcacggtggctcacacctgtaatcccagcactttgggaggctgaggtgggcggattgcttcaggttaagagttcaagaccagcctggccaacataaggagaacctgcctcatcgtacttaaaaaaagattatgtcctgttttacagtgcggttaactttatatctggtaattaatctaaat

SEQ ID NO: 165185 - DNA, 395 bp, Homo sapiens
tgaacaaagtagccccaatgaggaggttttttcatatcaggcacaatcttctgcacatatttgtatggtgtaaaatacttccgctatacccctgccttaatatctaccccatctagataccagtgttagaaatcccactattgagatgagagtccttcagatttaatatagcttttgtaacttagtattttttcccccaaatgcaagattctaggaaagtctgagctattcacactagccctgtgattttctttcttttattacttttctttatgattagaggtagtttatagaaatgaataccacctggatgggtcaagagataggagatgagacaaaagagaacatgaaacacgagaaaaactatttcacaaccttgggtacaactagttgct

SEQ ID NO: 165186 - DNA, 334 bp, Homo sapiens
atgccaaagcgtagtacccaagcaccttgtgatgtcccaagccacagctgcggctctaagtggcttcctgcgagaccgattgccagaccacctggtttggtgagatcagagtccctttattaggggcatggtgctggtgtctacggagcagtgattttttggagaacacagataacattacaccttccagtgtgcattgacaatgttacatggctcttctgcaggggaaccagggcgtggaggctgagttggcaagcaggaggtgtgcccctgggatgggctgggccagaccgggagctttctgggagttgggttgggtactacgctttggccc

SEQ ID NO: 165187 - DNA, 283 bp, Homo sapiens
ggctgccgtctcacgactgacggctttatataggattcacgaatactcaggaattttccctagggaagttcattctcaacctcaccattctgttctggcagggcatgttaggatcttatgtctttgtaaagctttagaatctctcatggaaataatagcagttttatagttgagaataaacagtcgggcgccgcggctcacgcatgtaatggcagcactttgggaggcagaggcaggcagatcacttgaggtcaggagtttgagaccaacctgacaacagaaa

SEQ ID NO: 165188 - DNA, 440 bp, Homo sapiens
attcttactgagtggctgtagtcaaagcatgatgcactctgatttttttctctttaaaaaggtcaagaaattttggccaataaatccatttaaaacaacaaaaacgaaatggagaggaacagctgaaaatagcaccagtaacaactgcaaacagtattctctataaataagctatttacccacacacaaaaaccgaagtcaggtcaacacggttggccttttcgtaattaacatatagttgagacaagtttctcctgagaaaagattttgcttagcaagcaatagatctgagtgcagaagagtttctaagttttatacgaaaaaagtgcaacaatacgccctttaaagcccaaatacttccaaatgatcaaagagtcaaagatgattaatgctattcaagaaaaaccctcactgattctttgcaagttctacatgcatca

SEQ ID NO: 165189 - DNA, 720 bp, Homo sapiens
cttcaagcccttcatcagtttaggagtatgttttgtgttttccctatagtttttttctttctgccaaatgttacctcccactagtattttaagtcaaaatttaattttattgtcctttaagactggggttttttgggccaatatttaactattgtaaagtatctctttgtaagatcttctgctaaaataatgcattctaagcatccggattgcgattttttttttaacatagagcattttagaaggtacagtaagctctacaaaacattttctttggattggttacattttaggaagatgaagtctgttttcctgatttttgtttaatcgctttatttctgagtgtctttattgttactgtaaactgacaattatttttactagtgagtctaatccaagattaatagagatcgtgacttattttaaaggaaacatattttttaaatctaaggtcttagtcccaagtcacacaaatcattattagaatttataactctctaaggcttcaactgtttcttcacttccttatatatttggttgctttactatgaacacattaattgattcttatacaaggagtctttatcttaataatctgcttaaaataattttgataatgtgtattttgcataagaacaatgaagaaaatcagaagttgaaaagttgaatctttaatttacaaagacttattttctcattagaataataaaggagtgtgta

SEQ ID NO: 165190 - DNA, 246 bp, Homo sapiens
agagattatttttcagacattcccagtgtcaccaaaatgagggcaacctgaccctggatgatggggtatctaaaattacattcctgaaacccattaacggtcaaacagagaggagagtttatttggcagccaggtttttaactttgttgctctagctgatgaaaaggtttgttgtttgaggtcagcaattacagtttgaggtttaggagtcctttggttttaacatgagcagagagataagtgact

SEQ ID NO: 165191 - DNA, 321 bp, Homo sapiens
attgtttaagagattagctattactgactcttgttaactctacattagatacaatacatatttctcaatcatgaaagagaagagatggaatgcatggaacacaagagtagttttcttgaacacaaagctatggatcaaattggagagatcatgtgatgtggtggaaaagagcacagcggggaggaggccgaattttcactcctaagtatgcccacagttgtgtaacctgcaagtcacttagcttgctgcagactcagtatactcatcataaaatgagaatcttgttttagacaaatctaagatctcttctttctctgccat

SEQ ID NO: 165192 - DNA, 522 bp, Homo sapiens
ctgagtagctgagactacaggcacatgccaccacacctgggtaaatttttaaattttttttttagcgatagggtctcactcattgcccaggctggtcttaaactcctgggctcaagcgatcctcccgcctcagcctcccaaaatgcttggactacaggtatgcaccaccgcgcccagcctcctttctggttttctaataaagccttttgttcacctccttcaaacacttccccatgctcttcaggtctcagctcaaacaggccaggcccggtcccctgggtcctctctgtcctccgtctcctggttccctgtacctctccaaaagcccccacgaccaaaagaagtaaagatgtagggccgggcgcggtggcctacacctgtatttcccagcactctgggaggctgaggtaagtggatcacctgaggtcacgagaaccgattgaaccccagaggcagaggttgcagtgagccgagattgcgccactgtactccagcctgggcgacacagagagactcaacctc

SEQ ID NO: 165193 - DNA, 891 bp, Homo sapiens
aggatgtaaatgccactgcttttgtaaaggccgggcttatttcaacatatttaacccttcactggacaaagtgttttgaatgctgatcctggcattttcagccaaccaggccaatccgaggacgtagacaggacagcatagaccagtgctgggggctgcgggacaaatgagtggacttttccatcatttgcctgcaattcctgaacaaggaaacaaccacccccagagagcagatggggatttcccactggatgacgaggacaggtcaccccagtgcccaccacccgacagggtgtctgggaaaagacataccatggcaagttacccaaactcactgagctgctgcctacccgtctggaaaatgggaacacggtccctagccacggaagtgcccaggacacacaactcaggcagaggtcgtttgtgaatggccttgtgccggcttaatacttaggactgaggcacagttctaagacaggtgggagatggtggcgaatgacatgggacacgtgggctgaggtgaaagttctgcttcttcctcccagacttacattccactgctagaaacattcaatcagaaaagcctggccaaaggctgggcatggtggctcacacctgtaatcctggcactttgggaagccgaggcgggtggatcatgtgaggtcaggggttcgagaccagcctggccaacatggtgaaaccatatctctactaaaaatacaaaaaattggctgggtacggtggctcacgcctataatcccagcactttgggagactgaagtgggcagatcacctgaggtcaggagttcgagaccagcctgaccaacgtggagaaacctcgtctctactaaaaacacaaaatgagctgggcatggtggcacatgcctgtaa

SEQ ID NO: 165194 - DNA, 544 bp, Homo sapiens
acaaaactcctttataaagcctgacatcatctggtactctttcagactaacttcatatattgccctccagatcagccatacagtccatttttcagtcattggttctcatattccatttcacccacgcgtttactcaacaaatctctgttgagtcccttttatataacaggacattgaagatacagcattgaccacaatatataaaaattcctactgtcatagagcttgcattctactgaggagagataataaataaatatgtaaaacacttagtaaatgaaatgaagacaaatgcagtggagaataaaacaactgggaaggggaatggggagtgccaggatgtgaggggcaaggttcacttttaaataaggttgttagaaaagacataatccagaaggggacaattgagatatgaagtaggggagggaataaaccatgtagatgcctgggcaaataacattctaatgaagagaattagtgcaaaggccttgggcagaagcctgagtgcgcatttgagaaatagcaagaaggctagtgtggctgg

SEQ ID NO: 165195 - DNA, 535 bp, Homo sapiens
aagatatgtgggatgatgacacttcatagatgaagatcctgagtttagagatagagaacaacatgttcacagccgcacagcgagagaggcctggaaatgaaggtgctggcacccttgactcttaaagggagccattcattttgcttcaaagcatttcacaagcccaaggtactcggaggtaaatgtaaacactgtccacctcctgggaagggaacagaagatgagagagggaaggctggaaaggtgtgttacctgttttatatcaaccatccaaccaaccaaccaaccagtacttattaactatgtcttggttttccaagtaagtacaaagacgaatagttcacactgattaaatgctgaatggtttggagtacctccacatgtcaaacaactctttggggaagggactgttagttttcttggtacagacagggaaatggaagcccagagaggttaagaaacttgaccaagattaggcagattgacctcagaactcggcttttaaccagaagtacagacacactctttgctatta

SEQ ID NO: 165196 - DNA, 201 bp, Homo sapiens
gcccggcagggttcattgacgtgggcgggaagactgggaagacaatgctgataatacacctgtagctcaagcacttcactgggctcagagattgacaggcgtcatttcttcctgctaaggccttcagaagtaggcatattattattattattatccccataggacaggtgagaaaatcgaggcacagaacaattaaaggca

SEQ ID NO: 165197 - DNA, 262 bp, Homo sapiens
cggcatcccaaagtgctgggattacaggtgtgagtcactacgcttatcctgggttctagcttctggctgctatatagtaactgcaaaaggactgtttttcctaagcctttgacccagaggtttggttgtgctcagtctttatggggacagaggagtagtctctcttcccattagtctgagtactgagtgattaggggacatttttgttcatctcaatatctttattccttttcctctcctcttcatcctgactttccctcta

SEQ ID NO: 165198 - DNA, 297 bp, Homo sapiens
taaaagtgtgtgggtatcaagagtaaccagcaggttggataaagaggggtattgtctcacaaactgaaatatctgcattgcgattgatcctatcaaactaaatctaggctctgggaatgcacaaaagaccttagggtgtttgggagtatcactcgataattcggagccctcaccctgcggaaaaggtctctcctgacctcaccaaacatttctggacattagaaacaagtgtcacaaacacaattgtttccttgaagaacaaccatggccaggcacagtggctcacacctgtaatcc

SEQ ID NO: 165199 - DNA, 262 bp, Homo sapiens
ttagtttataggagacactgtatgtggtagtttctttcaatgtcatgtccctgcacactgccccttcttacattgacacagggaaaatattaaatttcactccttatgttgtaacacattcaaaaacaagtggatattaaaaattgaaatctgtaagttgaagaattcccccccatcttccccactacatatgtaaaattatctagacataaaagtacttttggctgggcgcagtggctcacgtctgtaatcccagcacttt

SEQ ID NO: 165200 - DNA, 373 bp, Homo sapiens
ccacctcggcctcccaaagtgcagggattacaggcatgagccaccgcgcccggcactagaatataggtttgtgggactgttccagtaaagggggagaaattgacacatgagaatgaggggatgacagtattaatgaagtctttggataagggaagatggaagccaaaaaagtcacagggcgacgttaagagcagaagtatttcatccaccacactataagggaaggaaggcaaagaatgagggtggacaagcaggagattagtagattaggttatgggaaaataaggaaatttacttacttatttatgtatttatttattaatgagatggatcaccttctgttccccaggctggagtgcagtgtgcgatctcg

SEQ ID NO: 165201 - DNA, 406 bp, Homo sapiens
agcaaattcttccgttctttgcttgattagggccaggactcaggtggagaagcaagccactgagagtgcaaaatttaaggaactcactctccaggtggtggaaagcatctgacttgcctcaccctattcctggactggcctaatatataaaataaagcaacagaggagactagtggccagccatcaggtagcttgtactctgtaagaagaacaaggcaggggacaggtacagtggctcacgcctataatcccagcactttgggaggctgaggccggcagatcacttgaggccatgggattccttgagtccaggggcagatcacttgaggataggagtttgagactagcctgcccaaaatggcaaaaatctgtctttactaaaaattagccaggcatggtgatgcac

SEQ ID NO: 165202 - DNA, 168 bp, Homo sapiens
ctgagtcatatcttaccactggagaaactgaaaggaaaagatcccattacatatgagatggaaattaaaagtggtttaagaagattctgatttctcatttaaaaagccccaaagagtaggcgtagtgactcacgcctataatcccagaactttagggggtcaaggcag

SEQ ID NO: 165203 - DNA, 281 bp, Homo sapiens
cagcaggggccaggtcggggagtgggtgcagagagccttggagaggccagagaggggtgattcggtgcccatctagggcttcctttttggttagcgatgcttcagggcacctgggagacatgaggagctagaacctgtgttgcagttcccagctctgcccctgctccctgggtgtcccaaaccctgctcctttccaagaaatgttgggttctcatcttcaggatggtgggtgctaatagggaggctgaggtgggtggatcacctgaggtcaggagtttgag

SEQ ID NO: 165204 - DNA, 299 bp, Homo sapiens
tacaggacaagcgctaatggcagaagagggttggagaggggaagacagttgttagtgggaagggaagtgagaatgacctagagttgagtccacccgaaaagaggcttccaggtagctggcaaaagtgggcctgggtgttgggtggctctgcagggaggtgatggcagtgcacggccagtgtgggggcgacctggcagattctatgaacttcatgtgccccgccccttgccgcagcgtgtacacttctctgtctatctggagaagcctcagtcataggcaggagacggcgtgatggagca

SEQ ID NO: 165205 - DNA, 564 bp, Homo sapiens
ggcccgggaggattcagggcttcaggttagcacagtattgaaatagaagcccaggtatcccctgctcccggcggaaaccctctggccactccacgctaccctcaggctgagcctcccagcggtgtccaaggctctcctgggctgggtgctctgtccaccgcggactctcctcccttcaccaggagacaccgcatcccagcaatgccacgctaatgtcggtgtcctgtccacacggcgacagcaacgttgctccccagatccgtcctgacgctgtcggctttgtgtgtcctccctgtgctccctgtccctgcctggccagccccggcctcaacaggcgctcatccgcaccgtccccgcctgacgcctcgtctgagcccggtggagtcctcaggaacacccctggtggccgcgacatgcggctctcagcaccctggcctgggtctcggcgcggttccaggagtggcccggaaggtctgcaggccccaggagccggacgcggatggcgccgcatcgcagcagacccggcctgaaggcgcccggggacccccgcccggaggcggccgc

SEQ ID NO: 165206 - DNA, 177 bp, Homo sapiens
ttagttgtcatgttttcagtctctctggtatatgagtttgtcagtcttgccttgctttttatgaccttgacatttttgaagaatactggctagatatcccacagaatgtctcccaacttaggtttgtctgatgctattctcgtgactagactggacaaatgagtttttgcaaagaat

SEQ ID NO: 165207 - DNA, 352 bp, Homo sapiens
gtcagaatgatctgtacaaaatgctatttcacttgtattaaaatcccacatttatgatagcctatgaatccccatgtgatttgcacttgccctcctatctctctgacttcctctcactactgtcctcttgctcactctgctccagcccttttccaagaacacaccaggccccctcctgcctttaacattagagtatttggtttgtgttccttctacctggaacactctcccagcagataaccacctggcctcactacagcagctccttcagatctttgctccaaaatcaccttagtgggtcaaccccaaacatcgtattttaacagatgataatgcccttcactcgaaaccc

SEQ ID NO: 165208 - DNA, 327 bp, Homo sapiens
tccttttatatcatgcttttaaaccagatagtgctttagaaataaaatagagttttggctcacgcctgtattctcagcactttgggaggccgaggtgggcagatcacctgagctcaggggttcaaaaccagccggggcaacatggtgaaatcctgtctctacaaaaaatacagaaattatctgggtgcggtggcgcatgcctgtagtcccagctactcaggaggctgaggtgggaggattgcctgagcctgggagatcaagattgcagagagctgtgattgcaccactgcactccagcctgggtgacagcgtaagacctagactctg

SEQ ID NO: 165209 - DNA, 490 bp, Homo sapiens
ctgacaattatttgtgaaaggaacaaacattcctcttggaagggcaagccattgtgttactggaaatttgcagtatttgtcataataaagagagttttacagcaagaatgaataattagggcattataaaggcaaccaaaatagctggcctacctatgatgatccattctaacctcccatattgctctacaaatacagcagtgaattaacgcatttatgcccggtgttccgttattggaatgctaagcttgtgggagttctttatatcctactgcttaaggtcattgccagtgtcttctttttcacacacaaaaaaactgcaacctctggcataaatggattaagggttctagtctcaacctgcctcagaagtgatgtatgaatctggtctcatgtcttttaacctacttagcactcaagttttcttatttgttaaatacctataagtatagctatctacctatatctcatggagaaagggataagataa

SEQ ID NO: 165210 - DNA, 652 bp, Homo sapiens
tagctgtcttctcaactcaaccaacagactgggggttaggatatttattcatctttgtaattcctaatttaaatagagtagaagttcagatacaatggtgaacacattgtaagtgatgaataaatgattgcttgtatgcatgtgtatttttcatgttatattaagaaatgtgtgtgtacacacacacacacacacacacacatacacagtaaagcgtataaaccttgggtatagagtttaataatttttatatttggatactccatgtgacagccactcaataattccaacttcttagaggtttcctcatgctcctttctagccaataccttctccctgccactagaggtaacttcttttttgattttcatggaatgaattagattagttttgctggtcctgaactccatgtggactctataaatggagtcagatagcatttactgttttttgtctaactcaacataatgtttttgagatttatatatgctgttacatgtatcagtagttcattcttttgcattctggtgtggaattccattgcacaactatgccataatttatttatccattctcttcttcatgagcacaaaagctattcagttttcaattattaggaataaattactaccaatagttttgtacctattat

SEQ ID NO: 165211 - DNA, 489 bp, Homo sapiens
agttctatatttacagtttcctcttccattgtgtattagcttattagctccacttatcagatgaggaaggtaaagctcagatgttttagtgacttggttagtagataatgtgccactgaccagagccagtttgtctggctcagggctacatgcaaagtgtggctcagcatcacctgggagcttgctagaaatgcaaatttcttgggcctacctacggagtcagcatctctcaggatgaaacccaggaatctgctgtaggaagttctccaggtaatttgtgggcacaccaaacttcaagtagcactgtttgaactatgattcagagagctctcatcaatgtgccatactgccatctcagccccaacttcaaactaagacatcctcctggacaataggataaggctgaccactgtgggacacaatccggatcagcctctctcctcttcttccctttttcctgcccccacataaccatacttcagtgaacat

SEQ ID NO: 165212 - DNA, 275 bp, Homo sapiens
ggattaacaggaaacagctgcaaatataccgttaaagaaagatacgcaggggaaaatgctttgacattagaaaggttttgtttgtttgttgttgttttaaagacaaggcccttggagatcagcctttccataaatcaatgaataaggaagaaaggatttccatgaagatagtgccaggcacaaagtagatgctcaataaatacctttgagcgattggatagggagaggtggttgccttcgtttttaataagggagacataaaccaagataaacag

SEQ ID NO: 165213 - DNA, 111 bp, Homo sapiens
gtccgtctctctctctgtgtgtgtatgcatatatttttctccctacctcactaaaatgaaaaattcctgaggataagaaacaccttatttttaacacctgttttatagata

SEQ ID NO: 165214 - DNA, 358 bp, Homo sapiens
cctttactgtatataacctaatgttgataagtttaaaaagattaacaatttatagtgtattatccagttacaatgaaacctaattaaaaattagtgattgtaatctaggaaagcgaagctcttttaaatcatccattactcaaagaggaaatctctaaaatgtaaattctgtgaaaagggagtttagttttacacactgttttgttcccagcatctagacgagtgactggcaattagtaaatggttaacaactattattataagaaatgccccaggggacagagaaagaaatgataaggaaatatgcaacgatttttcatgagaaataaatgatgaacaggtttttcatgaaagatgt

SEQ ID NO: 165215 - DNA, 332 bp, Homo sapiens
cagggtcttgctatgttgcccaggctggccaccttgatctcccggcctcaaacaatcttcccatctcagcctcctgagttgttgggattacaggtgcatgccaccaagcctgacaaggatgtagtcaatgccacagttttacacaaacaaagaaaatacacaaccttggaacttaacctatgacagcactgactgcagtaagatccgactcataaaaaataagcattgagattagcttctcttgacacaatggcactaagaaaaaactgtcatgttttgaaacatttattttcagttgctcgggggaagaaaaatggaagtcccacacttca

SEQ ID NO: 165216 - DNA, 564 bp, Homo sapiens
tctctttccacaggccaaggcaagagagaagaaacttcacctaggtgctgagcctagtgatatgttacaaagcttcctattgacagaacccccccccccccaccaaaaaagactcacatcacctgggtgcagtacccagttatgtgtcacaatgcaccataagtgcagggccaaggcaatagaaggaagtcacatcacttacatgatgaatctagataaaagccgcaatgctctgtaggcagagttcaggccaagatttcacatcagctgggtgctggtcccagtgatatgtaaaagtgccctttgtcgcactgccaaagaaggtgttatacattgcttaggtgcttggtccccgtatgtcacaatttcaactgtgctctaggcctagaaaggagagtccaaacactcagatgctgggcaaagtcatacttcccaatcacacacttgaaaatgttcagaaaaaagtttcctagtgccacacaagtcctggcttcgggtatgagagtcaacacctcctatgagttgggtcgaagcacaggagtcacagtcccctgtggaaagatc

SEQ ID NO: 165217 - DNA, 558 bp, Homo sapiens
ctagagaatctttttttctgtaacaataaaatagtccaggtgtggtggctcatgtctataatcccaacactttgggaggtcaaggtggaaggattgcttgaggccaggagttcataaccagcctggacaacataatgtggtcaaattagaattctttaattcagatttggctggctcataactttgcctttattggtgatatatttagttcatttatatactgtcttgaacaaaaaagagctaccctttctcagatttttatttatgttcattttaaatttagatatagggtcttgttatgttgcccaggctggtgttgaacacctgggctcaagtgctcctcctgcctcagcttcctttaatagttgtgattatcggccacaccccgacctctcagaattttttaaaggtggattcactaatgtatgtatatatatgttgggagtacttgtttagtttaaaaattgtcattacctgaagcttaatatcccgtacaaaataagcaatttcagtcatgggtttttaaacttgttttagtttttgttcaaactaaatctc

SEQ ID NO: 165218 - DNA, 537 bp, Homo sapiens
gattgtgtcttctgaaatacagagtttcaacccctcattttatttccaaacaatcacttttatgttactctctagagaatgaggagggtcggatcttagatcatggggcatgctatagctgagaacggaaaaaggggagcagaattacttaaagacttcatctcttcaatgcagaggatagtaattgatattacttatcaaagtatctcttttctagctatgcaacatgaagtttcaagcaatttattattgtcattgatgtctcaattgtgtacataatccccttttcctgtcatttacgatactaaaatatactttagtaaaatatagtacatattttaggtttttatcgtattgttttcatggctaagagatttaacaatttcatcttttattataaatgttagaaggtttatgtgaaaatagtgaataatcagtaaataatctagcttctttttctaattgcaatgtttttcttaatatgacaatgtactgaaagctttgttgattaaaagtggaatgtaacacgttcatagt

SEQ ID NO: 165219 - DNA, 267 bp, Homo sapiens
aaccaccacccatttccccacctccaacactaccgcccacggctgggcgagaagttgggaacttcgggaccacgctccaggcgcgcgcagagagtcacttgcttctcctttaactttgggagccagggtcgcagtctagggcaggaggatcgtcctgggagccaaccaacaaggccgtccaggtcctggacttcccggaatagagtaacggctatgggatgggaaagaaatagggggatacacgttccgcctcccttctcccaaaag

SEQ ID NO: 165220 - DNA, 495 bp, Homo sapiens
attttacgtggcgccacagcgtttgttttcaaagtttgaacgtgaatgtagcaagcataattttattaatgaaaatattctttagacaactgttaatattgacggaagaagagaaacagagacacggaagctaaagagttgggaatcctaaaggtcaaaggatgtttctcagttactctgatgtcgtgtgttttctttcagttggtacaaaatcgtgagtagtttaattatatcctgcagtcaaaatggtggctgtggtgggaggtgccgcctgtgacagggccatcttgggtgctggtaaacttgcacctagtcccttttcttccttgcgagataaagttgaggtggtgctgggattatgagttcagagtttaaagacccatcctaaaaatattgttggaaaaactttatgtctcaaaatccatgtattcccattttgttgatgaaaagctagaggtaactcattttgccttaagtactcgcagcatatttaga

SEQ ID NO: 165221 - DNA, 324 bp, Homo sapiens
agaacctacctgagttcacatttctttgtgcttcagaaaaagcatcacattttatttctttactggatttcaagttccttgtgggaacggatgtgggtatcatatcattatgaccagaacattgctcgtataaatgtcagaggaattccaaattgcaagttgatgatgagagccaagctcagctgttatttctcaaagaggcaaagaatctaactgtgattatgttccctggaaatttctttttattgatccaggaatttttagatgtagtcaggggacagaagcatatgctgacatattcatcaagtcagggtggcctataga

SEQ ID NO: 165222 - DNA, 495 bp, Homo sapiens
agcagttggctctgacgggctctaaaatcccttctagagtggaactgttaacagtctttgaaatgccaaatcaaaatataggatgtaaacactcatttttacaactgaccagtgactaattaggaatctttaaaaggaatacaacattggctttgtcctttctgctatattctgtcttccctgagagggtaagtcattatttttgagttaattaatgcactggcaactttgctattctcttaaggcatgaacaatctctttgaactaaaaagttattactgcaggatttttgcaaatgtgaaaaagcacacttactttgtctttcgcagaagcctaatataaattcatgatttaattctcttctaaatgaatagccacagagcctgagtaaggaatattaacccttctattgtcctccacctaaattatataatcccatggttcagaggccattacatatctctgaatgagctttggtaaattcttcagctcaag

SEQ ID NO: 165223 - DNA, 340 bp, Homo sapiens
aattgggggaagtttccaccatggttcttacagacagaagatctgggttcattgtttattctataccttcaagccatgtctccccagcttctatcttttccctacatacaggctcaattcccatatctcttttttcttcaaatcctccccatcttaggaccctcttttgctatgaagctttccttggctgtactggccaacattaatccgcttctcctgatggcgaccttgtacatgccaggcaccgtgctagacacttcatacccaaccgcatgcttaatcttgccaacaaatctgggaggagagcttcccctttcacagaagaacaaagtgaagttca

SEQ ID NO: 165224 - DNA, 533 bp, Homo sapiens
ctcagaagcgaggcagccgtgaggcggaggacaggctgggggatcccaaagggtgcgctccagcccccaacccaggcactgggactctggtggcaccctgggtggcaggcaagccttgaaatcaagtgcacgagccttggaaaggaggaccgggagagttatggcatttatgaatgaagaagagaaagagaatcactcggatgggaaaagttaactggattgttcccacctgcatggatcaccgggatgaagctgtgccaccctgtaggaattagaagaccatgtccaggaattgagcactgggtgcaggatccagtcttctgaggccctgaaaccacatgtggtcctaatatgctatttagaaaatacaaagtggaaagaagaaaaatgaaagtcacgcatcgtccttcaacccggggacaactcctgctaacactcggatggatgaatttcacatatacatataaatattctcatctacagtcaaatttaataatgtgaatgccttaataaaccactaattcttcaatttc

SEQ ID NO: 165225 - DNA, 492 bp, Homo sapiens
ctcagaagcgaggcagccgtgaggcggaggacaggctgggggatcccaaagggtgcgctccagcccccaacccaggcactgggactctggtggcaccctgggtggcaggcaagccttgaaatcaagtgcacgagccttggaaaggaggaccgggagagttatggcatttatgaatgaagaagagaaagagaatcactcggatgggaaaagttaactggattgttcccacctgcatggatcaccggcagcccatgagggaatcagagatcattgatttcttcctgggggcctctctcaaggatgaggttagaaggattatgccagtgcagaagcagacccgtgaccggccagcgcaccaaggtatcaaggcatatggtggctatacggggactacaatggccacgtcggtactggatgttaagtgctccaaggaggtggccaccgaccatccgtggggccatacatcctggtccaagctctccaatcgtcccc

SEQ ID NO: 165226 - DNA, 939 bp, Homo sapiens
ctcagaagcgaggcagccgtgaggcggaggacaggctgggggatcccaaagggtgcgctccagcccccaacccaggcactgggactctggtggcaccctgggtggcaggcaagccttgaaatcaagtgcacgagccttggaaaggaggaccgggagagttatggcatttatgaatgaagaagagaaagagaatcactcggatgggaaaagttaactggattgttcccacctgcatggatcaccgggatgaagctgtgccaccctgtaggaattagaagaccatgtccaggaattgagcactgggtgcaggatccagtcttctgaggccctgaaaccacatggtgagaagttgaaggtcacacagctgaagcaacttagccgtctcgccttgcggcctggaacccctggcaatttccggagcaccggcaagagacttttgcacagtttctgcttggagtctaccgactgtctgtctcagaggtctggacagctgcttgttacatttggctcacgctagcttaaaaaaggaatttatggaccttactgcagaacgtcccaattcttcaggccaaggtgcctgtgttcctgctcggtttctggattgcttggtacttaaatgaaacatcttattaatcatttcccgggaatgctgtgcaggcaaaaggaaaacaaaggcattcaggagccacagaaaagtgtactggctcctgtcctggatcaactcagaaaatgaaacacatcggattctgtccaggccgggcacagcaacctggcccatccatgtggagcctgcagtgaccacttccgctgtctgcacaaaactggagggaggctgggggtgctccaagtataagtttcctcatcagcaaaccggaaagagaaagaccgacctggaggctggttatggggataaaataaatatgtccttatatatgtgta

SEQ ID NO: 165227 - DNA, 242 bp, Homo sapiens
agattaactaatttattgaaagtcagataatctatgtcagatctgggattcaaaacttcatcgtttgaatacatagcctaaacttttaaaagcagtactcatccaaaattgacctcctgatcatccttctatggctgtccaatcattttctccacttctaacacctcagagttaccaagcatccagtctaaatgaatctctgtcttctgcctcctctttcatctaaacattttactatctag

SEQ ID NO: 165228 - DNA, 584 bp, Homo sapiens
  misc_feature (102)..(102): n is a, c, g, or t
cttaagatgatcccatcaccagagaggtttctctaccattagcttccctcttccggccattcttcacaaagtcatttttctaaattctgtgtcacatacgangatggcatttctggaaattccttcaggtgctctcaagccctgctgcagagatccttttcagagcacacactgttccagcccatctgtctcaccctctcctgttgtatccagctccacgacaaacttctgccttccccaacacctttgtgcctttgcatatggtgttttcttgcccattttctgctcgactcgcccctgattttcaagttcaagacttaactcagggttcaggtcttccaggaggccttacttatgtcgtcagtctggggaactctccatgtgcttctatcactgtgcggttacctctttcacagcccttttaaagttctatcttccctttcccaccttttttgaccttccactagaccatgagcacctgggcggaaagccatatatcttattaagctttatatctgctacctggccgagggcctaattcatagtggagaataaatagtcaattgaataaatgaataaatatc

SEQ ID NO: 165229 - DNA, 459 bp, Homo sapiens
cagaatctattctcttctctccagtcccgttgttatagtcttcactcatagacagcccatctgtctcaccctctcctgttgtatccagctccacgacaaacttctgccttccccaacacctttgtgcctttgcatatggtgttttcttgcccattttctgctcgactcgcccctgattttcaagttcaagacttaactcagggttcaggtcttccaggaggccttacttatgtcgtcagtctggggaactctccatgtgcttctatcactgtgcggttacctctttcacagcccttttaaagttctatcttccctttcccaccttttttgaccttccactagaccatgagcacctgggcggaaagccatatatcttattaagctttatatctgctacctggccgagggcctaattcatagtggagaataaatagtcaattgaataaatgaataaatatc

SEQ ID NO: 165230 - DNA, 369 bp, Homo sapiens
aagacagttatatgtggcttcttattgtggcttacacttcctcagtagatggtggctgggttccaagaacaagcattctgagagaaagtcagatggaagctctatcacctgttatgatactgtctcaaatgtcacatggtatcccttatgccatattttgttgttagaaatgagtcactaagtttagtccttattcaagaggagaggaattcatctctacttcttgatgagaggagttttaaagaacttgaagactaacttttaaaactctcacaactgcatacttacccttccccgtagcaccaaaccttctccttctacagtctctcctatttcaataaatggcttcagtaggccagaaaccttgga

SEQ ID NO: 165231 - DNA, 283 bp, Homo sapiens
ttcaagcaattctcctgcctcagcctcccaaactgggattacaagcacctaccaccacacccagttaatttttgtatttttagtagagacggtgttttaccatgttggctagactggtctcaaactcctgacctcaggtgatccacctggctttgcctcccaaagtgttgggattacaggcgtgagccaccatgtccagcctgggttctcagtcttttgtggaatatctttgttcttcctccattttccatcagttttccactctggggagatgagaattcgt

SEQ ID NO: 165232 - DNA, 286 bp, Homo sapiens
ggttgtttttcctggatgcattatttgtgttagtgaaagatggaaaatgtcagtctaatttattgaaattataaaattgttgtatagcaaaaccctaagtaagctgttttgtgtgtattcccttggatgatatttttaaaattatgttttacaattcttcttacttttgagtatttctgaagcactttttacgatgttaccctgaagtcatacagacaaggctgtgaggaggttagtgctattttgtaaacttgactcaagatacaggactttgctgtacaaggga

SEQ ID NO: 165233 - DNA, 198 bp, Homo sapiens
gaggacccagacctgctctcctcccacagcacattcttgagtcttggaaagagttgtgaaaatgccacaggtacaaacacctgcaggccactcccacagggacagctccgtgaggcggtgccgctcattcccacaacctcctgccacaggcaacacttaacacttagacagtgacccaaggccgaccagggaggacgc

SEQ ID NO: 165234 - DNA, 512 bp, Homo sapiens
atttctcataatagaagttaaattatttttcttttgttcaatatctgaagtttcagaaaatattaatgtctgtacttcactaaatttccattaaatagtttagtttccacagaatcccattctctagtgaagattgattttcttaaaattgctaagtaaactttaattttaaaaaatgtgtatacccactttagctaattctgcctctggagtctgcatttttttggatatttttatgttgtttacagtattccaagtgattgattttattgattggtcatgaatattcttaaagtatatacaagcttacttaggaagtaatatataaatgaaagtgatgtaagtagaattttacctgttctatctgtacgttaaatataccataagagcacacacatgctaattatatttccagaatacaattatatatacatgcatatatatacacacacatatacataattacatatatacatatgtatacacacattatttttataatggtcactgaa

SEQ ID NO: 165235 - DNA, 481 bp, Homo sapiens
tccgcctcccgggttcatgccatgttttcaattcttttggaaatgtattcccagaagtgggattgctgggtcctctaggatatttttaagcacatgtcgatggttcagtcagaagacctgagcttcccagggctcactctcctcctcagatcgtctgtctttgcacccgtctgacatctccattctgaattttgtggttccgattctggctgatggatttgtcttcaggggtagtgcatgattgtggagtgcccaggcttcaagctgattgctgcttctcctgttccttcatccctcacatattctattgttgagtcactcagatgtcacagacactcttctttcctgttcagtggcataaatcaatagcataagtgaagaagaaatccgtgaagcaagagcttagcagcgttgttgataagcctggagtcacagtggtgagagaacggggctgatgtattaatatttaatattaccacag

SEQ ID NO: 165236 - DNA, 337 bp, Homo sapiens
cgctgggattacaggagtgagccaccaagtccggcctggtgtgggcatgtatttattttgagatagagtcttgctctgtcacccagactggagtacagtagtgcaatctcagctcactgcaacctctccctcccaggttcaagccattctcttgcctcagcctcccgagtagctgggattacacatgcgcaccaccacacccggctaattttgtttttagtagagatgggagtttcaccatgttgcccaggctggtctcgaactcctgacctcaagagatccgcccgcctcggcctcccaaagtgctgggattacaggtgtgagccaccgcacctgg

SEQ ID NO: 165237 - DNA, 162 bp, Homo sapiens
tgctgggattacaggtgtgagccaccacacctggctgtaagatacctttagagactctgtaggtcagcccataattttccagggaagtgtgacccattgaggtatttgccaaaattacatagctacttttgacagaaccaggactaaactttgagttattaa

SEQ ID NO: 165238 - DNA, 138 bp, Homo sapiens
cactatcctcatcgctgcgacactctggcaatgaactgtttactgcccaataatcttaatgattaatttctgcttagtaagaacacttagcttctgtggagtctgagactgagctttatgcctcctttgtactcagag

SEQ ID NO: 165239 - DNA, 122 bp, Homo sapiens
tgagcatgtggccctgtgggcctagtcccagtttgttaatcttgtgagcagagctgctggcggctgctctcagtccgctaatcgggctctttctctgtcacgtggacaggagactgctcaca

SEQ ID NO: 165240 - DNA, 291 bp, Homo sapiens
cacttcaagatccttgcctctttcacttttaatctgctcctctttctgtagacattctcttcctgatgagtatctacgtccaatagatttccctggctaggaagattcttcagttgaacaaatggggtctttacatttggcaaggtatcctaaataatattcatgccaggtgctaagagagacttctcaaaaaggctgcaggcatttgtctctgtgccctttaatatacttcttggtatcatgggatttcttcagacctaacctgagaaagttgttctgttctattcctgc

SEQ ID NO: 165241 - DNA, 260 bp, Homo sapiens
ttggcgtgaggccaagcacctttgatacacggagggcccagtggccctagagcaggctgactcatggaccagagaccctctcacctagaaaagtcagcagtttcctttgagctggtgctggaagctttggaaagggaaggctaccacccaaatggccccaggaccagctcctgctgctgactcaccgaaggggttagaggcctctggtcgctggatgccatgcagcgggacgtgtggtgttataacgttatttggtttca

SEQ ID NO: 165242 - DNA, 468 bp, Homo sapiens
tcgtgaggatgtttgcagaagtttttacttttctgtgcacttaaatctgccagtctcttgagatttcatgtattgatgtgctgagaacagcctttcctacctaagatggcatgagttctggaagcttccctctggcccttcccactcatgtctaccccatgagcacctgcttttctgctctctgcctaccttgattggctttgcctgttcctgaattcgtggtgatggggccgtgtagcggtgctgttctgtgtctgagcttcgtggtgatggggccgtgtagcggtgctgttctgtgtctgagcttcgtggtgatggggtcgtggagcgggtgctgttctgtgtgtgagcttcgtggtgatggggccgtgtagcggtgctgttctgtgtgtgagcttcgtggtgatggggccgtgtagcggtgctgttctgtgtgtgagcttcgtggtgatggggccgtgtagcggt

SEQ ID NO: 165243 - DNA, 344 bp, Homo sapiens
actaaattcgcggccgcgtcgaccgcacgtggcctctaaagagtgggtcccaaggtcatgaaggcctgtggggtggagggcaaggtctctccttccaggctggaatggcggaagatgcggcggcagaggggctgcatgtcctcctcacagcaggcccctgaggacctttatcctcctgagccatgaatgtccctcaggagtgtctaaagcacccggtggggcagggggacccctataggccttaggagctctggccaattagtggtcagtaaaacgcagaggtgaacaccatagaaccacaggtccagggcagaggaccaacgtcgacgcggccgcgaatttag

SEQ ID NO: 165244 - DNA, 453 bp, Homo sapiens
aactttgagggaatatatttatttggttttagaccaccaggtttatggtaatttgtaatagcagtcttaggaaatgaatacagggggcattttaggattccgtgtatcacagtttctacaattttctaggctgggagacaattctccgtggatctgttgcatttttgcatatcctgcaaagcaaggcattgtctttttttttttttttttctgagctgtatctgcagcataaaacagacgtagttactgcttcttaggaaatatttggctctccaagctcaaggatcctctctgtaaaacagctttctgtgtatgcagactttcatctgggctcagttgcatcactgctgtgggttttgtggacaagaaagattggtgcaaatagtctgacaatcatgatgcttgctgtgtcacgagttaataaagttctttgtctctaacccaggagtctcg

SEQ ID NO: 165245 - DNA, 311 bp, Homo sapiens
ggtcttttcattatataaataaataaaaccagtttttgtcaaggctagtatgaattgggttttatattacttatcacaccttgacctaactctcaaattttcaggaacactgtgtgatcttttataagattttatcactatttgttcttcataaatatttatgcatatttcctgataaccatgaggctcataggttgaaataagatttatgaatggagatttttctttatatatgtatatgattcatagattgcagggatgttttaaagtaatagttcttatagtgagacctccagatcagcatcttcttg

SEQ ID NO: 165246 - DNA, 349 bp, Homo sapiens
cgtttagacaagtgtcagagttggctgggcccagccaatgagtggagaccaacataaacagcctgcacaggctcctgggtgatgtgggtctgcgccagggagagctggaggtgcagtaagagtccctaagggaggagtttctgtgttcgaaaaataaccgtgagcaggtagaagcaactaagaaatggctgaggccaatttcagggggttgaccaggaagagcgacagatccattccttgggtttgcacttgggcgctgttcccctccaggcagagtcttctcccctttggctgacctttcccctgccctggattaaagacccatggtcccaaaatcttgtaaaagcag

SEQ ID NO: 165247 - DNA, 312 bp, Homo sapiens
acaaaaaagaaaaacaattagctgggcatggtggtatgcatctgtggtcctagctacttgggaaacagaagcaggaggatcccttaagtccagtgtttgagtgctgcagtgagctttgattacacaattgcactccagcctgggtgacagagcaagacctcatctattgaaaaaacaaattaagcttttgtagggtttggggccaggccaggctggtctcaaattcttgagctcaaactatctgcctgcctttcctcccaaagtgctgggactacaattgtaagccaccacactggccattaactttctcat

SEQ ID NO: 165248 - DNA, 512 bp, Homo sapiens
atgttgggtgaatggctgtttcctcttattcaagccatgcaccctactcttgccggtaaaatcactggcgtgttgttggagattgataattcagaacttcttcatatgctcaagtctccagagtcactccattctaaggttgatgaagctgtagctgtactacaagcccaccaagctaaagagactgcccagaaagcagttaacagtgccaccggtgttccaactgtttaaaattgatcagggaccacgaaaagaaacttgtgcttcaccaaagaaaaatatctaaacatcgaaaaacttaaatatggaaaaaaatatcaaaatataaaagaaggaaactgaaccgtatgtaccgagcaaatgccaggtctagcaaacataatgctagtcctagattaattgattgaaaaacaaaaaacacaaaaaaaatagtaaaatatagaaacaaattagtgttttatagaccctgggaaaaagaattttcagcaaagtacaaaaatataaaacattcc

SEQ ID NO: 165249 - DNA, 453 bp, Homo sapiens
actgcctccactatttgcattatttcctcttctattaggttttattaataaaaatcattgtttcaaaagttaaaagacctaacttcagaacccatcagtatttatttcttgtcccatgtgacccctctaaaacagtgatccccttgtccatctgtttctcctagagacactttcttcctgactgaatgataaagtaagaaaaacaacaaaagggactgcagagctacacataacctagcttcctattctagcattgtcaccagttggtagactctggcaagcctcctctccctgtgtaccttctcagcccagcagccaacacctcattcttggcaggcctaccacagaactgcccagaaactttctgccttctgtatttttccccttctaatccattgtccacaatgtggtcagtttgtttcaagaattgtggccatgccattcctttactca

SEQ ID NO: 165250 - DNA, 366 bp, Homo sapiens
tttcatactaagttagctaagtccccccaagagactttacatgcttttatctacttaaaaacatttaataaactccatttaattaaaccaaataaatcattaatttaggctgtttaggaaaagttataaaatgtttgataatttttcttataataatcctaatgtattatatggttcaataatgtgctattctaggatgaaaccatttaaatctggttctttgtacattttaatgaacttttgcatcatatctccaatacttttatgaatatttatgatctcttacataagttgatttccacatagtggggagatttaggctttctaacactgctctgctttttcttataacttcttttaccattg

SEQ ID NO: 165251 - DNA, 495 bp, Homo sapiens
aagtggttgaatgaggacttgaatctctgcccctgtggtcccagtccctggttttctccgtaagttgcccctttgaagaatctgttttaacactgttgatctgaaaaaaaaaatctacagtatgattaaattgcttaattctctgtgggaattcaagattttcttattcagagcattgttccattctttctgagaataactggtttaatattcaaacagatattcccaaaaccacagtgtctctttccagaatctgaaaaggaaatgaggtaatcttcaatatgtgaatgaatgaatcccaagctatacaaaccacagacagacatatcagctttttccattttgctctcctttttgtttgttaagtatgataaagtaaaattttaaaaatgttaatggatcttggtttaaatgatacctcactaaataagctattcacaaaatttggttggtctactacctctactcaataaacattactgatgtaaagtccta

SEQ ID NO: 165252 - DNA, 172 bp, Homo sapiens
tccttaattatcccttaaaatgtattgctacttttccaaataaaatcaatatacccttgttagcttgtcagttaagtactcacacaagtcttagggttcaggcatcactttaagaatctgcactcacaagacattaaccagaacctgggataatcaagttcaacttcctgct

SEQ ID NO: 165253 - DNA, 114 bp, Homo sapiens
ttttaaaatgaaaaaaaaaagatggatatggttctataaatgcttcagtgaaaagatacctgtaatatgatgtcaagttaaaaagtcaggttccagccgggtgcggtggctcat

SEQ ID NO: 165254 - DNA, 162 bp, Homo sapiens
catatgttcaacagctgtgttgatgccatttgcctgcccagacaagcctcttgaggcatgaaagcctaaggaaggtttctcatattaaggatcaacagggactcttctgtatccgtcctaccagtgtcacctccccacccagcatcagccgagcaccacatc

SEQ ID NO: 165255 - DNA, 430 bp, Homo sapiens
cctatttagaacctgaaacatagatttaattatttggttatgttttattgcaagtggaatgtagtgacattacgtagaattatctcttacgaaagacaaatgagaacagattcaacttttagaaatgagtcttttgtatattgatgtgacgggaagaagaattttttttttaatccttgtatttaacacataaaagtgttaattggatacatgtgcactgttttgccaggggccaattttttgcagtcagttgtggcaaatgctcttttattttaaaacttagatatgctttctgttatctgcagtcctctactgttgcctctcctgtgtagaggtcattgtaggttgcatggacagggagcaggcaggcaaggagtacccttagacactaacttagtaccattaggcactaacttggattctcagtgcc

SEQ ID NO: 165256 - DNA, 336 bp, Homo sapiens
tgaggtgggaggatcacttgaggctgggaggtggaggctgcagtgagccaagatcatgccactgcaccccagactgggcaacagagtgagaccctgtctcaaaaaaaaaaaggaactataatatataaaagttcactcactgtttttaagttaaaggtaacctccatgacaaaacctagatgttccgaaaatcttttccctacttttttttttaatcgagggaatctttccccacattgagaagaagcatcatgccataaggtgaaaatgccagaaggctatattttccttcaaactcttaaaatgtggtaataaggtactttaaatataatacat

SEQ ID NO: 165257 - DNA, 259 bp, Homo sapiens
atgcaaaggagtatttaacattcaacaaatacttatagaaggcctcctatggggcagacactgttgtggtgccttgtgatacatctagtgaacaaagcggacaaagattcctcccctcatggaactcaaattttagtggggggagagagacaacaaacataataaacacattgtataatacgttacaaggagattaaaggtatagaaagaagaaaaggttgaatggttaaggaggatcaggaatgcctgaatggagtga

SEQ ID NO: 165258 - DNA, 617 bp, Homo sapiens
gatgcatgcaccatccaagatttactcattcgcgatgagtaaatcttggcaaagatctttgccaagtgtacttcttcctgcatgaggaagagaagtttgctccttgagtgctgcatgacctttaggctaattttactcctgtgtgaccctgggccgccagaagtctaaaagcccttctctcccaagagtggacttatattttccacatttcaggttgtcagaaacaggaaaggagagtggggctttctttcatttgtactgcaaatctatcaggaaattttgtttctttgtttttgtttgtttgagacagagtcttgttctgttacctaggctggagtgcagtggcacagtcatatggctcactgcagcctcaaactcctgggctcaagcaatcctctagtctcagtctcctgcgtagcgaagactataggtacatgccacacaccagttaatttttaaatttttttgtagagataggggtctcactatattgtcaaagctggtctttaactgctggcctcaagccatcctcctgcctcagcctcccaaagtattgggattacaggcatgagccactacacctggccaagatttactcatcggggtccgagctcgaa

SEQ ID NO: 165259 - DNA, 223 bp, Homo sapiens
tgagtaaaaaatctcacaaaaaaaggagattttgcttcattttcttcttctctatggtctgccctccgtgctaatgagaaacccccagctccagaactaatatcctcactctccactcatgaatcataacggactcagtgaggctcccactctcatcctgtatccagtatggcattgctatctgccctctgggagacttgagtcaattcccactttctgcctt

SEQ ID NO: 165260 - DNA, 376 bp, Homo sapiens
gctaaatacaaatactggcattctatgggtagtagattcaggattaatactgatttaggttcaagacaaccaggcaaaattacttttgtcaataaacaagatttttgcatattttgttctgttctatatacaaatgttagtcttacatagaaatcctgcaaataaaccgatacacagctggcttcaattatggggataattggtgataaaggaatcttctctgaaaaatatttgtggcattaggctggcatttagatgagatgaagataatgaagctcccatcagaatggattatgttactgaacactatgtgacacacttcattggggaaataaatgattaccaaatgattaccaaactgtaagcaaaataagaa

SEQ ID NO: 165261 - DNA, 234 bp, Homo sapiens
acatggtaatgtaaaggaacgtactggtatgatatcgctagggtggcgacagcgcatttctaggataagtcagtagaattagaattgtgaagatgataagtgttatgggggaaggtaatgtagtctaaggtggggctgggagatggatggaggcgtctgcaatctgagagtctgagcatacttccttgaggtgacactgaaaggcttctgtgatatctcccctttgactctgtt

SEQ ID NO: 165262 - DNA, 707 bp, Homo sapiens
tattagcactttaggatgctgaggtgagaggatggctttagtctgggagttcgagaccaccctgggcaacacagtgagaccacattttattaaaaaatatatatatatactggacacggtggctcacacctataatcccagcactttgggaggctgaggtaggcagatcacctgagcccaggagtttgagattagcctggacaacatggcgaaaccccgtctctactaaaaatacaaaaacgagctgggtgtggtggtgcacgtttctagtcccagttaatcgggaggctgaggcaggagaaccgcttgaatctgggtggcggaggctgcagtgagccgagatcgcaccactgcactccagcctgggcgagacagagtaagaccctgtctcaaaaaaagaagaaaaaaaagaaagaaaatttttgttggtaaacaattgctcatctaatggacaaaaagtggtaataacatgtgtcgccccttagaacgggcctggcccttaaaaagagtctctcagcattgcctattggcatcgtgaatagtaaaaaagtaggatgatcttgttcacgttttagttttcctaagcattcctaattgctctccttagggtactgggctgtctcccttcatcagtttccctcccaaaaatcatgatctactgaagtacctggggacttgctcctaaaggggaactgctcaaatggtga

SEQ ID NO: 165263 - DNA, 705 bp, Homo sapiens
ggagggtgaggagggaataaacttgggaaatggttgaatttggagtgaggtcaatccactgggtgtttttctgacacactcatctgtgtaggcacagatgcagaaaaggcactggcattgaagttttgcggtcaaaatgtaacaaaaacaagagggaggctaagaagctgagggtggatctcatcttacagtgttacaacaacagtgtaagctgagggtgaatctaagggagtgattatgaccgaccatgaaatttcagctgggcaagcagagaacccagatgagagagaggacagggaaagttggttacagatgccagtggctcaaagaattttcgggatttgagtactagaagggttgaactggacaaacaggcattggccaaagaatgaaagacttcacatcgagcttgtggaggagctgcatggtcagcaccgacgaggtcagaggaggcctagggaggctgtgtgtctgatttcagatggaggacaaggtgacgagagaagttgaggtcatggaattgggaagtcggagagttgggagtaccacccctgtgcacgctgagatcttccagaattgcaaactgaagatttgagaaatgagagagagagagagaaatggatgtcagtagctgacagcagaaggggaaatagtgcatggtgtaggctgatgggttgaaatggaaagttggagggctttagaagg

SEQ ID NO: 165264 - DNA, 701 bp, Homo sapiens
tattaaatatatgtgtagttaaaggtcctttgctattaggaatatgaaaataaattcctatgttttcataaaaagtataggttaacctctaagagacttcccactaatcgcatttgatttttcacccagacttcattctaaacttcaaactggctctttaatgatctctaccttactgcacaatcactccttgaacactggacacatcttctattcaaactgcttctcctcatattagtccttagcatggagcaatgtgttctcttccatctaatttccaaatactgatatatagggatcatcttagactcattgctatccacctacatgtcattctcaaccaaactggactaagtataccttctaggtagttctttgagatgtgtcctcctttcttcccacactgctcaaatgttaggccaattacagtggactaactggttacccagaccagggcctcctctcagtctgttctctgcagctttgccagggtaatcactgtaaagcctcaatctaatcatgccatttccctactgagaacctctttgctaacttccaatgcctacaggatgtatttcaaatctttcattgtgatatataagaatgctcaagatctagtactgctttcctttcagactcaccttccaccattcactcacacactcccaaaccttaacaaacacatacatgtgcagccaacc

SEQ ID NO: 165265 - DNA, 172 bp, Homo sapiens
tctcatcatttttatctggacttcttcagtggtccccaaacctggtctcccatcctatcctttcaggtccatctttctcacagctgcaagagtgaatcatctaacacagaaatttgacaaagtctgcatctgtagtgtgggaagccaaaaaaaaaaaagaagaaaaacacat

SEQ ID NO: 165266 - DNA, 244 bp, Homo sapiens
ctgatcaccagttaaggttgttgcctgattcatccctgtacaattactgtttttttccttcttagagataattaacagtctgtgggacaacactttgagatcaagaaatatcctgcttatcatcaaaatttcccctagattcagcatctgtaattagttacccactgctattatgccaaatcttagtagcctaaaacaacagatacttatgaactcagacagttcctatgggtcaggaatttgg

SEQ ID NO: 165267 - DNA, 114 bp, Homo sapiens
gaaactctagtcagggactccttgcagaaataaatgaccccagtctggcaggacaataacaaacagtggcccccttgatacagatcgtaactcttaagctgcaacaataatgac

SEQ ID NO: 165268 - DNA, 666 bp, Homo sapiens
tactacagggcagaaagatgtacagagagttggcttgttttacttgcaacgagtcagtgtcacagaatttcaagataatgttctaaaaagtccagaataacccccgctgcctaggctgggtcacagacgtcttagaatcagatctacgctgcttttgttgtccaacaggaagacagaatttaaacttgagaattaaaaagttaatcatattcaaagccaaatacttcgagaagtctgtatacaaaaaatggaaggcaaactcccaaagaaactgatacactgttcagtgctcatggtcagattttaacttaagttttaaagcatttcctcaaatcgggttatataataaaaactcctaattagtcagaaataaggaaacctctcgcactgtatagagagctcttctggccatccagtactcagaattaattgcaatgaattagaatgaagaggcaccattaacttttggtggaaaacatcggctcataaattgagactctagcagaaaaagaaccatacaagttaaatgaaactagaccgataagaaaaggaagaaattgttactggcgtttaaaaaacataacttgaacttaactaacaatttctgcagctgtttgtaaccactaactgcagattctgttagacaatatcctccctttgcattta

SEQ ID NO: 165269 - DNA, 213 bp, Homo sapiens
ttcaagataatgttctaaaaagtccagaataacccccgctgcctaggctgggtcacagacgtcttagaatcagatctacgctgcttttgttgtccaacaggaagacagaatttaaacttgagaattttttgacaaacccttgggaatctccctcaaataaatccaaacagacctaaggatgtatggcttatacatgatttcacttcttggtaa

SEQ ID NO: 165270 - DNA, 284 bp, Homo sapiens
agaatttacgttttaagactaacaagcaaaatgactgttaaggttatgtctcaaatttttgtcaaaatctggtggtgttttttaggatttgtttttgctttgtattgtatttgatgtttctacttttaatctagatgttttcaatgatgctattttatgtctctgacctcatttttgtctgtttacatttttagctaattatgcttcccggtagtgattctctgttatggagtatgtaactttacgtgtatatagcagctttaagtcgtttttagtttgatttt

SEQ ID NO: 165271 - DNA, 231 bp, Homo sapiens
aagtgatctgcctgcatcggcctcccaaagcgctgagattacaagcgtgagccactacgccttgccctccacacagccttgcttggtgttaaagattaaacaaagaccacaggtgatcactgtcttcgtggtgccagtttcaagggcacccttcttcccttcccagcctccgagagaaggagagagggtccacaagccagatccatccccatccacacaggtaaaaccacg

SEQ ID NO: 165272 - DNA, 335 bp, Homo sapiens
tccgaaatgcttgggaccagaagtgtttctgattttggaatacttgtatacttattggctgagcatccctaaacctgaaaatccaaaatcctccaattgacacttctgagaatcacgtcagtgctcaaaatgtttcagattttagagcattttgtatttgggatactcaacctgtggtaactaatgaagtaccttgggatatcttaaaaataagcaaaggaagacaagcaaagtctgaaatacatataaagcttaagactaatgatacttgtacagcattactccttggacctgctgaaagagatttaacacacaacacatttctggccaggtgc

SEQ ID NO: 165273 - DNA, 197 bp, Homo sapiens
caactcagcctccccaagtgctaggattacatgtgtgagccactgtgcccagcctcatttccacttttatatcacacaggtatctcaaaatttaacatgtcctaatagtcctccaggaacctgctcctctcacagtcttcctcatctctgtaaacagcaactcctttcttttggttgtataagccaaaaaccgtgga

SEQ ID NO: 165274 - DNA, 284 bp, Homo sapiens
agaaaaaagcaaggttccttctggtaatattagccccaaggccctatcctcccagcatgtagatgatgtccttgggttttttgtagcatttcttcataaaagggcacaacgttgttcgtagaagggctacagtgcagacatgggttgttgcttgtttttatttttccagaatcacctaggcttattcataagaatcaaatatgttatgattaaagcttgttcaaatgactttcaggcctacaatttctctattttgaagatttaaaagtaaaggagttcagata

SEQ ID NO: 165275 - DNA, 424 bp, Homo sapiens
ttcttactgttatctgtatgcaaatatatggtaatcttctttacttactaaactgtgtgtgcttggaggaaagttaccatgctttatacatatctatggtcccattacctaccacagtgtctcatacatgatactaaagtgctaataaatattgtgcaaatgaatattttgcagaccattaaaaattttgctttgaaaaattatttgattcttctaaatcctcagtgattcaatagaaagttctgtcctgctattattctaagcatatcttcaaaatgcagcttcaatgtatatataaataattagtctcaaaatatagtacttgaaacattcattcgattgtttcctttttaatggagtactccaacagtaagaaaaacaactgtaaaaatctcgttatttatagtaatgagcccaagcgcag

SEQ ID NO: 165276 - DNA, 562 bp, Homo sapiens
attcacctagtaaaaagagctctaaggaaaaacctgattgcctagaagtccattcagaggaaaatgaaatgtcacgtgctctggaacaaacacaattctaaaacacaaaagtgggagcatcacataaccctatggaatttcttggcttgctggtctcaaataatgcatgctcccaaagaagcctctggcattgagctgaccttaaatgaaattactgtccagtggtttccaaatcaaatcagctctgaaataaactgggtggaaaaattacctaaacacagcctttcagatgttatgcccaagagagatgtacacatatgacgtttatgttattcgtaataaatgctaacagggactctgtaatgtttttatgtctggcaacaactttatcttgaagacttgagtggattataaaatcttttctgttttttttagctatctttgtaccatacaactattgatttaaatatagtaacactatatttaaatggtacatatcatcgccactaaaatagttgtaaaaatactcctgattaaatttggttcttgttctttggcaaca

SEQ ID NO: 165277 - DNA, 482 bp, Homo sapiens
atgagtttttaacatttgcatacattaagtgtcactctttgtgctatgtagtttaatggtttttgacaaatgcatgtcttgcctctacaactacagtattatacagaataattttaccgccctaaagattccctgtgtttcatgtatttctcccttctccatttccctcaaacccttggcagtcatttatcatctgtctatagttttccctcttccagaatgtcatataatgaaatcatacaatatgcagtctttccatactagcttctttcagctattaatatatatctaaagttcctctatgtctttttgtggctggacatgcatttctttttattgctgaattatattccattgtatagatctgccacaggtgaatgtatccattaacctattggaggacatcttgactgcttccggtttttggcaattatgaataaagctactatgaacattcacatggcactttttgttgaacacag

SEQ ID NO: 165278 - DNA, 362 bp, Homo sapiens
tcttcaccagataatcctgcaatatccaatatgctgtcactctgatgggattcagtcatgtgatttgttttggccaataaatagggtgacagtagatgtcatgtaagcagaggttttttttaataccatgaaaagcacttgaacagttggacttgctctgctttgctctctgccatcaccagcccccaactactgccctctgctgggccagcctgctggtcccaatcaggggagaacttacacatcggccagaggcagggcatccctgtcatctcagctgaggccactttagatgagccaacaaccatccaagaccaagtgaatgggcccacccaagatcatcagaaacacccaattcacct

SEQ ID NO: 165279 - DNA, 217 bp, Homo sapiens
agaaggatttagcccaggaatgcaaggttagtttaacatcaagaatcaattaatgtattataacatatcaatagaatatggaaagaaaccacatgatcatctcaatagagacagcaaaagcctttaacatcttctcatgagaaaaacatttttaaaactagagatacaaggaaacttcctcacctgataaagagcatctgtgaaaaccacaaataac

SEQ ID NO: 165280 - DNA, 460 bp, Homo sapiens
agagcaagactctgtctcaaaaaaaaaaaaaaagtgtttaaataaatgcctctggctttatttgaacagtccaggaataattcaagggtctgtcacagaattttgacaaagaaaaaaggtgggagggatcatgtgaagaaggccttttttcccccaagagttaagcaggggccaggcacagtggctcaggcctgtaatcccagcactttggaaggccaaggcaggccgattgcttaaggccaggagtttgagaacagcctggccaacgtggcaaaaccccgtgtgtactaaaaaaatgcaaaaaaaaaaaaaattagccaggcatggtggtgcacacctgtaatcccagctactctggagtctgaggcgggagaatcacttgaacccaggaggtggaggttacagtgagccgagactgtgccactgtactccagcctggcccacagtgagtctctgtcta

SEQ ID NO: 165281 - DNA, 435 bp, Homo sapiens
accaccatgtgttgacactttcagagcctaagtcctcatggtggtcacaagcctgatttccaccgggggtggttgttggtgaaggcagactcccttcctgcccaactacagctgggacgcctggcttccttggactcggttaattgcctggatttgttcaccaggcattcctggaggacctgccatgcacttggcatcctgatgggccttgagaactgggcagaaagaaaagagaggcacaaagcttggctcctggccctgagactgcctagttccctggccctcagcattcctctcccccatcactcaagccatttgatcatcccctgaagacttagctcccacccaggagcagagattaaagtgagcattctggagccagactgctcaggtatatgtcaagcccatggcaagtgcctggcatacaaggtgctc

SEQ ID NO: 165282 - DNA, 311 bp, Homo sapiens
cacctctcaggaccagaggcctctgctaggacctcaaatgagcaggcagagggcatccaggaggaagtgcccatgggcagagggtcccatgaggggaggggctgacctggcagtgcccctggtgcctgccgcctgcctcctgcctccctcccctttcctccagctctgcccactgcttgagtggcatgaatccgtctgccttcatgggcctgtgagtgggtagggccttctccctgggtagcgctttcctcttcggtctgggcaaatttcccactagcccttggaagaaagctcagaagtccctgctacgt

SEQ ID NO: 165283 - DNA, 496 bp, Homo sapiens
gagtagctgggaccataagtgcgtgtcccaccacacctggctcattattaatttttctttgttgcccaggctggtcttgaactcctgggattacagacatgagccaccacacctggtccaaactttttgcttacaacttttaatagaaataggtaaaagaaataggaaggatctaattgagttataaaacaacctttaaagatacaaaagtgaaaaagattaagccattgctttttgtcaatagaattaaaagctgttggtaaaaatattaatgtatgaaaaacttattgaaatgaaaaaaatatatatatatatatatataaataaaatgtcgacatggctggatcttaaaaactgtcaaatgaaaaaaactaattgcaggaaagattttttttttttttttgagagggagtctcacgcagtcaacccaggttggagtgagccgagacggcgccactgcactgcagcctggctgacagagccagactctgtctcg

SEQ ID NO: 165284 - DNA, 309 bp, Homo sapiens
ccacctcctaggtagtagatgtaagcagcaaatataggcccacttgggccacataaattgaactagctgccacacccatcttgccccagccaggctccccatataagcaagcaggcaggttgcttaagccccaaacatagcagcagaggtgatggtggcacagggtggggcaggaggtagagagccagcctggcagacaggatgggcccacaggcacagtgatagcagcccagccactagggcctgtccacaggccagagctggccaggatcaagcgaggcactcagggtcctctcagctccttccttc

SEQ ID NO: 165285 - DNA, 489 bp, Homo sapiens
aggtgggctatcatcagacctctaaaatccttagtgcctcgttaacgacaatgggtagaatgttctatcttctaaagatcgtgaggaaaatgcattccctgtctcactgagcaaagcctgagaagaagcttgatcaggcctctgacttacttaaggaaacagggctgcagggcagcacagccacaggcagccagaaggaaagggcaaaggcacagggatggagcagccagaggcgcccatggtgtcacaggcttccctctcccctatcggtgcttgctttcaactcctaacctcaagtgcgagccaccgcttttgcatcgaatgctggatttcctgcccggatctgtgtggcactgttggcagtggagtcctagcaggagacctgagtgctggggaaatggggttcctgccctggctccacttcttctaggggcgcgacttccattgggttactgaacttaccgcaatttcagagcttcttcaacaaaa

SEQ ID NO: 165286 - DNA, 387 bp, Homo sapiens
ccccacaccccaaacacttctccttagaataagtatagcaagcctcagcatacacaaatctcagagtgaacggaaatgtctctgcaggcccaagggtggggtctgagtagcgggggcgctgaggaagacaggcagtgacagagccaggacagggtcaaccctgagcgtgagtgagcccaggaaacggaaagagagcaacacagccacccacacaactaaaatcgacccacccgggtctccatgctgcaggaagtcactgtctaggtctcccaagacacattttcaggggaaggttccaggcagcaagagcagccctaggaaactttaatatacaatggaatctgggttaagcactatcttctccaagagttgagctcacaggacatt

SEQ ID NO: 165287 - DNA, 153 bp, Homo sapiens
ggaaactgaggcttggaggggcaaagggccttccaaggctgcagctggcgaggcgggggccagagagcgatgccagcactgtgttcaggccactccgcggccccagccccactggctctctggggccagttcctccctcccccagtggtttcc

SEQ ID NO: 165288 - DNA, 543 bp, Homo sapiens
agagtcgccgctgcttttttgctcatcactgtgtgctacaacccagcagagtgcctagtacacagcaggggctcaataaacattagatgaatgaatgaatatggggaggggaggggaggggaggagagaagaaaggtgatgaggggagagagaaggggccactactttgtatataaagaaatcagggctttgctctacccaaacacgccttatgatccaccagcgatctgatgaattctgaaaggcaccacatgcaatgcacagctgtaagtatagcagctgtcacgcaaaggagctgaggtccagaactatgaagaattcagccctttgtttttctctctgtctcataacgaaaatgaagtcaagcccactgtcaatctacctgtcggctctatgtattcaacatgcggctttcagcaatactaagttaacactgcctctgaatgacatttatgttgattcactctctgacatcactgcctgaaaagatattatttaaatgtttgaggtcacacataagacctaaacagaactgagttaatt

SEQ ID NO: 165289 - DNA, 458 bp, Homo sapiens
tgaagaaaaagtcttattgatactcgaaatttaaggaggaaaatggacagaattattggccttcatttaactgacagcaatagaataggggaacacaggtttttaccaactaatggtaagaaaagcatgttgaaagctttaaaattaaattccaatgaagccagattgaagtttcctagattacttcagattatagaacggtatccagaggagactttgagcctcatgacaaaagagatctcttccgttccctgctggcagttcatcagctggatcagccacatggtggccttactggacaaagaccaagccgttgctgttcagcactctgtggaagaaatcactgataactacccgcaggctattgtttatcccttcatcataagcacgcgataagctattccttcaaggatacttctactggtcataagaataataacgctcttgtggcaaggaag

SEQ ID NO: 165290 - DNA, 246 bp, Homo sapiens
tgaagaaaaagtcttattgatactcgaaatttaaggaggaaaatggacagaattattggccttcatttaactgacagcaatagaataggggaacacaggtttttaccaactaatggtaagaaaagcatgttgaaagctttaaaattaaattccaatgaagccagattgacgtccagggagataccagtcacgaacggtgtcggaacgacggagaaggaccaagagcgaagcactgacaaggtgagt

SEQ ID NO: 165291 - DNA, 210 bp, Homo sapiens
aaggagagtgggggaggatgtccaaggtgaatggggcagggcactgaaaaaaaaagttgaaggagtcaggggaagcaggaaagagttacagaaggaaaggaggatctcagggaagtctaggaggaaaaatagaatttcgaagaatttcttttagaatgaatacccggggaggggccgtaaatctcgcgccgggccgtacccggggagggg

SEQ ID NO: 165292 - DNA, 357 bp, Homo sapiens
ctcccaaactaaccagtggcacactcagacccagctctgggcctgggccaggctcagcacagacctgctttctcacgggttgaggtggggaggaattaatgaggccccaggaagtgggacagagagaggcctccggaaggaggcaacgtgaggtgcatccccagcagcttcagggagggtctgagctgggggcagctgagccctgagggagccccaggaagggccccctgccctcccctagctcccaggctgccatgtcaactctctgtcaatgccctgagtctggggacaaaagtccaggaatcctgtgccctgttgggctgatctttttatcaacagtaaaatccactacgaata

SEQ ID NO: 165293 - DNA, 469 bp, Homo sapiens
actgcactccagcctgggtgacagagaaagaccctgtctcaaaaaaagaaaaagaaaaatgcagattctgattcagtaggtctggggttggtcctgaagcactgcatttctaacaggcccccaggtgatgctgctgctgctacactggaccaaactttgagtggagagcctgcaaagattgcttaatttcctccctttcacatttctccctattacctctccctccttccctgagggcttaatctcttaggccatccttatcatcatttaccacttttgccgtctgcttcctcccaaaaaataaataaataaataaataataaaataaaattttaatggcaaaaaaagaagttgtaaatctcaataaaattatgtgagaacaaaaaaaaaagcaaacatgctcaaactgctgcaccttgaaccaactatagacgtcagttcatccattcattcagcagttattgagctc

SEQ ID NO: 165294 - DNA, 197 bp, Homo sapiens
tcggtcttgaggtcccacacgtacgcttcggcaaacattaaaatgagttgttacagaacatttgtgtagattccaatcttcagtgtcaagagagcatcattctgctgtaatagtatcttttcatgaaagcacttcaaggcagtcataaataagagccagtgaaaggaatgacaacgtcaaaatggaaactgagtcag

SEQ ID NO: 165295 - DNA, 857 bp, Homo sapiens
tctctctcacgtcaccaatcaacacagaactgttaagatgaccttgttacagcccagtttcatagtcactttgggtttaactgaagagctcttgatctctgggaacttctaagaacatgaaactaatactccagaaactattactttcataattaaattctatactgggtagtgccaactaatctacggtgtcacatacaatagcttctctaaaaatactggtgcatactagtggtgtacataaagaattccagaggggatcagagaaagagaatgagtttatggaatgaggaaatctgaaaatgttctaacaagtgagtagagcttcaataagatatgaaaaaagggtgggaatttaaccccagggaagagtagggagagtggttgggactggaaggaatcaaaagtgactgactccagccaggtcaccgttattaccctcattatctcccagacattgctcagtcattcacatgccttggaattccttcccaacccaacagctagctcaaggcaaaagtcagatcccacctcctcaaatcctccatgatatttgccgttaatttcagtaagagttaactttctcccaatcttaatattctgaagtataagtaataaacatgcaacaatcttttgcaagattggagagtaactacttcctccagtgcgattgcgctaggaccaatgggtttatatgcccattgcgcagtaacagaccaattccactgagacagaagtggcagagaaagagaaatgattgcaggacaccaagtgaggagatgggagaagatcctcaaatttatctccccaaggagttctgggctgggttttttaggagatcatggagggtaaggggc

SEQ ID NO: 165296 - DNA, 94 bp, Homo sapiens
taaaaaaatgtccaggatgagtgttttggcttggtatgctcactgaatttaaaagaaaatagagccagtagagaatttcagattgtgctctcca

SEQ ID NO: 165297 - DNA, 594 bp, Homo sapiens
ctgaacctctaacaagctctgtaatcttaggcaagcaaattaacctctctaagccttaactgtaaaaattaggataatgatagttctgtactcagaaggaagttgtgagcattaaacaagatgattcctgtcaagttcttagcatagtgcctggcacagggatgcatcataaatataaaattctttagctgtcagcatcaatttcttctccatcattcctcacatatgttggagtgcacagtactatgtagacgctgctttcctgtctttaagacggatccgaatgcttgcctttcgcagatgaagatgtatgttgcagaggtggatgctgtaaaaatgggactagattagaagccctttctgtaaccttgactgaagaaaatacaaggtgacattgtttaaaggctctatcacttgcctttgtctagggctgctgttctcttctgcacatagtttgcggtcatgagtgtggcctttttactcctaaaatggcacaatgtgtcttcaaatctcaacagatgcattgtatttcaactctatcatgaaaggtagcttttgccattttttcctttttgtcaccaccatcatccattt

SEQ ID NO: 165298 - DNA, 457 bp, Homo sapiens
ctgaacctctaacaagctctgtaatcttaggcaagcaaattaacctctctaagccttaactgtaaaaattaggataatgatagttctgtactcagaaggaagttgtgagcattaaacaagatgattcctgtcaagttcttagcatagtgcctggcacagggatgcatcataaatataaaattctttagctgtcagcatcaatttcttctccatcattcctcacatatgttggagtgcacagtactatgtagacgctgctttcctgtctttaagacggatccgaatgcttgcctttcgcagatgaagatgtatgttgcagaggtggatgctgtaaaaatgggactagattagaagccctttctgtaaccttgactgaagaaaatacaaggtgacagaaagggcttctaatctagtcccatttatacagcatccacctctgcaacatacatcgtcgacc

SEQ ID NO: 165299 - DNA, 436 bp, Homo sapiens
aacctccacttctgaggctcaagcgattctcctgcctcagcctcccaagtagctgggattacaggcacgcgccaccatgcccagctaattttggtatttttggtagacacgaggttttgccatgttggccaggctggtctcaaactcctaacctcaggtgattcactcgcctcagccccccaaagtgctgggattgcaggtgtaagacactgctcctggcctgttcttgtttttctatgagaatctggaacgtctgcaagtttcattacgcttgctccctgtttccaagaggcttgtatgcaggcatctcctaaactctcccacccagcaaactggagaagctaagcacactcattcctccttccttttctttgggatctgcctgcctgcagggagcatgtgttcttggctgtatttttcttgtcgtaagcttaga

SEQ ID NO: 165300 - DNA, 472 bp, Homo sapiens
tgagttaaagaaaccacggctgcctagcttcaagggataagaacaacaaatacaataacattcaaatacaagacagcctttaaagagataagagattataaatttattttataactgcaaagggcagaagtagatctcatgtggtggaatgaaaatagttctgtataaaaaactattgaataatgagatatatctagcaaatggaaggggctaatcttgaaaataatgctagtgaagacaggaagcagagaacttgacattcatgtttgtaaaaaaaaatcatgggggagatagtgggtcaagttggagggggcctgagaaaaattcccgtggaatgtgatagtcctttatttatcttccaattcccatgcacccttgtatatatcacttcttcgtgtttttgactcctaactgctacagctgatagagaattccaatctcatgctcctattgtaacgcattccccgttctc

SEQ ID NO: 165301 - DNA, 129 bp, Homo sapiens
aaaactgaaactccttctattaagttccaattagaatttcatgaagcactaatgagagagaatgaaggaagggtattaaacaacataatacggtctttctaagcacagctgataccatgcccttaatat

SEQ ID NO: 165302 - DNA, 687 bp, Homo sapiens
accttgtgatctgcctgcctcagcctcccaaagtgctgggattacaggcgtgagccactgcacccagcccaactgtacactcttaagtggttaaaaatgagttcagaaaatccaatatctgattaatacaaattccttaaaagaaaatagaggagatgggggaggagggaattagcaaagaagttatataagaaaatttcccagaaatgaaagattgtatccttggattggaagggactggcacaataattttaaaaaggcctgtataaattacctccttgtgcagctgcagcacgttggtaatgcagaggacatcaacccctgtagcgggaaacctgggtcacaataaaaggatcaggaatcagagcagtagacgcctcagcggcagctccgatgtaaaaaaaaggtggggcgcggcatcccagatctgtagaggaactgattttgattgtctacttcaaatttttagttttatctttattcaagttacttatgcatacaatttgaatattcaaatgattctgtaagtcttttttttaatagcaaaccctatgaacccctctaattttcaaggcaaacattgttttagctgtttcatttggtatttatctgtgtgtctttaaattccgtggttttaggcattctctgctgattcttccctaagcctggtgggtgagtctgggccct

SEQ ID NO: 165303 - DNA, 420 bp, Homo sapiens
ctactgaaggagctgaaatttgcaggatgcctagaaaaaaggcagacataagcaaagtaaatttggaggctaataaagacttagataacaatatgaataatggaaatccttgggtttgaagaagatgccgtgattgagtttatattcaaccaggtggaagtggagacctgaaccaaaatggaagttattccttgcatctcaagtataacatcatcattgtattaggtctcagcaaaatgaacatcccaatgtcacactgcactcccttatgtgtttggaaaatccagactccaaaatgatacaaagcaatctgactgggtttttgaatgaaattactagagaattatgggagaactgtagtccctgctgttaaacgcacaagaagacatcactggaatctcttctgctttcctagaactg

SEQ ID NO: 165304 - DNA, 368 bp, Homo sapiens
gtatcatcactactatataaatgtattcctcaaatggcatttgacggttccctcaagtaaaaatgagtgttatctctttcttacaaacaggtatacagatatggggcaaaaaagcgagttgggtattcaaacactggggtactaagcctaacttggctttgatgttattggataatcttgagcaaatcataatgccaatcatattgatcacttaatatatgccacacaattttctaattcctttttgtatggaggtaggtccttttactgtccctattttaggggacaaagctgaggctcagaggaggtaagaaacttgtctaaacagagaagtggcagagccagatttagatccagggttgtctgac

SEQ ID NO: 165305 - DNA, 588 bp, Homo sapiens
caggatggtctcgatctcctgaggcctcccaaagtgctgggattacaggcatgagccaccgcgcccagccttaacacatcgtttttaaacaccactatgtgccacacaccctgctacagcatgtacctaagtaagatgttcaagataaatccctgtcctagggttgtttataatcttgtggggaaggcagctaaacaaatacttgcacaaataactacttagtcataattgaaagcgctaccaaggaaaaggtaaggaatcatctttgacgctttctcctcctgcattgaatcaccaggtgctgttaattctaactccgaagtctccagattgtcctcttctctccacttcactgctatcagtatctcaacttagactaccgaaataccttcctaactggctcccctgtgtctatccttgcccccacagtctatttaccatgctagatccatagtgatcttttaaaaatgcaattctgcgtgtcaccttcctgcttaaaacacttcattggttttctattgcccttgggataaagtctacacttcttaccatggcttgagaggccctctatgtcctggtccctccttg

SEQ ID NO: 165306 - DNA, 619 bp, Homo sapiens
attatgcttttggagtgtaactgaaacatttctgggattggagttaatatgctaaaaattaagaggcaagaaaataaagcagtagtttgtttagaataaaattcagcttaatctttggctgtcctgactacggcccatcatcagtgtttggaattttcccaccgtgttatgtagtgcagtgctgtggctttaaagaagcacttccccctgttgccctggagccccatgccctggttctgggaggtaatcacgattgtgtactgttactatattgtgtcagccctctctgcctgctgctttcatctttcttaagttatgcagcacaaatcttagaatgtttctctattttttctaattaaaatactttctatcctaaaacaattgaggaccattctcctagaaggttgctcacccagtctctggcgtgtcagcgcagctaatgacgcacctggcccacgaattcacttacagttggtttttgatgcatgaatggtagcaatactaggttacttttattttggcctttaaagtttgcagagatctttggtacacatgattccatttaatccttacaggattcctgtgacattagttattattcctattttaagatgagaaa

SEQ ID NO: 165307 - DNA, 343 bp, Homo sapiens
actccaaacccctcattcatcccattaataattcctttaaatagaatgattttttggctgggcacagtggctcacacctgtaatcccaacactttgggaggctgaaggggaaggatcgcttgagcccaggagtttgtgatcatcctgggcaatgtgagaccccatctctacaaaaaataaaataattagccaggcatggtggcatgcacctgtggtcccagctactcaggaggctgagttgagagaattgcatgagcccaggtgtttgaggcttgcagtgatccgccatgctgtgcccctgcactccagcctgggtgacagagtgagaccctgtctcaaaaaa

SEQ ID NO: 165308 - DNA, 172 bp, Homo sapiens
  misc_feature (23)..(23): n is a, c, g, or t
gtgactctagacgatcccctttntccacactggctaggcctggacacggttgcagaacgtgtctcctccccatgtcgctctgtgaccgaggggtgcgcatggcatgaccgctcactcactcctgcctggaagtgaagggctgctaggtggaggtcagcaaggatgttgagtg

SEQ ID NO: 165309 - DNA, 407 bp, Homo sapiens
ggacagaggggaagaagagttgaagaaaatgggacaaattagaagagcaactttcatctcacaggatagtgatctaaggagtcaggatttccttctttcctcttcaggaaagaggattcggctttaaaggatgagatccagggtggactgaaggaaagggatgaaacagtagaagaggtgaagggagttcaagatgaacaaagccagggggagccaggggaagtctggtggaagggaaaactcgctaaggcggtctttaacctcacttgcttccaggctgctgccctgccccatgtccccattcatcccataacatcaggatgtgttgtgggctctgcctggagtggttctgagagaacctcagaaacaaaggcctgaggagtttggggtggctcctgggaaggtat

SEQ ID NO: 165310 - DNA, 513 bp, Homo sapiens
aatatcagccaggcctgacctagatctgctgagtgtagcccaaactgccaaaccagagtcacagtctaaataagtgctcatagcagcattgtttacaatagcaaaatggtggcagcaacccaagcgtccatcaaaggatgaatggttaaacagtatgtggtatctacatacagtggaatattagccagccttaaaaaggagggaaatcctgatgcatgctaccatgtgggtgaaccttaaggacattatgctaggtgaaataaagccattcacaggacaaatattgcataattccacttataagagggtctaaaatagtcaaactcatagagacagaaagtagaatggtggttgccggggatgagtggaggggaggtggggagtggttgtttaatgggtgtggagtttccgtttgtgaagatgaaaaggattccagaggattgcccaacagtgtgaatatacttaacacaactgaactggacactttaaaatgggtacattttaccacaacta

SEQ ID NO: 165311 - DNA, 437 bp, Homo sapiens
tattttacccagtcccaaggatttcccctaacatttgcatacgagctagtgttcacaggattcactgtatgatgcattatggcagtaagaatacagtgtttgactgttatcaccagaagctaaaataaaccactctagagttggagggaaaaggtcttattttttgttttgttgcctttttaaccccattgcgtgatttctttgagaagaggtcattttaaagttctcctgcacagcctgatggacacgcgctaatgtgtgcagctggctttgtgatttgctattgttcttctaaccacatggtgtagctgtggatggctgggaagagccaagcaggctgtaatcatgtggaagggtgcatgtgtgcatggtgcatatgtgcatggtgcatgtgttcatggtgtgtgtgtatgtgtgtgtgtgtgtgtaagggtgga

SEQ ID NO: 165312 - DNA, 220 bp, Homo sapiens
actcatgaacatgtgcagatgggaccaggactgctctcagccaatgactagtctccatggcttggagagaggcctttgccatcgtacccaggggctgggttccaacactttcctgggcattcaccagggcccgtggataccatgtgtcaccacactgacccattttaccgatgaggaaacagaagctcaggaaaataatgttgcttgaggccatttaatt

SEQ ID NO: 165313 - DNA, 477 bp, Homo sapiens
aaggactctgtccattgggtatctgcagagcaggaatagaagggaagattccctgtcatggtgtcagacagagagaaggatttttagaaatagagcagcccatatgactgatgtcccaaactatagatcgctggctaatctcatcatttgttggtgtccctaagcagagttttaaaacttctataaatctagactataaaggtatctactggttgatgtgggaatgagaggtagaaagaggggaaatctaaaagtatcaacagataaagactaaaatgaatatgcaaaaaataaaatagttgttggagttttctattttccaaacttctataatcttacaacttttataatttaaaaataaagaattcagataaaaaattttaaaattagaaataagaaaaatgtgaacaaatgttaatgtaccttaatttaaatgtcaaaaatataacatattaaattagaagatacgtaatatac

SEQ ID NO: 165314 - DNA, 282 bp, Homo sapiens
aactccagatgtcattcaataaatatctattgagagcccaccatatttcagacactgcactagggatacagcagtaaaatacagtcttgtcctcatggatttacacaaactgaatgtcattggtatcaaccataaaaataaagacaacaaacaaaacaaaaacccttacttctcctgactttcccaatccaacaatccaatcagtagctaagtccttttattctcctctcaaacagctttcttattccttcctatccatcatacctgaggcttcaccaagaa

SEQ ID NO: 165315 - DNA, 551 bp, Homo sapiens
aagcttcttcaccctccctgggaagaggctgccctgagcttgctccaggcttcctggggtcctcgttaacaggcatgaaagtgctgctccccccccaccatgccctcatggctgagtgctgcatcagggcagagcttgtgtgaggctgaatgagaagtttggtgttagatttagggaatggggggccatggcaggatgccagggaagaacctgtgtatgtgtgcagctgtgtgagagctccagaatttctgcagggaacttggacagctaggggttacatctgcataggaagcaccctgtctttgcttagagtgtgtattccaaataacaaaaaatagcaagtttaataaagttgcttttgtgcacagtatgtataacatccagaaaaggtcaatggcctattactcaagagaaataattacacaaataagtcaaatgagaaggatgaaataaggccaggcgcagtggctcatgcctgtaatctcggcacttcgggaggccgaggcaggcagatcacctaaggttaggagtttgagacctggtgaaaccct

SEQ ID NO: 165316 - DNA, 622 bp, Homo sapiens
gaaaacaggcccagaatggaggggaatcaactaatgatggaacaaaaggtctatctagctattgtagtagcagtagagcatcactaagtatttcaatactttgtcaattataagagaatgtaagaatgaagaggatttcatctttatggctggaacagttgttagttgatctactatttgcatagttgaagagaaccaagcacataaaatcttgtgagtggtatagttgatcaaaagcagacctgctcccagaagttatgactccagaccattgatgctcacacccaggtagaaagggtagcatgtgaagaagacaggggccttataggtggagagaagcttgcaggtacatgatgtttgccacagttcacatttggctgagataatggggataaaagtatgatttttcaaagtgctctgtggccttttccatcattgcaaagtagtggaggcttagggttttgtccataagagcaatttaaaattacttcaaatttctgcaactctatagtattaacacatttaaagtagatacagaaataaaaatgtgcatgacccttcatcaaggattctttttattataatttataatttcatccagatggccaataatagaatatag

SEQ ID NO: 165317 - DNA, 517 bp, Homo sapiens
gagattaaaataataaataactatgcccccaaaagaatgtataaagatatgtaaacttgtatccagcttataaatactaaactaaacatcactgagcatttggaagagcagaattgatactgcagaacacaaagtcaggaattctaaactaatatagaaattccagttatataaataggtgtattataggtctagaatcacaagtctacaaaaagaaaaagagtatctaatttagaaataagaaggataagaaagaaaagataaaatgtcagaactgtacaaatcatgatcagaaaaaaaaaattttcaaagaaaacgatgccttcagcctggttaacaagagagggcatagagcatttctcagcaattatccttaaagaatgaccccagacatttatttgtcaagttttaaacttttaaagacaagatcttacattctgttaagaagaaaggtggtgtaatatatgaatgcccttgacctcatttctcagatctctaagaaaggagaagctaaaaa

SEQ ID NO: 165318 - DNA, 202 bp, Homo sapiens
ttggttctctggtgacacagaaccccctgtagtctctggaatgcatgagctatttcacctccaggtctttgcatatgctgtcccttctgaactttctccttgctatctccgtggccaaatcctatccagtcttcaaaacccagctcaacacccaggacctatacacccactggtctcgatctgtttttactggccattcatg

SEQ ID NO: 165319 - DNA, 215 bp, Homo sapiens
ggctactctgaggcttttctttagcatacttcctgattctttgctgttttagaaaaatgagattcgattttgatactgatttatggataggttatttggcaatgattattagtgtgtgatgcaaataatttcaaagatttgttcttaataacagctatgctcactgtagatgacgcaataaaaaccgtgattggtagatctggttgctgatactc

SEQ ID NO: 165320 - DNA, 329 bp, Homo sapiens
cagaataacactttttaaaagagatataaatctactcaagtaatctccctgcttaaatcttcccatgtaaagaccggaccccttaatatgactaaccaggcactgcatagtctgattcttgcttacttctgcaaagtagtcttacttcttgcttacttctttagtgttatcttatattttattgcctcttgttctctgttcactagctacactggtctgagagttcttctgaggtaccatcattggggctttttatcctgttccctgatatatcctgtataattcttattctttcaactcaaacatttcttcatggaagctgtcctttt

SEQ ID NO: 165321 - DNA, 403 bp, Homo sapiens
aatgtgtagtccattttcatgtttataaggcagggatttgaattatatcctataaggtttatcccagagagcaagaatcttcatttcaatgtagctttattctgatttaatgaactcagcgatgtgggtgttctctggaatctagtctgtcctttgcaaaatcagggtcctgccctcgtgcctttgagcccacatgtgtccagggatgatctaagtgacaaagtacttcgtccctaggctgtgcaagtaataatgtgattaaatagttgttggaggtcacttcttccaagttgagtatggactattggcagattttattttttgcttgtcacttaaaactggctaaggtagataagctttgcacgaatgtaattcaaaatacactgtatacatatgtgtgtat

SEQ ID NO: 165322 - DNA, 305 bp, Homo sapiens
tcctgagttcaagcgattctcctgccaaagcgtacaccaagtaccaatgtctaccaggctggtctcaaactcctgacctcaggtgatcctcccaccttggcctcccaaagtgttgagattacaggcatgagtgaccacgcccagccctgcacttaaagcttttacttctctccaggggcctgcacatgcaagtctattcacccctacctcctctcctcaacctatatcctcttccctcacttgcctggtttatgcctactctgtctttgggtactacgctttggcatcagttccagtaggaagtc

SEQ ID NO: 165323 - DNA, 203 bp, Homo sapiens
gaattgggaaagagaaaagaagcatctcaaattttgctgggagatataaatccaaagtttgtgtcagggcctataagggcttattagatttggtctcagcctgcctccacctccttgaaccttaaccttcttccagcttctgtaggtcctatgccctttgctggaaacatcactctccccattctgtacgtcactcactccaa

SEQ ID NO: 165324 - DNA, 247 bp, Homo sapiens
attctgcactgggtgctgaagaaggatggctcttatctgcaatggcgggcagaagctggcggatgggagagggtggggattttggccccgtggcttccccactccccaggtctgaccagcaacctccagcagagaaggcaccatgtccactcaggggccacacagtggtgcttcatacatgtgccactgacttagtcccaacccccctccaggacacctgaaggtgccaagtgtgacctgggctcct

SEQ ID NO: 165325 - DNA, 464 bp, Homo sapiens
ccaccgcacctggcctctaagagtgctttttcctagcatacttttcttctcctaaggtaaaaggctgtttgtcatggtacagctacggtgattttacttgagatatttgactttgagatggagatgaagataagtatataatgcagctgccacattcattctcatacaaggtaaagtcattcaaaagataaatcgaagaactatagatgtatttaagaagaaattcagcctatatgtaacaacaaaattttgaataatcaagttcagaaattggatttttaaaaacttattagctactttaacccttttgaaatattcccaaaaagtgttttctcttcctgagttaaatttattcgtttattgacctattaaagatttttttagtgcttcagagctattctgtatatctgttcattttcgttatttagtagtatatagaagtaatagattgggctgaatagatt

SEQ ID NO: 165326 - DNA, 284 bp, Homo sapiens
gaggtcgaatcttggtgatgggacttgggttccagagtggggtgaaagaaccaagacagtaggcacccacctgtcctgcacacatctgtggtttcatgttgactgcattttgggaggagctggcccccacctcgtcatgagttacaggcaagtggccctgttgagtccagagtggggagaggcaggcacagtggactctggctcgagacctaggatggcatcctactgtggctggcatgctgtgtgaccttgagcagacagatcttccccgtctctggggctga

SEQ ID NO: 165327 - DNA, 558 bp, Homo sapiens
gtaaggctgggaatttgaggctgcaattagctataattgtgccactgcaattcagtatgggcaacagagggagtttttttatatctaaaaataaataaatagacaaacaaataagtaaataaataaggcattccactgtcttctgacttccattgttaacattgagaaatctcctgtaatttctggctaatctttcttttcatgtgttttaaatattttcagtcttctcctttagttatgtaaccatgttaaataaacttgtgttgtatcctgcacttgtaattttagtgtcttcttttttctgaacatttcattactgcagttttttttctgttttgatataagagagagggagagagagagagaagaaagagagagagagagtgagcactaatgtttttggaacattatcttggagaatatactgaaattttcatatgaagtaaatttatccagaagggagtttcttttgactctgtctagtgtctaaggatatataccaacactttgaatcatattagttttccttaaagctagaaagttctatgagccacatat

SEQ ID NO: 165328 - DNA, 309 bp, Homo sapiens
  misc_feature (286)..(286): n is a, c, g, or t
tggcatgggtgctccaagaggatcaggaggcccaaagaaagctgactagctgaggccactgtttatgacatcagaaacagagctgcaggctcgacatccaccaatgaggaattgggtagacactcaagaacactcaagaacgctggagaggccaggcacagtttattaataatataagattaaagcaaaaacaaccttttatcaagtgaatactaagatggtcagtctcaagaccaggaagcattttggctgtaccagaccagggatgtatctttgttggtctgtngacttcccaagtgctcatccatc

SEQ ID NO: 165329 - DNA, 302 bp, Homo sapiens
tggcatgggtgctccaagaggatcaggaggcccaaagaaagctgactagctgaggccactgtttatgacatcagaaacagagctgcaggctcgacatccaccaatgaggaattgggtagacactcaagaacactcaagaacgctggagaggccaggcacagtggctcatgcctgtaatcctagcactttgggaggatgaggtgggaggatttcttgagcccagcagtttgagatcagcttgggcaacagagcaagactctgtctctacaaaaaattaaaaaattagcagcacgtggtggcac

SEQ ID NO: 165330 - DNA, 489 bp, Homo sapiens
gagctgtggcccaaaggagcaccacgagacagggacagggtgtctaccccgcctccaccatcactcccaaggacagcagagtggtctcaagagaaggcccagcttggggggagtgcgtgctgtaagggaagtgttcaaagaagaggccgaccacagtgcggtgcgggtaggtcaggggtggcgggggttgtgtttactgaagacagttccagaaggctagggggtcggcggggagagttgatcaacttactaaaagtcagctcctactccatatttcaatccagaatccagaaaacaggccagaattcatttttcaggactttctgatttatttgttgttgtttggtgagaaaatgagcatgggttagggacccactgggacctgttttctcacctgggttagaggggctatgagacggcctactgagccccaggctctcaggagcctctgaacaccaggacatgtggtccaagaaagatgaaggaaca

SEQ ID NO: 165331 - DNA, 526 bp, Homo sapiens
attccggaaggcaatacaaaccagtcagagtagataggactttattctggatatgattgaaagccagtgaagatatttgagaagggaagtcaaatatgattatataaaaatattaatatagtggacatgtataatgtggatacgatgggggaaatagtgccgtcacataggagtctgttgtagtaattccggagtgttgtgatgaaggcttggactgaagtggtgacgagaagagacagagatataggtgatgtgtcctaattgaggaaatgaatataatttggtgacttattgaatgtataggacaaccatcagaaagagaaaggaagattaaaaatgtccctaaggatttcttggatactataaaaattacacttgattaatatgaacaaagttgtgtaataaaatattttcaggaatatttatgcaaagacgattaggacatgcttaatttatcaggaagtgataaactatggctatctctgaataaatcatgcatagtctagattatccacactgttagacg

SEQ ID NO: 165332 - DNA, 155 bp, Homo sapiens
cattgttgctattatttgctgttgatgttattgtcttttgcttagtggcttttctgatttaattctataaagtctgtattcttttcatatgtggtcactgaagtctctgctcatttatcttagtggtcagttaacatttaaacagaggtttcgtt

SEQ ID NO: 165333 - DNA, 531 bp, Homo sapiens
actctgttgcccaggctgctcttaaactcctggtctcaagcaatctgcccacctgggcctcccaaagtgctgggattacaggtgtgagccaccacgcctggccctctgttaatgtattaattataactctttgttttgttatttgagggattactttagggttttacaactcgttaagtaaaaggggatcatcataaatgtattggaggaggaagggttggtcttgctgtgtcaggggtagcagaggtacatcttgacttaccacagtttctttctttcttttttattttattctttactcctggcaagctgtgacacagttattttcaagagatgtaatatactacttcatgcgtaagaactgtacaattatataccttttttgccagtcccaattttatgcagttgttttcatacattttatgttcatatatgtaataaaattaataatacgttgttatttttatttaaatgaccacttaggttttaatgtgtacttaataaacagtaagcagtctcttctgttgaccc

SEQ ID NO: 165334 - DNA, 280 bp, Homo sapiens
tgccccccggccaaatctactttcttgcagaataaatggattgtgctcctccttggctctcttctgccccactgaagacacacttttcttctgtgcagcataagaaccctatgctgatgtttggcggctatgatacacatgcacactctcacttccccataaacttttgttagatatccatgtttcacaatgggtacctgagattgtgaagctggtgttgaacccttgaccagcaaggacttatccaacagggttttctaacatcacttaactgaagcca

SEQ ID NO: 165335 - DNA, 228 bp, Homo sapiens
tctggaatgttatttacttggtacatttctgtggctttttgtagcattgcacatgccagagccatttacttgaaaatgccaggttgcacagtttgtcttctcaacggggtgactttctcagttaggggagtttagttcctgtgtctctcagtttcttccttccttccttgtttttttttttcccctgagttagtgctctgaacaatactgttggtgcctgttgcatcg

SEQ ID NO: 165336 - DNA, 506 bp, Homo sapiens
ggcaattttaataaggtagactaggaaggtctgggtgaagaggtaacatttcaggcaaatttacatgaaaaaaaaagtgcaaagcaaatgtaaaggctttgagattggagtatttttagtgtgtttgaggaaccaaaaaggttaatgtggatggagcagagtgaatgagaaagcaagtagtaggaaatgagattgaagaggaaggtaaagccagctcttgtgcacccttgcaggccccagtaagaagtttggattttatgccgagtggaatggaatgactttagtgggtttcccctaattttcacctctaatcaattaataatgactgcttagttcactgtgatgagaaagattctgaggctttacagttcaatggataaaagtccattgatggattaataatatacatcatgtctgtagcatgaggcagtggtaacactgatgattaatatttgacatctctgatcatgatggaagattaaattgtatttgtcaaagtactctga

SEQ ID NO: 165337 - DNA, 351 bp, Homo sapiens
tggtacgcaatagatacggattgctccacagttctggggtctggggagatcaaggccctggcagatgaggcatctggtgagggcccactttctggttcatagacagcaccttcttgctgtgtcttcacttggtggaagggtgaggggtctctctcaggcctcttttaaaagggcactaatcccactcacaggggtggggcccccaagacctaatcacctcccaaaggtaccttggtagttagttaggatttcaacagatgaatttggggaggacatgaagattcagaccacagcagatctctattttccctttatagagaaagtaattcaagacaaggagatgcttacaag

SEQ ID NO: 165338 - DNA, 209 bp, Homo sapiens
tggcctccagtctcccttgttaatcctccccaggccccagagctggccctgcactttccttcttcacagccctcctgtggctccccagccgccctgggagaaggtccaagcccctcagccaagcactcaaggctctgtgtgatctgagccccgggtcatggctacggcgttggagtccgcagagcactcagaacctccccaggcctcca

SEQ ID NO: 165339 - DNA, 406 bp, Homo sapiens
cagtgactgacgtggactctccccagtgactgacgtggactctccccagtgactgacgtggactctccccagtgactgacgtggactctccccagtgactgacgtggactctctccagtgactgacgtggactctccccagtgactgacgtggactctccccagtgactgacgtggactctccccagtgacggcatttacctagagaatctgctccgatataaggctggctaatttctggatggtgcactctgagcaggttgaatctgtaaacttcactcttgagccttggcctagtgaatctgggacttttgggtgttctctcctgtccagcacagcacagtgaggggagctgacttggttgtcacaggaccctacttgtcatcctgagcagccactatttgatt

SEQ ID NO: 165340 - DNA, 1007 bp, Homo sapiens
ctttcccatgttgtctgtctataagagaaaaattaccctctgtaatttaattttctcctggcatccccatggtataattcatcgaaattttgttgtggggtccagaagggctgtattggaatcttggttcttctacttgctagttttgtgactttgggacccctctgagccttggttcctcctttgtaacacactcatcttacatcatggtgagccaaatcccatagaatgacatctgtaccatgtagcccagtgtctcatacacatccaataagtgtgggctctctttcttccccatcacagaaactcactctgaacatgcttccaattgttaccattgatgatttatttatgtttgagtctgggaaggtgtttcttgaaatctgatagcaatgacaatgacaactgagttcatcatatggagtgattactgtggaccaggcactatcctaactgctttacttatatggttctttatgatagctccatggggaagcaatattgttatccagtattgtcagatgaagagactgaggcacagaaaggttataaatcctgcctaagtttatacagctgataagtggggagccagggactctggctccagagtcccacggtattaacagagcttgtctattgcccacacttcagccagatagaaggtcgggggaacagcagttaactagtagtgccatgccaagccactacaatttcaacctgaagcaaaagaaacttggtcttcaagatagtctgtggaggtcacattattgacaagtatatgatttcccataccttttggaatattgaaaatacctctaggtacccttctctcactgcctttactactttcccagacccttttgggtccacaggtctgaggttgaaaatcctaatgtaacctaaatttctcctgaaaaggaactcagagagatcaagtgagttttttgctcccttgccccatactgagattgtagtatatgaggaaaatggcagttataataaaaata

SEQ ID NO: 165341 - DNA, 465 bp, Homo sapiens
tcctgaggcagtgtgtgagctgtggttaaaagcttggactctgggccaggtgggtggctcacacctgcaatcccagcattttgggaggctaaggcgggtggatcacttgaggccaggagtttgaggccagcctggccaacatggtgaaaccctgtctctacaaaaaatacaaaaaaaaaaaaaaattagccaggcatggtggcttgcgcctgtagtcccagatactcaggacgctgaggcagagaatggctcgaacctgggaggcggaagttgcagtgagccaagatggtgcaactgcactccagcctgggcgacagagtgagactctgtgtccataaaacaaacaaacaaaaagcttggaattgagccagactgcctgaacttgaatcccaacttccacatttactagctgtgtgaccttgggtaagttactaatcctctcagtacctcaatttcctcacttgc

SEQ ID NO: 165342 - DNA, 153 bp, Homo sapiens
ttcttcatggggagggttaaagtgttgattatagactttggcttaattatacattttaaaatttgagataaacagtagaagaataaaagagatatttaatttttatatgagcagaagaagaaaatcagggtgaagtatttgattcaaaataag

SEQ ID NO: 165343 - DNA, 433 bp, Homo sapiens
aaagggaactcctttcctattctgctctttcttctttctttcttgagtctattaatagcactatgaaatcccatttccaaggacaagccttctggctacatgaaatgagaaagctgtcatcccatacacaccgtttaatccttgttacacaaatggtgcctgtccagatgcccggatatcatttattttttgctgatggactggtatcttgcatacatttgtttggtgatttctttttcttttctttttttttttttttgagatggagtctcgctgttgcccaggctggagtgcaatggcacaatctcggctcactgcaacctccgcctcctgggttcaagcgattctcctgtctccacctcccgagtagctgggactacaggcgtgagccaccatgcctggctaatttttgtattttttttttttttttttt

SEQ ID NO: 165344 - DNA, 214 bp, Homo sapiens
caagaaaacctgacgtaaacataatgtttttaacttttgttgtgctgacttctctcactcccctatggagtggaaatgcctgtgtgagatccataggtgcttttcctcctcaacagttccaccatgccatattcacattaggatatgattctcctgctaaatcatctgtacatcagatgtacacatcaattgtgggccctaggtgcttatctgc

SEQ ID NO: 165345 - DNA, 477 bp, Homo sapiens
acaacgtttctccattgtttcgtatgtcggctaggtctgagggacgggacggaagcccccggggctggggctcactcactctgttcttcatgtaacgcattcacaccatgtgtatgagcattcagcttggcgggtggagcagttcggcattacttgctggaaataattcagagcacttatgaccaggctttggaacccaagccaagtgttctcgagcacatccgtacggggaacaaaagttttgttttgtccccatcgttccctcacccgcttcggatggggaaatatttgaaaaacggaagtgcctataatattctgcttgtgctaccaaagttctaatggtgtttacctgaaatgtttctatcattcccaaactttcagggtttctgttggtgattggcgaggaacagattgcactttcctgaactgaaatctaatgaatgccacaaagtgaaaataaactggagacacttcaaa

SEQ ID NO: 165346 - DNA, 272 bp, Homo sapiens
tcaatcttcctacctcagcctcccaaagtgttgggcttacaggtgtgagccactgtgcctagcctcatacttttcttataattaccccatacagtataattacctcttataaaagttgttaattttgccatgagcttttcattaaaaatttatgatttgatcaacttcatttgatttcaaattatcactaaaatgtgtgctttttgcattaaataggcatgtaattcttccttttattcagttccaatccacgttgacctgtgattataaac

SEQ ID NO: 165347 - DNA, 216 bp, Homo sapiens
ccaactgctgaagggtgtaatatcacatggccacaggataagctggggagagaatgaggaaggggcaatttcccaacccaaattccccaaggtcctgaaaaattatactccccagaaagtgtttgctttacactttgctgaaatctgttacgtaacagtggagaaaatgtgtggggtgatcttttccctgcacttcagccggggaggggggtgaga

SEQ ID NO: 165348 - DNA, 515 bp, Homo sapiens
tcactaggccataggaatttctcagctccattaccttatgagactaccatcaaatatgtggtctgttgttgaccaaaacataattatgtggcacatgactgcacataccgagacatattgcattcctattatatttttcctttagtctaaaggtaataaatttctttttgtgtaagtggcagatgattaggatattactttttaattttatacacacacatgatctgttttatttccttgtaaggaaaagtcaagctctatggtctagagagaagagaacaggccttaagactaggatctcatccctgagcagctagcaactgaagatgagagagaaggatatttttaaagacacccctctagcatgtctaatggtcaaggattgcagtgtttctgacagaacacttctgttctgagaggctcagactccttagccctatggacagggtttaatacttcatcttgttaactttggtctgcagttctggtctggtagggttcctttgattcatgat

SEQ ID NO: 165349 - DNA, 450 bp, Homo sapiens
tgtcaagctgcttcacttgagtgtctaacaggcatattaaacttagtgtgttcaaaaccaaagtcttaattttctcccccaactcattccttacccagtactccctatatgagcaaatgcctatatgagcaaaagtccctttcttatagttgctcaagtcacaagcttggtataatccatgaattttgtttctttctcttccatctctcagccattactaaattctgttctacttgcaaaatatatctggaatctagatatcaatttctcatgcccccactccagtgatcccctcctcagcctgagtcatcatcactctcttctgagactattgcagtagctgtaagactcagctccctgctttcccctgtgcccccaacagtcttttctctgcacaacagccaccctaaccccctttcactcagaataaaacccaaagtccttgccatg

SEQ ID NO: 165350 - DNA, 357 bp, Homo sapiens
aattttacagaatatcaaattactcagggggggtttcagctattatgcttgagaattcaagtgatgaattcccttaaagttgaggtgtcatctagacagaagagacaaagtatatattcataattactggaggtcttatgttggcacagtgagctgctatgagttttatagtgcccaaataagtattgcaacaaaataaagctcatgctggcttctttccttgttttctatgactttcttcctatgctgctgaccactattagatcactttcattctcactgaatttcaatgcatatagccaccatttctcagggtttacaatgtataaggaatggggctaacagtgtacgtctagt

SEQ ID NO: 165351 - DNA, 420 bp, Homo sapiens
ttctgatccttttcagtcgtatgtggcagaagctctgttccaggcagtcatgtccaagaaaactgagactcccttaccccattcagtgcctgcttgtaggataaatgctttacttaaggcatggcaggctgagaatattgggctctgattatccccaacctggcttgctcacagggtggacattatatgtcagggagtgcaatctgaaaaaatcagagtttgatcccacacacccaacaccagcacctgctcttaaggcagggatataattttgggagaagttagctgctgtcctccctctatctcctgaacagtaacatagatgttctgtccagatggagagagaaggtgtgaggatgctgtgctcagcagttgtgcttgaagggaccaactttctttggaccagaccgtgctgtgcct

SEQ ID NO: 165352 - DNA, 285 bp, Homo sapiens
agttaaagaacaatggagttgaaaaaagatttagaaattatctcatgtaacgattcctgatctaggttcttcaggcactcaaaaataaatggataagcaagtactagtggttcatgaactattttcaatacttataaaattatcatagaaactgtaactaaagagaatgcacaggttaactgaattgtcaattttagcagcatttgattggaattatatcacctctgtggcaaagcttggcatttcttcttattggccaattaactttctatgtaataagatttg

SEQ ID NO: 165353 - DNA, 359 bp, Homo sapiens
ggttgctgtttcagttcaccgtgattggaaccagctgcattcctgcctgtagacttttgagaaaagttgaatggttagatcttagaagctcctccttcttccctgcatctcatgaaaaatattaaggcataggagcttgtcaaaagtcttcagattattttgtgtggttttattgttactctgcaataatgtaaccagagaacagctactccttgtggttaaaagtattctcattgtaatcccagtgctttggaaggccaaggtggaaggatcccttgtgcccaggagtttaaggctgcagtgagctaagattgcaccactgttctccagtctgggcaacagagggagaccctgtctca

SEQ ID NO: 165354 - DNA, 200 bp, Homo sapiens
gcagtttcagttggtctttatggaaggacacacagcatttcactgaagcttgagggatctgccaggttcaagtgtaaaggggcattagtttcaacttagagcagctcccccagctacaaatgctgataaaatagctcagaagtgcaagagcctggttactttcagtaattttaggatttagtatctggatctgaattttg

SEQ ID NO: 165355 - DNA, 99 bp, Homo sapiens
gcatgactctcaggctgcacaaacctttttgccaaacaccaatacgtgggactcaggtcagacagactatgaccactggcccattgcaaaatgaggaaa

SEQ ID NO: 165356 - DNA, 588 bp, Homo sapiens
tgtaaatgtcaggcaacttatgtccccacaaaggaaagagtcattttagcagtctatttgccaaacatttctgttggtgtgttaagctcagttcagctataagagggaactgtactaactggctgtcatcacttattccactgtaattttatagcttaactagacctctaactaacaacccaaaactctaaacacggaactgtttcctttcaataaacacacacggtcacacgcagacacacaccaaataatcctctagaagaaggaatatatactaaaaagtgagatgtctgtctgcctaaaatgcatgattttacttaaaatgttataagttaagttgcccgccaatcgattcgattggcgggcaacttatgatcatacaaggaaatgtacagaccagctactgctcttgggtcaaacagacagagctgtgcagttgctggtggcaacatagggccgagaacccgcattagtactgtgaatcactcaaatgcctctttcaatcattactgtcaacctcatcaggccctctactcagagcaccaataagttcccacaccaatcgaagggatcctcagatcactacag

SEQ ID NO: 165357 - DNA, 345 bp, Homo sapiens
aggtgatctagaggatcccgaacgcgtcaaatcgaagattactgagacttttaaaaatcgtgttaagtcttctgagtgacccttcagaggcattcttcatttctgttactgtgtttctaatgtctagcttttccttttgatcttttcttagctctttcatcgctccacttacatcacccctctgttcttgcatgttatctactttttctattagagcccttaacatatgaatcatagctaccgaaattccctgtgtgataattccaaaatctgcgtcacatcttcgattttgacgcttgctttgtatctacaggctgtttttccttgcctgttagcatgctttgt

SEQ ID NO: 165358 - DNA, 1378 bp, Homo sapiens
aaaaggctctggaacataagaatcgaatgtcacgaatgcttgaagacagagatttattcgtaatgcgatcagagctgacggagtctgtttatgaggaaaaacttaaacagttgaagagcgattagcagaagaaaggcataatcgattggaagaacggaaaaggcagcgtaaagaagaacgcaggataacatactatagagaaaaagaagaggaggagcagagaagggcagaagaacaaatgctaaaagagcgggaagagagagagcgcgccgaacgagcaaaacgcgaggaagagctacgagagtatcaggagcgggtgaagaaattagaagaagtggaaaggaaaaaacgccaaagggagttggaaattgaagaacgagaacggcgtagagaggaagagagaagacttggcgatagttccctttctagaaaggactctcgttggggagatagagattcagaaggcacctggagaaaaggacctgaagcagattctgagtggagaagaggcccgccagagaaggagtggagacgtggagaagggcgagatgaggacaggtctcatagaagagatgaagagcggccccggcgtctgggggatgatgaagatagagagccctctcttagaccagacgatgatcgggttccccggcgtggcatggatgatgacagaggccctagacgtggtcctgaggaagataggttctctcgtcgtggggcagacgatgaccggccttcctggcgtaacacagatgatgacaggcctcccagacgaattgccgatgaagacaggggaaactggcgtcatgcggatgatgacagaccacctagacgaggactggatgaggacagaggaagctggcgaacagctgatgaggacagaggaccaagacgtgggatggatgatgaccgggggccgaggcgaggaggcgctgatgatgagcgatcatcctggcgtaatgctgatgatgaccggggtcccaggcgagggttggatgatgatcggggtcccaggcgaggcatggatgatgaccggggtcccaggcgaggcatggatgatgaccggggtcccaggcgaggcatggatgatgaccggggtcccaggcgagggttggatgatgatcgaggaccttggaggaacgccgatgatgacagaattcccaggcgtggtgcagaggcaaataacttcctgtggcccttcaaattgtcttctccacgaggtggaatgaagaaaaagaccacccattttgtagaaggtggagatgctggcaacagggaggaccagatcaacaggcttattagaagaatgaactaaggtgtctaccatgattatttttctaagctggttggttaataaacagtacctgctctcaaattg

SEQ ID NO: 165359 - DNA, 199 bp, Homo sapiens
actatggctttgtgataccccctggagaacgtaatgtgggaatcctgtaatctcacttgagaaatccaaatgtcaagaggctggctgccacagcctgtgatgcagagctgagggctacagtctggaaagtgacgttcttccagagtttgccagagcaaaggaataacaagactttcacatgaatctgatataagtcaag

SEQ ID NO: 165360 - DNA, 569 bp, Homo sapiens
agcctgttctgtggggcttatctcaggactgtgaggcaactgaagacagaagccatgagaggagaagtttggtaatctcatctgcaattgttgtttttgtacttatctaaggatgggggtggggatggaagggtgggaatgggtttgagttgcagccaaaggaatttagattagacacctgaaagaactttccaacatacaacgctgtaaggccaaaaggagatagtacagttgccttttatctggatccatagtataatacttaagtttaggtgttcaataagtactgaacacacaagactgggagtctggagagttgggccaaaagctcttatttgtccttcattcccactggggacatttctcctctttatttcactctctgagcctctgtgtccttgtcagccttgtagggctgcgatgagaattaaatgagacaatatgtgaatgtgaccagtccagtcaatgcctagcacatagtacatgcttaagaaatacctatgtcatctggattctggaaatcctgtacaccatggtagtccaataaaaatatacccaatgaatcatta

SEQ ID NO: 165361 - DNA, 455 bp, Homo sapiens
aatggtgggacttgcctcgtcacctggaatgacttccactgtacctgccctgccaatttcacggggcctacgtgtgcccagcagctgtggtgtcccggccagccctgtctcccacctgccacgtgtgaggaggtccctgatggctttgtgtgtgtggcggaggccacgttccgcgagggtccccccgccgcgttcagcgggcacaacgcgtcgtcagggcgcttgctcggcggcctgtcgctggcctttcgcacgcgcgactccgaggcctggctgctgcgtgccgcggcgggcgccctggaaggcgtgtggctggcggtgcgcaatggctcgctggcggggggcgtgcgcggaggccatggcctgcccggcgctgtgctgcccataccggggccgcgcgtggccgatggtgcctggcaccgcgtgcgtctggccatggagcgcccggcggccac

SEQ ID NO: 165362 - DNA, 376 bp, Homo sapiens
catgcatccttcatgtattcagcaaatatttcctgagaactttccttgggacacagcaatgaagaagacaggccatcccctgccctcatggcactcacagccaaaagtggacactaatttacgacaggtatggatgcgagacgatcatagaaacactcttctgtacttactacgtgcatggcaatgtgccatatattaattcgtttacttctcacaatactcatgaggaaaggaacattatcatccccatttcacagatgaggaaactgaggcatagagtgtttgcatgaggtgctcatggtcacacagctgggtgggggtagactcagatttggaacccaggcagtgcttccatcactatactatgctgcatctg

SEQ ID NO: 165363 - DNA, 335 bp, Homo sapiens
gtgggttgaccgtggcttgtgggttgaccgtggcttggcatgggctgttccagcagcttagacttccttccctccacttctgctgaaacacttcagcacatcctcaagactccttccctgaccatgcctcatggtcaaggtgacactcagtgatggcatagggttctggagtcaggacaccagggtgcctgtcctgattcttcaactaattggctgtgtgactttgggcaggtcatgctacctctctggacctcaggcttctcttggagaaaaagatgaaggtgttgggttagagtattcctagagtccctttcagtttgttgtgataccatggt

SEQ ID NO: 165364 - DNA, 371 bp, Homo sapiens
catttccactgtcccctttattatcagcgtgagatcatacagtccgcaggaagtattattgaagtgacttataaaaaaattaaattttctttaatcacactccattgcctgacaccccttatgtaagcagaagggagtctgaggcctcagcttctaaaatgggaaccatgctaaggataaaaaactgaagacatttagggacccttgtcctgtgaatacaagcaactacagaaaggcatgagaacagtttcttggcttgcttgacttccttctcaccttcccttggttgacccaaaaacaaatacaaagctcagtcatttaggtgggctgataattccatatcattcatattttcaatcaccaagagcaaa

SEQ ID NO: 165365 - DNA, 404 bp, Homo sapiens
aagaagagaccacacaacagacacagccagctctagcaggatgcaggcccttcccttgcctcctcaagcagctggggcagcctggtgttttcacacagacttggccaagcaggaaggggaaacagtgatggggcacggagcccaggagaaggtgcacagggcccaggttgctggaggagccattgtgcacgctgtgtacgctggggcactgctgcagcctcttttcagcctggacatcaggcctgcctttccatgcccacctttgaagtagcgacatccctgctctgatggctcccacagcccccactttggtctcatcattcccagctctgatcctgcctccgagtggtgggagccctagagattgtcagtcactgagctggtttccgggacacctgcccctg

SEQ ID NO: 165366 - DNA, 195 bp, Homo sapiens
ccaacatggtgaaatcccgtctctactaaaatacaaacattagccgggtatggtggcaggcgccctaggaaaacagtaccaataagcaacttgtcactatgggttgtttttttttcccccacctcttgatagcaagggtctatcggaagtataaagcgttgagcgggaagtaccttgcctttttgaagcgaatag

SEQ ID NO: 165367 - DNA, 665 bp, Homo sapiens
ctcaacgcctatacttctctatgcccactttacagaagagactgaggcaccaggcaataaagtgacttgcctgaggattctagactaacaagcagcactcaacgctttatacttcatgtttaaacatgaagtagaaatggggttgtgcgttctccccagatgtacatacttggaagagccatgcagcaagcagaggagaggaacagaggagctgtgtggcttgaccctcctcggaatctgcagtgtggctggctctgtgtgcttcctgtattgattccatgactcacggagcatgagctaagcagaaagcacacttaaactacagaggagacagctgtctgttacagaaggacatattttctgggtttaatggcgccacatttttcctaatagtttgtacactggggatgtacttactagtaatgtctgctaaagggtctttattgttttttcctttttgaataaaaaagacattctttaaaaaaatcacctaaatattattcttgacttttatttcacaacaggacttcccttctaggaaaacagtaccaataagcaacttgtcactatgggttgtttttttttcccccacctcttgatagcaagggtctatcggaagtataaagcgttgagcgggaagtaccttgcctttttgaagcgaatag

SEQ ID NO: 165368 - DNA, 842 bp, Homo sapiens
ttttattttcacggaattgcagatttgcagacagttgcagtatttttaattaagccgtaatacctgaatcgttttagtttagaatctttgggtagtggttaaagactgaaagtggataagggttaggagtcactaatacgttaacacatgcctttatgctgcacaaattgggtagggtatcttattactcaactcttgggagtatttgtagaaagttattttggagtcaacgactttatattttcatctcagcgtgttccacatattggttccctcaaaggctttatacttcatgtttaaacatgaagtagaaatggggttgtgcgttctccccagatgtacatacttggaagagccatgcagcaagcagaggagaggaacagaggagctgtgtggcttgaccctcctcggaatctgcagtgtggctggctctgtgtgcttcctgtattgattccatgactcacggagcatgagctaagcagaaagcacacttaaactacagaggagacagctgtctgttacagaaggacatattttctgggtttaatggcgccacatttttcctaatagtttgtacactggggatgtacttactagtaatgtctgctaaagggtctttattgttttttcctttttgaataaaaaagacattctttaaaaaaatcacctaaatattattcttgacttttatttcacaacaggacttcccttctaggaaaacagtaccaataagcaacttgtcactatgggttgtttttttttcccccacctcttgatagcaagggtctatcggaagtataaagcgttgagcgggaagtaccttgcctttttgaagcgaatag

SEQ ID NO: 165369 - DNA, 706 bp, Homo sapiens
ctcaacgctttatacttccgtgtggtccccacccctcaacaagggaaagaaatccacatgtatcgagcatatactacatgccagacatcatgccaggcacttatatgatctatttgtatcttcccaaaaaccccataactcaacgctttatacttagtgtttaaacatgaagtagaaatggggttgtgcgttctccccagatgtacatacttggaagagccatgcagcaagcagaggagaggaacagaggagctgtgtggcttgaccctcctcggaatctgcagtgtggctggctctgtgtgcttcctgtattgattccatgactcacggagcatgagctaagcagaaagcacacttaaactacagaggagacagctgtctgttacagaaggacatattttctgggtttaatggcgccacatttttcctaatagtttgtacactggggatgtacttactagtaatgtctgctaaagggtctttattgttttttcctttttgaataaaaaagacattctttaaaaaaatcacctaaatattattcttgacttttatttcacaacaggacttcccttctaggaaaacagtaccaataagcaacttgtcactatgggttgtttttttttcccccacctcttgatagcaagggtctatcggaagtataaagcgttgagcgggaagtaccttgcctttttgaagcgaatag

SEQ ID NO: 165370 - DNA, 631 bp, Homo sapiens
ctcaacgcctatacttctctatgcccactttacagaagagactgaggcaccaggcaataaagtgacttgcctgaggattctagactaacaagcagcactcaacgctttatacttcatgtttaaacatgaagtagaaatggggttgtgcgttctccccagatgtacatacttggaagagccatgcagcaagcagaggagaggaacagaggagctgtgtggcttgaccctcctcggaatctgcagtgtggctggctctgtgtgcttcctgtattgattccatgactcacggagcatgagctaagcagaaagcacacttaaactacagaggagacagctgtctgttacagaaggacatattttctgggtttaatggcgccacatttttcctaatagtttgtacaggtctttattgttttttcctttttgaataaaaaagacattctttaaaaaaatcacctaaatattattcttgacttttatttcacaacaggacttcccttctaggaaaacagtaccaataagcaacttgtcactatgggttgtttttttttcccccacctcttgatagcaagggtctatcggaagtataaagcgttgagcgggaagtaccttgcctttttgaagcgaatag

SEQ ID NO: 165371 - DNA, 503 bp, Homo sapiens
cacatttattgatattttcaagaagtataaagcgttgagaacagaggagctgtgtggcttgaccctcctcggaatctgcagtgtggctggctctgtgtgcttcctgtattgattccatgactcacggagcatgagctaagcagaaagcacacttaaactacagaggagacagctgtctgttacagaaggacatattttctgggtttaatggcgccacatttttcctaatagtttgtacactggggatgtacttactagtaatgtctgctaaagggtctttattgttttttcctttttgaataaaaaagacattctttaaaaaaatcacctaaatattattcttgacttttatttcacaacaggacttcccttctaggaaaacagtaccaataagcaacttgtcactatgggttgtttttttttcccccacctcttgatagcaagggtctatcggaagtataaagcgttgagcgggaagtaccttgcctttttgaagcgaatag

SEQ ID NO: 165372 - DNA, 272 bp, Homo sapiens
gagaattgcttgaacctgggaggcagaggttgcagtaagctgagatcaaccactgcactccagcctgggcaatagaatgagactctgtctcaaataattaaaataagataaaaaataaaaatagagattggtagctgtgtttctgctttgtagttttgagttcccctcccagtccccaactataacccccaaaatgctcttcaaaacctaagaagaagaagaatgtagggtgtgttttggcagaagaatttggctaggttacttcctctgtt

SEQ ID NO: 165373 - DNA, 257 bp, Homo sapiens
ggctttaacttggcctctggtaaggggttttgtcctgtgtcacaacacggcaaaaggtcaaagagtaggaaggcacatgcaaagaggcaaaatctgaggggctttataacaacccactcttgcaggaactaatccatttctgcaagaactaatccagttttgccagagtgagaactcactaccatgagaatggcatcaagccattcatgaggaatcttctctcatgacccaaacaactccaactaggcccacctccc

SEQ ID NO: 165374 - DNA, 448 bp, Homo sapiens
aagacttcgtgacacaagtttacctatttaacaaaccttcacatgtgcccctgaacttaaaaattaagaaaaagaaagaaaaagaaatagaatttataatcaaaaacattcctacaaagaaaactccaggccccaatggctttactgttgaattctaccaaatgtttaagcaagatgtaataccagtcttagagaaactcattcacaaaataaagaaggtattatagaaatacttaccaagtcagcttagaattgtgaccctcctgcctaaacttgacaaagacattgcaaaagaataaattacacatcagtgtcactcatgaacattgacataaaagtccctaacaaaaccttagcaattctaatatatcacaaccaggttggccttatttctagaatgtaaggtttgttcagtattcaaaaatgaattaattaaactcactacctg

SEQ ID NO: 165375 - DNA, 197 bp, Homo sapiens
tgctaggattacagatgtgagccaccatgcccagcccatatgttgaatttttaaacactgagtactgcagaacccaggaattatttggacatagggtctttacatgggagttaaaatgaggttgttgtgaagggaccctaatccaatttgactaatatccttgtaaaaagggaaatttggagacagacacacgtaga

SEQ ID NO: 165376 - DNA, 443 bp, Homo sapiens
agagcaaaactctgtctcaaaacaaaaaaagaaagagagagagagagaatggagagggtgccatcaaggcacaagaaacctacacccaccctcatcacatgaaaacacctcttcccaacccagcatctgtcctatctctaaaacacactcctctcatgggtaaagagccttaaaaagcaacttgcaaccatttttcttaaagacgtttccttaaagaagtttctttttggagatgtggtataaatcatggctcctaatccttcctttcactttctaaacaacactcactgtttttcctttcccacagaacctaacgtttaaatccatgaaccagtttttacccttgaaaatgcaaccaggaagtgaaacataaagcatgggattctgccaaaacttgccaagctgggaaaacctttcttaaccttcaatgagggggttcagaa

SEQ ID NO: 165377 - DNA, 501 bp, Homo sapiens
caaaaataaaaagtcttctcagtgtctgattttctaatagagtgccagattttctactttgcatgttatgaaagttgttttaggtgatcaaaggcttataaagaacaggatgagattattgatgataagacggtaggacccagagccataattatgcatctctcagaatagatacagtagacataatacccttgcctatataaaagccttgaaaaaggcttaactgaaattcaacagctcaactgcctggattttatttaataagcaggtggaaaaatgacacattctataaatgccggtctttcctctggcactctggccatttgctatatgggccttgtgtgctgagtacagacagagaagagtgctatacatagactcaacaatgtggctgctaatgagtgcctgagttgccaaaagcagaggctaaagctgaaccctgataatgcaccatgagtgtattaaccagccatctgggagcaggctgattgcactggtccc

SEQ ID NO: 165378 - DNA, 282 bp, Homo sapiens
tggtttgacctcctatagatatcctgtcagttaattcaacacatttctttttgcacttaacaggtgcttgaagtggcagggtccttcctctaaaacattttaaataacactagtagatgaattccagttaaggggaaaaggtatgtgctgaaagtaatcttcaaggccacagtatgttctctccaaacacatgttttcaccacgagggatgtagatctgtgtgcccttattggctttactttttcacttactggcatctcttctgaccaacatctttagtca

SEQ ID NO: 165379 - DNA, 399 bp, Homo sapiens
ctcagcaaactaacacaggacagaaaaccaaacactgcatgttctcacttataagtgggagctgaacattgagaacacagggaggggaacaacacacacactggggcctgttgggaggctgggaggagacagagcatcaggattaatagctaatgcatgccaggtttaataccaggtgatgggttgataggtgcagcaaaccactatggcacacttttacgtacgtaacaaatctgcacatcctgcacatgtatcctggagcttaaaataaaataaaataaaattttaaaaaatattaagtttgatggcaaataagaaaaactcaaactggcagtagcttccataaggtggggtttattactcttatgaagtctatgaagtggaggtagtcatcccagg

SEQ ID NO: 165380 - DNA, 462 bp, Homo sapiens
  misc_feature (18)..(18): n is a, c, g, or t
  misc_feature (23)..(24): n is a, c, g, or t
  misc_feature (26)..(26): n is a, c, g, or t
gcggctagaggatccccnacggnngntgtactcaggcttatcctaaaaaatcaaatctggtgtcccctgagtttctatcattcttgggtctgctgtgcagaagttgcccctttatagaaggcaggtattctccagttggctactgtgcccaccttagtacttcccttactcaggcaaccttccttggtccttgtaagtatctgagtttacaactcctatgttatagtatatttggataaaaatttcaaggtttttaagtcagcatgtattggtttataatatatagtctatagagtatataaatccctcagttatggagttgaattttagagtttagaattttttaactcttttctttatatataccacaaataattctctgcccataagaatgcctagaagcctttttaggttattcctggttatagttggataatttacgaatattgcagacagtacatc

SEQ ID NO: 165381 - DNA, 386 bp, Homo sapiens
tcctgaaaaaacaaacaaacaaaaaagccactgagggcccttggactaaatccaggcctgagttgctgggcagaggtcagtcttgtccagacatgggaaaaaaataactcgagtcagacaggtgggtcaccacagaactaatccagcctgcaaatggcctgtgcaatcttcagctctgtccagacctgcctccctctggggatgcctttaaaggtgatgaatgatctggatgaatgggcttagaagataagagggaaaaacaaatatcacaggtcaaatcgttatttgtcttcaagtttaacaccgtctactggactaaaagatgtccaaagaatagttgttcaactatgtaaattccttttttttttttttttgagacagagtct

SEQ ID NO: 165382 - DNA, 160 bp, Homo sapiens
cccagcatttaagaccctgtatagatgaatctacgtgacttttttctatccttatctttctgaaacccaaaggggtatatcttaaaagagtttacctcctcacttggacatacccaattttttcacaggtgtcctggacctcattctcctccacttttta

SEQ ID NO: 165383 - DNA, 442 bp, Homo sapiens
cacacacacacacacacatatacttacatatatattgctgaattttatttgctaatgttttgttaaggacttttgtttgtatgttcgtgagcaatattgctctgtagttttttttttgtgctgctttggtctggttttggtatcagggtagcgctagtttaaattaaatcaattggaaagtttcctgttttctgaaagagattgtgtagaattgtttttaattctttaaatgtttggcagaatttcatatgggccaagagatttcttttttgggagtttttagattatgcatttcatttcctgaatgtttatagggctattcaagtgatgtattttgtatgtgtaagttgtggtagtttgtgttttttgaagaagtggtccgtttcatctaacttgttgaattaatatgtgtagagtttacagtgtttccttattatccttt

SEQ ID NO: 165384 - DNA, 547 bp, Homo sapiens
cagtaatgagttgatttttggacatttgagtttgaaatgtgtttgggacaagacagctgggtgacaaccaggcatttggatataaattagtaggtatactagtcagaagtcccaagaagaggtcaaagctagtaatataggtttgttgtggggggagtcatatgaatatcttccaacttgattttcattgtgctaaagtatcatataaatgccatcttctaaaaattcacaacaaaaaatgtttttctttaccttaattttcttttaccttacttacttttatctttcttttactttaacaaaattttccctagaatgaaattctaaacaaaagatggaggattcttattgtatgacatgatgactacagttaataaaaatatgttgtatctttgaaaatagataagaatagattttaggtttcctcaacatatgaggtaatgcttatgttaattagctcaatttagccgttccataacatatacatatttcaaaatatcatgttttccatgataaataaataaatatattttttaaatacaaaaga

SEQ ID NO: 165385 - DNA, 181 bp, Homo sapiens
tgtgtcaggtggaatgcagagtccagtatgaaaaggagcctgtttcagaacggaaactgtcaggtggagtggactccctgcaatggagtgatggaaagatttggtacaaccattgatgacctgagaacagacactaggaaggtttgacaagatccttcctacccccactccactggtgatg

SEQ ID NO: 165386 - DNA, 121 bp, Homo sapiens
tgtttgattaacggcttgagctcctcaagggttcaggagcttagaatgctgacaaagcaactctgctttgcatccccctaccctccccacaacacactcgtgcaatcgccggctccctggg

SEQ ID NO: 165387 - DNA, 412 bp, Homo sapiens
tggcagtgtgcagcattgcagaccccacccagacctcttgaattttaacaagacctccgtgcagagtaaaagtttaagaagcactgctcctggggatgggctaagtatacagtttttcaaacccttaggctatatacacattggcaagggctgtgtttatattttgtggttaaacctattcctttgcctagcacagtgctcagcccatagcagtaactcaaagcatatttgccaaatgtgtatgaatgaatgggcctgatggtacccaggcaacaaacagaattaccacacccaccccttccccattgtgcttcacacatcgaacatgtgccttcccaagtggcaaggattacagggtctgatgagactgtcccaaaccagaaaggtgccctcactccctgacacggtcacc

SEQ ID NO: 165388 - DNA, 213 bp, Homo sapiens
tggcagagctccctggaggcaggaattgttgcctgcttcattcactgctgaacccccagtgcctgaacagtgctggttgtgtagtaggtgctcacttaacatttgttgagtgaatgatctacatatagtgcaccttaagaaacaaaccaaaggcacagcctataaacagctgtgtgtacacatactgaggtgtgtagtgtctagggcaacaaa

SEQ ID NO: 165389 - DNA, 125 bp, Homo sapiens
tcagcataaaggccatttcttctaagagcctgtccctgactctccaatcggggatgtgtctgttgtctcatagagtgcccaattcctgccaccacttgtcatttccattcgcaacatttctttca

SEQ ID NO: 165390 - DNA, 218 bp, Homo sapiens
ggaaaaaattaaaatccttaggaatatacctaatcaaggagatgaaagacctctacaaggaaaactacaaaatactgctgaaagaaataataaatgatacaaacaaatgggaacgcatcccatgctcatggatgggtagaattaatattgtgaaaatgatcattctgccaaaagcaatcaacaaacttattgcaattcccatcaaaataccaccatca

SEQ ID NO: 165391 - DNA, 724 bp, Homo sapiens
gacacaagtggaagaaaccccagatctcttttcttttctagggcacttcttgctattgtaatttgaaaatgtattatttgaataatgagggatgtctttctcctgcaggactggtagctccttggaggaagggcctactggtcttgcatctgtctccctaccccaaggccaggcacatatgggaactatttgttgggtgtgtgtagtttcaagttctgcctctacccctgcctagtggttgcccttctgcaagccacttaaccctctatgcgtgtttcctcatctgaagcacgcaagtcaaatgatctgtgtgtgcctccctctgcctctggacccaatctgttcatatggttgtattgaagctaatttcatccacatacaagaatgtctagagctagcatagtgtataacatagccatcatttccaggatgtagatactctatttccattaactgattattatttattatttcagactttaccctgctttctctatagggtttttgtaaagactaagtgaaatgatgtataggaaattacttcagaaattataaagtttgtataactgaacaatgattgttattgctggcccaaagataccctcctgagaagaaactcagacccaaaagacagcattgcagaccaagtattgtaaaacatatgtgtggctagccccatcaaagaatgtatttcccaagttagtttttcatttaaaaaaaaaaa

SEQ ID NO: 165392 - DNA, 622 bp, Homo sapiens
tctcagttcagattcgttcccaaatttataaaatctgtaaaatccacatctataagaagtttgggttggtaccttgaagtttcctttcatttctaaaactcttgattctaggaggttttgcagcagcgtgaaagtttgtttttagaagccagaattgaagctgacaactcccagtcaaaagcagtgtagcttccaccattgccaggggcagccctcaaaatgtgctcagaggtgcagagccaaggaggcaattaattacccttcagtttcaggctgtgccgtgacaggactggcatgagaactttctcagcccccgcagtccctctctttgttcctaggtccaactgaagctgcctgtggcaggcacagcgcagggaaaggacatctctgcctgtgaggggccaggagacgtagaggagccacatgacccggggacagttgtttttttagagtcctgccccttttcttggttctccaggtgctaatcttggtttgacagcttttgaaggtcagcagcctgggcaagcacagccctggggcagaataataccttacaccgtcagagctttcacactgcagttccctgatcctccccacagccttgtaagacatagagagcagg

SEQ ID NO: 165393 - DNA, 255 bp, Homo sapiens
ccaagtcctaccaattctgcaccctttctatcttcaccgccccatgctagctcagactgaattcctctcacagcagcctgctcattggtcttcttgtcaatgctttctctctctaaaccatttgagtcatccctgttggatcgaacttcctaaagtagatataacacaacttccccgtgccatccataccttcattggttcctacagcttactgaacatcttcgaaattctttatttgatgctgaagatcttcac

SEQ ID NO: 165394 - DNA, 600 bp, Homo sapiens
ggccccatgagcccgcggctccccgtcgcccgggccgtccgtagcccctgacctgacctgtcctcgccatggccgaggccgcctccggcgccgggggcacgtccctggagggcgagcgtggcaagaggcccccgccggagggcgagcctgcagccccggcgtccggagttctggataagcttttcggaaagcggctcctgcaggctggtcgctacctggtgtcccacaaggcgtggatgaagacggtgcctacagagaactgcgacgtgctgatgaccttcccagacacgaccgatgaccacacgctgctatggctgctgaaccacatccgcgtgggcattcccgagctcatcgtgcaagtccgccaccaccgccacacgcgtgcctacgccttctttgtcaccgccacgtatgagagcctactccgaggggccgacgagctgggtctgcgcaaagcagtgaaggccgagtttggcgggggcacccgcggcttctcctgcgaggaggactttatctatgagaatgtggagagcgagctacgcttcttcacctcccaggaacgccagagcatcatccgcttctggctgcagaatttgcgtg

SEQ ID NO: 165395 - DNA, 446 bp, Homo sapiens
ataaacatcatttttgctttaaaatgagaccggttaagatttacctgtacccagatgataaagttttggtagaaaatattaaatgggaaaatagaaaagtgtgtatctacatatattccttaaggtcttatgtgtatctaagtgggagggaagtctaatagttaaaaaatataactgtggccaagggcagtggctcacgcctgtaatcccagcactttgggaggccgaggtgagcagatcacgaggtcaggagattgagaccatcctgggtaacacggtgaaaccccgtctctactaaaaatacaaaaaattagctgggcgtggtggcgggcgcctatagtcccagctactggggaggctgaggcaggagaatggcgtgaacccgggaggcggtgcttgcagtgagccgagatggcgccgctgtactccagcctgggcaacagagc

SEQ ID NO: 165396 - DNA, 195 bp, Homo sapiens
cccttttcccatcacatgcctgggcccaggctggttgtttagtgttgcctctcctctccagctgcggagcttattgaaaagctcttgctccctgcctggctttggcacattttctgcaggtgcctcctactgtggccacaatgggctgctagggaggtttagacctgtcaacagctacaggggagggggtggcag

SEQ ID NO: 165397 - DNA, 211 bp, Homo sapiens
tagagagaggaattagagaaggaggagaagacgaaaatgagagaaaaacaggaggaaaatataaattcatctaaggcattaggacaagcttcaagaattgaaatcagtgtaagaacgactacagaacaagaatgctcatctttgcattaaaaaatgctgctgctatttacaatagcaaagacttggaaccaacccaaatgcccatcaatga

SEQ ID NO: 165398 - DNA, 179 bp, Homo sapiens
acagtactttctcctttggcttctctcttaaccactctcctggttttcatcctacctctccgggtcctcctctagaatcatgtataggtagccagtccggccgtgatcatcctcatttaaatgttgatgttctccaggattctctcctgagcactcttctctactcatagcatagtgtt

SEQ ID NO: 165399 - DNA, 323 bp, Homo sapiens
gtccagaaaatggacagtagtctggtacagagctcctcgtggcttgcagggaggtggcaacagactataggaaggtaaggggaagacatattctgggaacaaaagttgtcttatatgcagatgaagcctgtcagtaatagcactcagaatagatgaaaattctctctgggtgggtgtggtgatggccttcagattcttctttggtgattaattttccctggttgatgagatttctgacagggagctgaaggcaattttttttcttttgaaagaacttttctcagatgaggaaacttcagagagatcccctccatgggctaggt

SEQ ID NO: 165400 - DNA, 415 bp, Homo sapiens
ccagagccccagaatccattcgtgcctttctctaaagcaaaccgattatattttaacatttaattaacagcgctcaaaaaaaaaatcagtgttaagtattcctcaacaccataaaacctaccaatggtctcagcccatagaatctctatctccattatctcctgcggctcccaggggcccagaccagcatatccagatgcctcagttacctcaatgctgaacattcgttttcaaaaacctgatcaagtcatccctctgctaacaatgcgcttcatcagtttttatttcttcaggctaaggccaacatcctgcataaggccccaaatagatttttgagcttgttttcctattatctctcttttttaagaaaatcaacttctgccaggagcgctggctcacgcctggaatctcagca

SEQ ID NO: 165401 - DNA, 355 bp, Homo sapiens
agtggatggtggacaggtgggtgagtggatgggtaggtagatggggaggtggatgggtggttgctggacaggtgggtgagtggatagatgggcagatggatggtggacaagtgggtgagtggatgggtggatggatggtgggcagatggatggtggataggtagatgagtggatgaatgggtggatggatggtgggtaagtgggtgagtggatgggtggatggacaggtgggtgagtggatgggtgggtggatggatggtgggtaagtgggttagtggatgggtgggtggatggatgggtagaaatattttcgttttcctaagtgttgcgtccagctgctgtcggcccctccttg

SEQ ID NO: 165402 - DNA, 249 bp, Homo sapiens
ctcaggaggagtggaaatgcctggaccctgctcagagggctttgtacagggacgtgatgttggagaactacaggaacctggtctccctgggtgaggataatgcccctccagaagctgggatctgctctgctgtatctctgcatgttccctgtgtgcctcttgggagcccctgcattgctcaattaagactgaagctatgttaattctcagatgaaaagcttaatagtgcagcatctggacttaattatc

SEQ ID NO: 165403 - DNA, 249 bp, Homo sapiens
ggccgacgaagagcaatgagaagagagatcaatcaagactacaataggatttgcaaagaattttctaccattgtgattttttttcctcttaagaaagagaacaccggtcctggatcctcaggatgaaacccagagatgggtttttgaagattttctttactcaaaagagggttctcaaagcaggactagaacatggaccatgaagaaggttatattccaagggtctgccgaactgccatgaatacaaca

SEQ ID NO: 165404 - DNA, 741 bp, Homo sapiens
ctatcttttaattgccatttttagcccctttgtatttactgacatatttggacttctggctttcttctttctatttgtcctgaattcttgtctctacccttgactttgttttttcttttctcttattccccgtctgctggattgtaagttatattctgtctcttttcttttataggttaccttgaaatcttaccatatgcatacttaacacaaccccacctcctgagtaattcaaggcccttaatatatatttttttacttgtcacccactccttctcaaacttacaagctatattattttctctttttttttacagtacccacaaatgacatttttcttcttaatttctttattttatacatacagtacttatttagatttacccatatgttaatacacatttcttgtcatttttttcttgcatctcaaatcctccaaagcttattttctttctttctgaagtaaaaaacatctatactgttggaaaacgcttcaaagaggcaaataacttcctgtggcccttcaaattgtcttctccacgaggtggaattgaagaaaaagaccacccatttggtagaaggtggagatgctggcaaacagggaggaccagatcaacaggcttattagaagaatgaactaaggtgtctaccatgattatttcttctaagctggttgggttaatacaacagtacctgctctcaaaatcgaaccaaaacgaaagaaacaaaaaacaacaaatc

SEQ ID NO: 165405 - DNA, 600 bp, Homo sapiens
ttggaccgggaatccaaagccaattattctttgaaaatagaagccagggacaaggcagagagtggtcagcagctgttttcagttgtcactcttaaagtttttttagatgatgtcaatgactgctccccagctttcattcccagtagctatagtgtgaaggttcttgaagatctccctgttggcactgtcattgcttggcttgagacccatgatccagattgcgctattctttggtcaatgactataatgggagatttgaaatagataaagcaagtggtgccatccgcttgagcaaagagctttccctatgggtacaatttcactcttcaagcaaaagacaagggatctcctcaaaaatgttcagcattaaaggcagtttacattggcaaccccacaagagacactgtccccattagatttgaaaaagaagtgtacgatgtgagcataagtgaattttcccctcctggtgtcgtggttgctatagtaaaattaagtcctgaaccgatagatgtggaatacaaattatttcctggtgaggatgcagtgtagagtgctgtagctgtgtgttccaataaattattttgtagggaaaaaaaaaaa

SEQ ID NO: 165406 - DNA, 357 bp, Homo sapiens
catgtggctgccacctagcttttggaaggggccgtgagagccaggctcagggactgtgggaggtgtgcaagcggccgaggggcaggcaggggtggttatggcaggtcccacctgcatggtaggtggtgagcttccagggactcatggcatgagcaaaaataactagcacaccctttaacttttttgcatagttgggaattagctgtctccacacctgtgtggcctgccttccaaggaattcccagcccaggagttttaaattagtgctgcctgtggcattatgtttcaggtattggaattactctgtgtttgacaaggggaaggcaggtgttctgtgtctagaaaaggaaaaggtga

SEQ ID NO: 165407 - DNA, 227 bp, Homo sapiens
atttttatggctttggattaggcaatgttttcttaaagatgatgccaaaagcactagtaaccacagaaataatacataaattgtacttcaaaatttcaacattttgcttcaaaggacaccatcgagaaattgaatatgcaatgtacaatgtttgcaaatcttatgtctgataaaatatatatagtaggatataaaaagaactcttagaacttaataaaactttaccc

SEQ ID NO: 165408 - DNA, 411 bp, Homo sapiens
gtctgtattaatatcaagaatattttaaaaaattgtccaggataaagaaggtaattttataatgataaagggaataattagtcaaaaggacttaaaattataagtgtttatggctttgaaaatggagctttaaaaatatatgaactggggccaggggaggtggctcacacctgcaatcctagcatttgggaggccgaggtgggcagatcctgaggtcaggagtttgataccagcctggccaacacggtgaaatcccatctctactaaaaaatacaaaaattagccaggcatggtggtgtgcacctgtaatcccagctactcaggaggctgaggcaggagaatcacttgaacccaggagttcaagaccagcctgggagacatagtgagaacatgtctatacaaaaaaaaaaa

SEQ ID NO: 165409 - DNA, 899 bp, Homo sapiens
tgaacccaaagatgccttgagaccctgcgtgggagacagatggaaggagatgtctaagcctggtgtcaaggtgctctcaccttgcagaatcacagtgggctgtggtggaccaggagaagaccccttaacaaagtatgggagtgagtctgtctaagtcagctagcccttaatgaggtcctcctcgagtgaagctctgattctgacacccatgttaggttgtggtcatttctaggacccagggtccagccccagagattcctagatagttctaggaccatctggtggaatcaaactatggatagacccattaatatccaactgggtcctctttcgttgagtctcccgccctcttgagggagactgatctttagtaacttctttatgagactgggtcaggtgggcctcctgttgttgtctgtggtgctgcaggtcatgtgctttggtgggcaccagtaactgtcattggaattgccaaggtggtgggaataaagagagatgggcttctctgtgattgaattgaagtttggttgtgagtgtgggtcatgagccctgaccgggtaggagacagaagcctgtggttcttctcctggtttccttagggattttcagctggctcttgggcagctccttcaggtggtagctgttgtggcagaatagaagagtgctggactgaggagcagagacctgggtctcatgagatcatgagatcaaaccacttaaactctgtgtgcttaagtgacttcgttggcaatagagtaataccctccctgaagaataaatgaggcgatgttgagaaagcattttatgagcaagccattttcattaatgcaatgggggaaacatgctatgtctagcttagagggctgaaacggtcaaatgaaataatcaacgtaaatgct

SEQ ID NO: 165410 - DNA, 425 bp, Homo sapiens
tcagaatttctcacttaagaggtatagtaaatgaaaatcctttaccaaaacaagttcctgaagtgtgtcatccctctgctagacatctaagggatgacttttttcacaaatcatattaactcaccagtacaatagtagtaatactcattgtaagttgctgaattttgcaacttaacgaatgacaagaacatggcataggtcagtgatgcatgttatgcttaattttgagtgagtgacttgcatgttatatctctgcctgtctgaaaaaaagttggtgaaaatagaggcactaaacatcattagattccatgattatactacatttttgcataaaataaaactttcagatgttttataattactacagtgtattatcaaaattttattatgcaattaaaacattagctacaacaaatataaatatg

SEQ ID NO: 165411 - DNA, 516 bp, Homo sapiens
  misc_feature (58)..(58): n is a, c, g, or t
  misc_feature (66)..(66): n is a, c, g, or t
  misc_feature (69)..(69): n is a, c, g, or t
  misc_feature (104)..(104): n is a, c, g, or t
  misc_feature (113)..(114): n is a, c, g, or t
gactctagaggatacaccaagcccgaccatacactttggccctaggatcaggtgatcntcagcatnaangcctttccccaaataggtctcccctgctttacagngcacccagnngaggtatgagaccttgagatccaatgcaaagttgaagtgtgtgtcagtcacctgccttcacacatcttttgttccctggccccagggctcatgggtatctctgggtggcttaaccaccccacaagtgacccctccagccacttcccaactcagctcagagctccatgggcttctgccctccctggacttgatggcagcagggatgctccctccaggccttctcctggccgcagctgggtgaagacctctcaagtcccctgactttgtcccgactggtggctacagctcctgcctggactcaagctggctatgacatgcccttaagtctttggcatgacttggacaattccctctctgctaagggaaacccattccccccgccatagtttgtcatctgcaaaa

SEQ ID NO: 165412 - DNA, 366 bp, Homo sapiens
ttctggatgctgagggtccctgtgagggtctggcggcagaggcctgcgcttatgggtcagcagctaggactgatgggttgaataagaagggcccaagttaggccagttgttctcacagacccagaggtccctagagtttatgatgcccagagtctaggagagggaaatgcacacacatgccctcgaggacaccagcatcctgacatccaagttactgtactgccctggttagcaagaaagaacatctgttcccttctctatgcaattgttacagtaactgttgttacatttcttaagatacatagctatatatgtagtcactctgcaaacacacacactctgatagacacacgattgcactcatgg

SEQ ID NO: 165413 - DNA, 198 bp, Homo sapiens
atagaggaggtgtcagggagggctttcaggggaggtcttagatgagctcagtctttcagaatataaggaagagtgagccagcaaagggagtgaggaagagggaatagcaggagaaaaggttgaagaaaggcaggagccagccagtcctcatcaaggatctagaactttatcttgtagattaccaattgtcaaccctgg

SEQ ID NO: 165414 - DNA, 272 bp, Homo sapiens
ctcccaaagtgctggggtgactggcgtgagccactgcccggctgatcttcgtcatttcatttagcatacaatatgtgattttcctaattactttatgaagtcatcactgacagtctgactttagagacaggaaaacagagaaattaaagaacttctccagagccaatattggacttgagccgcatgtcagaaatatttcctgcttctgcatctcggagtcaggtgccattacttgtcttcagaaccttaaactttcgtagcttagctctgcc

SEQ ID NO: 165415 - DNA, 394 bp, Homo sapiens
ccgcgcccagcccctagatttgtttttatccagtctctgcttggcactcattgcgagctttcagaattgagattcaagtcttcaattatggcacatttttagcgttagttctagtattgcctccccaccactccttctagctttatttctggaaatcctactagatgtgtttcttttcactctacctgttatgttacttcacttctcatagagagaagtgttttatctctattctatacacagagtgaatttaatttactaattctctcgtttactgtgcttggtgttgtttctccccatctactgaccatatatttcattttcaggattttgaataggtttttgttttcataactactgcctgattttgtttctaaaaatttttttttttctg

SEQ ID NO: 165416 - DNA, 682 bp, Homo sapiens
agcgagggagggaggggacgggcgcagaccgaaagtggggaaagaagagcggcgtgatctactgccgggactcggacgagtccagctcgccccgccagaccaccagcgtgtcgcagggcccggcggcacccctgcccggcctcttcgtccagaccgacgccgccgacgccatccccccgagccgcgcgtcgggaccccccagcgtagcccgcgtccgcagggcccgcaccgagctgggcagcggtagcagcgcgggttccgcagcccccgccgcgaccaccagcaggggccggaggcgccactgctgcagcagcgccgaggccgagactcagacctgctacaccagcgtgaagcaggtgtcttctgcggaggtgcgcatcgggcccatgagactgacgcaggaccctattcaggttttgctgatctttgcaaaggaagatagtcagagcgatggcttctggtgggcctgcgacagagctggttatagatgcaatattgctcggactccagagtcagcccttgaatgctttcttgataagcatcatgaaattattgtaattgatcatagacaaactcagaacttcgatgcagaagcagtgtgcaggtcgatccgggccacaaatccctccgagcacacggtgatcctcgcagtggtttcgcgagtgtaagtgcacctcccatt

SEQ ID NO: 165417 - DNA, 713 bp, Homo sapiens
gcggccgcgggcgcgggcgggcgcgcgggggagcccggccgagggatgggctgcgcccccagcatccatgtctcgcagagcggcgtgatctactgccgggactcggacgagtccagctcgccccgccagaccaccagcgtgtcgcagggcccggcggcacccctgcccggcctcttcgtccagaccgacgccgccgacgccatccccccgagccgcgcgtcgggaccccccagcgtagcccgcgtccgcagggcccgcaccgagctgggcagcggtagcagcgcgggttccgcagcccccgccgcgaccaccagcaggggccggaggcgccactgctgcagcagcgccgaggccgagactcagacctgctacaccagcgtgaagcaggtgtcttctgcggaggtgcgcatcgggcccatgagactgacgcaggaccctattcaggttttgctgatctttgcaaaggaagatagtcagagcgatggcttctggtgggcctgcgacagagctggttatagatgcaatattgctcggactccagagtcagcccttgaatgctttcttgataagcatcatgaaattattgtaattgatcatagacaaactcagaacttcgatgcagaagcagtgtgcaggtcgatccgggccacaaatccctccgagcacacggtgatcctcgcagtggtttcgcgagtgtaagtgcacctcccatt

SEQ ID NO: 165418 - DNA, 339 bp, Homo sapiens
gggtcagttcttcaagaggacaaaacagttctaaacatttataaactaaatgacagtgtttcaaagtatatgaagcaaacactgataactgcaaggagaaatagatatatccataatgatagtgattccattattcttctcttagtaattgatagaataaggagactgaaaatcattaaggatgcgggagacttgaacaaccccttcagcctgctggatctgactgacagtcatagcacaccatccagagagagcagaatgtagttcttttttagtataaacacaaagatagatcatattcttgtgagccataaaataagccccaaattgataattatg

SEQ ID NO: 165419 - DNA, 502 bp, Homo sapiens
aataataaaacctcattgagctatgtggctttatgtttactagcaaagctagtatttactgtaaaatcttaaaactggtctaaaacttaagctacccaagaacagaggccatgtattattttgtattcctcatgatgccacatgctgttaggcacatggttgctcaatgaatgatcatatagtatgaagaccaccagaagtaggagttaaaaagtggatgatggtccttgcttaacattctctacttgtatggggcaaactacctaatttacaaagatgttattttcctctctctaatgtgaagattgaacaacatggtaatataagttcctttattctggagtaggattgccagaattggggaaaaggcccttcaattacaaaattacagaatttaagattttacttttgggtcctgttcccttgtctggtttcttcctagattctgccctattgagtgattgttctgcaaagcagtataaacaccttggagaggtatgcg

SEQ ID NO: 165420 - DNA, 662 bp, Homo sapiens
aacttttttaaaagtgaaaaaggaagcaaataatactgtatatttcatacactatatcttaatttgagatatatatgtatgtatatttaaatttagaaccatatattaaaatttttgcagtggttatttctgaaaggtggtttatggatggattaaatttctttctttgtacttttctgtatttttcaaattttctacaaacgaccatagtagaaaataatagagaagctgcaaaaaagggagaaaatttttataatagagaaaaagttgcaaaaaaggggagacacccaagtttatagtactatattttaggcaaattgccatgaaaaattgttaaacttaaaaaaaaaacttaaagaggtaaggtttggtgttattgagcacttcaaatgtggctagctcaaactgagatagctgtaagtataaattaccaaatggatttcaaagtcttagtgcaaaaagagaatatgaaatatctcatgtatttttaaacattggttacatgataaaaaaaattttgttagattaaataaactatattattttcttagtccattttgtgctgctataacagaatgtctgacactggttagtttacaattctggaggctggagtccaaggtcaaggggtggcatctggtgatggccttcttgcttcatca

SEQ ID NO: 165421 - DNA, 809 bp, Homo sapiens
tggaatttctccagagggcactaccaggatgagtagcaccaggtggctggaactcttgtgtgagcagggaaatagcaagtatttagccagttttggagatgagaaggttaacgttatcaagagactcaatgctataacccttacccccacaaaaacctggtgcttaggggtggatcctggggtggctcttcagtctgccagttaagcagggttgggcaaggaaaagttacagattacatggaaagtcaacaaaccacggtgcagagaagctgttgaagtcagcgtgccctgccctggctctgtgtctctgaccagggcagggtcagagtgcccaagtgcatgtgggtaaggcacatgtggatgaatgtgtgtctggacacgtgattgtttgtgtacacttgcagttcttgagcctgagcctgtctgtgtgagtaggcaaatacggatttaccctgtgtccccatgagactaaggagggagctactctccctatctggtgggtgctactccgtgtagacatgaactggggataagtaggatggctagtggggaacctaacaagggagaagccaggcagtttgctggcttagcttttcgtaggtaaccctctgatgtgacatggggccataccaacccaagagcataagccatgcctctggactcaccctgtgccccatgcagccctaggcttcagtgagcatacctaatcctccttaatggtaaacatcccaaatatccattaataatcctctgagggttggttatttgtgaactttgactcgtaaaagctcgtcatcggggggtcctct

SEQ ID NO: 165422 - DNA, 331 bp, Homo sapiens
agccttttgatttggaggctaaagagctctagactgggtattaacaaccctgtctttgaggatttgctctgtttctgacagttgtggggacttggccaactttcactcactgtctctagtttccaaatctagcaacttgacttttagttttcttacttttcctttatgtagcaaatgaattaatgtaggagaaaatattttaaaattttaattaatatgtgaatgtaatattaatgtttcttttaattataaatatatgtatcagtataaaagtaagacaagtgtaatataattgataatataattatcaaataaatgaaaaagaagaaga

SEQ ID NO: 165423 - DNA, 285 bp, Homo sapiens
tactgcaaaagtattttttaaattacttcaattttcaaggaagaatgatatcagctctcaaaattcagttttgtaaaatattgatgcttgtaaataaaaacaaatcaatgacttgcagctgtagttacacaggctatcttgcagtaattataatttttaaaaagagtacagattatgttgctctatttattaaagtaaaaggataaagaaagatttatcagacaaattctaaccaaaagaatactagttattaatattgaacaaaactggaagaaaaataccaaa

SEQ ID NO: 165424 - DNA, 425 bp, Homo sapiens
gaagtttaagttatttaataatatgacattatcaagtaaagctgaatatatgtatagccaagtatttatactatagaaatgcacgcttatgtgcatcagaagacaagtttacaaatagctgcatcattcaaaatagaaaaaaaatgtgaaacaacccaattatccatcaatagcagaatggataaactgtgttggatgcattcagtggaatcaggtcaatttttaaaacaaaatagcattgcacaaaagaacccagactcgaagaaaatatactgtatgatccatttgattcaaaatatgcaaaactaaattatattgcttggggaagaataagtaggtggcaaaattataaagaaaaccagaagagactattataaaaatttacgggtaacactgaggggtggggtggaaagttttgatcataa

SEQ ID NO: 165425 - DNA, 225 bp, Homo sapiens
ggagagagttgggaggggatcgtgagggaggagctgcggacagcccgtgtagtcaactctttggcaaaatttgatgatgaaaggcgaggagcagagaaacggagtgggagctggaaggatgtgcacaagggaaagaggttttttggaagtgttggtaatttgtgtgctgatgggaaagatcagtggagagggagtgactgatcaagagaaacgagttgggtcagt

SEQ ID NO: 165426 - DNA, 111 bp, Homo sapiens
tcagcggaaataaaaacctggaatcctactggattttgaaacttcccagtcccttgcttcagctaacataaaaagttctacattaagaatataaggaaatgcacagaaact

SEQ ID NO: 165427 - DNA, 512 bp, Homo sapiens
tgagggaagcaggagactgagggcagacaaaaagccacccttcggaaaagcaagcgagagctttctaggcattaatcgccgcacccccacgccgccaccagaacaaacgtgggatgcggtggtcttcgccaaaagggaagggaatcttagccgcgcctcagggcccggaatgcccctccagcttcacttccagaagggcagagctttccggaatggcggggggcaccaaaccatcgtgtttgggggagtttccactgggcaaccggtcacagtttcgcgaggaacgagtaacaagcggagcgagctcccagatgggaacgctgcgcggtcgccaagagctgctcctccccggcttggagtcccccagaggagttccatccggagcaggacaccggaaagtggggctgctagccggactgcggcagcgcatcacccctagagttggttttctcccgacaactccaactccgctctcccgcggagctgtgttcccaggaggctgccgcggccgc

SEQ ID NO: 165428 - DNA, 405 bp, Homo sapiens
ggccagatcgtggaggagtcggggtccaagggactgggacagaggtcatcctcgaagagatggggagggtgaggccaggtgtgggcaggagggggtggaccgggagcttctgcagcgccagccctccgcggggacgtgtgttacactgcctgacatgggcaggaccctggagctgcatttgtaagataaataatgggtgtcccgagcgcctcattaagacatctttgctgagatggaaatcgctgaggcattaattaatagaattaatgccttttctagttgcctttaagactaagtcacctttagtccaattcccagagtgaggaagccttaacattgctcctcctggtttaaaattccatcagcatttttgttgcaagcattaaaaaatatttttgttttatt

SEQ ID NO: 165429 - DNA, 692 bp, Homo sapiens
agtgttttctttccattagtgcacaaataaaattagaaatgactaatggaagattgctttgctttaccagatgaatcttgggtttgtctgtaaatctgtgactttaatgttacttagtatcatctccgtatctgaaggcttattccatagcaagtatatgctgcattgagattatattctaattgaactttattccctgttctggattagagcaatcaagaagtgtttctatatggaactttgttcattgtaaaggcattctgaaattatcttaaattgtggaactttattgcttttctgtgtgttaaggaggcagaattgttagagaaggggattctgattatttaacaacagagaaaggcttctgggttatctattagagatgaaaggattaaagagaaactatagatcagctagtccttatggagagaggaatataaaggaaagagaaaaaataggactgtggcttagtttgggctctgttgactgactataaaagtgagccaatcacatagtaattttctgacaaaatagagtttaggttaaggcttaggtcaaggctgtactttgtgttaatagtattataatgagcaaattaatagaaacaagaaaacacaagttagaggtgagagggccagctgtgtctggttaagtgcatttgtttctggtcctcaactagataactatagtaa

SEQ ID NO: 165430 - DNA, 436 bp, Homo sapiens
aatgactgacacatgtggccaacctctactacaggtcctatctatccaaggaatagtaccatcaattatcttttgtttgtcagacataattatttcatctccttccaaaagcacatcacattatctgttgattttagctccttgatatttgcctacagataagaaccatcagtgagtatttctaaaaccttgacaatttttttctcattagttttattttttttaaggcagtgaaaaacctgaaaatagctagaatcacaaagagaactgctgggctaggaccatgcctgggacaagagcagagaaaattagggtccattgtcagcacatgtgtagagtaagtaagtctgctacccagcctcacagtcattcctctcttatctgcctaatgcctctgatgctcattaacataaagaaaacaaatttcatttggtaa

SEQ ID NO: 165431 - DNA, 475 bp, Homo sapiens
tgagggggccagtttacacagctaactcaagcctaaccccttatgaaaggtggatttcctgtacaactgttctgacaagcggaggattaggcacttcatacattctgcttgggtaagagactcacgacagaagtgaatcaccacagaggagcatactgcttttctgaacgtctctgagattgttgtatgctggaagacaaggacacttcggttgcgaaccaaactcaactagagtcacctcccatcacaacaatggcatgaaacatcccacacctacaagttaaagctatcagtcctatacagacagctgtagctagctagctagctctctctccctctggagacccacatgtgacactccctctaccttctgtaattcaggattactaacaccattcaaagcaagcataaggctgggtgcagtggctcatgcctgtaatcccagtaatttgggaggccgaggcggacggatcac

SEQ ID NO: 165432 - DNA, 299 bp, Homo sapiens
aaacggtaattgttgagcccatccacacaactgggtacttttttaaaggattttccaagtaagaagactgttcttctcccactatctgactcgccagttacacaaagatgcctttaattatgtttcatttaagactaaagaaagcatttggaggccaggggcagtggctcacacctgtaatcccagcactttgggaggccgaggtgggcggatcacgaggtcaggagatcgagaccatggtgaaaccctgtctactaaaaaaaaattagctgggcacaattatggaggggtaccgagct

SEQ ID NO: 165433 - DNA, 318 bp, Homo sapiens
aaacggtaattgttgagcccatccacacaactgggtacttttttaaaggattttccaagtaagaagactgttcttctcccactatctgactcgccagttacacaaagatgcctttaattatgtttcatttaagactaaagaaagcatttggaggccaggggcagtggctcacacctgtaatcccagcactttgggaggccgaggtgggcggatcacgaggtcaggagatcgagaccatcctggttaacacagtgaaaccccgtctctactaaaaatacaaaaaattagccgggtgtggtggcgggcgcctgtagtcct

SEQ ID NO: 165434 - DNA, 1084 bp, Homo sapiens
gagacgtcatcacgcagggccgagtcggcgcggccacatcctttaaatatggtctttcttgggcgcgcgcgacaatgtgaggagtggggtggagcgtgtgtggtgtgtggctgcggcctgggcaagagccgccgcggaccatgagctgagtaagttctggagggatcctgcctcttggagccttcgcagccaggcagctgtgaactgtgagctagagtgaagcagaaatctaggaagatgagctccaagatggtcataagtgaaccaggactgaattgggatatttcccccaaaaatggccttaagacatttttctctcgagaaaattataaagatcattccatggctccaagtttaaaagaactacgtgttttatccaacagagagagcagaggagttatgtggacttgttggttaaatacgcaaagattcctgcaaattccaaagctgttggaataaataaaaatgactacttgcagtacttggatatgaaaaaacatgtgaacgaagaagttactgagttcctaaagtttttgcagaattctgcaaagaaatgtgcgcaggattataatatgctttctgatgatgcccgtctcttcacagagaaaattttaagagcttgcattgaacaagtgaaaaagtattcagaattctatactctccacgaggtcaccagcttaatgggattcttcccattcagagtagagatgggattaaagttagaaaaaactcttctcgcattgggcagtgtaaaatatgtgaaaacagtatttccctcaatgcctataaagttgcagctgtcaaaggacgatatagctaccattgaaacgtcagaacaaaacagctgaagctatgcattatgatattagtaaagatccaaatgcagagaagcttgtttccagatatcaccctcagatagctctaactagtcagtcattatttaccttattaaataatcatggaccaacgtacaaggaacagtgggaaattccagtgtgtattcaagtaatacctgttgcaggttcaaaacagttaaagtaatatatattaattcaccacttccccaaaagaaaatgactatgag

SEQ ID NO: 165435 - DNA, 414 bp, Homo sapiens
actgaggacaacccgtgtgcgaagaactacgtgttttatccatcagacgtataggagaaaatttgaatgcctcagcaagttctgtagaaaatgagccggcagttagttcagcaactcaagcaaaggaaaaagttaaaaccacaattggaatggttcttcttccaaaaccaagagttccttatcctcgtttctctcgtttctcacagagagagcagaggagttatgtggacttgttggttaaatacgcaaagattcctgcaaattccaaagctgttggaataaataaaaatgactacttgcagtacttgcaattgaaagaaacgcgtttcttttcaattccaagcgttctggtaattcccattcttttcatttccaaggtttcttgtaccctgtggacaccctgcaatgaaaaga

SEQ ID NO: 165436 - DNA, 1541 bp, Homo sapiens
gcaggggcgggaggagggaacatggcggccgggccaggaccctttgctcctggctctgcgcggctcctacccctgctttgcttgcccttttacctgcttttctggaaccttgtttcccctctctttgcgtcccctttccctcagccgtttcttttgccttcctcgactattcccccccagctccacactgggtcgaagtgtgagaggtagattaagtgggagccggtcgggcccgttcggtgtcgagagaccgactcctaaatttgattaggttctcgcaggtcactttatcagtctgcctggggtcacaggagaagtactgaacatgagagatcaagcctgatttgtagtcctgatgatgtctctgagtaagttctggagggatcctgcctcttggagccttcgcagccaggcagctgtgaactgtgagctagagtgaagcagaaatctaggaagatgagctccaagatggtcataagtgaaccaggactgaattgggatatttcccccaaaaatggccttaagacatttttctctcgagaaaattataaagatcattccatggctccaagtttaaaagaactacgtgttttatccaacagacgtataggagaaaatttgaatgcctcagcaagttctgtagaaaatgagccggcagttagttcagcaactcaagcaaaggaaaaagttaaaaccacaattggaatggttcttcttccaaaaccaagagttccttatcctcgtttctctcgtttctcacagagagagcagaggagttatgtggacttgttggttaaatacgcaaagattcctgcaaattccaaagctgttggaataaataaaaatgactacttgcagtacttggatatgaaaaaacatgtgaacgaagaagttactgagttcctaaagtttttgcagaattctgcaaagaaatgtgcgcaggattataatatgctttctgatgatgcccgtctcttcacagagaaaattttaagagcttgcattgaacaagtgaaaaagtattcagaattctatactctccacgaggtcaccagcttaatgggattcttcccattcagagtagagatgggattaaagttagaaaaaactcttctcgcattgggcagtgtaaaatatgtgaaaacagtatttccctcaatgcctataaagttgcagctgtcaaaggacgatatagctaccattgaaacgtcagaacaaaacagctgaagctatgcattatgatattagtaagatccaatgcgagaagctggttccagatatttacctcagatagtctaactaggtcggcataattaccttattatatctggggcacgtaagaccggggaatccggggtcagacacccgtgcggtcaaccgtagattttttatacactccggaatgattagaagaacacttttagaccaatagcgacgacatgtcgctgctagaacacaatatatacatcgtgggcacgcaagagaacattcagggttcgacgccctcgtttctttcccttctttttttgtcaatattttga

SEQ ID NO: 165437 - DNA, 1322 bp, Homo sapiens
gagacgtcatcacgcagggccgagtcggcgcggccacatcctttaaatatggtctttcttgggcgcgcgcgacaatgtgaggagtggggtggagcgtgtgtggtgtgtggctgcggcctgggcaagagccgccgcggaccatgagctgagtaagttctggagggatcctgcctcttggagccttcgcagccaggcagctgtgaactgtgagctagagtgaagcagaaatctaggaagatgagctccaagatggtcataagtgaaccaggactgaattgggatatttcccccaaaaatggccttaagacatttttctctcgagaaaattataaagatcattccatggctccaagtttaaaagaactacgtgttttatccaacagacgtataggagaaaatttgaatgcctcagcaagttctgtagaaaatgagccggcagttagttcagcaactcaagcaaaggaaaaagttaaaaccacaattggaatggttcttcttccaaaaccaagagttccttatcctcgtttctctcgtttctcacagagagagcagaggagttatgtggacttgttggttaaatacgcaaagattcctgcaaattccaaagctgttggaataaataaaaatgactacttgcagtacttggatatgaaaaaacatgtgaacgaagaagttactgagttcctaaagtttttgcagaattctgcaaagaaatgtgcgcaggattataatatgctttctgatgatgcccgtctcttcacagagaaaattttaagagcttgcattgaacaagtgaaaaagtattcagaattctatactctccacgaggtcaccagcttaatgggattcttcccattcagagtagagatgggattaaagttagaaaaaactcttctcgcattgggcagtgtaaaatatgtgaaaacagtatttccctcaatgcctataaagttgcagctgtcaaaggacgatatagctaccattgaaacgtcagaacaaaacagctgaagctatgcattatgatattagtaagatccaatgcgagaagctggttccagatatttacctcagatagtctaactaggtcggcataattaccttattatatctggggcacgtaagaccggggaatccggggtcagacacccgtgcggtcaaccgtagattttttatacactccggaatgattagaagaacacttttagaccaatagcgacgacatgtcgctgctagaacacaatatatacatcgtgggcacgcaagagaacattcagggttcgacgccctcgtttctttcccttctttttttgtcaatattttga

SEQ ID NO: 165438 - DNA, 719 bp, Homo sapiens
  misc_feature (55)..(55): n is a, c, g, or t
ctctcgagtatccacgcgtgttcgtcagatggtcgtctgtgcgggaggactgaantgggatatttcccccaaaaatggccttaagacatttttctctcgagaaaattataaagatcattccatggctccaagtttaaaagaactacgtgttttatccaacagaaaattttaagagcttgcattgaacaagtgaaaaagtattcagaattctatactctccacgaggtcaccagcttaatgggattcttcccattcagagtagagatgggattaaagttagaaaaaactcttctcgcattgggcagtgtaaaatatgtgaaaacagtatttccctcaatgcctataaagttgcagctgtcaaaggacgatatagctaccattgaaacgtcagaacaaaacagctgaagctatgcattatgatattagtaagatccaatgcgagaagctggttccagatatttacctcagatagtctaactaggtcggcataattaccttattatatctggggcacgtaagaccggggaatccggggtcagacacccgtgcggtcaaccgtagattttttatacactccggaatgattagaagaacacttttagaccaatagcgacgacatgtcgctgctagaacacaatatatacatcgtgggcacgcaagagaacattcagggttcgacgccctcgtttctttcccttctttttttgtcaatattttga

SEQ ID NO: 165439 - DNA, 321 bp, Homo sapiens
ctcggctcactacaacctccacctcccgggttcaagcaattcttgtgcctcagcctcccaagtagctgggattacaagcgcacaccacgcctggctaatttttgtatttttagtaaagacagggttttaccatgttgcccaggctggtctcaaactcctgacttcaggtgatctgcctgccctcggcctcccaaagtgctgcgattacaggcatgaaacaccgcgcctggcccctattctgatttttatgtcttatttcgtcagtattaattcctagtatctttgaaattatttatgcattgagactttcatataacaaca

SEQ ID NO: 165440 - DNA, 487 bp, Homo sapiens
tgggtgcgtggtccctgccatttctctgtctgcggagcagcctttgttactgtctgctgggcttgcccatgtgtgactatattcaccacaaccaatgggaaataagtaagaccatatttcagcatatttaagatgctattgattgtaagacacatggtattttataagttgctaagacaaatctaataagatgctgatgaaattatgacatgccatcaattgtaaaatggatctccatttctgatgttaaaatatgaaaaatgtgtgtcttagaattgatgcagtggccgggcgtagtgggtcacgcctgtaatcccagcactttgggaggccgaggcgggtgaatcacgaggtcaggagattgagaccatcctggctaacatggtgaaacccccgaatctactaaaaaatacaaaaaattagccgggtgtggtggcacgtgcctgtagtcccagctatttgggagtctgaggcaggagaatggcgt

SEQ ID NO: 165441 - DNA, 893 bp, Homo sapiens
aaaaaatacagctaagtagagctcgagttgaatcagaacgagggagtccggagcctgaggagtctccgggacaggaaccctcagtgctgcgtctagattctgcaggggaggtttgctgggaccttggctccacccagccagcgaaatggcagccacactcgatttgaaatcaaaggaggagaaggatgctgagttggacaagaggatcgaggctcttcggcggaagaatgaggccctcatccggcgctaccaggagattgaggaagaccgtaagaaagctgaacttgagggagtcgcagtcacagctccccgaaagggccgctcagtggagaaggagaacgtggcagtggagtcggagaagaacctgggtccttcccggaggtctcctgggacccctcggcccccaggggccagcaaggggggccggactcctccacagcagggaggccgggccggcatgggccgagcatcgcgcagctgggagggcagccccggggagcagcctcgaggaggaggagctgggggccgtggccggaggggccggggccgaggttcacctcacctctctggagctggagacacctcaatctctgaccgtaaatccaaggtaggagctaggcagcgcctggagccctggctgaggttctctgttgtctgtttctgttttttcctcctctcagatgcacatttgtcctgtgtgtccatctttcagtatctctctctgagcctttgcatctggctctgtttctctcttcctccacctccttctcctcctcctgctccccctcttctagttccccctgttccttccctctcacgcctagagctcgtgtgtttttccttgtctctttctctcctactcctgctccccgtcttcttgttcctcctcgcct

SEQ ID NO: 165442 - DNA, 2408 bp, Homo sapiens
gcctcccgagttgctgggattacaggcgcgcgccaccacaaccggctaattttttttgtagagacgggatttcacaatgttggccagactgatctcgaacttctgacctcaggtgatccgcccgcctcggcctcccaaggtgctgggattacaagtgtgagccaccgcccacggccggtagaacatctgaagcttctaaagcgaactctaaggtttcattggcacgagggggctcgaaccacgccaggcttccaggcgtcagtgcccagtgcttggcatctactgatagaaaccaggaatgaggggctggaggcggaaacagcttgaagaaagaggtagaggccagggagtgaggacggtgtctccttttcctggaagttggcaggaagtgacgcgcctggcccgggagctgcggtcgcagaggccgacggagccggagtcgcggacgccgcggggtctccgggacaggaaccctcagtgctgcgtctagattctgcaggggaggtttgctgggaccttggctccacccagccagcgaaatggcagccacactcgatttgaaatcaaaggaggagaaggatgctgagttggacaagaggatcgaggctcttcggcggaagaatgaggccctcatccggcgctaccaggagattgaggaagaccgtaagaaagctgaacttgagggagtcgcagtcacagctccccgaaagggccgctcagtggagaaggagaacgtggcagtggagtcggagaagaacctgggtccttcccggaggtctcctgggacccctcggcccccaggggccagcaaggggggccggactcctccacagcagggaggccgggccggcatgggccgagcatcgcgcagctgggagggcagccccggggagcagcctcgaggaggaggagctgggggccgtggccggaggggccggggccgaggttcacctcacctctctggagctggagacacctcaatctctgaccgtaaatccaaggagtgggaggagcggcgcaggcagaacattgagaagatgaatgaggagatggagaagatcgccgagtatgagcgcaaccagcgggaaggggttcttgaacccaacccagtgcggaacttcctggacgacccccggcgacgcagcgggcccctggaggagtctgagcgggaccgccgggaggagagccgccggcacggccgcaactgggggggccccgacttcgagcgggtgcgctgtggccttgagcacgagcggcagggccgccgagctggcctgggcagtgctggagacatgacgttgtccatgacgggccgggagcggtcggagtacctgcgctggaagcaggagagggagaagatcgaccaggagcggctgcagaggcaccgcaagcccactggccagtggaggcgcgagtgggatgccgagaagaccgatgggatgttcaaggatggcccagtccctgcccatgaaccatcccaccgctatgatgaccaggcctgggcccggcccccgaagccccctacttttggggagttcctgtcccagcacaaagctgaggccagcagccgcagaaggagaaagagcagtcggccccaggccaaggcagcgcccagggcctacagtgaccatgatgaccgctgggagacaaaagaaggggcagcatccccagcccctgagactccacagcctacttcccccgagacttcccccaaggagacacccatgcagccacccgagatcccagctcctgcccaccggcctcctgaagacgagggggaagagaatgagggggaagaggatgaagaatgggaggacataagtgaggatgaggaagaggaggagatcgaggtggaagaaggtgatgaggaggaaccagcccaagaccaccaagccccagaggctgcccccaccgggatcccctgcagtgagcaggcccacggagtccccttcagtccggaggagcccctgctggagccccaggcccctggcacgccttccagccctttctcaccacccagcggccaccagcctgtgtccgattggggtgaagaggtggagctgaattctccccggaccactcacctggctggcgccctctccccgggtgaggcctggccttttgagagtgtatgaagctggctgcctgtgtgtgtgtgtgtgtgtgtgtgtgtgtgtgtgtgtgtgtgcgcgcgcgcgcgcgcgcgcgcgcgctagaggggtgtggctggtgggggacccttggggctgggccctgggacccagtgtgccccacagccctgtcagctgagggggtagcgcagcccatgctcttctgtactgtcatgcccgtctctggaatgtccactcccagagcctgccccagcccttcgagccccctccccaataaagaattcacatcctccaatg

SEQ ID NO: 165443 - DNA, 2181 bp, Homo sapiens
gtgggtttgactagatcgtttacatgggaactgggtgagtccacaaagatcatgaaagggctgagtctgaatttctatggagaagatggaggtggcagttgaaaggagggagagtgagggctacaattctcttggggtacagggttttttgtgtatggctgtgaggatcccgcagtatgttagagggtgaagtaggttggggggccattggcctttgtcctttttttccctctgtccccaggaaccctcagtgctgcgtctagattctgcaggggaggtttgctgggaccttggctccacccagccagcgaaatggcagccacactcgatttgaaatcaaaggaggagaaggatgctgagttggacaagaggatcgaggctcttcggcggaagaatgaggccctcatccggcgctaccaggagattgaggaagaccgtaagaaagctgaacttgagggagtcgcagtcacagctccccgaaagggccgctcagtggagaaggagaacgtggcagtggagtcggagaagaacctgggtccttcccggaggtctcctgggacccctcggcccccaggggccagcaaggggggccggactcctccacagcagggaggccgggccggcatgggccgagcatcgcgcagctgggagggcagccccggggagcagcctcgaggaggaggagctgggggccgtggccggaggggccggggccgaggttcacctcacctctctggagctggagacacctcaatctctgaccgtaaatccaaggagtgggaggagcggcgcaggcagaacattgagaagatgaatgaggagatggagaagatcgccgagtatgagcgcaaccagcgggaaggggttcttgaacccaacccagtgcggaacttcctggacgacccccggcgacgcagcgggcccctggaggagtctgagcgggaccgccgggaggagagccgccggcacggccgcaactgggggggccccgacttcgagcgggtgcgctgtggccttgagcacgagcggcagggccgccgagctggcctgggcagtgctggagacatgacgttgtccatgacgggccgggagcggtcggagtacctgcgctggaagcaggagagggagaagatcgaccaggagcggctgcagaggcaccgcaagcccactggccagtggaggcgcgagtgggatgccgagaagaccgatgggatgttcaaggatggcccagtccctgcccatgaaccatcccaccgctatgatgaccaggcctgggcccggcccccgaagccccctacttttggggagttcctgtcccagcacaaagctgaggccagcagccgcagaaggagaaagagcagtcggccccaggccaaggcagcgcccagggcctacagtgaccatgatgaccgctgggagacaaaagaaggggcagcatccccagcccctgagactccacagcctacttcccccgagacttcccccaaggagacacccatgcagccacccgagatcccagctcctgcccaccggcctcctgaagacgagggggaagagaatgagggggaagaggatgaagaatgggaggacataagtgaggatgaggaagaggaggagatcgaggtggaagaaggtgatgaggaggaaccagcccaagaccaccaagccccagaggctgcccccaccgggatcccctgcagtgagcaggcccacggagtccccttcagtccggaggagcccctgctggagccccaggcccctggcacgccttccagccctttctcaccacccagcggccaccagcctgtgtccgattggggtgaagaggtggagctgaattctccccggaccactcacctggctggcgccctctccccgggtgaggcctggccttttgagagtgtatgaagctggctgcctgtgtgtgtgtgtgtgtgtgtgtgtgtgtgtgtgtgtgtgtgcgcgcgcgcgcgcgcgcgcgcgcgctagaggggtgtggctggtgggggacccttggggctgggccctgggacccagtgtgccccacagccctgtcagctgagggggtagcgcagcccatgctcttctgtactgtcatgcccgtctctggaatgtccactcccagagcctgccccagcccttcgagccccctccccaataaagaattcacatcctccaatg

SEQ ID NO: 165444 - DNA, 1180 bp, Homo sapiens
tgggctcaagcgattctgtctgcctcgggcctcccagagtgcggggattacaggcttgagccaccatgcccggccctgtcctacttctagtgtcccctgtctggttgaccgtctgtctctgatccgattcctgaccctgacctctcccatcttcttgatcctcttgttaccctgttcccccagctgcccgctcacccgttatctttcccccaggttcaaggatggcccagtccctgcccatgaaccatcccaccgctatgatgaccaggcctgggcccggcccccgaagccccctacttttggggagttcctgtcccagcacaaagctgaggccagcagccgcagaaggagaaagagcagtcggccccaggccaaggcagcgcccagggcctacagtgaccatgatgaccgctgggagacaaaagaaggggcagcatccccagcccctgagactccacagcctacttcccccgagacttcccccaaggagacacccatgcagccacccgagatcccagctcctgcccaccggcctcctgaagacgagggggaagagaatgagggggaagaggatgaagaatgggaggacataagtgaggatgaggaagaggaggagatcgaggtggaagaaggtgatgaggaggaaccagcccaagaccaccaagccccagaggctgcccccaccgggatcccctgcagtgagcaggcccacggagtccccttcagtccggaggagcccctgctggagccccaggcccctggcacgccttccagccctttctcaccacccagcggccaccagcctgtgtccgattggggtgaagaggtggagctgaattctccccggaccactcacctggctggcgccctctccccgggtgaggcctggccttttgagagtgtatgaagctggctgcctgtgtgtgtgtgtgtgtgtgtgtgtgtgtgtgtgtgtgtgtgcgcgcgcgcgcgcgcgcgcgcgcgctagaggggtgtggctggtgggggacccttggggctgggccctgggacccagtgtgccccacagccctgtcagctgagggggtagcgcagcccatgctcttctgtactgtcatgcccgtctctggaatgtccactcccagagcctgccccagcccttcgagccccctccccaataaagaattcacatcctccaatg

SEQ ID NO: 165445 - DNA, 1540 bp, Homo sapiens
gcctcccgagttgctgggattacaggcgcgcgccaccacaaccggctaattttttttgtagagacgggatttcacaatgttggccagactgatctcgaacttctgacctcaggtgatccgcccgcctcggcctcccaaggtgctgggattacaagtgtgagccaccgcccacggccggtagaacatctgaagcttctaaagcgaactctaaggtttcattggcacgagggggctcgaaccacgccaggcttccaggcgtcagtgcccagtgcttggcatctactgatagaaaccaggaatgaggggctggaggcggaaacagcttgaagaaagaggtagaggccagggagtgaggacggtgtctccttttcctggaagttggcaggaagtgacgcgcctggcccgggagctgcggtcgcagaggccgacggagccggagtcgcggacgccgcggggtctccgggacaggaaccctcagtgctgcgtctagattctgcaggggaggtttgctgggaccttggctccacccagccagcgaaatggcagccacactcgatttgaaatcaaaggaggagaaggatgctgagttggacaagaggatcgaggctcttcggcggaagaatgaggccctcatccggcgctaccaggagattgaggaagaccgtaagaaagctgaacttgagggagtcgcagtcacagctccccgaaagggccgctcagtggagaaggagaacgtggcagtggagtcggagaagaacctgggtccttcccggaggtctcctgggacccctcggcccccaggggccagcaaggggggccggactcctccacagcagggaggccgggccggcatgggccgagcatcgcgcagctgggagggcagccccggggagcagcctcgaggaggaggagctgggggccgtggccggaggggccggggccgaggttcacctcacctctctggagctggagacacctcaatctctgaccgtaaatccaaggagtgggaggagcggcgcaggcagaacattgagaagatgaatgaggagatggagaagatcgccgagtatgagcgcaaccagcgggaaggggttcttgaacccaacccagtgcggaacttcctggacgacccccggcgacgcagcgggcccctggaggagtctgagcgggaccgccgggaggagagccgccggcacggccgcaactgggggggccccgacttcgagcgggtgcgctgtggccttgagcacgagcggcagggccgccgagctggcctgggcagtgctggagacatgacgttgtccatgacgggccgggagcggtcggagtacctgcgctggaagcaggagagggagaagatcgaccaggagcggctgcagaggcaccgcaagcccactggccagtggaggcgcgagtgggatgccgagaagaccgatgggatgtgagtctcctccccgctcctctccccatgtggcacgttgaccttggccctgacttctaagtcctatgcctctctctggtttttcctgctgtgtatgag

SEQ ID NO: 165446 - DNA, 612 bp, Homo sapiens
cattttattttattttcgagaaggggtctgctctgtcgtctaggctgcagtgcggtggcatgatctcggctcactgcaacctctgcctccccggttcaagcgattctcctgcttcagcctcccgagttgctgggattacaggcgcgcgccaccacaaccggctaattttttttgtagagacgggatttcacaatgttggccagactgatctcgaacttctgacctcaggtgatccgcccgcctcggcctcccaaggtgctgggattacaagtgtgagccaccgcccacggccggtagaacatctgaagcttctaaagcgaactctaaggtttcattggcacgagggggctcgaaccacgccaggcttccaggcgtcagtgcccagtgcttggcatctactgatagaaaccaggaatgaggggctggaggcggaaacagcttgaagaaagaggtagaggccagggagtgaggacggtgtctccttttcctggaagttggtaattcaggcagaaggaagttggatgagcttgcggaacacccggggggccagtcggccccgctcccgcatccatcgcggaggcgcggcccctttaaggctcccggaaacggtcc

SEQ ID NO: 165447 - DNA, 2573 bp, Homo sapiens
gcctcccgagttgctgggattacaggcgcgcgccaccacaaccggctaattttttttgtagagacgggatttcacaatgttggccagactgatctcgaacttctgacctcaggtgatccgcccgcctcggcctcccaaggtgctgggattacaagtgtgagccaccgcccacggccggtagaacatctgaagcttctaaagcgaactctaaggtttcattggcacgagggggctcgaaccacgccaggcttccaggcgtcagtgcccagtgcttggcatctactgatagaaaccaggaatgaggggctggaggcggaaacagcttgaagaaagaggtagaggccagggagtgaggacggtgtctccttttcctggaagttggcaggaagtgacgcgcctggcccgggagctgcggtcgcagaggccgacggagccggagtcgcggacgccgcggggtctccgggacaggaaccctcagtgctgcgtctagattctgcaggggaggtttgctgggaccttggctccacccagccagcgaaatggcagccacactcgatttgaaatcaaaggaggagaaggatgctgagttggacaagaggatcgaggctcttcggcggaagaatgaggccctcatccggcgctaccaggagattgaggaagaccgtaagaaagctgaacttgagggagtcgcagtcacagctccccgaaagggccgctcagtggagaaggagaacgtggcagtggagtcggtgagctcgtcactggggtgtgggaccctgaggatggggaggggcagagggttgaggcctgggacccaggagcccccagctgtcctgcaccagtgggtggcctccatcctggccgcatgcctccctgccccagtgactgtattttccccatctcccctcttccaggagaagaacctgggtccttcccggaggtctcctgggacccctcggcccccaggggccagcaaggggggccggactcctccacagcagggaggccgggccggcatgggccgagcatcgcgcagctgggagggcagccccggggagcagcctcgaggaggaggagctgggggccgtggccggaggggccggggccgaggttcacctcacctctctggagctggagacacctcaatctctgaccgtaaatccaaggagtgggaggagcggcgcaggcagaacattgagaagatgaatgaggagatggagaagatcgccgagtatgagcgcaaccagcgggaaggggttcttgaacccaacccagtgcggaacttcctggacgacccccggcgacgcagcgggcccctggaggagtctgagcgggaccgccgggaggagagccgccggcacggccgcaactgggggggccccgacttcgagcgggtgcgctgtggccttgagcacgagcggcagggccgccgagctggcctgggcagtgctggagacatgacgttgtccatgacgggccgggagcggtcggagtacctgcgctggaagcaggagagggagaagatcgaccaggagcggctgcagaggcaccgcaagcccactggccagtggaggcgcgagtgggatgccgagaagaccgatgggatgttcaaggatggcccagtccctgcccatgaaccatcccaccgctatgatgaccaggcctgggcccggcccccgaagccccctacttttggggagttcctgtcccagcacaaagctgaggccagcagccgcagaaggagaaagagcagtcggccccaggccaaggcagcgcccagggcctacagtgaccatgatgaccgctgggagacaaaagaaggggcagcatccccagcccctgagactccacagcctacttcccccgagacttcccccaaggagacacccatgcagccacccgagatcccagctcctgcccaccggcctcctgaagacgagggggaagagaatgagggggaagaggatgaagaatgggaggacataagtgaggatgaggaagaggaggagatcgaggtggaagaaggtgatgaggaggaaccagcccaagaccaccaagccccagaggctgcccccaccgggatcccctgcagtgagcaggcccacggagtccccttcagtccggaggagcccctgctggagccccaggcccctggcacgccttccagccctttctcaccacccagcggccaccagcctgtgtccgattggggtgaagaggtggagctgaattctccccggaccactcacctggctggcgccctctccccgggtgaggcctggccttttgagagtgtatgaagctggctgcctgtgtgtgtgtgtgtgtgtgtgtgtgtgtgtgtgtgtgtgtgcgcgcgcgcgcgcgcgcgcgcgcgctagaggggtgtggctggtgggggacccttggggctgggccctgggacccagtgtgccccacagccctgtcagctgagggggtagcgcagcccatgctcttctgtactgtcatgcccgtctctggaatgtccactcccagagcctgccccagcccttcgagccccctccccaataaagaattcacatcctccaatg

SEQ ID NO: 165448 - DNA, 1452 bp, Homo sapiens
gcctcccgagttgctgggattacaggcgcgcgccaccacaaccggctaattttttttgtagagacgggatttcacaatgttggccagactgatctcgaacttctgacctcaggtgatccgcccgcctcggcctcccaaggtgctgggattacaagtgtgagccaccgcccacggccggtagaacatctgaagcttctaaagcgaactctaaggtttcattggcacgagggggctcgaaccacgccaggcttccaggcgtcagtgcccagtgcttggcatctactgatagaaaccaggaatgaggggctggaggcggaaacagcttgaagaaagaggtagaggccagggagtgaggacggtgtctccttttcctggaagttggcaggaagtgacgcgcctggcccgggagctgcggtcgcagaggccgacggagccggagtcgcggacgccgcggggtctccgggacaggaaccctcagtgctgcgtctagattctgcaggggaggtttgctgggaccttggctccacccagccagcgaaatggcagccacactcgatttgaaatcaaaggaggagaaggatgctgagttggacaagaggatcgaggctcttcggcggaagaatgaggccctcatccggcgctaccaggagattgaggaagaccgtaagaaagctgaacttgagggagtcgcagtcacagctccccgaaagggccgctcagtggagaaggagaacgtggcagtggagtcggtgagctcgtcactggggtgtgggaccctgaggatggggaggggcagagggttgaggcctgggacccaggagcccccagctgtcctgcaccagtgggtggcctccatcctggccgcatgcctccctgccccagtgactgtattttccccatctcccctcttccaggagaagaacctgggtccttcccggaggtctcctgggacccctcggcccccaggggccagcaaggggggccggactcctccacagcagggaggccgggccggcatgggccgagcatcgcgcagctgggagggcagccccggggagcagcctcgaggaggaggagctgggggccgtggccggaggggccggggccgaggttcacctcacctctctggagctggagacacctcaatctctgaccgtaaatccaaggtaggagctaggcagcgcctggagccctggctgaggttctctgttgtctgtttctgttttttcctcctctcagatgcacatttgtcctgtgtgtccatctttcagtatctctctctgagcctttgcatctggctctgtttctctcttcctccacctccttctcctcctcctgctccccctcttctagttccccctgttccttccctctcacgcctagagctcgtgtgtttttccttgtctctttctctcctactcctgctccccgtcttcttgttcctcctcgcct

SEQ ID NO: 165449 - DNA, 529 bp, Homo sapiens
taatataacaaaaattaaaataaaggttacttacacttctaaaataaatacttgagaaattattaatgtgtagttatattctgtccctatatgctgacacacagaactatctagtctctttaaaggacagtctatgtataaaacatgtggcttaaatatgtaatcattcatactagaaaaggcgcacaaccaaaacagtatgcaaaaagtttcagtaatgagtacatctcttttcatgtctgtgtcacgtagacacaaaatcctaaaaccaaaataatttgctaaaatataaaattattatttgaggactgacatcagcgagatggtggaatagaagacctccagcatcaatcgcttttaaaagtacaactagcaactattcgaatataaaaataccactctgaaagcaccagagctcagaagaaaagtgaaaaatcttatgggttcatggaaattaaaaaatccatgaccagaaagaagaaagatcattgtgccacatcaccccattctccaaaccaaaatagcatca

SEQ ID NO: 165450 - DNA, 334 bp, Homo sapiens
tttgttctacactgctctgttctaaatgtttgttcccccaatattcatatgttgaaattctaacccccaaggagatagtattaggaggtggggccttcgggacatgataaggtcatgaggatgaagccctcaagaataagattcattgccttataaagaaaaaccagaaagatccctcatttcttcaatcataagaagacacatgagcaagaagacggccagctatgaagcaggtcgtgggccctcgccagacactgaatctgccaacactttgatcttggatttcctagcctgcagaactgtgagaaataaatttcttttctttataatccac

SEQ ID NO: 165451 - DNA, 374 bp, Homo sapiens
tcatcgagcccggcccatctattcgctgactggtcactgtgtaccccagagccttcacagcctgcagcaaataaacctgttgaacttagcatttaacccaacttggcctcaacttctttaaccaataattcctctcccacccccaggggaattgatgtttgcattcaggaagcactggtcagatccagggtcctgcctaatgtagaatccccctggagccctctctctgttggtcttttggccttgctgggacccaaacttctgggtgctcctagctagcaggtctgcaaaagaatgtggaacaaacatgtattagtcacctgctatgtaccacacactcccacctttgtgatgctactgatcagcgacttgat

SEQ ID NO: 165452 - DNA, 195 bp, Homo sapiens
tttcatgagtgaaaaatcacaggactcagttgcttaaccctaacaaaaacctttttgaaataaattttatagactggtgattagcaagtccaacaagcatacccctatctatatctttttaaaattcaagttcaaatgaatctgtcagtattttaatttctgctgcttgaattaggtttacccaaaatgcctaag

SEQ ID NO: 165453 - DNA, 278 bp, Homo sapiens
ttctagatatttaaaaattactttgctcttttagacaactatgtattcgtaaatttaatgatccaaacataaatgtttcccttcattatatcaatgtaaatatagcaaaatcccaaaacctctggagctctagttttaacaaaaattgatgtaatatcatggtcttatagtaaaatatttcttcccatttctttccatagagtcctacaacattgccttggaatttgttcttagaatacttcactgtttgaagttcattagaaaagatgccatcacaa

SEQ ID NO: 165454 - DNA, 409 bp, Homo sapiens
ccctgtctaacccgcagcactcattgcaaaagctatctcctctgatatctacagacacccagcacctcctctggcctgtccattctcttcccagacctcctgggatgctaatcaagggctgggggtagaggacagctggcctgggcagggggccagggctatctctgggaaggcatcctcacacccagacaggatgagcctggttcccaggaaatgcaacagctctgcaccttcctctcttccccagaaagtctacccgtggctgacccaggcaccctccttcaaggccctatgtccagctggaaggccacaggtcaacatcaggagatgcctggggttcctccccaaggccaccgtccacatctgctctgaggatattctccatctcccctcccatggccctgtttgt

SEQ ID NO: 165455 - DNA, 146 bp, Homo sapiens
tttaggagagaagatatttaaacatgtttttactggctaagtagaagtcagtgctcagtaaggtggaagaaattacagatacaagaaggaaaatggctatgactgagaaagattcctgtttaagacaatattaagaacatacatag

SEQ ID NO: 165456 - DNA, 118 bp, Homo sapiens
ctggataattattgtgaggaattagttattactgtaagtgggtatgtataagccatcttcttggtgagtagaattgtaaactgagcctttagttatatgggatcagataatcacattt

SEQ ID NO: 165457 - DNA, 171 bp, Homo sapiens
ctggtccgggtgggagtacggaatggtggacactgagcttcttgggctcactgccctgaccgccaggtgtccctgggagctcatcaggcccgggggcctaggtagtcatcacctgggactcacaggacttcggcatttgccctgtggacaatctaggtgtgcagaaatggg

SEQ ID NO: 165458 - DNA, 344 bp, Homo sapiens
gaaagtcctgcatagctacctggtggaatctcctctggcaacagataaaatacagctaatccccctgggcctgaccccatctcacggccaggggggcccagatgtctttcccggctcagctatctgagtctagggacacggctgactgtgctcaggtcatcaggagatagataggacattcccacctagaaaagtggctgggctacagggaagcctccagagaaccaaactgtgaaaccctctgcagaaacaccaagcctttccttcctgccactcaggctggctcagagaggaggaagaggccacagaaggagcccgagtgtaaaatggaaacccatagccgc

SEQ ID NO: 165459 - DNA, 272 bp, Homo sapiens
ggatagtgagttttatgtacagacagtagttggtattggcatgctgatcaaagacagcattattattctatagtctgtttctaatcataatgttggtattaattgcttatctctgctgcccataaataggaatatatgcttaggttaattcagttttgcttgtgagaacgtgcctaaaattcaaacttaaatttaatttttgtggatatatagtgaagcttttttttaagtctcttctaaagggagaaattgaagtattttgctaatgactt

SEQ ID NO: 165460 - DNA, 121 bp, Homo sapiens
tggatgagatgactggcccaaagagaggaaggaatataatgtcctagactccaggtctcatgacgtcaaggttgtttccactgcaccagggtctgcaaactggccagagggattggtcctc

SEQ ID NO: 165461 - DNA, 155 bp, Homo sapiens
tctcttgaatatgcaatttcaatatgatgaggtaaggtgtgtgggagcaaaacactatggaaacacagagggaaggtacctgctttatgcaagcctacataagaagaatttcaaaaggtagagatatttataacatacctaaaggataaatttgg

SEQ ID NO: 165462 - DNA, 99 bp, Homo sapiens
ggctggtccgatggtagtgggttatcagaacttattaacattagtgtcactaaagttggtatacaaccccccactgctaaatttgactggctttttacc

SEQ ID NO: 165463 - DNA, 801 bp, Homo sapiens
  misc_feature (770)..(770): n is a, c, g, or t
tccaaacccaatcaactattttagttatgtctttgtgtttggagttgaaatagcaaacagaggaaatgtgttacaaattcatttaaattacatttcctggtcactaatctgtacagcagatacacagaaatatgcttcctatgctctgtaactaactgtttctttggttgtcttgactttaaaacttgtttgttatttagtattcttttagaggaataattttactaattaagtttattattttattaacttttaagttcaatattgtttataagagcatcataaaattttaattctgttacatataagctattctggcttggacacattttttaaccttttaacctttaagcttcagtttctgtgcctactaatgtaggtatgacaatagtattaacttatatgctgtgaggaataaaatgttaaatgcatgtatagtgctttgcacaatacatggtgcaaagtaatcaagaaaggtccctgttaataatatatgctgtattaacctgtataatgtagttaaagtttttggtaggtaggctgtaaagaataagacataatttgtggtcatgctgaatgctaggtattatttacagtctatgaatatggactttttttttaatacggtatttaaaatagtagtactaagaaagtggtgaacagtgatttagaaataataaacttgtaatccaaatagcctttagaaaagttactgctaacctctgagttactaaattcacagtcctcaataaggttgattggtgacgtcnaggggtatactctaggaacagctatgacgat

SEQ ID NO: 165464 - DNA, 773 bp, Homo sapiens
tccaaacccaatcaactattttagttatgtctttgtgtttggagttgaaatagcaaacagaggaaatgtgttacaaattcatttaaattacatttcctggtcactaatctgtacagcagatacacagaaatatgcttcctatgctctgtaactaactgtttctttggttgtcttgactttaaaacttgtttgttatttagtattcttttagaggaataattttactaattaagtttattattttattaacttttaagttcaatattgtttataagagcatcataaaattttaattctgttacatataagctattctggcttggacacattttttaaccttttaacctttaagcttcagtttctgtgcctactaatgtaggtatgacaatagtattaacttatatgctgtgaggaataaaatgttaaatgcatgtatagtgctttgcacaatacatggtgcaaagtaatcaagaaaggtccctgttaataatatatgctgtattaacctgtataatgtagttaaagtttttggtaggtaggctgtaaagaataagacataatttgtggtcatgctgaatgctaggtattatttacagtctatgaatatggactttttttttaatacggtatttaaaatagtagtactaagaaagtggtgaacagtgatttagaaataataaacttgtaatccaaatagcctttagaaaagttactgctaacctctgagtacgcgcaaggttttcccaatgtaaggacgtccaggtctgccgggc

SEQ ID NO: 165465 - DNA, 505 bp, Homo sapiens
tcgaaagatagaacttggccccaaaatcatgcaatcattttaaacaatttctttcatggtaccagagacaccacaccatatgaaagttgctttgggacctgttcaagttgaattgtgctctccaataattcacatcttgaaatcttaacctccagtagctcagaatgtgactgcatttggagacagagaaataaggaaaaaatgtagatgcaggcggatacagagcaagggtgatgtaaacacacagggagaagacagacaccagtgagctgaggagagaggcctgaaacaggtcttttctttacagcacttggaaggcaccaaccctgtcgacacctcgattttggacttctggcctcagacctgtgagacagtatattcgtgttgtgtaagctgcccagttgtagtacttttccacagtagccccagcaaatcaatacagggcctacaggcatggatttctgttccagttactttgctttgcaataaatgtccctaaaacttc

SEQ ID NO: 165466 - DNA, 179 bp, Homo sapiens
agtagaaatgaccagatgtagtcagtatctatggatcttttctctagggtagtcagatcttactcacctaaacctggctgccagtgctctggggctggggttgcactgattgtgcagactttcatttaagatatcttcctattttcagtttcgtgcctcattcctttcgttctctgggt

SEQ ID NO: 165467 - DNA, 592 bp, Homo sapiens
gtctactatcctaccatcatatgtgaaatagaggtcattaaactttcatcttcaggtcaaataaaaacacaaagagaatgactccctcttccagagggtcaatccaacagactgaaattatagaagcagaagaaaaacagaacaacatggagctcctctgtaataaatctaccttgactattttggctgtgaaaagttattactgtttgtggaggataggatttgtagctgttatccccaagacattatacaaacgaaaggcacatcccttttggggcctgcaatggaaatgaagtagaaaaaaaaatgctttcgctttctggctgcctagctaaattgcaaaataaaaactggaatattaactccttatgtgcaattcacaaatagtgggcataatgatatgaattttcacatttagtacaattatactaaaaagggaataatagctattaaagtgtataatgctatgttttcgcaaaacataattttccaccagaaaactaaaaacctaaataattttttgggcaaggggctagaaagagcatagaaagtgtcagtatagctctgtttcccaatctcttccaaattattc

SEQ ID NO: 165468 - DNA, 410 bp, Homo sapiens
aacctattaggaaattctggcacatttataattccataagatgaggaaaactatttgtagggtcatggagagaagtgacttaccagctgcaccaatagtgccttgaagatgccgtggcctgactacgtaatgactgtcttagtcatgacaccgataagcttcaaatctacaccattacagtttgtacaacaggttggcttaatgaggttgatgcagatgctcaagagcagttattaaatcctcacaatgagactttagcaaatgagggcttcaacaagttgttgccagtaagtgataacagtggaagccactcagttgcatcagacacatgtgtaaggtgctctgagtgctagacgctggtacagaactccaaaagaaaatcaggcctcattgccaaagctcagggataa

SEQ ID NO: 165469 - DNA, 209 bp, Homo sapiens
tgtctgtttctatatattcaaatttctcatagtttttggtcacattttacttctcatgtctaggtcttttattattggaggttgaagtgaatattacgatattgagggtctagatttttttgttttccttgtagatagctgaatttgttttggtaggtacttgatttaatttacttgcagcttactaagactttcacactcttgcatta

SEQ ID NO: 165470 - DNA, 216 bp, Homo sapiens
tgaggcagaggctgcagtgactccagattatgccactgtactccagcctgggcaacagaccaagactctgtctcaaaaaaaattaattttaaaaaagcaaaacaaattcagaagttaattggatgattagattaacatgagatgcacagtgtggccctgttttcatgtgtttctgttcatcagagcagcccctttattcagtgattggctttataa

SEQ ID NO: 165471 - DNA, 331 bp, Homo sapiens
gaggaaaaaacaaatgtaagttggtcactaagctgtccacagctgcacgagcaaacacagactgttgcttagtcatgtgaagcatctacagacaggctgtacaggacaagtcagttagattgaggaagaaaaataatttatctgccaacatcttcctatctctcatttcacattggtcaaagctcaccttatggtatgttactgtccctatactttcagattatatcccctgaccccagtaggcaattgttggggaagttagatcctacaccgtatgctttgtggcttcactggaatctggaggtggcaggaggaactgagcttccatgtg

SEQ ID NO: 165472 - DNA, 298 bp, Homo sapiens
accacctaaaccgaaaccagctaaacctaaaccagccaaacacaaaccagataaacctaaaccagctaaacctaaaccagctaaacacaaaccagataaacttaaaccagataaacctaaaccagctaaacctaaaccagctaaacacaaaccagataaacttaaaccagataaacctaaaccagctaaacacaaaccagataaacttaaaccagataaacctaaaccagctaaacttaaaccagctaaacctaaactgtcactctcccctactctggtcggtctttctttttcctac

SEQ ID NO: 165473 - DNA, 578 bp, Homo sapiens
ttcttatcacctttactattaccatgctggttcagctgacagtaatctcttaactggtcatctgttccaagtaccctcattcccatccctgtttatggcatctattgaccacttaatagctgaagtaatcttttttttttttttttttttggagaaagattctcattccgtcacccaggttggagtacagtgacacgatcttgtctcactgcagcctccgcctcccaggttcaagcaattctcatgcctcagcctcctgagtagctgggattacaggcgtgtaccaccacacccggctaatgtttgtatttttaatagagacagggtttcaccatgttcgccaggctggtgaagtaatatttttaaagcctaaatcagacctgcgcaaaatcctccaaagaagtgctgatttcaggtctggggcaggaaatgtacaagatgaatctcagaggataggatagtaacagagttccagaaatgatgaggagagaataaagctataatcataaaattggaaatgttgcctatgacagaaacaatagaggccttttatgagacccttcttaagatcacatcaa

SEQ ID NO: 165474 - DNA, 198 bp, Homo sapiens
actgcaaagtgggaactgatttgtaaaggagcaaaaagggaaatgggggaccaacaggaagctactacagtggttaggtgagagatgataatgtggcttagaagatagcagtggagggggaaagaaaatagatatggggtatgtaaaaggaaaagaacaaatagaatcatcaagataagaaacactcaaaaggccaag

SEQ ID NO: 165475 - DNA, 451 bp, Homo sapiens
tattttattttattttatctatttatttgtagagacagggtcccactgtgttggaaaaggcaacctttaaaactcttagaagaagacacaatagaatatcttactggcttcagaaaatagatttttttagaaaaagaaaacacaaaacactagtcataaaagaaacaatagataaatttaaacatattaattaatattaagagtttctaatcatcaaaagacactctaagaaaaggaaaaagaaacagcatacattgagagaagatagatagcagcagccatataactgcagtctccagggaagttcccatgatatgcttatcaggacacaaatgcaagaatgtctatagcagcattacatatagaaaaaaaagaattcaaatatccatggatggtagaacagaaaaatggtgctatattgacagaatttggaatattatacaatgataaa

SEQ ID NO: 165476 - DNA, 271 bp, Homo sapiens
aattacgttgtttaagccacacagtctatgttattttgtcatggcaacctgagcagaccatatgcactaccttgcatgtagcattcaagatggcaaccagaatttggctagtattttccaaaatcagccctggagaaactatagaaagaatgagataacagtatcaacaacaggaaagaagcaaaaatgagaaattcctgagggacaagaagtctgggttgaaccattacttatgtgtgggaaacaggtgggggcataccctcaagtggaa

SEQ ID NO: 165477 - DNA, 542 bp, Homo sapiens
cacaaaccttagttcataaacctctttcaaaagcccgaagaaaaccgtttctgtgctctgactgtagaatagaaaacacaacggtcacagaaagtaattgaaggcaaagcccaacaggctgcagcctgaacttgtttgagccgtaagcccgagcctagcgtcgcacgctgggcgactcccctcaggctctcaggccggcgccttcgggggaccacgtagcgccccagcggtggcggctgcgcccggctcagggcggtgccgcggccactggctcctcctcggggtggggcgggccgcgccgggcgagggcgggaggaggagcagccgcagcggcgtgaggagctgccgcgcgaggagcgcgtcgcgtccgcacttctcctgcccgagagagactgagccgcgctggcagctcgcgtcgagtcggtctgccctagccgcatcccgcggcgcccggtcgggctccgggcaccaggcaacacctaggccgttccctttagacagccccgggccagcggccccctcgggaaatgtccagcggccgc

SEQ ID NO: 165478 - DNA, 273 bp, Homo sapiens
tgaggggttgtgcatcatctggggccatccaggttggaaggcacaagcttattttccagggggaaaaatggagttttaaaatccattctaaaaatgactcaagggctgtaggatggtgcgccctctgtccgtgtggctctccggctcggtgggatcaatacctagtgctgggggacttcacacatcactttcccagccgtggctgaaatatgtggcttaggagagcatctcttccctggagaaggcttggtttctagaatcacagagcaatac

SEQ ID NO: 165479 - DNA, 287 bp, Homo sapiens
ggagaggtgatgaaggaaacagggaggagggagaggtgatgaaggaaatggaggagggagaggtgatgaaggaaacagggaggagggagaggtgatgaaggaaatggaggagggagaggtgatgatggaaacagggaggagggagaggtgatgatggaaacagggaggagggagaggtgatgaaggaaatggaggagggagaggtgataatggaaacagggaggagggagaggtgatgaaggaaacagggaggagggagaggtgatgatggaaacagggaggaggga

SEQ ID NO: 165480 - DNA, 169 bp, Homo sapiens
cccttctctgttcttctccagaagaagctggtgaaaggcagaggcaacacctgcttcctgcagtaacctcagagccttaccagccagctctgcttcctgcctgcttttggtacgtgctttgctttcttgccactccacagcttgctgtacatggaaggtatctgtccct

SEQ ID NO: 165481 - DNA, 452 bp, Homo sapiens
gcaatgggatatgcctggaactgggggctggcttctgataaatggtcagtttaagcctttacaccacaatatatgtacacatacaatatgagtcacccagggcccctaaacatttgacatgttctcactatcactaaaaatatctaaatcccatgaaggagtggggagaggacgaacacttggaaaaagtaatgagatcaagtgtaaggaaggacagagatgctgggaatggacccggtcccacggaaggttctagctcaagtccttggtccacacgggagcccctgggttgccaggaaatgggcaatctcaaccccagtgcctgtggggctgtgagggtcccttgggccccagaacctgaggaggaccctggagaggcgggaaggcatcttctgtgggcttctagaagtctcgtcacagatgctacctcttttctgaaattttacaactca

SEQ ID NO: 165482 - DNA, 257 bp, Homo sapiens
gtaagtttaaacaacaacaacaacaaaataaacaaactaattgctgatagataatggcagtcactgttatttattgaattttgaatccacgttttctgcatattttatgtctgatgttctggtagatgctgttagagttactttaagtaataaaaatagtttgctggtaatgtctattctcatttcaggtagaaacaataccctttctaccacttattttattcaattataaagtctccactttaatatataatatg

SEQ ID NO: 165483 - DNA, 569 bp, Homo sapiens
ggaagacccagaatgaagtgggcgaaagggataagggtaggtgaaggaggagtggcaaaaggtccagagagaggccctaacaggcctatagggaactggagcctgggaagctctggactggcttaggattctaagctcttctctgcagaaaacatctatccagctgcctgctgggtacatccaggtggattctgacaggcaccttaaacttaaggtggccaagctgagcctgtcatagtccccccagatctactcctcccaaagcaccccccaaactcgttggtacatatcaactcacttcttcccattactcaggccaaacctcaggactgtccttgactcctctctcccaagccatcagcaaatcctgttgactccaccttcagtagttccccagaacctgaccatgcctcgccacctccactgccagcccctctggtcccagccaccagcatctagcccggatgattccaccactggtgctcggcagtctctcagcccagcagccagacggggcctgttaaccctgggagaggcggcgtcatgttaagttctacttcatacccctc

SEQ ID NO: 165484 - DNA, 889 bp, Homo sapiens
tgggaatctagacacagcaacagtaacaacaacaacaataacaatgaaggctcactgtgaaaacatcaattcattaggaaagttacatcccctccgccactgtttcagatgctgtttctcattctccatgggagcagccagcatcgtgtttaggatggggatacaatagcctgagctcctgattgagtcagaccctggactttcccttttgtatctgtcattttcctctggatcctcacacctttgtgtttaatttttttaaatttcatttgttgacttcctatgtggggtaaaatgacttcctttgattaatgtactttctgtatcctagagtttccctttccctttgtgatttagtccaacgtgtcctactacagcctcaaaaattgtcattggaatcaaaagctttccaaggtgcatcaggttaatgatttggatgcatcctgaggttgtctcctgtagcatggaggcattataataggagtctcagaagttacaccatttttctacagcacatcacaggcccagaggcttgaatctaagagaatccactctatgtctgtcagcctgaatccttccttcttgctgcacaacaaagcaactgaacgtattttgagtttaggtgaaaactatcactcattcatcaaagttctatctgggtgatatatgctatcgaaacagatgtggacactgggctgacagatgttgagaacggacctgttgctgaagctcatgttatcacacatgctgtgggaagagaggtcattggcattcaagatgcaacacctacaatatggtgaattaaagatgccatttgcatggatcttggattagtgcttgtaatttgatttgcgtatttacattgctttggacatatagttgtcatcct

SEQ ID NO: 165485 - DNA, 609 bp, Homo sapiens
ctctctctctctctctctctctctctccctctctctctcattccctcacactcaattagccctccatatccatggcttccacctctgtggattcaaccgactgtggattgaaaatatttttggggaaaaataagcataattgtatctgtactaacataatgttgagcacattacaatacattacatcagggtacattacaataccctaaacaataaagtataacaactctttacataacgtacattatattagatagaagtaatatagggaatcctctgaaggttatatgcaaatataccattttatatcagggacttgaacatccctagattttggtatctgcatgggatcctgtaatcaatccctcaccgataaaagggacaacagagtgtgtgtgtgtgtgtgcgcgcgcgcgcgcatgtgtgtgtacacagtcatccctcagtatatgtggggaattggttctaggactccctgcagatacccaaatccacacacgcttaagtgccacatcagccctgcaaaacttgcataggccctgtggaacccatatatacgaaaagccagccctgagtacgcaagggtttcacatcccacaaatactgtat

SEQ ID NO: 165486 - DNA, 255 bp, Homo sapiens
cgagatcatgccattgcactccagcctgagtgacagagtgagactccaacttaaaaaaaaataaaattattattatttctagattttaacaattggaattatcagttatatttgtgcttgcaaatttgtgggatctctttttccccttctcttccttattgaactttagcatgctagactgtcttcattattcatgtatggagaagaagattctcattttgtggttttggttgttcttaataccttcataataat

SEQ ID NO: 165487 - DNA, 244 bp, Homo sapiens
aaattgtgaggctgtactttctcattacttatgtatatttcacccagcagtgaaaatgtctcttcaggtaaaccaaggagatacatcaatatcttaattttagttccaagtgtatacacgattcgtctaaagtagaagagtgtcacttgtatgctattatggttttggggttgtcttttattttttatttatttatttatttttgagacaggacattgctgtcacccaggctggagtgcagtgg

SEQ ID NO: 165488 - DNA, 703 bp, Homo sapiens
gcacaggaagtcactgagacagtggaaatgtgtgaaaatcccttaggggatcacaaaattgctagcaaaggtagctaagagtagagtaccaacatcaagagacagatggcagaggaaaagccagaaaaagatgaagatagtgaaaatacacatgccatgggtgaagttacggggacagaagagttagaaggagcccttgccacaaagagatcaagtaggaaggagatcaagataaagcccctacattagaagggtccagtgacctctataaaaataaaaatgatttctgaaaagggatgaggataaaagccaaattcaagttatttaattagtgaatgggagtttgtaagtatagatccctgtttaagttttgcgccaaatggaatgatgaatggagtgattcttcttgatcagacagaacggtcaagagatgtgtgtgtgtgggtgtgtacatgcatgtgtgtgtgtattgtttagaatgaaacacttagatgaatgaaaggaaatagtggagagacacattttaaaaaggagagaaacagaaaacatggctatatggttccaagtaccatgtaccgtagatggtctccaaatcatatttatgagcaaatactttttctcctttcctggacgtaaagatatactgccaccaatttacaaggcttataaagcagacagccatgtctattttagaatagctata

SEQ ID NO: 165489 - DNA, 256 bp, Homo sapiens
aatgtttttctaagcttctagaccttcataagccataagtattaagcaaaagattagagagatacagcagtggtatggtataagtgtcataaacaatggcttaactactgggcaaaattaaactaatgtttactgagaatcagtttggtgctagtcaattattatcactcagtcttcacaaatatcaaatgagtcaagcatcattttgcttattttatacataggctatctatgtaactgatctatgtaactaagg

SEQ ID NO: 165490 - DNA, 531 bp, Homo sapiens
gtaaccacaagtgaagagaatatatttaaataaatcaaatattatgaaccaaactgccctaagaatttaggttggttgtttcacatttgaatcacttgatcagtttaagtatcttttgggtggaaacatagcctttgcatttagccattaaaataaaattgattaccatggtcataaagcttacaaagcaatgagatactttatggttttcagatttctttacataatcattttcctcagtcttctttctctatccttttcttttcaagaacaaaaacaactggtgatattcctaggacaagtcctatatatttgtctgtctgtctgtctgtctgcctatctatctatctatctatctatctatctatctatctatctatctatctatctatcaggtcttgctttgttgcccaggctggagaactatgccctggttattctaatcccaattacatgtacttagcaaagtgttatactgatcttgaggaaaaccagaatgctttgaagttctgtaattttggcattattgct

SEQ ID NO: 165491 - DNA, 320 bp, Homo sapiens
caaagtgctgggattacaggtgtgaaccgcagtgcccggcctcttgatgcatttcaaggcagattgtggacatcattgcacttcatcccaagacatttcagcatgtatattaagtagagttcaatattttaatgcttttttttcttttgagttcaaatttacatacaatgaaatgaattacttttaagtgtgcacaaactagttttgaaaacttaagtagaggccaggacggtggctcactcctgtaatcctagctctttgggaggttgaggccgggggatcacccgaggtcaggagtttgagaccagcctgaccaacat

SEQ ID NO: 165492 - DNA, 522 bp, Homo sapiens
gaaatggttagaatttaatagcctattcctactcttatgaactccttcctcagagaggtaggaagaatggcaagacttaaacagacgaaagaagggaaagtgctgtctagattatgaaaaatgccaaaggattgtaaattaatgatgtaatttagatggggacatgagacggaccagaagtgagcaatttatttggctccgatttggtcattgcaacttggtggttggctgcagcacccaaaataattcaattacctttactgagcctgtttttttcttgttttaataatctgtagcgtaacaatttctactttatagagttcccgagaggacaagatagtgtatatactggactccccgtgagcagaagtaattttcacgctctggctctcacacctgagcacacatagcaaacgtgaatgcatatgctggttgccatacttgaaacttcatagcattcttcataacccctgcaccagccttctgcactacctaccaataaatgcatgcgtatttcagttt

SEQ ID NO: 165493 - DNA, 315 bp, Homo sapiens
ccccgggcccagttttccccactcagggccgtagcagagcggggcaaagccagccggaccctgagtctgtgctggggtgaccgcgtccgtcaagtccgcctccccagtagagtctgtgaggggaccttcctggaaagtagggtctttttggatgtcattgggtagggatcaagatgagatgaggtagctctgaaatccagcacaagggtcctcagaagagacaggagaatcacttgaactcgggaagcagaggttgcagggagccgagattgcgccactgcattcgagcctgggtgacagagcaagactctgtct

SEQ ID NO: 165494 - DNA, 143 bp, Homo sapiens
ctgaagagaaaccggagaattttgttgttgttttaggttttacgttagtttgtttgagttgggagctgatctgaaggttcgaattgcaaacagcaagagtgcacttgggaggaggggtcactgctgctggaagtgagctttag

SEQ ID NO: 165495 - DNA, 102 bp, Homo sapiens
actcttctcccatattacaaacattaataacagcatatcgctcacctatccctaatctcatatggtacatttttccaactcttgacatgacctataaagaaa

SEQ ID NO: 165496 - DNA, 496 bp, Homo sapiens
cttagacgtatcttaatctataagaaagagacaatgcagccgggcgtggtggctcatgcctgtaatcccagcactttgggaggcggaggtgggtggctcacctgaggtcgggagtttgagaccagcctgaccaacatggagaaaccctgtctctactaaaaatacaaaattagctgggcgtggtggtgcaagtctgtaatcccagctactcaggaggctgaggcaggagaatcgcttaaacccaggaggtggaggttgcgacgagccgaggttgcaccattgcactccaggttggacaaaaagagcgaaactctgtctcaaaagaaaaaaagaagtaggggtgtgggtatagacagggttatttttttgttttttgtttttttaaatacccttccgtcatcttctcttcttttgtcatttacatctacatctttaaaaattggagataggaaatattctgattgagtaaacttatttaggttctggtaaagttttg

SEQ ID NO: 165497 - DNA, 689 bp, Homo sapiens
tctagaccttctaactcttcctggttcccaattcctttattctgccctctaggagggtcggatctcttctaacccgaatagccttcatttattaattctgctaagtactaagctataacctcatttccttcacttccaagcaattgaaacacatgtgttgtctttgcctttcctcatcacctaatttttcctggccctctgcagtgcctccctacccaagatcgctgggaacagcacaaaatcagtatccatgtcttggccaaatccaaaggcatttttagggacctcacactttttccttttacaatatctaagatgacagacaacttttcccttctggaaagctctcctccctccatttcccacttacgactgctcccccacaccagatttagtactcagacccttcttgtctccctccatctaccctctttcatcagcttagtgacctctctggagatggctcttaatttatatctctagccccaactacttccagaactcatgacacccacatccaaatactgtctgaagttacccatttaaacaagctctcccacacagctcactcatttctcccagtgacaccccctaagtttccacagcccctgctcatttgtttccagattcaatacattgtgaaagcctcttgatccttttttaacaactgtcagttatgctgttctcac

SEQ ID NO: 165498 - DNA, 494 bp, Homo sapiens
aataagatgcagcgaagtccagaatctgtgaaatcattttggcccaaatgagtcttttgtgtcctttgttcatggagattgggtgaagcaaggtgcacctgtttcaatagtaaagcagccccactgaggaaaggactttttgagttgtgtcattagaagtcatcattgcatatgtgagagaagagaggaaggaaagggcaggatgcagtcacataacaggatcatggaattctaaaattggaagaaatatgtttctagtcatctagtatagcttccaatccataggatgaatcctcatggctaatgaaagcctggaagaacattagaaccaccatgaggaggctgctgggatgcaatggtgtggcgtgatctcggctcactgcaactaatttggagcatctttctaagactttgcatgtaaatgtgactggatggccatctgtcaggaaaagactagaagaattgaattggaaaagcgaaaaaaataaaagtgg

SEQ ID NO: 165499 - DNA, 232 bp, Homo sapiens
agagactgttgtggcggttgcagtgtctagagggttgcgatggaagctcttgtgctgtcaacttaatgcctgttggggcatccctaactggggtcacctcacacttgtctaaccccagaagaacaatggagtcgagtgtgtggccaccttgtttgaaagtgtaaaggaaaatttaaattgatgggaccacaatcataaaaaaaaaataaagttaatgattttagaatcatga

SEQ ID NO: 165500 - DNA, 498 bp, Homo sapiens
aggaggaatcatgtatctcatagtcataatgacgaaagtaaaatattttaaattctaatgttaaataccttaaaacaaatatgatttaatagcttgggatatagcacttatactttgttggtattacttttagtaaataggctacctggtcaggctccctggtctgtgccaggtaggatgggctccccagcccctcctcactagtttcagcctaagatcatatgaccaaggaacttaccaaagataaggtagaaatgtggctattctctgatttcctttaccttcctcccttaagaatcagatcaagtttatcctgccctctgtgtggtctgtatttatggggatagcaagaaagtcctattgtcttagagtgcgtgttacatagaaagagttcacaaattgtgaaatattaggtagggagtatattgatggataccttgaatgttctgtgagtgtccatgagaaaactgtatcccagtctctcatggacaaatagaa

SEQ ID NO: 165501 - DNA, 286 bp, Homo sapiens
cacacatgcactctcacacacatccactcacacacacatccactcacacacatccacacacacacaatgtttggctaactcaagacttggtgtttatgttaatgattttagcccatccatgtagaggattatagatgttgccggccctttcttctctgtagcattgatcccggcttggtgcttggtcttcaaattgtttacagtgttgtcactcaggaatgcccagcgtgaggagaaagaatcccctcttacattcatgctcacacacacatccaccctcacactc

SEQ ID NO: 165502 - DNA, 424 bp, Homo sapiens
tatcttttttttatcctacaaaattgaaataactactggatgggcctattgtgagaattaaataagcatacatatataagattctgaaatataatagatgcccagaaaatgttatttactattttattcctcatttccttttcttttcttttcttagtcaataagaagtatcaaaaaaaggtaacatatcttaagcatgaggtctgtcctttttttaaaatattttttagtttggaatagttttatatttacaaaataattgcaaaaatagtacagagaatttccatataactcatacccaatttcctctatcattaatatcttacatttgtatgatgcatttgttacattaatgaaccaaacgttgttattgactaaagttcatagtttattcagattttctcatttttcttcaatatccttt

SEQ ID NO: 165503 - DNA, 578 bp, Homo sapiens
aatattatttcaaaatattatttcaaaacattatattgagtataatattccaaaatattatactcaaaatcagatcaactcaccagcatctaccttcactaatcaaaaccaaacaaacacaaatcagatcaacttaccctaccagcatctaccgtcactaaccaaaaccaaaaatcacctctctaccctagctggtgtcccctagggtaaatccaaacaccattgccactgaagacactcaatggtttggaatcagtttgcccttccagcataattcccttccaacttgcctttgcaacttccatctcaccattgcaacctacactctcatcaaatcagaactcctgaagtttcctaaacacattatgatggctctgtccagtagaacttcggataacacgttcgcgagctcgcgaacgtgttatcctcaccctcttggcctgcactggaatgaccaggactctggggctcctgggagtctgtagtaggtggtcctgagatgctccagtccgtcactcgcttcctaggagggcacagagtgtcctaaaggggactggcctccaatgggcctgggaaag

SEQ ID NO: 165504 - DNA, 334 bp, Homo sapiens
taccttggtttctttacttataaaatgggaatgacagtacctagatcatggggttgatgtgagcatgatgcatgtgtttaaacatgacataagcaaagaggatgcagagcttagtattagttctagttgccttcatgccttacagacaaggatcctgtctgtgtgtggaatttatagaggaatgcagttaaggctcaaagggacccattccttcccccattaccagcttacctgcttgcttcttccagtgctcatccctgcctcctccctggctccatgcctgcctttctgctgaggactcgagcatggtgctgaagctcacttgcttggaatt

SEQ ID NO: 165505 - DNA, 312 bp, Homo sapiens
cgcataactatacagtactataactttactatgataacttcactgagcaacggtacaaatcgacaaatggacaacagtttctatcattgattaatcaaataatcagaagtcaataatctgctaagaatattctgacctctactggcccttggcaatagatggagacagaacaatgccgcaaacgtgaagacagcctcccactctctcctctcccacttctcctacaggctttgaggatcaccacgtttcgctccttcattcacatgtctctgacattttagagtccagaacatcacaagatacccataattt

SEQ ID NO: 165506 - DNA, 322 bp, Homo sapiens
ccccgcttctcctccttgtcagtccacaggtatgagggcagcagcgccaggagtggggtgctgagggcaggcagaggatgcttcagaaacacctgtgtagtaagaggggagggtaatactcatgctcccaggacggctgaggattcaatgaggctgaagcaattctgttgagatgagctgtcttgtagacaattgagggtttattctgagagagcaggtggtgaaggagctctgggtctgagttctcgtcctggctgtgtggccctgtacacgccacctctcccagcgtcagcctcctcacttgtaatatgaaggtagccat

SEQ ID NO: 165507 - DNA, 502 bp, Homo sapiens
  misc_feature (96)..(96): n is a, c, g, or t
cccggccccggccccggccctgcggctctcaccctggcccggcgcggcccgggcgcgcggcggtcgctgtggctgaggcagggcagccagaggcangcgcggttccggggcgctgcagtccacgccgacggcgcgctcccagcgccagcccccggcccccgcgcgctccacgcgccacacggcgctgcccaccagctccgcggccggcgggggctcccgggcccggccactgccccggccccagtacgccccaggccgggcttccggagacgcgcgcgccgcgcgggggcccggggccgctgctaggcgcccggcagacggcgtcctcgaccccccgggcggccggcgggccccgggggtccccgcccgccccccggagccgcgggcccggggcccgggggccccgaagggacggacggcccgcgcggacggcggcaggacggctggattggctccgcgcctcctgcgcctcccggctgaaggcgcccgagccccgacacgc

SEQ ID NO: 165508 - DNA, 423 bp, Homo sapiens
aaaatgaggctggctatatgagaagaaaatagcatgtaaggggtgacacgttctgaaaactaagagtagacagctttggaaatgtcacgcccacatgatgttttgtggtgatgtttattatttcaggggaaccggctgtccttcaattaaatgcagctgagggaggaaggccagcaggagaggaggggcatatgaggggcttccctgtgagcccgcggccctaagtcagtgtagggcagctgagacaagaaccaaagtgtggacaatgtccttttgtacctgcttggagaagagagaagtaatgatggtagattttagtacattatattacaaaagattacgtgaaaaatggtgctccctcttatcccagggacagagcaagaggagtttaggtgagctttcaggaagaattcattgacagaa

SEQ ID NO: 165509 - DNA, 205 bp, Homo sapiens
aaagactcagaattaaagggttggaatctactcctagtggaagatctaccagagtgtagaaaaagtctttttgatcctctaaaggaaagtctttttcaggcctcctaggagggagatgcccacatggagggtgagctggaggggaagaagtgagtgactgtgggctatggaaatcctgggtcatagggagctacgtggaggggtc

SEQ ID NO: 165510 - DNA, 590 bp, Homo sapiens
agaatgccccgatgagtgccactggctgagcagacatgtcacatggactgcccagccaggaagggaggcctatcataattttgtcccccacttgtgttatctcatagactacagacttaaatttatttcttaatatgcatactatttaaagaaggaagttataaacatttgggcattatcttagagaaagcagaactttctaaagagagtgtctagaggctggaccacagactaacatccctgttggttgaaaaattgcaggctgtcttgtcctgttggaaagcattattttaacagattgcttaatgcttttccttcctgtagcatgggcttgggggagtggtactcaaagcagacttataaattggattgtatagtgaatgaactttgcttaatggctttgctgggtttatttaagacattgaactgtttgcccttgtctccagtggttcaatgaccactcatcattacattagtgggagaactatcatactgtgttagagatacggagagcttgtgactgggtgaagagtcagtgttttgactttttatgccaagatttactcatcggggatcctctataatcgcgg

SEQ ID NO: 165511 - DNA, 406 bp, Homo sapiens
aggtcaaggctgcagtgagctacgattgcaccacagcccttcaggggaaaaaaagaaatctgcagtggttcctcactcacaggataacaacttaaacctggcatccaagttggactatcatatggtcccaactacctttgcagctttggaattaaggcatcaggtctaggcacatgaatttcctggttgcacttgttttgtgtggggtggcaggaagaaactcaggccatcggctactctaggcactgccagagtcacttattctttccagaacttggcttcctcatctaaggtgacagacaattgaaccaactcgttttaaagttctcttccagttctgccctgtgtagtatgaagactgtcctcttctacttttgtacttcctacctcttctagaaccccagcc

SEQ ID NO: 165512 - DNA, 236 bp, Homo sapiens
gctgggattagaggtgtgagccaccatggctggccacatacttttattataaaactcattttcctcatcaaacagtggtaatacacttttgcaaatgttaatgtgcatttctcttttgccattctctgtacttcaccatctgctttgtcagcagagctgtttgccctgcggatttgacagcagtggtatggcaggtgagtgattagcaggagtgcaagagaaagcattcatgctca

SEQ ID NO: 165513 - DNA, 222 bp, Homo sapiens
atgctactaagtaaaagctgacaatcgcattttcctcaccatcttcagaacctggtgtatgatttttactgtgttttctttgtatgaaaaaagctttttaaaaatcacggtattgggcatttgaattgcttttattgaaaagagtagagtaatacattggaacggcctttgaagactgggttcgttgtcaccttgcctgtcctggtgggtatgtggcctgat

SEQ ID NO: 165514 - DNA, 167 bp, Homo sapiens
ggcacagtgctggatgagggtcatgtagacacggttgacagaaaatgtagggggcacacctgaagtaggtggaagcaccagccattgctcaatgtaccatgatctaaagaatgttgctgatggagccagttattcttcatttgtttcccacccccgaatccatacta

SEQ ID NO: 165515 - DNA, 284 bp, Homo sapiens
tgctgcatcttatggcagttgacatcaaggccttactttgtatatgtaatatgagagctacttattatttaagggtatctgaccatcttgaaattcctgatgttactttctgaaggtccctgaactctcacaattggcctctttgcaactagattcaaagtcgttcacttagccatgtacacaactgccaaaatgactctgtgaattccatgctcaaagattttcgatggttccccactgcctagtcaatgatgtaggaattccctagtcaagcattcaagtcc

SEQ ID NO: 165516 - DNA, 347 bp, Homo sapiens
ccttttactgtagagtacatggaaataacacaaatctaaatgtaattcttagttgtactattcataaatatttgttttgctttttttgtcttcatatttgtgctaaattacattagaagtctttgttggacttcaaaatatattgtttgtgttttgcactgggctctttgcagtgttcttattgtaaatgttagcccttaatgacacttgctcagaataatgaaaacagatggtatttgtttttgtttttgtattttagtagataaagctaaagtcattcagatttcctttctataattaaaccaaaatttgtagaatattcagtatccaagtaggataaaatcata

SEQ ID NO: 165517 - DNA, 459 bp, Homo sapiens
gactgcacagggctgcagacatagatttgtattcccaggtttaaccacctctctaactttatggaggagaatctctgattgtgaagcgttatgacttaccaaactacccactggatgtcttcctgtaatgttgagaagcatccatagtttcctatttctttgtaaataccaaacctagaaaactacacatgacagtcaagggcactattctaaatattctaaatgctcagagtatgtgagagaaatttggaaagaatcctctggctcagagtcaacagatgagagaaggaaagctactgccttaggtgtttgggggcagaaattttccattactgagaagcaaactgaggtaaggatagtcaacattcatgggcagtcccagtttttgttgtacctttaaaaaaaccaaagcctaaaatgagtttctgagaaaagaaatctatccatatatcaatggaa

SEQ ID NO: 165518 - DNA, 370 bp, Homo sapiens
gattatgatggatggggggcgggggtccctcaactcagcctacttggaggggaggctcgaaacggccgcagtggctcggaagccgcggctcggggcccctggctcacgcccccttctctggctctcggatcggcccggcgccggccccccggaggaggaaggggcgcgcgggggcgctcaggcggcggccggcaggcgcgcccgtgccccgggcatcgctcagcccgtgcgccgggccgccgctgcctgccctcgggctgcggtgctcagcgcgaggcgcgcagccgatccccaggccggtgccaagtcgccggccccgctagctgcctccatgggccaggggctcggagaggggggaggcggcggccgc

SEQ ID NO: 165519 - DNA, 333 bp, Homo sapiens
cgccaagaagtgttgagtgcgggggaaagtgcccagcggtgttgagtgcaagggaaagcgcccagcagcattgagcacggcagatttcttctctgccctcttcagtccatctccttggagttctgcaaaacagaatttaatttctgttgttctgtcctgaccaaaaccaggctccagcttggaggctgacctcctcgtacacaaagaagtgtgtactgttgctcacgggggacacactgaggtcaagacgggtggacaagcccaaaaggcaggttcatctgaccgcagctctgtgggtaaacgcctgtgcccactgtcgctgtgcagtacgat

SEQ ID NO: 165520 - DNA, 324 bp, Homo sapiens
ccctgaacattttgtttctaggattatgcttgtgttcatcagtcggttttcctctggtgtgattttgctgtagtagattgggggtggaggaggtggcaaggagggagggggtggtcaccacttgttggatcttaggataaagttggttgtgtccagaggtgactgatacaccttataatttcagactgttccatgtcatgtgatcactttaaactaggcttaatccaaacctctctctaaagataattcacaatagaggacagagtggtcacatagtgtttcttacagtgacatgtgcattagaatgatttgtagaccaaattt

SEQ ID NO: 165521 - DNA, 231 bp, Homo sapiens
gaggcaggagaatctcttgaacccaggaggcggaggttgtagtgagctgatatggcctcactgcattccagcctgggtgacagagtgagaccctgtctcaaaacaaacaaacaaacaaacaaatgaaaattattactagtgtataataatttcattttcattttaaattcttcaattggcttataacaaaacttcccaagaaaagctcctacaaataacttctcaaatgaa

SEQ ID NO: 165522 - DNA, 232 bp, Homo sapiens
tttcctctttggtctcatgaacctactgagagacaagatggtaagtaccccatactgacctctccactgggggaaggagctgtgcatgactaactcatgagctcagcgtggtgaggaggtactccaccccacagtacttgtgagaactgtgtaggtgccatcaattacaagaaatagtacaaaagcagccgggtgcagtggctcaggcctgtaatcccagcactttgggagg

SEQ ID NO: 165523 - DNA, 145 bp, Homo sapiens
ctccatctaagtctcaaagttttattcacattttagtatttttattttgacctctccacctcactcaaaagatcagtacatgctcccaaatctatcttataaaagaaggaattctgttattttgttatttttcctgcagttaaaa

SEQ ID NO: 165524 - DNA, 519 bp, Homo sapiens
tgtgtattttaccctctcactcccagcacacacacacagaagtgcactgtaatggaacatggagtgtgctgctatgtgtattttaccctctcactcccagcacacacacacagaagtgcactgtaatggaacatggagtgtgctgctatgtgtattttaccctctcactcccagcacacacacacagaagtgcactgtaatggaacatggagtgtgctgctatgtgtattttaccctctcactcccagcacacacacacagaagagcactgtaatggagcatggagggtgctgctatgtgtgttttaccctctcactcccagcacacacacacagaagagcactgtaatggagcatggagggtgctgctatgtgtgtttaccctctcactcccagcacacacacacagaagtgcactgtaatggaacatggagtgtgctgctatgtgtattttaccctctcactcccagcacacacacacagaagagcactgtaatggaacatgtagtgtactgctatg

SEQ ID NO: 165525 - DNA, 472 bp, Homo sapiens
agaatctgtattttcttcctcttttcctactatttttaagccagggaatttgtacagtttaattaaaagatactggagggaagaaaagagtccatgcatcagtagcttaggatccttagcactgaataatccaaccctccaaataactcttacaaatgaatcctacagtatttctcattcagcaatatcctgttactggggcaacctgtgccattaggtctcagtaagcagcacagtctcattgccagatgtagctcagacagcagcaactcaagccctgcactacagaggcatctcctcttccagccatcacctgcttggaaacaaaaacagaccccactggtttggccacacatctgtaatctgcttaaggctataaaagtgttttgcttttctttttgacatacatgtagtccaagtttattcaatacaggaatcgagcatttctaaataaggacctcaaaactggcag

SEQ ID NO: 165526 - DNA, 191 bp, Homo sapiens
tggaaggaaatgaaacagactaaaatcagagtaacgcttaaaaccatgaagattccagcccacagattctatctgccacatgcagacacgatttatacccctagagggaaactgaagaaacaaggtggtggtcatacaataatagactcaaaacccaaccacacttttgaagtgaatagtggctcatgatg

SEQ ID NO: 165527 - DNA, 215 bp, Homo sapiens
ggtgaattaaattttaaatgtaaaagtgaaaacaaagtaaagtatttttttctgtcaagtaaacattcttcttttgagtacaacttcatttcacattaactatcacactgaataaggttattattgttgtagtacacatgtactttttacatttttaatacatgactgtgagaaaattttaaattttgactcatgtttaattcacttctattggg

SEQ ID NO: 165528 - DNA, 178 bp, Homo sapiens
ccatcccaagtccagtgtgcttcctgcctcagcacaccacctggaaagcaaactgccctgccctgcctgagtccactgtgagattcctcccctctggctctcacaagtttctcatgatgttgatgtttgaacctttaaggaatagactgagggaagggggcagtcaccagactggaaa

SEQ ID NO: 165529 - DNA, 224 bp, Homo sapiens
aatacattgcaattattttctgtctgactaatttcagacttcatttaaaattggaacagtctctgagctttggttgcctagggatacagcataaaaaataaaaaatttggaacataaagtaaactatattgatatatttttataaaacatttgagggcagaagaagatagtgacacacgtgtaatacatcttagtctcagtcacagtaagaaatgtttcatttc

SEQ ID NO: 165530 - DNA, 393 bp, Homo sapiens
ttgagttccagtggtagtcatgcttaaaactgcttgacataatgggctttcttctattggaatattttgtattagtttaaccttgctttgtgggatttacagtttattgaataagaacagaatatgattatttctttttaataaaatatgaaaaataaacatgggaatacattgcttttaagaagtaaatgtaaaatcaaatgactttaaacctagtacagttctctagtgacatttgtaataacttgcctaaggcattaattctaatcactttgtcattatttgcagttttattttaagcaagttttatattaattccccttactgttttagttttaaaagtaatatatgattctcttttaaattatttttatgctgcgacttcaatcttcc

SEQ ID NO: 165531 - DNA, 323 bp, Homo sapiens
ctttgacctcctggactcaaagcagtcctccgtgcctcagcctcctgagtagctgggactgcaggtgcccgccacaatgccctgttaatttttgtattttttgtagaaacagagttttgtcatgttgcccaggctggtctcaaactcctgagctcaagtgatctgcatgctttggcctcccaaagtgctggcattacagatgtgagccaccactcccagctgaggtgtacctgttttgatacatctaattacaatgaaaaatgctagtttcttaccagcattgctcagtcagtcatagaaccttgaacttaaaataatgattt

SEQ ID NO: 165532 - DNA, 128 bp, Homo sapiens
tgaatccatccagatgggcagctccccctctcttcactcctcagttctctggcttagaccttggtctgcttttatccagatcttcagtagggtttcacccgtgtcaacttagttgtctgcttgaaccg

SEQ ID NO: 165533 - DNA, 411 bp, Homo sapiens
tggagggaacaataccactcacataggcaagaattaatcaggagaggtctggataaatacacttgtttccttgagcacctctccacccacatttatactgtgcacagtactttgcaacagtagcagaaatgcagcagtagcactaccttgcagaaatgcaacagtagctgaaatgaaaatcatctctcttccaccgtttcttcagcaaaccaagtatttctattggttttcttccaattctagtgcatgcccatcaaaatgtttatgcttgcaacctgcgtagtttttggtttactgatttttttatcattttatcacaacacctttccattattaatgtgtagttgtaattgtaatggctgtatgccagttcagaacatgtgcctgaattgatgtgcaatcatttgctta

SEQ ID NO: 165534 - DNA, 277 bp, Homo sapiens
ttcagatgaaatgctgaatgatctctatagatatacagatacagacatagacaaagttagtctgggggagaaatacaaccaagttccaacactgagtgtctctatagagatacagatacagacatagacaaagttagtctgggggagaaatacaaccgagttccaacactgagtgtctctatagagatacagatacagacatagacaaagttagtctgggggagaaatacaaccgagttccaacactgagtgtctctggtgggggggttatgggatt

SEQ ID NO: 165535 - DNA, 320 bp, Homo sapiens
atctcatcttgaattgtaataatccccacatgtcaagggtggggccagatggagataatttcatcacgagggcggttccccccatactattctcatgatagtgagtgagttctcatgagatctcatgattttataatggctttcccccgttttgctctgcacttctctttgctgctgccatgtaaagaaggacgtgtttgcttccccttctgccatgattgtaagtttctgaggccttcccagccctgcagaattgtgagtcaattaaaactctttcctttataagttacccagtctcagacatttcttcatagcagcac

SEQ ID NO: 165536 - DNA, 414 bp, Homo sapiens
aaggtaaaaggcaaaatgataaaatttctagaacagtacattgaggggtatctttatgatggtgtggagaaggtaaacatttcttaagaggacacaaaaagcactaacataaaaaaaaaattgataaattctacattaaaatgaagaacgtctgttcttcaaaaggcaccatgaagagaaaaggtaggttacagaatggaagaagatatttaaattaccatgacctgccaaggagctgtagccagaatacgtaaataactcctataaattgggggtaagggcgggttgtaaatccaactggtaaaccaacaggtagatgggcaaaagatttgaacaggtaattcatgaagaaagacacccaaatagctaataaacatataaaagacactcaaaatggttaattaacaggaaaat

SEQ ID NO: 165537 - DNA, 401 bp, Homo sapiens
ctgtgtgttgcattctttcccctggataggggacaggactcctctgtaatgagggttttctaccttcaggggagtggcgtctctaggtttttatgacttgctttgcgggagatactggacataggaagaggggttctgaagctgctgaaatggcccaggtgagagttatggagtctgatttacagaggacatgaagatgaatgggctcatgctctgacaaaagggacttcccaggatgactggcttagtgagtatttcaccagggggagtgagggaacgtgaggaggcagacttcagcaagaaggatggcgggccctttaatagagaaataggagctggttttgggtggaagactctgaacttagttgtggagtgctgggaagagagccaggtgaagtccc

SEQ ID NO: 165538 - DNA, 320 bp, Homo sapiens
ttgagcttgcccagtggaatgtagcgggagatactggacataggaagaggggttctgaagctgctgaaatggcccaggtgagagttatggagtctgatttacagaggacatgaagatgaatgggctcatgctctgacaaaagggacttcccaggatgactggcttagtgagtatttcaccagggggagtgagggaacgtgaggaggcagacttcagcaagaaggatggcgggccctttaatagagaaataggagctggttttgggtggaagactctgaacttagttgtggagtgctgggaagagagccaggtgaagtccc

SEQ ID NO: 165539 - DNA, 206 bp, Homo sapiens
gaagtatactaagcaaaacttgtataagccaaccaagacccagcttggcaactgggatcaactttgcccaaagtacaaggaatctggggaacaagcagatatccagacgaaaatcggtatacatatgagaaagggaaaagggaagcaaacactagatgaacaatgtccatgatgtgctctttaaaaaaatatgatctattctagaa

SEQ ID NO: 165540 - DNA, 543 bp, Homo sapiens
ccctatgaaactggtcagagggaaataatttatacatactaatgaaaatcaaactcctcatactaatgtaaatcaaactatacagacacaataggaaatatagaaatgtaagtttaaacaaatatttatctattgactcatagtccatcaacatagtcttttgtttcaggcatgattggtagaggcatagctgtctgccacaatgtcagcatcatcagtttaggaagctatcaccctcccccaacatcctatttttctcttataatttcttatgattccttcatccacccattcctaaaccaatcatcaactcccagttatcactgtgtatggagtagtacttctttttaacctcctacccaatatgtaaaaagtaatatttcattttacttatctaaatttacctgacatccaaggtagaaaggacaagtaatttcattattttggaatttgaaaccaactctccatgtttatcttctttgtgtctttcacaattttataactttatagcttttttccctttaactttttttatctttcccg

SEQ ID NO: 165541 - DNA, 462 bp, Homo sapiens
ctggccaaagaatgcaatttttaagtctgcagttaaaactgcttaatttctgcagagaacggagtaggcagagggctcaggtgtgacatgctgggcttgaatcctcaaagcaagaacaagttcactggaggcccagaggcaggcctgctagggatacgctccctccgacctcaggcaggtcactggcagaagtgggcttggtggcttccctggattcccctgtggccaggtgaaagctggcaagggggtttgaagagaatatagagaaagcagcccaggactcagaaatccaggtcctgcccctggctctgccaccactagcctgtcacctgcagaccggcccgttcctgaatagacacaggaattccaacatcccagatccagcacctggcgcatttaggaccaagccccttaacaactcaggtattatttggccagcatgttgcctagacttgccaggac

SEQ ID NO: 165542 - DNA, 551 bp, Homo sapiens
tctaagagttatcagttataaactgttgttagttggaggaggtaggctaggtggcccatcctgtaaaataaaagtttcagctagtgaggtagggccagtagggcaatcctgctagctgaataatctcattgagattattcagctaggaggagctgaatcaccagaggacatgtaccaatgtacctttatcttctggtgcaatcacttctaaggggagaaaactatgaagaaataagaactccagaagacaatcagatggaaagttcttcttcctgtggaaagatcgtgtcttctccttctttgctgtttctacaacattgtaagacctggtatgtactcaagagaactgaaataaaaacaattacaagaaatttaagtcaccacgggaaaaaaaagagtactctggtttttgtttggttaaaaaccaaagaatccatacctaaggcagaagggaaaaccacaaacacctggaggtgcctgtgtatgctgagcctggagacagaggctccaggtctgaatcctggctttggccatttactagcagaatgaca

SEQ ID NO: 165543 - DNA, 350 bp, Homo sapiens
taatgagaaatttttgcttctcatgtgagctgaaattttaaaaattcccaatgatatggctgccttgatatcgctggggggagtataaatccatgtaatttttttgtaaagcattctggcagtatatcaagagcctaaatatgttcatgtcctttgacccaaactcgctcaagaatatggtgaagattcagcctcatttctgcgcggatcacagcctgaagtagattttgtctgtgtggatccttcaaatcattggcaaattaaggagctagagcaaggaagtgtcacgatggcgtgatgggcaagaatgggaacctaaggaagttgatgcaagaacgtgatcctattcc

SEQ ID NO: 165544 - DNA, 337 bp, Homo sapiens
cccaatttacagaaattcccagccttattcaatacccagtgttctctaactgggcaaacatgctcctttgtttcagttactccaagatttacctcccttctgtaggaaactgaagttctgcagaatggacaaagatgatttcctattaaaaaaaaaaaaaaaagcagatgtggttttctctccctatggatgacaatctagttttatcttttacttcaattctaggaaaattcattcccatcatgaaaaatatgtcagaagaaaagcagaccactctgttgtatttgggtcacataccaattttctaagctagctaatgaaaagggactatattaac

SEQ ID NO: 165545 - DNA, 433 bp, Homo sapiens
gaacagggatatagaaaaaacgattttatatcaagactgtggagtcagacagactgagtttgtatcctgaatatgtgatattagcaatttgttcaacccttatgtgcctcagttttctcatctgtaaaatggagataatgattataacattttccacatgggtttcctgtaagaaataaattagctactatatgtaaaataggaagagtgtctagcatacagtgttagatggtttgattattttagcccagataggactagaatgattatataattatactcatcaatatactaatatgttgaaaaatttgagaatttagctatgagatacaaatacatttttgtaaattctttgacattattactatatgaacatgatgaaattttactttaaaaagttgaacttgacaatttaatgacactttgtcctggt

SEQ ID NO: 165546 - DNA, 350 bp, Homo sapiens
ttaggagcatatacttttgctgaacatgttgctaaataaaataggatattgattatatagtaagttgtgtacttgagcagaaatgtcagaacttaaagataaatgaaaccagcatatcggtattttaaaccaatatggtttcaaaatggtttaatatctttgcttcatttttaatgtctaaaaggtggttgtttgaagactgtacagagttgaaataaaaagccgttaattcagacataaaataaaggggacataatttataggataggtgtatattgatttatgaggatcttttaggcctttgagaatggtagaatggtggggtttttattttttttatttatttttgg

SEQ ID NO: 165547 - DNA, 318 bp, Homo sapiens
tcttcattgtgttctttttttctggcaaatttctctcctcatggtggtgtgctcttccatctacaccctggaatcatcatgttgattacgtgagaaaccctgttgaactggggttggtactgcatcgcgttcatggattaatctgtggcactggagatatagcagcgggcatgaccgctcagccactgcccgcccaccttcaaggagcttttattctagtggtggcaacagtctagtgagaatcggagtgctagtggctggtgggggtggtgttatttttaggtgaagcaatcagggagagcttcattgatagggtaa

SEQ ID NO: 165548 - DNA, 547 bp, Homo sapiens
atacatgggaacggagctggaactgtcttatggcccaccaatgtgcaacctgggcatgtgaaggcactaatgacatacgtggcaacccttgccaatggggtcaggagccagtgtattaatgatccccatctgaggtgcattacgtacagcttcttagatcttggcagttttcagcccaattgtccatagtggtgaccaactcaacatatactcatagaagctttctctcctttcctgtttcattttccctagccccccactactggttcctgagaatcccaggctctgctttctaggggtatcccaggctaaaacaacagaggtggttacaaagctgagagaagaagcctttctcaacaggtagagtctgccccttatcccagtatagaaatctaatacttcaaggatcagcatgtagttctagtatcatctcccacatgcatgggcgataaaagaggagggagtctatatggctggggatccgttacatttcttgaagagcacctttaaaagttgggatcggccaggcatggtagcatgtgcctgt

SEQ ID NO: 165549 - DNA, 366 bp, Homo sapiens
cggcctttactgtaaatgcagataatattttatgctgccttccctgccttgcagggctgcttaatgcagcatgtattccttaaatacacataatgatgagacaggacacctaccatagtggaacattcatgcagagaggaagaaccacgtcaacaaccggctccaccactgactcagcgaagaagagaagaggaacatgcaacttgccgtgggaacaaagagaaagggacacttccttggacactcaagcgaagagtgtcatggaggatatgacatttaaactgggtcctggaagatgggtagaatattggcagggaagggaagagatggtggaaaggtatcccgggccgagggagaaaagcaaga

SEQ ID NO: 165550 - DNA, 387 bp, Homo sapiens
tgggcggcctccccggggacaggtcccgggcccagccccacaggagctcccgaggccccgcggacggtcgcgacagccccaacttcccggaaagaagaccaagatgtaagcacacctgagcagatccttttccaagtatcctgatgtctccaagggctgttcagattccaaagagaactatctacaagttaatctctgttactggagtcattcattctccgtagtaatctgctccacagaattcctcttctcttccctcccataacctgttttaccaggatccaagcctccattctttctgtaacctcattgggaagttggttcttcatttggaaggctcccatgtgtacatgttaaataaatatctatgccttttcttctgttaaa

SEQ ID NO: 165551 - DNA, 343 bp, Homo sapiens
ctatgaatgactggaccctgtattgtctaattatccttaataccaaagacaggcatctgtgagaatctgagaggtactaagaaaggctctgtgctctaaaaccatttcctccactggctttatcagagagaaaccccacatttcacatcattgttaaagagcctctacagaaattcagttaccagctgagaaaaataatgaagcctccccaacaggcctctgggaccccttgagttgccaccaggaactggggtacaacagaagaggaggttactttctcaaatgcaagagcttggcaggcctaatcggttgtagatttaagaaccaaatggccaacccaatc

SEQ ID NO: 165552 - DNA, 121 bp, Homo sapiens
agtagaatactagagaggggaggactgatcggcatgtgcaggtgtggaaaccccctaaggtaaggtacagaacacctgaaaggttgggcccgcgcggtgcctcacgcctgtaatgccagca

SEQ ID NO: 165553 - DNA, 106 bp, Homo sapiens
gggccagagagagaaaaaatgagcctatttgccctcccaccataggggacaaggatggaggcagcagtcacagtggttgctaacatctttgtgacctacctggaaa

SEQ ID NO: 165554 - DNA, 343 bp, Homo sapiens
aaattggctgatgttttttcttacagttttgttttataaattttttaacttaaaatattaatgtaatgaaagaaatcactttggaggaaatttaaaactaaaatgaattcatactgaattatgttttaagacttgtggtattccctgtaatgcataaaaagcaatgtgaggaatcactgctcaaattgataatgtttaaaatggagaataagagcatagaaaaaaaaatacgggactaattgtacaatattttaacatttttaggttttacatattgagttaacctgatcacctacttgaagcagtctagcattaactgttaaatgtttaatgaagtagttct

SEQ ID NO: 165555 - DNA, 713 bp, Homo sapiens
gaattccacaggggagattagcagtagatcacactcattctgctccaagttgactgatggagaaaatctagctaagagagcaaggcttacagctgtcactgacaagccttctgcttcctttcattgcccagcctctaattcctgagatctgtgaaacttttgctgcatagatgctatgcaaagatggaaaatttaaatttttagtgttcaggtatagtcattttctgctctgtggaaagtcatacaggagaactgatttgtgaagagaagaaaatcaggattaaacatgtgtaggctgttgtaaattgtaataatgaaactgcaacatattgtcaccttctctcctctccccttctcctttgcactcttaaggggtcccactctcagatacacagcctgtttctcctgttgcctgcctcccactggcggatgattaataactcacaaagacattgtaaatgaatttagtttactacacataaaataacttttcctgtagataagtagttgaaaacttttgatcaggaattttcttattttgatagctttaattccatttctccgtatctttgcaactctcactgaatggtgatcagtgagattggtctagtgaaccagatatatagaggatcccatgtatctgcccagaaagtagggttctgatcttctgggtgaggcaattccaagtggtctttggaggcctgtggtaagta

SEQ ID NO: 165556 - DNA, 550 bp, Homo sapiens
gcattttcaattcccttcaagaactttccagttgcattcacaatttggctgtttggcataagaggcttagctttcagtctgtctcagctttcgacctgctttcctcaccaagcttcatcatttctagcttttaattgaaagacagaggtatgaatcttccttccacttgataacatagggaccactgtagggttattaattgacctaattccaatattgttgtgtctcagggcatagggaggtccaaagagagggacagagatgagggaatgcctggtcagtgtagcagtaagaaaatatataacatttttcaatcaagttcactgtctaaacaatcacaatagtaacatcaaagatcaccataacagatataataatagtaaaaataatttgaaatatcgggaaaattaccaaaatgtgacacagagatactaagtgaacacacgctgttggaaaaatgtcaccaatagacttgctcaatgtagggttgccacaaaatttcaatttgtaaaaaaaaaaaaaaaaaaaaaaaaaaacactatctgtaaag

SEQ ID NO: 165557 - DNA, 249 bp, Homo sapiens
gggtagagtgctcagggaagagaggagagcagcggagcccaccctgctgatgggccaggtcaggtgggagacgggacaaagggacagctggtggccttagtaacggggagcacgttggaactgccatagaatagtcccgctggcagggaagtaagcgctgaaagctggcctgcagcaaggtctagagaagtggggagaggaagacagaatggaggtggctcaccaggatcttttactctggttgggagc

SEQ ID NO: 165558 - DNA, 444 bp, Homo sapiens
gttgtgaactgtagcaagtggagacgtcaacagaccgtagcctacacttgtgccagtcaccgagttttggccaatccaacgtagccaactgttcaaaccatgttcaaatgaggctgacgccgagctgtagccaatccggctggttctgtgcctcacttctgttttctgtccatcactttccttttttctgtccgtaaatcttcttctaccctgtggctgtgctggagtctctgagcccactccggcttgggcggttgccttattcaggaatcgttcactgctcaattaaactctttcaaatttaattcagctgaagtttttcttttatccaatgaaatttgctcatgacaattcatactttaaaaaagacactaaagaaaaagcataaaacttcacaatcttcagctgaaaagaaaattactacttttgtgcattaactctact

SEQ ID NO: 165559 - DNA, 165 bp, Homo sapiens
tgggatttgaaggtctgccatagagtccgaagagagggggaaaacacacgcaaaccacccaatcacagggacccctgtggctcctcacccaccctccaccctccaccttccacttattccactcctctcgattgtcaattaaaataaacagccttgtattccacg

SEQ ID NO: 165560 - DNA, 200 bp, Homo sapiens
  misc_feature (182)..(182): n is a, c, g, or t
cgacatagggagaccacgtctctattaaaaagaaattttctttttgaatagtattacagattcacagaaagttttattttcaaggaattgcagatttgcagacagttgcagtatttttaattaagccgtaatacctgaatcgttttacaagaaaatcaaaattgctttacatgcaatagctnattatggtctaccacaga

SEQ ID NO: 165561 - DNA, 245 bp, Homo sapiens
ctccgtgctcaagcaaagggactggccaaatcggtttcctgagtctctgtcttgattcccctagcctgctcaaatcacaagagaatcttttagaaaccagtgggaataatcttcccatgacaccattatcatctcagtaagaaaatcatagatcatcttcaagtaatgtgtttgcatggcattacagataatgtttcataaggacaatgccatctcaacagcatgccgaccttaaaaaggaagat

SEQ ID NO: 165562 - DNA, 187 bp, Homo sapiens
cagtaatgctcacttccctcaactcatctcctgctgtgcagcctggttcctaacaggccagggactggtacagtctgtggtctggggcttggggacccctgctttataagatacatgatttgtaaaaattttctcccattatgtggattttcctttcactttcttgatggcattctttgaaacacat

SEQ ID NO: 165563 - DNA, 922 bp, Homo sapiens
atatttttaccataaatagataaatacataaataaagttttgaatttattggtgcttagggtaggaggaagcttattccctaccccactaccccctttgggggccacgcaagaatccctatctcctgaggccctttcccaactcacctcctgacatcatggtgggcatctccttgatctggcctcctgcttcagtttgtttacctctcatttagagatcctgaacctccagcactttgggaggtgaaggcgggtggatcacttgaggtcaggagttcgagaccagcctgaccaacatggcaaaccctgtctctactaaaaatacaaaattagcggggagtggtggctggcgcctgtgaccctagctacttgggaggctgaggcaggagaatcgcttgaacccgggaggcagaggttgcagtgagccgagaccgtgccattgcacttcagcctgggcaacaagagcaaaactccatctctaaataaacaaataaaataaaaatagataccttgaacctgtctctcatattcactgctcctctggcccttgcctctccctttcttccttgctcacaattctacaggatttggtctggttctaactgctccaaggaaccctctggaacctggatatgaatggccagtaattaatttatgaaatcagaccctcagctacattctatactcaagatactaaagccaagcttaaagacattgataaaacacttaatgcaagaattattttatgaaaacactttaaaaattatttcaaacatcaaaatggtacttaaatcccattacattaacaatctcataacactatctcatgccattgaatatgtgataaaaccttcatacaatatctggtgggaatgtaagttggcacaaacatttagaaaagcaatttggcggccgggcgcagt

SEQ ID NO: 165564 - DNA, 331 bp, Homo sapiens
tccttaaactgctttatttttgttctcacaattgtctggcctgtatttgtctgtatttgtttatgtgtttatctgcttcctcctgctcagtttaagttctacgagagcaggacctcatttgtttttgttcactgctgtatgcttagcacctggcaggtagtaagtgcttagtgaatatctttgtcgaatgttttaagctgtagctactagcctgatccccattctctaagcagaggacattgaggcactgagaggttacgtaacttgcccagtgacttacatatccacacactcagagatgctgcaagccaagttttgaatccagacgaag

SEQ ID NO: 165565 - DNA, 105 bp, Homo sapiens
cagaagcagggattaatggagttttggttaatcttagactgtctgactccaaagcatgggcttagctttgaggggaggatgattggccaggggaagagctacaga

SEQ ID NO: 165566 - DNA, 190 bp, Homo sapiens
ctcccgggttcatgccattctcctgcctcagcctcccgagtagctgggactacaggcgcccaccaccacgcccggctaattttttgtatttttagtagagacagcgtttcaccgtgttagccaagatggtctcgatctcctataggcacgtgctactaacccctggctaatttttgtcttttaagtagag

SEQ ID NO: 165567 - DNA, 340 bp, Homo sapiens
ccctttaaatagcaagctctcctaaggtaactgaaacaatgtaattaacttttcaaggacatatctaacttgggcaacctgtagtcttttgcttaagaagactctactactcactctccaattaggattccactcctgatcctactccaacactttagagtctcattcctgtgtgaaaatacagcctttcttaggcaaattcaagtcatttccaggcctgcccacagttattatggggcaaggtgttgggatagaggaaagggaggcaaattccaactcagacccagggatcatctagtttgtagccaaacccaggttcagtaacttcatattttttttt

SEQ ID NO: 165568 - DNA, 176 bp, Homo sapiens
aaatggaaagagatgagaattgtataacttcaaccacaagcatttgttgtcaaagacacaaattcaaccaaaggactgaaacattagccaatatgctttcccagcactcaaattcaattcagaaatgagacttcccattaccaatatcatcccatcccatcgggagcatgcagctt

SEQ ID NO: 165569 - DNA, 397 bp, Homo sapiens
tggctgaacctgtggctgaagttgccctaaaagtaggggcagaggaattcctgtaagggactgccccgaacctagttggggttccagaacactaaatctcagggtaatcagtcaaaagcatttagtgctgcagcagtcctctcagcagacagcaggaaaagatgtgtccaaggtgagggagttgatttgagtgttgaaggaatttggttcagggccagggatagtttctgtgtgtttggtgaagagtataagggcagatgcgctgatgaaaaccattacgagaagagtcaactttgtgttaaagtgttcaaagatgtcaccttaagcagaaaagagctttaatacgtcttctttgacttattaggcatttccagagtccacatagttcagcgtctga

SEQ ID NO: 165570 - DNA, 367 bp, Homo sapiens
gtatctgtgattggtttctctcaccctattccctttccctgtatggactctcccactctgaaccccttaacaattggtatctggtagggcgcggtggctcacgcctgtaatcccagcactttaggaggccgaggtgggcggatcacctgaagtcaggagttggtgaccagcctggccaacatggtgaaaccctgtctctgctaaaaatacaaaaattagccaggtgtggtggcaggcgcctgtaatcccagctactcgggaagctgatgcaggagaatcgcttgaacccgggaggtggaggttgcggtgagccgagattgcaccactgcactccagcctgagcgacagagggagactccgtctcaaa

SEQ ID NO: 165571 - DNA, 427 bp, Homo sapiens
tacatatactcccgcaagactaatgaccccctcactcccaccaaaacaagctatgtagtaaatactttttttaaaaaatactagttgtttattttcaaggaaatatttcctctcactttttctaataaccaactcttattttaactcttctgtgtctctccattgattagttcagccatccacacacacatttgaccagtctcatcatgtcattccactgtttaaacccttttattggctttcttttgctcttacaatacaatcccaaattccagaaatggctcacaaagatgtgtttccagcccctgcttacctttcttgctttatctcttactattcccctattgatgagttttttgggcattggtgaactacttaaagtcttccatgggccatgtgctctcatgctgccgtgctcattccctct

SEQ ID NO: 165572 - DNA, 321 bp, Homo sapiens
ggcagggtgatggggaatacatttggaggccttggtaaggattctgatgtctttattttagaagaaatgagaagccactgagtagtttctcactgagctccccactgtgccatctctctgatgatcagattttcatgttaactttggttgcggtgtggacctgagtgacttggagactggagcagggctggcatggcgtgagtccaggttgaagtgactagtacctcggacgaggtgtcttgggcaaggtggagtctgggccctctgtgtcttttcagtttttccctctatagatttctgaagctgcattggctggcccac

SEQ ID NO: 165573 - DNA, 327 bp, Homo sapiens
ttaaggcatgaaattcattttttcaaaatgcaatctaatacctaatagcagtaagagtagagctgctttgcttgacataggagccagggtctggaagtccccttactgttgggcctccgaggcatcctctctcaatagggctcctagaagcacacttttaaagtcacactaggctgggcacggtggctcatacctgtaatcccagcactttgggagaccaaggagggtggatcacctgaagttaggagttcaagaccagcctggccaacctggggaaactctgtctctactaaaaatacaaaaattagccaggcgtggtggcacatg

SEQ ID NO: 165574 - DNA, 282 bp, Homo sapiens
tataacatactacaactaacatagcaaattcaagggtgtgaccagagacttcatgttcaactccatgggggtttcacagatttcactgtaaataaaatctatgaatatggtatcccctagagctgtgcaactcagacaaacagggcaccatgtagatcaaagtgtgttggctggcttctttttcagggcagtttaaggtacaccttcatttatttatttgtttatgttttagagatggggtctgtgtcacccaggttggagtagagtggcatgatcatagct

SEQ ID NO: 165575 - DNA, 158 bp, Homo sapiens
ccatcgtgaggattaaatgagatgaaaatgagtatctcaagcacctagaacagtgccctcatgaatcaccagctgactgggtggatacatgaatccacatggaaggggcctggcatatgggaggtgctaaacatggttccttatccgggggacgggtg

SEQ ID NO: 165576 - DNA, 187 bp, Homo sapiens
gtttaatcctctttagaagatggcttataatcaactatagaactagcaggtgttcttaaatgcaggtttctaataactttggaaattgtaacattggaataaaggaaacaacttttagaactctcattaagaggtggagtgttcatgaatggaatgttcagttaacaggagttaactgaattaactg

SEQ ID NO: 165577 - DNA, 340 bp, Homo sapiens
ctgtgtttctccaccgacttgtcatactgctcccactacttaacatcagaacgtgttttagttgaggggtggtggatagtgagttatttttatgaaataaaattcctaatgaaaggaggaactttttcggatagctgtaatttagtcacagctttatttctcagactggcctgttccaggcagaaagctgacaggccagtgtcctgacccactgtactcagtcctcttgggctggccatgtgatgacaatttcttagccccaccctattgaccttcatcaaagaagataaaacaggcatgattattttgtttctctcggtatattaaaaagtcataaatg

SEQ ID NO: 165578 - DNA, 295 bp, Homo sapiens
attacagagtgtgcttacacaaacctagatggtaaagtctactacacacctaggctgtaaggtatatcctatagtgcctaggctacactcatgtacagcattttactgtcctgaatacgataggcagttataacacaatggttaagtatttgtgtatataaacatagaaaagttacagtaaaaatactgtattataactatagtttccgttgttgaccaaaacgttgttaggtggccgatgaccgtaattgttttgttttgttttctcttggggtgcctagaataaaacataaga

SEQ ID NO: 165579 - DNA, 487 bp, Homo sapiens
tcatatgtacaacaccgtgtaagaactgctaagtaggatttggttgtttgggccttttattttaccaaattccaaaaaggactaatggaaacttagaaaatttattaagaatgaaaataatcacaccttataaaccagttatgctttctacaatagctaacatagaaaaatggagtttcaaaaagatactaaatcatggctaagtgaagagttctctgtatagtgattagttttttggcaccctgattgaatgtcatttaaaacatcatttttaaaaacttctaagcaacttatgttgaatgtttataaaagctacagggaagctgaaactattttaaggggtaaactgtgcctagattcaagtaacactcagcaattttcagctgaaatgttaacgggggaggatgggagattttctctcttattcaggcaagtagaaagtcacagtcttgtgactggaaataagtcagtcatacagggttttgca

SEQ ID NO: 165580 - DNA, 661 bp, Homo sapiens
tgagccatagctaccatttccactcaccacggggtatcctattggctgggcctggaaagtggtgtttttgtcggacatggccaggtttaactctgtgcccttaagacaacactctgagcctccaggatgatgtggaaacaccagcaggtatagttagggcatctccacacctgctgtataaatagggaatatatatactttttagcagtgtaattggcatgcagtaggaacacaaataggaattctgttcctttcctgtccctgcagtgtggttgctgagacatgaataaactagggaaagactttgagaggtgttgtgaccactctttagacagaatggaccactatccaaaatttagttcagatatcaagattgatgatgctatacatacactaaagggatacgaacaggttttctacttacataatgggagcttctcagcagagcaggacaagcctaccaaactagtcccaagatggcttgagagaagaggaaaagagacagctcggggtttttattgccattagggggtacatacagaatgagggctcctgcataggaacgggggcttgcctggtttgagtctcccgctggtgtcgaggaaggagcaccttttcttatcagctagcccagatgtgtagggcacaaggaggaagagga

SEQ ID NO: 165581 - DNA, 558 bp, Homo sapiens
ttttgcagttttagtagatatggggtttcaccatgttggccaggctggtctcgaactcctgacctcaggtgatccgcccgcctcggcctcccaaagtgctgggattacaggcgtgagccaccgcgcctggcttctttctttttttaagagacagggtctcactctgtcacccaagcttttgtgttcagtggtgtgatcatggctcactgtaacttccaactgctgggctcaagtgatcatcctgtctcagctccccaagtagctggaactacaggcacacatcacaacacctggctgatttttgatttttttttccagagatgggggtcttgccatgttgcccaggctggtcttgaactcctgggctcaagtgatcctctcacctcagccttctgattagctgggattacaggtgttaaccactgcacctggccaattcttttttgttgtttttgtttcagagaaaatcatatgaattctctttgaggttacactcttttgaactatgtcttgggcagaacttcttcttttttcctatttgctgtgatatgtttgata

SEQ ID NO: 165582 - DNA, 606 bp, Homo sapiens
tgttaattccacaaggcaacaagcagctcctctttccactatgtagagaaactaggctagctactttgattaagtatgaacgtacctctatactggatggaatctggacttacaattggcgaatgtgtatagcatattcaacccatagacagctttccgcactgttcatctatatatgtccaaagaattacttgagaccatgtccacaaagaactaacttgcctctgtaaagtctttgaaggggaagttttagagaacaatgaagacccaggaggatgatatggggtgcaggtagaaatatagaatgaatcatggctttttaagatacatggttacttttccctgttgcaagttaggtctgagtagccaaaagtcggctttggcaaaaggcatctccatttcagtgatcagctaccaccaggcagaactctaaatagaattctcagtttcatgttttccctttgtcaaattaaatggcctccatgaaagagaagtaccattctctcaggcttctgacagtatccctttcgtggaggccagaaatgagagggtagcaatcaaagaataagcattaaaattatatcctgcctttagataatcctgata

SEQ ID NO: 165583 - DNA, 118 bp, Homo sapiens
tctgcaccctcttctacacacctctggggtgagtccacatttgcccagtagaaatacctgctatctgatgtttgactcaactctaagactcattcaacaaatatttattgtgctttta

SEQ ID NO: 165584 - DNA, 113 bp, Homo sapiens
ccctggaccaccagaagaatggaaatacccttaagaaagaaaggcaaatatgaacatcaggatgtgcagcaagagatcagaaacgagaatactgccattcctaccctcgctca

SEQ ID NO: 165585 - DNA, 193 bp, Homo sapiens
atgaattttgtgtttagacttgggtcctatccccaagacatctcattacagatatgcaaatattccaaaatgtgaaaaaatccaaaattcaaaacacttctggtcccaagcatttcagataagggatattcaacttgtgtaataacagtagctaacgtgtatgggcatctacgatattccacgagctactcta

SEQ ID NO: 165586 - DNA, 410 bp, Homo sapiens
aggagtgtggctgtgaacaaggggaggctgaagaggctgggaatcacccacattctgaatgctgcgcatggcaccggcgtttacactggccccgaattctacactggcctggagatccagtacctgggtgtagaggtggatgactttcctgaggtggacatttcccagcatttccggaaggcgtctgagttcctggatgaggcgctgctgacttacagagggaaagtcctggtcagcagcgaaatgggcatcagccggtcagcagtgctggtggtcgcctacctgatgatcttccacaacatggccatcctggaggctttgatgaccgtgcgtaagaagcgggccatctaccccaatgagggcttcctgaagcagctgcgggagctcaatgagaagttgatggaggagag

SEQ ID NO: 165587 - DNA, 564 bp, Homo sapiens
atgcttcccaacaccaagattctatttctctgtgattcatttatcttagcttctcattccttttctgctttatcacccttccccctgttcttgtatttctcctccctctgttgctcggtttgtgaggagaaagtagaaatgcactccagtgtttcaaatacagggccagtggggattgtgatgtctcccatctgtaatatggggtcagtgatgctcagccctcctgtgtcttgagcccggatgaacttcagaggcaaagtaaacaccttaagtgcagcatattaaaacagcacttaccaaagaaaacaaacaaacaagaacactacaaggaagccactgtcattacatcattttctcttgtgttttcatttcagggaaagtcctggtcagcagcgaaatgggcatcagccggtcagcagtgctggtggtcgcctacctgatgatcttccacaacatggccatcctggaggctttgatgaccgtgcgtaagaagcgggccatctaccccaatgagggcttcctgaagcagctgcgggagctcaatgagaagttgatggaggagag

SEQ ID NO: 165588 - DNA, 581 bp, Homo sapiens
gaacctcctgacctcagttgatctacctgccttggcctcccaaagtgctgggattacagacttgagccactgcacctggccgcatatatatattttatttttttatttaaaaaaatgtttctgagacaggatctcactatgttgctgaggctggagttcagtggtgtgatcatggcccaccgcagccttggcttcctgggcttaggtgatcctcccatctcagcctcccaagtagctaggaccacaggcaccatcgtgcttggctaatgtttagtatttttttgtagagtcgagatttttgccatgttgcccaggtagtctcgaacttaggagttcaaaacgatttgcctgccttggcctcttcaagtgctgagattacaggcttgagtcacctcacatggctgcaaagcgattttttttgagacacatttagttttttcggtgatgtcagtaattttacaattaaagaaaaagttatctgaacaaagggagagtgcccttaaattgctaagagggagcattgctttgtttttttctagtttcgttgtgtcttacagtgttcaaacactgtactggaagta

SEQ ID NO: 165589 - DNA, 425 bp, Homo sapiens
ttgtgagtaattgaaagcttaattctcaggaaataatttctaaatccagatgaaacttgtgaggcagaaactccatgttattaaaaaccaaaagacaaatctgttcatcagtatcaatggccacttcttttcctcttccatgcaacacaattaggtgttttgtgtctcctttggctttggctttaaaggatgtgtcagacaaggaaaagtccttaagtgatgatgcttcagctgcaaaaaacgagcaatatatttaacagctaagtgtgagatttctgggtcagtgtgccataaatcctacagttccagaattgcaaagctttttcatgatttgaagctcaacacagagtgatttcaatgtaaatcctcccctccctgccctcctccatggctgtgtcacacaatgccctgatgtctggtttccc

SEQ ID NO: 165590 - DNA, 424 bp, Homo sapiens
gtacggaaaggaaaaaagccaacccagaattctaagtccagcaaaaatataatttaaaatgttgccaataataattgtgaatgccattatcctgaatgtcgaaatcccaaagattaaaacccggcctggcatggtggctcatgcctgtaatcccagcactttgggaggccaagtcaggcagatcacttgtgatcaggagttcaagaccaccctggccaacatggtaaaacctcatctctattaaaaaaaaaaataaaaaataaataaaaataaaataaaaaaaataaaaaagcttggcatggtggcacttgctactccagccactccagaggctgaggcaggatcaccccttgaacccaggaggcagaggttgcagtgagctgaaatcgcaccactgcactccagcctgggtgacagagtaaga

SEQ ID NO: 165591 - DNA, 554 bp, Homo sapiens
cacattagcagattaaagcagaaaaatatctcaatagatattttcaatttatttgttttaaaaatcaaaacctattcataattagtcttagaaaatgagatacagaaacaaaagtgaatctgataaagactatccaaaatcaatggctaaaatacatgtaaagaagagttctcagaaacattgcttttaaaatcaggatcaaaacagacatcatcactacataatccagcattggctatgagactcttgctggtacaagattgtattaataagaaattagggaaaaagtaataaactgccattacttgaggatggcaacagaaaaacaacaagaattaatactagttgaataacactggtgaatagaagatcaatttataatttctattccaaagcaataagtgtcataaaggatatcatttgcaatagcacaaaaatagggcatattgaagacatttagttgaaatatagagaaaaagtaaaaagttttattgaaagacaaaaatctataagctgaaaagtaaactatactcatgggtaagaagatcaagttt

SEQ ID NO: 165592 - DNA, 196 bp, Homo sapiens
aacctctgtccctctttccttgtcaggaagactgtctgtggagcaagaattaggaacaggaaaggggagatacgcatctgtggcactgatgcagcaggaaaataggggagaaaagaaacatctctggcagaaaaagtgaggattgtgtgaccacattattaccctgggcacgggcagtcactggagggtccactca

SEQ ID NO: 165593 - DNA, 335 bp, Homo sapiens
gacgtactgaaacccgctacaacatggatcaatctcagaaatatgcgaagtgaaagaagatacaaaataccacatattataaaactctatgtatatgaaatgtccagaataggaaaatctatagaaataggaaatcgtttagtggttacctaaggctaggggtgagaatggggagtgaccgcaaatggacatgagatttcttttgggggttatgggaatgttctacaattggactgtggtgatgattgcacaactatgtaactatactaaaagttactgaattgtacccttcaaatattatgcaaaatataactcaaaaagctgtattttaagaa

SEQ ID NO: 165594 - DNA, 280 bp, Homo sapiens
gcaaatttggtatagttaactctgccattgccagaggctgttcacttagatttgtcttgtaacatttttctgtagtaagtaaaggcagggatcctgtacccattttataggttaaataatgcagagttgccaagaaataagagggttggaatcacatactgggttggttggtaggtaggtcatatgatccaggaactcttggtccttgcaaggagataggaggaaatgctcaaatttgtctccccaaatgggggcctgggttgaggtttataagcatatg

SEQ ID NO: 165595 - DNA, 385 bp, Homo sapiens
caagacctctttattgaaatgcaggcagacttgcacctgcctgtaaaagtgcaagctgtatacttgtgtgtgttggcccagaacagtcaacacaaaacatgcctttgtaaagtcactggactttaaagataaagaaataatcctttaggcagccagacagaaagaccaagtatcttataaagcaaagaaaaccaacttgacatcagacttctccaaagtgacattcaataccagaagaaaaaagaagcaatgcctccttatctagaatttgtgggtagaattctgtcccccaaaaaggtatgttacactttgggaaactgaggtaagtggatcacttgagatcaggagtttgagaccagcctggccaacatggtgaaaccctagc

SEQ ID NO: 165596 - DNA, 195 bp, Homo sapiens
cacacccaacactcccacagccatcttcagcgggcgagcctggaaagaactgggcctgtcagtcatttagacttctgcactggtttgcagagcagtggtgtttccagctcactttccagcatggctagagggttagaaaaaaaaattattattattattttttaacatattcggcacaagagccccaggtgccct

SEQ ID NO: 165597 - DNA, 257 bp, Homo sapiens
ctgggtgccttcagctgggggtgggctcaagtaattggtgttgagtggaaaacactgaaattcctgtgttaggttgaactgtgggcccctccaaaatatgcctacctgccactatggagcccaaccttatttggaacagggtctttgcagatgtaattaaggtaagaatctcaacataagatctcccagcgtttagggtggaccctaaatccaacgacttgctgtccttataagacacaggagagggaagtttgaga

SEQ ID NO: 165598 - DNA, 396 bp, Homo sapiens
atgcaagataagcagatgcaagaaaaggcaaaggaggtctacatgacctttctttccagtaaggcctcgccacaagtcaaaaagaatatattttcactcaacaaaagatcttttcactcaacaaaaagatcctggaagaaccacatcctctgatgttccaggaactccaggactggattttcaatctcacgaagtacaacagctacagtagctgcttaaagtttgactaggtttgttgttgtttattttttaagagacagggcctcactctgtcactccagcaggcatgcagtggcacaatcctagctcactgcagcctggaacttctgggctccagccgtccttctgcctgagtctcctgagtagctaggactacaggtgttcaacaccatgctt

SEQ ID NO: 165599 - DNA, 259 bp, Homo sapiens
tccagtaattgtgctctttttctactggaccatgcccattagcacacagactgtaatacatacctcaaataaaaaacatataaactctccttctacttcacatccctctccagacactaccctacttcttggctccactttacagccaaacttaaaagaattgtctatatttggtaacccgagtcctctccctcttattgtctcaaatattctcccatctggctttcatccccaccactcactccacccaaactgatct

SEQ ID NO: 165600 - DNA, 599 bp, Homo sapiens
ctttgtcagatgagtagactgcaaaaattttctcccattctgtaggttgcctgttcactctgatcgtagtttcttctgctgtccagaagctctttagtttaattagatcccatttgtcaattttggcttttgttgccattgcttttggtgttttagacatgaaattactgcttctttaactcaggctgctttaaattattttttccccttgcattaaaagaaccttgactaacatatctcctattaccctctatatgctgccagaaggtagtcttacttaaacattaatttaaccttgaacttcttccactcacaatcttttaatgactccctatggttttagcctcctgataaccttccaattcctaagaagaaagagcttacctctccagcctcatcttctgtcacataaattcatgcaccataggtagtatccctaacttactaagcttctgtgcctttgtatacactattccccctgccgcaaatgctatatatcccttctcccactggattactgtatctttaagactttgctcagttgacacttctactaagaagcttttcttgggttcttcaggctaaatcaggtgctccct

SEQ ID NO: 165601 - DNA, 458 bp, Homo sapiens
agctggaaaggaacattgctaagtaggaatttcaggcacctgtgaactgagcccactcaataatcggccctttcccttaaccaaactcagcaaaggaagaaagaccaagttgctgcggatgcacagagccacgtgggtgcgggtcctctagaaacaggaattcagagtcagtagatatggaaatgttatggtttgcagtcttcggaccatgctgctttcatgctgttcacatgattctcctcggactgcgaggtaaagtccaagaaacaagtcgaatgtttgtattttcatagaaaaaacatctgtaagggtgcacaccgactgttaaccacggttacgcggggaggggaaacaagggagttacatttttttactcccttgactttggattttgtatttttccagttgtatttactttcataatttagaaagctaataaaacatgtttaaagaaacag

SEQ ID NO: 165602 - DNA, 341 bp, Homo sapiens
gactccatctcaaaaaagaaaaaaaaaatcaacaatgaaatatcattacacacttaccagaacagtttatcagaatagttaaaaacaaatagtggcatcaccaaatgctgttgaggatgtaaggaaattgctctcatgcattgctagtggaaatgtaacatggtacaaccactctgaaaagagttttacagtttcttatgaaactaaacatgctactgttgtatgacctagcaattgcactcttgatgtattttcctagagaaatgaaaggtttacacaaaaaattagacacaaatgtttataaaagctttatttgtaagagccacaaactggaacaatag

SEQ ID NO: 165603 - DNA, 296 bp, Homo sapiens
ctctatagcctacttatctctttgggaatatggtattggggatgagagctggacttcctagaccaaaactgtgatatggctgaaaagagagtttcaggggatacttccctctaatatcctgaatagaccagaaaaacatttcccaacactagaagcttctagtgtgtcctgttttagccagaactttggaagggagtacgtcaaacctttttttccctctttcttattatcctgatcctgtaaacactactaagagagttttgaagaaaatgtaaaagagactggtacttgagaaa

SEQ ID NO: 165604 - DNA, 338 bp, Homo sapiens
gtcgacctgggctgctggattgtctcgttatctgtttcacatgagacatattatattacgattcagatcgtattttaagttacatggataatagttcctaatggttttttttaaaattgtggttgaatatatataacataaaatttaccagtaaaaccatttttttaatgaacagttctgtggcattaagtacatccatgctgttgtgcaaccatcaccatcatccacctccaaaactttcaaaatcatatcaaacagaaactctgtacacattaaataagaacttcctgctcccctctccctgcacccctggcaaccaccatgctactttctgtctc

SEQ ID NO: 165605 - DNA, 700 bp, Homo sapiens
acttaaacactgatgaccttaggaaagccatctccagtctctaaacctgtaatgtgtggcttttggatcaggaagcctctaacattccctttcgatgaacatgaataatcatggaaaatttacaggtcataaagcataatcttgttgaatgctttttcatttggacacattgcaatatcgtcaccattatctgttgctattatactatccctgaaatgtcactattggtctgaacgtggaaatgaacagaaaataatagaataaaggcacaggaacaaacattgactgaatgcttttcgtgaagcaggccaagtgcactgtgctcaaacactttatctcctctaaccctcgcagcagcactgttatgtaggaattttattgatgaggaaagcgataactcaaattatacttaggaaggctatattggataggtttatcatggggaaaaagataattcaaaggcttttgatgaaagtaacattttattttcttgattttgttttaaatctttctttttgttgtttagttttaaaacgaaaatcttcaatatttttgtctagtattgatttaggcaattggtgatattcagtatataaatcttattctaatctttttttagatgttcttaactttgaaatgttaaatgaattaatctaatgtaaaaaataagcaagatattatttatttcagcaactgcttt

SEQ ID NO: 165606 - DNA, 346 bp, Homo sapiens
catgggtattacatttggcatcctcaatttataacagtctattttaaattaataccaacctaactttaatagcatataaaaacttggctcctggagagctccattctgtcctccttcatgatgctgctgttgtcatcacaattaacatgtttatatattgtgtgctcagtattgatttataattatttttatacatttaaattctacaggaaataaaaagtggaattacaaactaatgttataataatacctacttttatatttgcccatatgtttacctttactggagatctttacttcttcatatgactttaagcaactgtctggcatctttcctccctgtccc

SEQ ID NO: 165607 - DNA, 309 bp, Homo sapiens
ttaaatggagtttgtagcccaggctggagcgcaatggtgcgatctcaatctgtgggtcccagttcaagcaattctgcctcggcctctcaaagtgctgggattacaggtgtgagtcaccatccccagccagatcctgttaacagtattccaggtccttgccccaggcaggctaagccccctccttttctgaggcatttccctgttggcagttcttgcctctagcacccagtactgctttaacctttgactaaaatgagcttagtttgactttggtaaataggggaacaagttcatccctgcttttttttt

SEQ ID NO: 165608 - DNA, 552 bp, Homo sapiens
atgagtgtagaaaagagaaaatttgagcccagggctgtctcacagcaggggctgggattttaaccacaacactacagtgaacttcactgaaagtgtcaaggctttttacattctaatcattatctccacaaataacccccaagtatttggttatcttcttaaactgaactctttccagtttgcagctttggatcagataaggcctagggaatcagcaagccaagcttgttagtaaggcctgtaaagggagcagaagcaggtcccaggccgaaaccaaatgatttccacagtgcacacttggcctctggtgactgaactttctggcacctattttgggtcttcagaggctcctttgccttcctcttggttctcagctatgtcctgggaaactgagattatcagagaagtgactttcagataagccaggtgcccccatggcactgactccagccctgggtctgcccctgtccctgataccccaggtccgattggtccccaagtcctgcagaacacttatgaggacccctatatccagggctcccaccttgtccc

SEQ ID NO: 165609 - DNA, 871 bp, Homo sapiens
taaagataaatattctttagtagaatgttcttgttatactttcagtcagaatccaggcccttagattcttccctgtgtaacagttgcctagaaagtattaaaacacttgtttcggccaggtgcagtggctcacacctgtaatcgcagcactttgggaagccaagatgggcagatcacaaggtcaggagttcgagacaagcctggccaacacagtgacaagcctgtctctactaaaaatacaaaaaaattagctaagtgtagtggtacacccctgtaatcttagctactcaggaggctgaggcccgagaattgcttgaactcgggaggcggagggtgcggtaagctgagatcacaccactgcactccagcctgggagacagagtgagactctgtctcagaaaacaaacaaacaaacacatgtttctgggccctgccctgggaaattatgagtcggtagttctggagtggagtccaggaatctgcatttactaagttcccaaagtaagtctgaacttactaagttctactacttcttaagctttcctttggtgtttttttagtcagcattctgctgaatccttttggttttaagccatgagtctctctgtagtcatttttagacaacattgatgtaaattattcatgattttggattaggcaatgatttctcagatatgacaagcacacgccacaaaagacaaataaattggacttcaccgaaatgaatagtttgtgattcaaaggacactatcgagaaagtgacatgacaatttaagaatttacaaataatatatctgataaaggactagtatccagaacatataaagaacccttaaaattcaacaataaaaaggtaagtatctcactttta

SEQ ID NO: 165610 - DNA, 380 bp, Homo sapiens
  misc_feature (366)..(366): n is a, c, g, or t
taaaaattcaaagccccactcaaatgccacctattccatggactgtcccccagccctgcaagaactagcccatcaataatagcattcataacaacagccaacatctgtgaatgtgtgtcaattggtactttacacagacagtatcttatttaatcctcacagacaaccctatgaagcaggtaccactgttgtttccatttgaagatgaaaaatagtgaccaggcacagtggctcatgccagcactttgggcggacaaggcaggtgggtcacctgaggtaaggagtttgagaccagcctgaccaacatggcgaaaccctgtctctaccaaaaatacaaaattagcagggtatggtgtgctattgaancttctaaaactagg

SEQ ID NO: 165611 - DNA, 528 bp, Homo sapiens
ctaggaactccacacatacttctggggagaggggtgaccaaactttcctgagctggcacatgatccttcaactggttgtgctgaaatggaaactatgtttatgttgatggctagtcagtctttggggggccctcacttgctctctttgtaagggttcctcttttgagaaccgtaagttttatggatcaagaaagaaccatgttttatcagacttaatcatgtaataggcattttctagatgtggaaatagtggaagtagtttggtacacaatagcctcaagcatgacatcaaatgcagaagaggagaaagttacttcaaacatgccctatggctcaaatccatttttcccacaaagatttccatttctgccacaaagatttgaaaaagttaccatttgagcaattttcactaacagatctttagcaaaaaatattgcctgaagaaaatatgatataggaaagcattccttatattaaaaattgtcaaatatacaagcacaaggaacaacaacaaaaaaagtatttaaa

SEQ ID NO: 165612 - DNA, 606 bp, Homo sapiens
ctgtactcagtgctgggatgacatgtcacttactttgtccaatacaagtctcagtaccatctcatgaggaaagaacatgattaatccaccttcacagaagtggataaggaggctcaggggtcctgcagcattttcgtggtcacatggctgctaagcagcagaaccaggaataccaagtctgtctgataccagagctggattccaaccgattccctagacatcctccccccaggccaaatccattgaacatcagctgcactcagagacggcaccaaccaagcacttcctgtgtatctttgaacttaaatgaaatctaagtactctgcagccttgttctgtctcaaaagcccaataatctccatttctccacaattctcagcaattagctaacataattcttatgcctttatgaacatatattcatataaaattatggactgaatttcccatatctaccataggacaaaaataaccccatgaaattctggcattttttgctttcaggcctattattctttctagacattaataatgattataagcagaagaagtttagtccaaagaaatgagcaatgggtacaaaataaatagaaagaatgaaagacc

SEQ ID NO: 165613 - DNA, 478 bp, Homo sapiens
atcaatcatctatcgaatccatcatctctatctaacctatatctcatctatctatatcatctatccatctatctgttatctctattatcaatctaatctataatctatcaatctatccatacctatatatttcatctatctaatctatcattctatccatcatctctatctatccatccatcatctctatcgtctatatctctattacctactatctctatcattaatctatcatctatctctatcatccctctatctatccatccatccatccatcatccatgcatctttctctctctaatctatgtatctatcatgtctctgtctctccctctctctctctttcttcctacctacctatctatttgtctacctaacctacctatctaaaatgtctacagtgatccttaagaaaaagccaactttctgcttatcaatcctcataatctgggccccaccttgatggttgtcgctgcat

SEQ ID NO: 165614 - DNA, 556 bp, Homo sapiens
cctatgccttctcattgtctcctgaacatataactatcatttcacagaaaagattaatggtcctgattaggaatagtacataattttgatggcattattagttaattattttctttacattgtagtatatttccagagtcacccatgcttacatttgtaatatattttcctgatttgagagtttgtttttagcagtttttcttacctatactgcactgctgaatcaggaaaatttaagaaaaagaatagatttaaatgtgtaatatcaaagagaaatatagatgatcattaaatttttagaaattttggggagttaaggagaagcattgtttgttaaaaatatataaccgattcttatatttaaaataggtaatttttgcatagttgtgttctaaatatattataaactagtgccagtaactctaataaagctagtattactgcatatcactggtgggatagaatctaaggacaaaaactcacagtagtaaaatctaaaattgctttcatggtctcagggtaaaattatccaatttctctgacaaataaatggctc

SEQ ID NO: 165615 - DNA, 415 bp, Homo sapiens
gagggggcttccgggttcgagtgaagcaatctcttttggtccctctgtctcaggtaaatactcccaggctgtcgccagtgttactggacactgaggagagagatgagaaaagaaagtagtggccctttcctgaaggagatagagcaagacgattttccagtatttgtgtttgcagtgtaagaatttagttaagtctatgtagctgctaatgttttccagctactaaatccagttcttttccaataatcatcattaatagccctaatctaacagcaatgtgtaaaagcaagacttttgcttttgttgtcttcaaaacttccagtccaacatcactgagcacctgctctctgtcaagccctgaagagacaaagaggagccaggagctggatagaaaatctcttagaaaagaaatacc

SEQ ID NO: 165616 - DNA, 157 bp, Homo sapiens
cctcagcttggaacatgttcccccattccctccctctccaatttcctatgccctcaatttaaaagttacctgaatctaggacctttcttcctctgcaagactaggttagaggccccctgcagtgtgccgttgagcatcctgtggtttctggtgagta

SEQ ID NO: 165617 - DNA, 133 bp, Homo sapiens
gcagaattcatctgaaatttttttgtaatgtaattccaggtaaatttgattatttgcagaaaaagtgtacttaataatttggagctctagaatagtagaggggaaagagcatagattcaaagagacctcgctt

SEQ ID NO: 165618 - DNA, 498 bp, Homo sapiens
ccagatcaagaaacagagcattatcaacacaccagaaacatctctcacactccattctagttaccacctctgcctaaggtaaccgttgccctggtttctaacagatatattagttttgtctggtttttttaaaaaaaatcttgtgtaaatggaataattcaatatgcactcttgggtctggcttctttcgctcaacacaacaaccttttattaggtcaaataatttggactccccctttaaagatgatggaaacagtctggcttgcagaaattagtgaggcattacttaatatgatagaattaaggaaaaacactaaccaaactgaagccatatttatattctgatgacagtctggttagggagaccaaacagacacaagtgaaatgtctaatgtgacaccagtgtaggaagcaggaaaattcagaggcgttccttccactaaggcaacccagagtgtatttcaccgtcctttcgtgagggccagcaacccccataat

SEQ ID NO: 165619 - DNA, 286 bp, Homo sapiens
tatgttgtcattcctgactccagccagattgaacctggccttaaattgacaatgatcttgtaggagtaaaatttcacctgtattccttgccagaggaccagagctttttagaagaattccttagaaaatgaaaaaaaaaaaagattcaataacttcttgagacatgtgcattccttccagagcatttgtgaggagtgttcagctgctgcaaacatcccatgaatcctcagctacttggaacaggtgtacaactctgagccacggtggggaggcagactagcaataa

SEQ ID NO: 165620 - DNA, 756 bp, Homo sapiens
gcagcagtcgggggcggagcctcggcctccctgggcttccttcttggacccaggccggatgactggagcccaggacgggctgttcccgtctcagtgtcccatctctgcagaaagagaggcccccttggccacatgaacccccatcgctgcgggaaggccatattggctaccaggggccgggccctgccacctggcctagccagcctcacatcctcgctccccaacggtctgcagtcaggccccagcattcctgggctctggttttgcaattcactaggataacgcggcccttccatcaatgaatcatggactataaaccactgtgccagcgcttgagctgttccccgcaccgccccacagtccgtgattcacctcagggtggtggtgatggggctcggagcccaagagaggatgctcgggcctcaacccagcctccaggctcaaaagccgctcacggccgatctcaggggccaggttccgggaggtgggggctcggccctcccttgccaaagctcaggcctgtggggtctcatgggggtgggtgtggaggggctagcattccaaaagcctatgcccgggcctgcatccccgtgtcagaacacagagaagcttccagaaagaggatggcaccctccattaaacaagaaggcaatcccaccactctaaacagccatgcacatccctcgcctccagccggccacaaggctaagcaccagtgccatggatgccaaggtgggccagagtgaaggcggccgc

SEQ ID NO: 165621 - DNA, 379 bp, Homo sapiens
atagtcctttttgtaatgggaagtgaaaacaaatcaaaggactggctacataaactaggatacaggtatacaatgacgtaactacttaggtggggctacacgtatggatataaaaagatcttaaaaatatatgtgaaggctgggcaacagagtgagactctgtctcaaaaaaaaaaaaaaaagaattggaataggtggcttcaattcctatatgtaattccccagatatttaaataaagttaaaatggatgtcctggtgattttcagtcccatgccatggcagtgtcaactaggcctcagttacttttcagttggcccgaatggaccccatctcaacattgggcaatccttaccaagcaactacttcactcgaaacccg

SEQ ID NO: 165622 - DNA, 203 bp, Homo sapiens
gtagatccccaatccaagggccagcaggtgagacagaagcagagatggaagaaacaccttcaaaaattctttttagaaaatacacccttttggccaggtgcagtgcctgtaatcccagcattttgggaggctgaggtggggggatcacttgagcccaggggttcaagaccatcctgggcaacatagcgagatcctgtctctac

SEQ ID NO: 165623 - DNA, 340 bp, Homo sapiens
attcttaaattccaaagattatttacaatgtttctgaagataaactgtgtaagaatctgcatataatgaggctgaagttgagtaagaagagaactggcatttaggacactacttttcttctgtcaagtactgtcaagttttgtttctgcctggaaatagatgcacctcaagggagggttgcatgtaaaggtgtgtgtgtgtgtgtgtgtgtgtgcgcgtgcgcgcgcgcatgtatgtgggataagaaggggtgtgtagtttatccatgtaacattatcatatattaacacatatatctacattaatttcttacttattaaatgtccatagaaaatatctg

SEQ ID NO: 165624 - DNA, 594 bp, Homo sapiens
actagtgatgatcttggcaatggttttgagcttggcgagcctcagtttccttgtctgtgtaacgaaagatgggggtgtgtctacatcacagggttatcatgaggcataactgagacattgctcaggaagcacttcttattggtattacttacgaacgggccatgattgcataatgaatctgatggctacatgcttttgaaattacaaaaccaatgccatccaattgattggtgatctgcctgggataggagcaagttaatgcattgaccatggggggcttagcacagcgccgtttccctgggagacttgggctgaaccgaatttgttcagccaaagattctgcctcctccctgggaactaggaacaaaagggccttgcttgaaagaggctgttgttccttcaccaagtttagaaagccaaagttcagtttctgcaaccagttccaggagttatgtggcagggctagactttttccttttttcttgtgcctaattttgggccagttcttctggttagatgattgaggtgaccagaacatacaggaaaataaacagaaacccccaaactgccctttgaagctgtccatcctcgctg

SEQ ID NO: 165625 - DNA, 286 bp, Homo sapiens
gacggcagatggccatatagaggctgggcacgggatgggtctgcctgaagcaaggggtgccttctaatttgcacaaaggagccatatgggctggtggtggctctgtggaggggcacccacaactcctgcctgcatgcatgtggagacacagagggtgcctgggggtggcgtttgcaattggcacggtggttgttctagatagaatctgcctgcctctgacttcaccccgatgccatctttctgggtgaatgagcacaggcggcgtcagaggccactgtgtaagcag

SEQ ID NO: 165626 - DNA, 223 bp, Homo sapiens
cactgccttcaagcagctcataccctagtggaagaagcctaaatggtaaaatagctcattacaatacaatagattagtaatgctaaactagtcactttatgtactttcaattactggagcacagagtagtaagccaatcactttgaaggggcaacaaaggaaagaatccagttggatttctgagggtgagtaggagtttgccaagtaagaaaaggacatgcca

SEQ ID NO: 165627 - DNA, 473 bp, Homo sapiens
acctatgtagcaaataatgaaagcaagacctgaaaggatcagactgtttctaagtgatctaactacatccctgaacaaaactcaaggtttatataaaggaatataaaaataactaccacccaacaaagtaaaatctgtaatgtctagcatcttagtcaaagattaccatgcatgccaagaggcagtacaatgtgatcaataattatgaaaataaaaccaacttagaactgataaagatgttagaattagtagacaatgacagttaaaatatttatgataactatgttccctctattcaaaaagttgagacctagaagatataaaaacccaaatcaaatttctctaaacaaaaactgtaatgtttcagttgaaaaatataccagatgagattattagcatgttagacattgcagaagtaaaaattagtgaacttgaagacttagcaatgaaactatccaaaatgaaacaagagc

SEQ ID NO: 165628 - DNA, 510 bp, Homo sapiens
atttttctatagaacttgaacctttgaaaacaatcacttttcttttttagctgcgaaattccatactgggaagatctaaaatggccattaaagccattctattctgtttacaacaaatcagaattggacagctttccaaatccataaaataactagtgtactacttatagagtgtaaacatgactttaccaagattaaaataaacacatgtaaggccagctgcagtgctgtcaacacaccactataaagcctgataaacgttgaggaaaatcctgctgctgtgatgtaaacaatgatcttatggaggatcttttatttaaaaaatttaatcaaaatattgcatgcaaatggataaaaataagaaacatctgtatgaaaccacaaaagaccctgaatagccaaagcaatctagagcaaaaagaacaaagctggaggcattatactaccttacctcaaaatatgctacaaagtgatagtaatcgaaacagcatgggtactggtataaaaaca

SEQ ID NO: 165629 - DNA, 364 bp, Homo sapiens
aaaaacacatggtcactaatctacctagtgtgtatgtttttttcctcctcctctagtaggccccattatctggaacctggacagaatacagaatattggataagattattagaattgtcctcaatagacattttgtcagtcagcatgtggaatgaagagatagagaagcaagggaatttagggtgttattgcccagagagagattgagaagatagactgtggaatttaaaatgctgagtgcccggacagggctaatgaataggagaaaggggagaaaggggttagtatactgagaatcttcttaaataaaaatgaagaatgggagtactggcacaagcaagttggatggttggtaggttgtgat

SEQ ID NO: 165630 - DNA, 562 bp, Homo sapiens
tatgcgcgagtactggttgctgcattaaaagacaaacttgtcacgattggctttgatagcgataaaggcgactaacaaattcattgaaatgttgtttccctccggtaacctgaatctgtccttagcctgcacagaaaggggaagtgcgagtggagttggggaaatgagacggcgaatgtcaagtgcttaccacgtagtgcagactcaggctgacagggggccacagaaatgcaaatatgtgagcagtgtgggtaactgcatcctggggaggaagtcctatgtgctggaataccacaagcacccatttctgccctgtggtactgcgcagcgttggtgtgaagcgatacataggcgtgaagtcccgagaacgcaattttcctggttaaaggacagcaacgtctacatttcttccaagaggcctactttgttggaacttcacttcacttgtgaaattagggtgttgggcagtgagtgaccactaactcagctcccttcttgtgaatcttggcaacagaaaacttttcgtttgtattactgaataaagtgtgtttcttaaaaaaaa

SEQ ID NO: 165631 - DNA, 747 bp, Homo sapiens
caaagaacgagaggaactgccactgcttaaccctttgttgggctgtgctaatgaaattgaagggaacatggtgagcatgcgaggactgtgagagccagaaagaaacccccaaaataatttcattcaatagtttcatccaaactctcccagtttgcaaatgaggaagtgacttgacaaaggccgggcaccaagttgaagcagaaccagattttggccaaggtccctgggctcccagctgggtgctgggcattggatcccaggcctgctgtgagggctggctctcttagggaaaggggaagggtcccatggctctcccatcatgctgaaggttgacacctgacaagtcactgcagctttcccttgttctgctctgattctcattctactctaaggaggcacagccaccattatcctgattttatggctgaacaggccgagcttcagggtagaaactcatcctcatccacaaagccatgggaaggcttgattagaatttaccactctgtccccagacactctgggctgttcccaccttcaggtagaactcactgcctcaaaagccaccttttactgttctttgtcttatcttctgggattgtgattttccctgtaggaaaaatcatggacaatggcagtagactggcgtggtggctcacacctgtaatctcagcactctgggaggccaggcaggttgagaccagcctggccaacatggtgaaaccctgtctctactcaaaatataaaaat

SEQ ID NO: 165632 - DNA, 264 bp, Homo sapiens
gtgaaacctaacattagctttttgagatgttttttagacttttgcatttctgactccacacagaccctcaattcatgactcaaccagtcctgtggcccccacaggtgggctgagagcatgagaactgttttccagacccctgtgatttcatccccaatcaatgaacatcccccattccctagccccctgcccaccaaactgtccttgtaaaaccctaacctccaaacttatggggagactgattttagtaattacttcatctcc

SEQ ID NO: 165633 - DNA, 387 bp, Homo sapiens
agatggagtcttgctctgtctcccaggctggagtgcagtggtgcaatcttggctcactgcaaccttcacctgctgggttgaagcaattctcctgcctcaggctcccaagtagctggggctacagtcgtgtgccaccatgcccggctaattttttgtatttttagtagagacggggtttcaccatgctgggcaggctggtttcaaactcctgacctcgtgatcctcccgcctcggcctcccaaagtgctggtattacaagtttgagccaccgcgcccagcccagatgtttaaagtttaaggagtttcagcttatgttttttgccccctttttaaaaatttatgtcctcaatttttttcttacaaatttttatttttgccactttcttc

SEQ ID NO: 165634 - DNA, 198 bp, Homo sapiens
ccaggattagaggggaaaggaatagaggtgcattgcatatcctcttcctttcttcatgtacttgaaggacaagttgatcagcaatgaggggagggggacaggggacgttttgagaaccagaaaagtatttagagcttaaaactgaataaaattttagtaactgaagtggacaggaaattatgggctatgatctagata

SEQ ID NO: 165635 - DNA, 399 bp, Homo sapiens
acagtaagaagtgagtaaatctggcccactggcaaattgtggcctctgcctatttttgcaaataaagttttactgggacaaagccaagcctatcatttgcaaattgtctataaatattttcatgttacagaatcacacagtttcaacagagaccatcttgtctacaaagctgaaaatatctactatctggcccttgaagaaagtttgccaaaccttagtttatataataaaagatcagctatctcatagacacctatctcacacaacacattgtgggaaaggaccttctttttttttggagacggggtcttgctctgttgaccaggctggactgtagtggcatgatcatggctcactgcagcctcagccaagatttactcatcgggggtcctctagagt

SEQ ID NO: 165636 - DNA, 391 bp, Homo sapiens
agatggtcacgtacaaacagggacagaacaataaagttggataaggaagaatttactgctatgggagtacacttctattcaagatttgacagcctagcatggatcctgaaggatgatgtcgacacactactcaaatggctcttggaaacctggaaaaaggtaatggtccacacaaaatgaaataaacattaacaccatggcagatggtggaggaaggtatcaaaagactcagaaaagtggcatcttgaagtggatacactgtttggaagatagcctaccagctaattatgttcccaaagagggctcaaaggatgcaaaagtgatgtggaatgggctggtgagagggatattatcagctttgagaagttcagtggtactatcctctgtaggc

SEQ ID NO: 165637 - DNA, 422 bp, Homo sapiens
gcagattttgttgccaatgttctggggctgttccctggacaccctgctgtacctggtcactgcgcctggtcctaggggaggccttcaataagtgcatttactgaggggagaatgaggcctagagaggtgggaggactttcccaacgtcacccagctgggagcttggtctgaagaaggaaggggctgttgcatcttctaactgggatttctcaggctttcaaggatagaattgagtgtcaatggcaaggcagattttgtggggtggtgagaaaaatggccagtcacagcaactttgtattcaaatcctctttaacaccatcggaggccagcaatattttgggattattgagggccaatgatggcctgcgggacaaatccaacccactgactgattttgtgaataaagttttattagaacacag

SEQ ID NO: 165638 - DNA, 206 bp, Homo sapiens
ccaccgtgcctggcccaagttccaataaaattttatttacaaaaatggtggtggaccagatttggcctctggtctgtaatttgttgacccctgctttaaagttatctattgttaagtcacatttctggtttttttttttaattcaacaacattaatatcttttaagcctctgatttatagctaatgatattggatttggtggattt

SEQ ID NO: 165639 - DNA, 405 bp, Homo sapiens
gagacggagtctcgctctgttgcccagactcgagagcagtggtgctaccttggctcactgcaacctccgcctcctggcttcaagcaattctcctgcctcagcttcccgagtagttgggattatcaatagagttttcaacagatttttaatctaattgaaaaatcctttgctttgatcgaatctcctctatatgatggtgttcctccacttttgtgaggtgaggcagtccacattttttatattccagacaatgttaccttttaactacctttcatgtaacaaactgtcataacagcagacttcattgatcaggaatgggcaaacatttctgctatgatatgaccatacagtgcctatcatccagctattcagagtcactatctttgtatgtacaggaatctgctg

SEQ ID NO: 165640 - DNA, 373 bp, Homo sapiens
acactgaggcgtacccctagaaatcaatttatttatcaacagaccttttgagactgcttcaataaaataccaaatacctctaattgtcttatagccaatctttattattctatagtccacgtaatgacagatgttctaaaatatactatgtatccactgcttattggtctgccataataggtacttaggtactatataaatacctcttgaagcgaattcaaatgaacaataatcataccaaaagagaaaagattttcttgccccatgacttacagccacgtagcagcttacagttttaccacttcctcttctaggtggggaaaaataattcctttaataatctatgctaagctgtgatccaacttttaagttt

SEQ ID NO: 165641 - DNA, 395 bp, Homo sapiens
catacatacatatacatatatacacatacatacacatacatatatacacatacacacacatttttaaatgcccaccaaaagtcaccatgtgtaaacaatcttatgagaagggaattagaaccgaatggtacactggcaatgttcaggaggacgttgctgtaataaataaagtttcatttgaaagttttcataattcagatggtaactggctgaaaatatatgaggcaaaccagtttcaacagaaaataactttagccagaagtcacagaaatatacaaatagttaatattcacttttaaagtcagaaattccaactcaggtggcaagcaattatttcataagcgcagaatattatagtttgaagggaactttgagattacttgatctaacttcta

SEQ ID NO: 165642 - DNA, 453 bp, Homo sapiens
aactgtatcagtcttgactttttttgaactgccttccacagagatgggtttcaagagattgttcacaatcatggagtaactcttcccatttaaattctttaccaaaagatcaaatgacctctctgtgaaatgcacctgcacattctcagtgggaacttgatgaactccagttaaggtaatgtagattttcacaaacttatctgactgatcccatccataattactgattttcaccgtatagcccgttgtaatgggagcaaccacagcagctggtttttcattatcaagaagttctgctttcttctgcgatttctgttgcaacttgttcttgatttcggtctcaatcttggatttttcagctgtaagggcatcacgtactcttcctagtagccttttccagcaacacctttacctcttctagatctttctgtagctcttctgaagccatggggg

SEQ ID NO: 165643 - DNA, 204 bp, Homo sapiens
atcatcagctttcttgaagtggtagatactttgaatgaatcgattttttttttttttgactctcagactcatccgtagatatagacttttgcttaagcagaatttatggattttcttttcttctagtggtgatgacaaatttattttgttctatcatttttgtcaggttcttctagctataaaaacatgcattgtgagtcagtg

SEQ ID NO: 165644 - DNA, 236 bp, Homo sapiens
tgtcttttgtcagggcagcagtggtggtccaggcattggtagcagcagagatggcagaagaatggaaaagaaaagagggcagggaaaataagtgaatcagaagctagagcagcctttgaaaagggagtgtcctagaattgagggcaagagaattgaggaagagaagggaattcctaccacaaggcaaccggggaattccctggttggggttgccattcactctgtcactgactggg

SEQ ID NO: 165645 - DNA, 485 bp, Homo sapiens
agagatgattaaggccaaaccaaaccaatacctggcctttgcctccccgagaccgctttccgtagattatttgggatccccaaccagtgatttccagaaaccgaagtagcttgccaaccagtcccctgttccccctagatcttgttaagaccctaccgtggggggaggtctaccccttctcatcttcatcaggtagtcagaccagccaactgattctaccaatccgctttatgattttggagggctcttcactccaaatgactatgctgggggcccaagccatagccgtggaggctcctccgagagggaattcccctgagatcctctggcctcctctggaccccctgggggtttggaagggggaaaaaaaaaaaaaccttatctcctcttttactttgaagagctgaaataacccgcttctgtttcaacttccctcacttcacttccacatttctctagctctctgcctattttattttcttatc

SEQ ID NO: 165646 - DNA, 308 bp, Homo sapiens
ttgcctcccgaggatatcatgaccagcagagactgagaaactacagataattcagagctcagaaatcaggggcagtgaggtaccagtctgggcatcagactgcactgccttatctcgaattattgccacaatttcaacctttccctttccttaaaccccaagctcatacctgtgcccttccttctctcccagaagaaaaccttatctcctcttttactttgaagagctgaaataacccgcttctgtttcaacttccctcacttcacttccacatttctctagctctctgcctattttattttcttatc

SEQ ID NO: 165647 - DNA, 462 bp, Homo sapiens
actgacagaggagcggcctgtgtcctggcaagacaatagacttggtatcagccaggcctgggataatgttctcaatctctgatcatggcaccctgggcttggtggtaaagtcactttggcctaatcatgtctgtaaaatggaaatccaggtacctccttggctggattgtcatggtcatgatatgaaatgacacgtgtgagaaaggcccatggaatctgagagcattagacaacagctagttcttagggtcaccaagtggtcaatcaggctttcctttaaaatcatgctcatggtgacaaataagtcaccagctgttgaggcaagctgtttgagttgtggacataatggttctgccccactgaatcatacatggggaagctatgctggagggaggtaagaaacttgccccaagtcccaaagctagtaagagatagactggaacctgggtcctgggcctgact

SEQ ID NO: 165648 - DNA, 320 bp, Homo sapiens
gcagtggagacaaagtgaggaaagttcctctgtctattttgttgtggatggaaagggtagtgagataatggactggacgatttaagtgttccaggtaggttttgcttaggtctatctctgggtgacaggtttcctttggagaacttacaaagcaacttataaaagcaagcccattctccaggtcctaaggacaaaggaatgtaattctgtagacattttatgcttctataaaaactcgaagacactttctagaaatctacttcaggttatggaaatttggtgcataaaaactaaaattaggcgctacaggagtttacaga

SEQ ID NO: 165649 - DNA, 321 bp, Homo sapiens
taggggaaactccccctgttttctggtccttccagctgttcctgattccttccttcagcttaactgatccccaggccagtttctgtgactcccctccctccctggctggacaggccaatgatattaggagctgctcaggaggagggatcagacctcttccactgctgccccctaacatttgatcccagggcttaacactctgatgcaacacctgcctcacctttggctgtttccctggtggcaggtgcacagtggggcagtgtgtgggacctggagcttgcagcttccaggctggaaaacctgaagggaccttctcatctt

SEQ ID NO: 165650 - DNA, 361 bp, Homo sapiens
tggggtaagtcactggggagcccttttgcaccagttcaagctttcctcagccaggaatgctcagccaggggtccattcagctaaggaggatgtggcaagctgccaccattaacgaacactgatagcgtgctttacccgggtcaccccattgaaccctgcagtagcctgcctctaagacataaattgcagaattcacttcacagaagaaaaggcgggctcagagaggctacctaaggtgctcaccaacacacagctcataagtggctcgacaagtcttccaatgctgctgcgccagagcctggacctactgctacagctcccaagcaaccagtgggctttaccatgcactggtgaacgcagc

SEQ ID NO: 165651 - DNA, 474 bp, Homo sapiens
atgctctgcttcccttttaaacgtaagtttcaatttcagataatctaagttcaaagttccacagctctttagggcaggggggaaaatgctgccagtctctgcttaagcatagcaagagtgacctttgctctagttcccaataggtttctcatctccatctccagacccaaagtcgcttttacattgctgggtatctttacagcagtacccaactctaccagcacgaatttactataatagtccattctcacactgcaataaaaatcttcccaagactgggtaatttataaagcaaaaaggttaaattgactcacagttactcatagctggggaggcctcaggaaacttacaatcatggcaaaaggcaaaggagaagcaaactggaccttcttacatggcagcaggagaaagaacatgtgtgtgcagaaaaaacttcgatttataaaaccatcagaattcatgagaattcactca

SEQ ID NO: 165652 - DNA, 377 bp, Homo sapiens
aagcattggagtccttggagctgcccgcaggactgctgcccttgatcaccaactctcctcacttgtcagaactcagctattaggaccccaagtcaggtcagggctgtcagggagacctcggcttgtaactgacagatgctgggctgtcaggctgtatgtgctggaggaggtaggaggtggccttggtcccaagggcacagcttttgagtgagaggacagttgccagggaaaggggatgcatgccctctcctgtctctctgtgtgtgtgtgtgtgtgtggtgtgttttgggggctgaggcacagaggaagaggatgcatgtggctgaatttcttatccctctgtttcttctttgcatttaattcaaaggccaaaaaaa

SEQ ID NO: 165653 - DNA, 334 bp, Homo sapiens
  misc_feature (308)..(308): n is a, c, g, or t
ttactaaatatcgatgagtgtgcatctttttctaaataccatggggataattgtaataaataagattcagattctgcctcagcaaacttgtgatctattagacagatggtggtagtcagacaagtacacaaatcgcctcaattacatgcaaaatgtgataaatgcaatgattaaggcacgaaaaactatagtgatttaaaaagggaattgttacatctaattagagtacttaagagaggcatcttataaagtaagggttctcaacactggctgctcattagtatcacactgggagtggtgcgatgttngtgcagttgcacaagttgtcgagatt

SEQ ID NO: 165654 - DNA, 437 bp, Homo sapiens
aatgagatcacataacttatgcagatcatgtggacatgcagtcaacaaacaatttgttgatgacctaaacttacactgttatgctggtggttaggatgccatctaaacattcttgacttagttgagttattgcaagacacttacacatttaaaagttctgatttaccgtgtgcaatgcttgtatttgatttgcttagcaggcatatttcatataacatatgatttcattgcatgaaattttacattatttcctcattagaagtactttatatggtaaaaatttcccactcgatatcagataacttcttgagacttggtgtctgattttgtacaagggaaaaagaattatctggtgcagtttctgtttttatcccagctacagcatataaccattttctttctgatactgcaattctagggtgctttgtttgttcctc

SEQ ID NO: 165655 - DNA, 210 bp, Homo sapiens
ttattccattgtggtccaagaaaataactgatatgattttgatatttttaaatttgttgacacttgttttgtggactatgtatcacatgatctgtcctacagattattccatgtgctgatgaaaagaatgtatattctgcagttgttgaataaaatattctgtaagtgtctattaggaccattttgtctaaagttcagtttgaacccaat

SEQ ID NO: 165656 - DNA, 498 bp, Homo sapiens
cagcctcttacatcaggattacaaacctgggagggactctttggggagaataaatataaatttgagccaataccaaccttatccttaaaaaacagacaaatatcatccctttcccagtgaattttgtgcaattaaagcttctggaatgaagtgatgattaggtgtagggtacacactgtattagactgaatatttctgaagcaagaagctttgctttactcatttttgttctgctaaaggcagtaagaagacacccatgagcctgggaccccgactttccctgtggaaatgtttttcaggactcctgcacttaatctagggttggggatatttgatgaaaggtggggtaggtgtcttaagaaaattgtactcttgatatctcgctcctccactccctgaagtaaggagttggtcacttgcatgcctgggagtaggcagcaatatttctatatatgtgtctgactcttagctttcattgagacttttctttctcatttc

SEQ ID NO: 165657 - DNA, 335 bp, Homo sapiens
caaaaatttagaggatgttggtccttaaatgaccatttttttcttctgagagttcactgatgcttttgaataaatgtccttctagtctaaaaggagaggtcatagtataacaaaatgcaaataaaaatataagcatatattgagtgtttactttactcaatacatgcttactttatgccaggcactattttaagtacttcttgtgtattaatgcatttaatcctcataacaactctctgaggtaaatattactatttctattttatatatgaggaaattgaatcacagaggttaaggaatttgcccatttcacatagccaagaagtggttaagcc

SEQ ID NO: 165658 - DNA, 363 bp, Homo sapiens
atgcaccttggaaagaaagtgattttctgaaaaggctctttgctagccttaaaattctgtgggtttatgagatcctagcaacagaaaggcattttattttctttttaacagcaatttttgtggcatctagaagcaagtgcagtaagtctctgggtttgaagggagcttcagtgtgttggtcagtcaggcaaagcgtgggtgaaacttaggaatcctgtgtttctctttgaactcaacagaaccgctacatttcttgacttccaccttcccaaatgtatgtttaaaacaaaaacaaaagtattctgtctccagtttacaaaggcaaccttcctgaacagaccaacatggattagtgccgcctgt

SEQ ID NO: 165659 - DNA, 126 bp, Homo sapiens
caggaaggccagtattgtttcagtaatcctataaatgccattttaaataattattttaaattccctaataatgggagattatgctaaacatcatttttagctattcatgaacaacaaagcagtgct

SEQ ID NO: 165660 - DNA, 193 bp, Homo sapiens
gtggggatggtgtggcaggggtgggtagggatgaaagccatatcatatcaaagcaagcagtgagggctatctacatgactactgcatcttctcggtatgccagtctaatttttatttgactacgcacaatctggcactcaaacataagatatctacaaaatcacaaatctcaggttttgtttgcttcttctgc

SEQ ID NO: 165661 - DNA, 123 bp, Homo sapiens
aacacgtcacacgttatagctacacagaaacaactgtggattacaagtcccagcagcttctaagcttctgggaggaaatctgtagccctgacccagtgtgcctccctcgctagtgtatctcca

SEQ ID NO: 165662 - DNA, 447 bp, Homo sapiens
gacctaaacccagaccatctgtttttttactggaaatgacgtttggatcaaaagctctgtatcttaaatgaatggtcattaaggcttatgttagttaccaccgtctaagacccctcagactccagagggaaacatgagctcacaaaacagtaagacatgactgagctttctggggtttatctgtcattcctcggctccttctaccaaggttctctgttacttaaaatggaaaggacagggcagaggctttggcctagggtctaatccagctgggcaagtcacagggttctaagactccgtgcttagctgtcttatgtttcaccccttgctttcttggtttcactagtttctgatgcttctgtaagagcaaagtcaagattcttcaagcagcctgcatctatgtttccctcacaaagtaattataaacttgactggcttagatcatga

SEQ ID NO: 165663 - DNA, 364 bp, Homo sapiens
accgcccaggacatcttctgtagtgcgagctgtgccctcactcgtgaccacgctgtgtgggctcatcctggctggggctggtcccggctgtgctgagcgtagatgaggttcccctgcatcctgcgctggttctgtcgtcgtgttgtgtaaaagcctcacagtgcgtagtgttctcctgcggtgactgggaacgcagtttcttgtccgcagtttttaccatgagatatctcgactggtgggtttgcacttgagcttgtggggctggtgggcagacgtctgccgggccttccagccttcagcttcatgtgtgggacgcggagccccatgagcttgaggggctggtggggagatgtccgccgggcct

SEQ ID NO: 165664 - DNA, 394 bp, Homo sapiens
agtagggtggggatatgggatggtatattcacaagcagaaggggagctcagaaaagaaacttagttataagaaaattaaattgactctgtggcactgggagtggcacctgctacacagaattgaagagttaaggtttgtactgatgtaactgcctctaggcagagatcatcatcatgctatgtcgtgtaaggacagctatgcagttggggagccacagaaggcttcagggagggggtaaaatgtgagcaggggtctcaggctgttaagagttttcagagatggagatagcaaatagggaggttggagaaaaatgcatttcagaaatgagaaatccttagtcaaggatgcaggggcaggaaagctttgcatacataaagcaatagctcctctgac

SEQ ID NO: 165665 - DNA, 577 bp, Homo sapiens
catgggccatctcattcaacttccattacagttgagaattaggtattggcagccctgctttagatggagaataccaagcacagcatgattaaattggcaactggtatgcatgcagaaccaagatttttcatactggtgtgtacatcaaagttttcattatgtagaaaattatacagaagctgtatattgagaagtaaataggtaaacaatcaactgttgagaattaggatacctgagttattaagagatgtgaaaaggattcaggatacaactaatacttattgaatactgctatgcttttaataccctctaccagaaaggagttaggtagagttcaagttcttagaacagtacctgatacataatgtaacaaaatcttactcatcaattactactattaatgttaccactccactaaatcctgccaacaatcctgtgaggcacatacagttacagttatccccattttagaaataagaatgatgcttagggaagtgaaggtaatacactcaaggacacggaactgggtaaaggaggatcaattttgtgtataagaactaaaatggggctgagcgcg

SEQ ID NO: 165666 - DNA, 181 bp, Homo sapiens
gatgattaaatcaggataattggggttatcccatcacctcagcatttatttcttctaagcatttaattacagatcttagaattgttagtggctttagactctttactttgtcaaatgagaaaaacaaggcctagagaacctaagtaacttgcctaatgatttagaatccagaactgctatg

SEQ ID NO: 165667 - DNA, 506 bp, Homo sapiens
agggacaatgctgactctggatggtgtgtgatactgacacttctgctgcagaggtgacgtttgtcccctctcactccagcaggaggctgaacgagaagttgggaacacagggctctagtcctaattccatcagacttgtttcaggaccccagtaagtccatgaacgtctccaaacccgtaagggtgagaagaattccacctgggccatcttccataaatgattccagctagaaaggccaggtgcaagggctctgaaaagagtggcagggccctatgacctaagggttactgctcagacaaccagtctccacccttgctcagactgaggctcacgtttttgatgtcactggtctcaagctgctggcttctctgagaacataaagaaaaatgaagtgacagttcccttttaatcctggtggctcagaagagcctgcagggtacccaacggaaagcctaggacatgttattcctgggccatgtgaggtcagctctgttcctaggagcct

SEQ ID NO: 165668 - DNA, 145 bp, Homo sapiens
tatctgtttgttgccatctttgcccagaggtgatttaattttcttctgcctgtcagttagaataggacagtaccttacttgtgcaataggaacatttgcatattgacttttttttttttttttttttgagaaggagtctcactct

SEQ ID NO: 165669 - DNA, 313 bp, Homo sapiens
ggcagctccggctcatcaaacctcactgcagcctggtctggcaggaccatcccataggatcacctacctggcccaccactgtgaccttacctggagctgtaaggccagcaaagagggcacaggaccttctactttcttgagaggtactcacccctgtaaattaataaatgacgtggcatctggtctatcagccatctctcattggctcagttagccaagttggaccgcctgagcccagtgacctgggagggcctcaaagagggatttctgggcccctcctaagctgagggtcatcccttggaatggaacgtgg

SEQ ID NO: 165670 - DNA, 227 bp, Homo sapiens
gttctggattctcctctatcagtaccttttgttttattctggtctcttctgcttttcctgtcttccattaagaacttcctctctctctatctgcgtctcatgcttagaatactctcctctatttttcctctctctctatccaaattctactcacccttcaagcaaggttcagaagcctcatcctctcccaaagcacgtttcccaatgactccacctcccactgatct

SEQ ID NO: 165671 - DNA, 526 bp, Homo sapiens
agcattctccaagtcaatgtacagaaagctctctgtgactccagaactgttggccatggcaaaaataaaaccatcccatcatatgaactaagcttaatagttactaatcattactaaatgaaaagtcagatgatactgcttaaaagaacactatacctaaaggaaaattaacaactgtaggcctaaccagttagggctccgtaacccagtgaaatggcctgtgctgctaaaaggtggatggcaatgacatcgcccagcataggaggacaagaaggaagcttgttgccagggaaaaagcaatacaagcagggaagcttttccgctcccagcagatatctgaagctttagattgttttttcttgctggcctgacaggcctcaagtcagatgagaaagttaaaggctgaagtggttatgtttaggtttggtcatgcattaatcaactccaaattcctcttgaggtataaaagactattttttccctctttaacaagacattcactctcacttctatccctgtctgccaa

SEQ ID NO: 165672 - DNA, 577 bp, Homo sapiens
cggtatgaaggatcaagaagctggagtgggctgagaaggtaaaagtgccttggacattaaaaaagccttttaaggtatgattagaacaagaacaagaatcaggaagtgatcggcccactcatgggctcttgctgcaatattaacagaaagcagaactactcagcttcctccttttcctcaaagaaaatgccccagagatggcagaagggagcccagctgtgttcaagaggggattaaaaccacaggctgaggagctctcccagggcctgccacaggcgaggttcaggaaatctctggccggacacatggatgaaagaacttgcatttctgctcaaagaactgtatttggtggcttttaagaaattgtgaagaatatgaaaagtattggaacactggaagcaggcagatgttctcattttcaaaaaagcagggaaatggattctgaataggaacaaaggcctgcttcattcccttgataagtttctagactcagtaattaaggaaaagggaagtgaaggcattcactaataggcagcctggttcatctatttttaaaaaaataaaatctcacacagaa

SEQ ID NO: 165673 - DNA, 496 bp, Homo sapiens
tcatcagagcagaaggagacgtcaccctgacctggagaaacctgacctgatctgtttactccaacctacacgtatcctttggggctaaactggaatcaattaactccctaagatatagagaagaataagccatcctccttgagaacatttacccaagagacatttccaggatgcccagatgtcctcttcagttcattcccaaagtaactgctcccaaggaaggttaccaaccataccacccgcagctaattttatggttgataaacatgtttcaaccttgagctcctagataatgtgtttctatgggtcaactgggcagcctcgggagtgctgacctttgaaatgtgggcatcacaatctgatacgtgagatggtttagtgcctctggcgtccacatagctccgtaagtcctgcttctcacaaagccgcctcccctgctaaccctgactgttcccaaatataaatgagaaaattaaacatttacctcaatgagaaa

SEQ ID NO: 165674 - DNA, 459 bp, Homo sapiens
  misc_feature (9)..(9): n is a, c, g, or t
  misc_feature (99)..(99): n is a, c, g, or t
  misc_feature (110)..(110): n is a, c, g, or t
  misc_feature (114)..(114): n is a, c, g, or t
  misc_feature (117)..(117): n is a, c, g, or t
  misc_feature (120)..(120): n is a, c, g, or t
  misc_feature (131)..(131): n is a, c, g, or t
  misc_feature (144)..(144): n is a, c, g, or t
  misc_feature (176)..(176): n is a, c, g, or t
  misc_feature (180)..(180): n is a, c, g, or t
caaagaaantcctcatattaaaataacatttccatatgcactttctagaagagtgtagcatccatctaccatccatcccaggaatgtttgtatcttgcncatagtattancaanaanttntgatgggtganaaaaatgcacttntctatttattggaaaagtgtagagttattganttanattctcaagtgggactccagcatcaatcagactcctctgcatcccgtctcaccggcgagactgttggtgtgatgagctgcaagcatccaggtttgtttgcttcctgccacacgtggcaattcttaaaactagtttttggtgttaggataagcacacccgacaaacacctgctgaagtgtaagcttgctcatcagggagaatactctgattgatgtggactttctaggatagcagagcccaagtggctttgtgcaattgatagtagtcatgtgtatgtta

SEQ ID NO: 165675 - DNA, 731 bp, Homo sapiens
ggtactaattatatttcaaacagtctatactctaaaccacagtaagcagaataaggcagatttctgcttacattaagcagaatgaggtaaaatttcttacctctggctggaattttataataccgattacttcaggttgatcaggagctttcagtaagcttttgattaatatgcacctgccttcgtctttgcactcagggtttattctctcatccctcactctcttcctgaaaatgcccgcttagctatttttattttttaaattaggcagcctcctgcaccggaataggctcagagagattcccacttggctctgttcttctggttcccgctcaaaagagaccttccctatccccccacatctggaatagaacactcccccaccccactctgccttactattgacccctgtcaccctgcttgattctcctccagagcattgaccatccagctggaaggtcagctccatgagagcaaagacttggctttcaagttccctgctgtatcccgtgtctaaaccagggtctggcacataggtgttgaatagacagttgaatgtatgtgtttgtttaataaaagaaaaaaaatgggccgggcgtggtagctcccagcactttgggagaccgaggcaggcggatcacgaggtcaggagatcgagaccatcctggctaacatggtgaaaccctgtctctattgcaaatacaaaaaattagctggccgtggtggtgggc

SEQ ID NO: 165676 - DNA, 612 bp, Homo sapiens
agtatgatatcctgttgggcattctggacaacttagacccactagtgttcttcaaatgtccttccccagggtctgccagcctggagcagctcccagaggtctactcagaaggacccaattcctaaccagcctccctttctctgtcagtggggacattatcagccaagcttgaagctattaatgaactaattaattttgactacatatatgccaagcccgtagtctgagacagagagccaagctaatgcggtagtgaaaatcaaggaagcacctctcagccttttagagaatgatcacccagaattcgtggtctcagtgaaggaagactttgtggaagatgacttcattccagacctgggtatctccaatctacttccatccagccactgcccgaagccatcttcctgtctactggatgtttacagtgactgtgggtatgagggctcccctttccccttcagcgacatggcctctccacttggtgcaaaccattctaaggaggagactggccaatgaactctttcaccagctggttagtgtctaaggagtgatccaatactgttgctcttttccttgactattacactgcctggaggatagcagagaagcctg

SEQ ID NO: 165677 - DNA, 518 bp, Homo sapiens
gaatttgataacacccataagtgccttttcgaggtcttcaattggttacaccctatgaaggattggcccgtggccagaggctgaactggagacttctgtgttgtcatcacaggagtgaggatgtggcctgtgtgctgcttaacctggcctagaacttgctgcacctgctgttcttttgcttccaccttaacccttggttatgctaattttctattctcctgcctcagaagtgcctctctaggaagccaagcaggctcttacctgcttcaggtgagcaggtaaccaggagggagaggaccacagttgctatcatggctatgattcgggtttggaaacctgtgcagagcctttggctccacttggtatgggatagccaagagaacagttaatgtggttttcgaatcatgatatgtctttgaatatttgtgtaaccttatgtattaccatcagtttttatttgttaggtgcagttgttcttgctcatattattattattattattttgagacagagtctca

SEQ ID NO: 165678 - DNA, 170 bp, Homo sapiens
gctttacactctagatgagcatccattgattattcttacccacaccaatggtacagttatgatagttggaaaatgctgcttttttccaactccactactccctccatttcatggtattctaatgaatgatcattgtcacaaaattcaacacctaattgtatctgttatga

SEQ ID NO: 165679 - DNA, 269 bp, Homo sapiens
ctagagaggcccttcccccactggtaccagtggatactcttggctggcagtgacgagatttgcccgggaaggaaaaggaatatcagagctacatctctgaggctctgatactaccaaatgaaagttactaccaaatgaggtctggcactcagagccctgcttgggttgacatcacagagccatttattcacagaagctttccagccctgcctgtcctaactgggagggaaaatggggagaaggtagtcagtgataattagagaaaagag

SEQ ID NO: 165680 - DNA, 357 bp, Homo sapiens
cttctctttactgtagaaaacggcttaacataatcttttataagaatgtaattaatacttatgtatctccaaactatatattatgaccaattaaactagtaactacgtgcatgagagtgtgtgtgtgtgtgtgcgcatgtgtgtagacttataaaagattaattgatctgagagaggagggagaagtaaaacaacacttatctctagaattgtcctttaatggttttagaacaatatttgaaatgtttttaaggatgaaggaaatatgactgaaacttacatctgtttccagtttctaatgctaaaataaactaagttgttttagacatattttatagaatttaaactcacttccct

SEQ ID NO: 165681 - DNA, 343 bp, Homo sapiens
ttttatttttctttcctcaagcattgtgtccatcctcactcttgccctaagctcctgctccaaatgaacttctcacaattctcaggaagctccctgttctcttccctctggggcctatcatgatggcccctcttctggaacactactgtactcttcttcctcttcctgaataacttcaactcatcaagtctcagcttatttatcattttctctaaaaatctttcttgacactccagaactaagttaggaggggctcctccataacgtcctgtgttcacactttttttttctttctgtttttgttttttttttaagggaccccggaattaggggggtcccggag

SEQ ID NO: 165682 - DNA, 348 bp, Homo sapiens
accataagataaaatacataaaaattgaactactaaaaattcctgtacaaaaaaggcaccattcatggctgggtgtggtggctcacgcctgtaatcccagctttttgggaggccgaggtgggaagatcacaaggtcaagagatgcagaccatcctggccaatatggtaacaccccatctctactgaaaatacaaaaaaattagccagatgtggtgggcacgtgcctgtagtcccagctactcaggaggctgaggcaggagaatcgcttcaatcagggaggtagaggttgcagtgagctgagatcgtgccactgcactccagtctggtgacagagcaagactccatctc

SEQ ID NO: 165683 - DNA, 493 bp, Homo sapiens
ggtatggttagattataggggtgctccttagtagtttggtgtgtcatgatgagaaatgagacctgaaaagcgtaggactatagaatggaatagcagaatagtattcataagtttgtatattatccttgagatgatggagggactattgcaagtattgagtgagataaaatgacaagttttagaaaataaggattttggaaaaactcaccaagtaatgttattgaaaggttgcttgaaatgaaaagatatgtctgtgtgaaaggagatcagtttggacaactcatatagaaagtgatgtgaggccgacactgggaaattagaagtagcagggatgtatgaatgttatagatgctgtggaatatattttgaagaactttgcagccagttaaacagtaaagtaggagaataacaggagagtttaaggccaagcgtatttagttcatgaggtagaaagatgagaaagaataggtttgaaggtgtctgtaccattgtt

SEQ ID NO: 165684 - DNA, 367 bp, Homo sapiens
tccaaaccataacacaagagctatttgacaaattgtaatcccaccaaaatgaaagagattcaactttgatttagaatctacaatagcaaaattttcaccatttagtaaacagccatggtgaacacatgatgcagtatcaagtctaaccactgagccctgtcaaacacaggagagcttcctaagtgtcctccttaaagtacatgttgcacctgtacaggtgagagccattttttggacaagataatagaggaatccatgttaatgtaactcactgctgagttggcaatgagctcgctcattggcagccaaatgaaaaagcccatatgggaagaaattaataaagctggcatgttttctgttcctatca

SEQ ID NO: 165685 - DNA, 298 bp, Homo sapiens
actgggttccagagtagactcataatcatgcttctgatttgtgtctgttaaaagaaggatcagaaacagactggcaaggtcttacagttcttggtaaaactcttggaaaagactttcttttttgatttgcttgtgtattttagtggtgtcttcaggctatttagagaaaagtagtatgtctattgattcggccattggcagggacttaaatgatggtacgtgttggctgtgtagtacctctgcttcttctagttggattaaatccgaggacaggtaaattcttttggcatttggcttg

SEQ ID NO: 165686 - DNA, 547 bp, Homo sapiens
tgcctctggataatttcactgtacatttagaatgaaagagcaagtaagtgtctttagtatttattatgaaaataatttttttttttaaacagagtctcactgtgttgccgaggctggagtgcaatggcacgatcttggctcactgcactctccacctcctgagtttaagtgattctcttgcctcagcctcccaagtagttgggattacaggcacctgccatcacgcctggctaatttttgcatttttagtagggatgggctttcaccaggttgaccaggctggtctcaaactcctggcctcaagtgatctgcccgcctcggtctcccaaagtgctggaattacatgtatgagccaccacgactggccttattgtgaaaataattttgaccccatggatctcctgaaagggtctccgggaccacttggtgtccctgaattgcacctggagaacccctgctacagcttaataaaatctctaccaattaaatgtgatagccattttgtttcagtttgaattgttttcatgtttggctatttatacttctt

SEQ ID NO: 165687 - DNA, 424 bp, Homo sapiens
aaggggttgtcctggggaccctttgttcagagtagaaaggagagtggtgttagtggaacaaaaccagagggcgatgagcaccaggacccaagattgagggaaacgatgcgccgatgcgccgcggagtagaggagccaccacgggtagcaaagtgaacttcccccgaatcacggttaagccccctgggccacatggagctgtcatctgcagtttttcccacctcggaggcctgaccctgtgctctccataatcaatgagtagatttggccctttatgttccctgaggcttccctgactgctcattaaaaggatctgctcagtcctagtgaattgatttactttgccacagtccttgaaggatgctacagatcaaaaggtgtccaggaaagtgatcttaaagatgctgacactactcccagttact

SEQ ID NO: 165688 - DNA, 412 bp, Homo sapiens
cattatgttaagtgaaataagccaagcacagaaaaacaaatattgcatgatctcacttatatgtggaaggtaaaaaaagatgaactcatagaaacaaagggtaaaatggcagttaccagaagtgaaaggaatggggagatgttggtcaatagacacaaaatttcagttatacgggaggaataatttcaagagatctagtgtacagcatggtgactatggttaatatcaacatattgtatacttaaaaattgcttagagtagattttaattgttcctttccacaagtagttatgtgaggtaaggcacatgttaaatagtgtggtttagccattccataagttatacctcattccataaggtatacatctatcatctatatgtcgcataccataaatatattcaattattactt

SEQ ID NO: 165689 - DNA, 317 bp, Homo sapiens
gtcatatcacagacccagaggatctcattctgagtgtgcactgggtgaattttcacgctgagcacacttgtgtaaccagcacccagataaaggagcagaatattgccagccccagggtcccccaccgtgcccctgtggtcatgactccccaaaggggaaccactgctgcgacttctaaacaactaggttcactgttgtacttgatagaaatcagatcatacagtatgaaaccttttgtgcctggctctcggctcaacatgacacttgtgaagttttccacgctgttttccaccgtggtggcgagtagtcttgcataa

SEQ ID NO: 165690 - DNA, 222 bp, Homo sapiens
ctcaacctcagcactattgaaattttgggctgcataattcttcactaggggaaagtgaggctgtcctgtgcagtacaggatgttcagcagcatccctggcctctatccctggatgccagcagcaaccccagcaaagaaccactgccttaggacatgctattgtactgcttgaggagtcagctagagatcagaggtggggtgatgatagttaggatacggtcg

SEQ ID NO: 165691 - DNA, 367 bp, Homo sapiens
acttttagtatattataacacaacccgggggctaagcagggggctaaagagtactgatgcatttcaaacaagattggcactggtattgaaaatagttgagactgggtaatagtacacaggggtttattatataaaagtagaaacattataaagaaaattatgtgcctattagagtacacacttaacattaaaaaatatgtctcatataccagaggattctgtcttatctaaatttaacacttaaatgtaacatgcaggaaacctgccatgggacaatcaaaagggtcactacataattggagaagaaaaatagcatttttgaggtaaagaaaaaacagtttatacaggtatcaaaaatgaacatttg

SEQ ID NO: 165692 - DNA, 278 bp, Homo sapiens
ctacagacatgggtagctaaagttcagtgcaggcagggaagaaggtgggggcagaagctgtgagtggcaggcattgttctcaaggctttgtatgcattcacttacagtacaaccaccatgggagtaaagtattattaacacgcagaggacaatgtggagaggcagaggaaggctgggctgggttctaaagggtttgaaatacaagggctaggcaagacacgttctctatttcctgtgggtcctgcacttggccaaaggacttcccaggcttaggccag

SEQ ID NO: 165693 - DNA, 234 bp, Homo sapiens
tgtgggctgagcaactaatgatataaattgatatagaaaaggtttatagtaagggaaagaggggtgagaaagaacagactgggagtaaatattagttggatatagattcacttgctggaataaagagatccagtggtttaaaccagattaaaagttctctttcatgtaacaacaatataagcagtctagagctaaaatgtatgcttcaggtattcagaacctacactctttcta

SEQ ID NO: 165694 - DNA, 534 bp, Homo sapiens
gtttcaggaagatagatacaacaggacagatttccataaaatggaaaacttacaaaccaatactttatattacttaggaatgaatactgtaggaaaatctaaaaaacaggcttgagattaatacacagtaaatttaaggttgtggcatctctgaggagtagggaaagggaatgagatcaaggaggccttcatctgtgtctgtaatgttttatgtgtttttttctaaaggcttgaaacaaatatggcaaaatattaagatctgataaagccatgtgggcgtatgacatttgttatatttctctctatccttattcatgtgtttaaataattctctgaaagcagtttactgagagttcagcatgtctcctgagacatgctaggaagttatgtgcaggagtggagaatatgattcattggaagagttaagtgccctaaatgccagccaggctgtgaccccaggacagaagtagggtgggggggccttcttgcttgctagtgacaatctacaccaaccagcaccacaggagccccagg

SEQ ID NO: 165695 - DNA, 178 bp, Homo sapiens
aggatactacagcacgacccagtaggatggaattcaagtgactgtaattcactgtagtaatagaaaatgattcaccacgtgatcatctcaagagctgccaaaaaggaaactgccaaaatccaacatccattcttgatagaaacacaccaatcctggagcagatggacactgcctgcct

SEQ ID NO: 165696 - DNA, 233 bp, Homo sapiens
aaattgataatcatatgcatgcaagaggtaagggagaagaaatagcccagccttactctcaagcttttaacttctgttataatttgactattagcttcagctatattatttaattctgaaacaataattctttcttttaagtaaattatgctttgccttacagaaagtggcaaggttagcattcaagaatttatgactaaattatccgatatattgacaattcctaaagctgc

SEQ ID NO: 165697 - DNA, 332 bp, Homo sapiens
atcatgaagcccctgcccaggcccctgatcctgttcaaccctgtctcaaagccacgctcttcctgatgtccctttcctagcttggcctctttaattattttcttcctgtcccaatcagttatgactgtgtggcttcatctttcaaccccgctcctgggtctacctgtgccttgcctcccacacctgcctttcttctcgatgagatagtgtaagtgaaatggctagaagtatgcattttgcaaggaaggggaatggccatttgatagtcacactacattgtgcaccaaggcattttagagcttttgtttgtgtaaaactttatgtgaacaaat

SEQ ID NO: 165698 - DNA, 710 bp, Homo sapiens
tctccttcctcctgcttcacattcttcctctaccagtggttaagagcaagggctctggagacagactgactggctttgaatctgggcttcatgatctactggttatgttaccttggggttgttactgaactttttgtgcctcagttttattatctgtaaagtggagataataacagtatccacctagcatagttatgaggaccaaatgagttaataattttaaaagcacctacaataatgggtggcttatagtaagcaatatgtacatatttacttaataaaataaacacttatatttgtcatccagcccttccttatgtgctaatgttcaaggccagaaggagaacagcaacagaacacatgagaataaaagaagaggcaaaatggcctggggttgtatcacagcaatggtgtgacagttctcgggaactaggaaaagagtcaatgaaaggaactggaggaaaggtggggatcaggaagggagacaaataagaagaaaattacatttcaaaataatctgcaaagattaaaatatatataatattagcttttagtattttatttcaaatataaaccccaggaaaataaagggatattttttataaatgcatagaaagttcccattttgatgttagcagttaattcaattttggtcttcatccaaggcagaaatgtggtagccacatatttaaggtacttaggctaaatca

SEQ ID NO: 165699 - DNA, 727 bp, Homo sapiens
aattagccatcttaaactaaaataaattgtgtaagtcagatattcagttgatgggttacatgaattagacataattaaatagtgaattgcaagctttgtaaaaaatttacctgaaatattatagagacaaggagacaaatgaatcaacagacttaggaagtaccatgtattccaagctggaaaagtaaaaagaaatccatacctacatacattatagtagaactacaaaatagcaaaggcaaaggtatcttaaagcatccatttcagtcagggtactgtcaggaaaacagaaataacactaggtatttcagaaaagcaaatttgatttagagaattgatgacgttgtagagggctgaaagagaaaaaggaaacaaggaagtaaactaaagataactgtagggaacagctcccacctctaggtgtggaaaagggcagcaagtgattagggttttcagaatttagaagtttacaggagaaactgaggagctggagctcttgcttccacagagagggacagccttgtggcagaagggtgcagtgagcctgggtctgggagtgcttaaagaacctggagactagagtgctgttgctggaataacactgacaggagcagcatgcaaataggaagaaagaagtcccttctccctcttgccttccaatcttctagtgcacatgtttgctgaacctaacaagaagcctgttaacaaaggagaaatgtggtttgca

SEQ ID NO: 165700 - DNA, 367 bp, Homo sapiens
ctcccccccccccacctcgcgtacccacaagggcacatccttgtcacctttgcccccagccccccagactttcagccacagcttctttctcaactgaagacctggggaaggggtgctgtctgtgttctttcttccacttctgccctctcctagccttgagggtagatggtgtggttcttcagtattggatagtgcctgctctgcggacaaaggagaagtttaaattgtccgtagagaaggggatatgattggggcctttgggaaatggtaccaggtgagaagggggagcatggaggaaagatgtaatgggtactccttcttttcaaagtcttatcctttaaaggaaaggcggtctctggagaaactg

SEQ ID NO: 165701 - DNA, 324 bp, Homo sapiens
tgagaccagcccgggcaacatggcaacaccccatccctacaaaagatacaaaaaaaaattagccaggcatgatggtacacacctatagtcccagctactcagaaatagaaagctgaggtgggacaatcatttgagcctaggaggtcgaggctgcagtgagccgtgatcatgccactgcactccagcctcgcgacagagcaagaccctatctcaaaaacaaacaaacaaaacaaaacccaaccaaggtaagtatatggcaatatttgtccacaaagagcttaataggaaatttgatattataactgagtactaaggggagcagtc

SEQ ID NO: 165702 - DNA, 373 bp, Homo sapiens
gtgacaatatgatatgggacaaaatacagcacttaaagagaggtgttgctcaggccagccactataatccacccatcagccagaacattttatttcttctaaatggcacttgagcaacattggtttctttgaaaagaatgaacttgagaatgcaactcccaggaccagaaaagaatgaaactgggccagtgcttgcatggtcctgctgctgctcactgcactttgcttcaaattcttacatttgctctcatttctacatggcaggtacttggttctctctctctttctccctctttctctgtgtgtgtttataatttttttttttttttaacagagaattaaaactaaactaaaaattttttttttccttttt

SEQ ID NO: 165703 - DNA, 270 bp, Homo sapiens
aagatattaaaagttctttgcatcggcttttgtgcccctataacctcatacctaaaatgtgcctaggtaaaactaagacactttttactattcttttaaacaaatctattttgcttccttctgaaaacacctacttgattccttctatatgccatataactcatgagtggcagaaaggttaacatgctataaaggggtgtacaaagtagttatcacctcatgttgaaaataattattgtaaattagtatattcttcctgctttgattatt

SEQ ID NO: 165704 - DNA, 567 bp, Homo sapiens
gagctggttaacccttaagccatctgtggatggcaaggctaaaagagtgcactgtaacacatgcacacttgggctttgaaagttacagacacccacccctagatgctgccatagggctggagcccaaaagcacttgccccagttcctgcacctaccggtatgcatgctccccatctcttaaagagtttgagcttgcagtggcagaacagagagccacacccctgtggcacaccctgtggtgggggaccaggaccagggaactctctcttttcactatcatgagaacaggctgggggaaccgcccccagcattcatttatctccacctggtcactcgtatgacatgtagggattgtgggaactacaattcaagatgagatttgggtggggacacagtcaaattatatcagtaacagagggagatcattctaggttgaagaagcagccaatacaaaggccagagcctttgtatttgtgggattgttttggaggaacagcaagaaagccagggtaatgaagcggagtgagaggagggtggcaggaagagagttctgacacaacatttcca

SEQ ID NO: 165705 - DNA, 472 bp, Homo sapiens
tttcagtatgtagttagtttattgtagtaaagaagctctcaacataatgaaattttgttcttaattttgtcaatcttttgaagcttgaaatacttttttttctgttgaaacgctgtacatttccttattttcttcgtcagaagagttcatgacatttaatttaatacctttgctcttttaaaacaacactgagttagccatgcagtgggccacagacactgcaaaacagtgtttcttagagaaaagcgtggttctagtgcctgtttagaatgccactatcacaattccctctgtttcaggaaaactgggatctttgctttaacttccctccgcagtctttgtgtagcagacttttgctgtgacttcagccctgagtttaggcaacataggagagggttaaatgcattggttttggaatacagcagattcaagttgaaatattccctcctccacttactagccacataacctg

SEQ ID NO: 165706 - DNA, 386 bp, Homo sapiens
agccttccccagtggcacttcaaactcaaaaacgtttacaaaactaatcacattttccaaacctgcttccaccactacccgacctgttgctcctccttcctgtatttcctatacctcggagattagcctcacattgaatctacctcccaagagtcatgttgcttttaaaatccttcactaactccttgctccctacagaagaaaatccaaactatgtatcatggcattcaagaccctttgtggtaagttctctatctcttcagtcatactactttttctgtgctacataataccaagttttctagccattctaaaatattcaaaggtccctggaatacaaaatcttccttatacctggaaagttatccctaccctactccatctgt

SEQ ID NO: 165707 - DNA, 359 bp, Homo sapiens
aggctggttaggatgtgctcgacagctacctggctggctggagacatgcttcccacaggctaaccaagtgcatacagtgaaggtggatggtggtgtctgttcatctcggaagagcccaggatcaaactatcactccctagtcaccctgtggtctctgccatgtttccacagatctctaaagttgcttaaccctgatttatgcagtgctgaacatctctttcagcgttagaactgaatattaccacctctgatgatttctcaaggaagcagtagatatgacagtaactgtcattgagatggtgaggcaaaggtgggggtgaggagtgtgggaagaaaattccatggtcctcactggctgg

SEQ ID NO: 165708 - DNA, 380 bp, Homo sapiens
gtgcaggtttacctgaggaaaccagatagtcagtgaatcacgctaacgataaatctaattgcatttcaaatttcacgaagcctgatttttttggagagtggagtaaaaccatcatgaaaccaagccaatatcttagtttttataaacacatagttttataagcttattgtaagaattcaagtgaagagatggggaggggtgctaaatgtctgctttccttgtcactgggcctccttaccatttggactccaaatagcttgatttttcttctcgtgggagtacatttttgagtcgctttggttcttccctccagggatatggggcaatggagtggacattttttcagagcctgcagaggagtaataaaccaaaatttaagt

SEQ ID NO: 165709 - DNA, 658 bp, Homo sapiens
acaataaaaaaaccagcacaataaaacagtaagcaaaagatctaaacagagaagatatacagatgacaaataagcatatgaaaagatgctcaggctgggggcggtggttcacgcctataatacgagcactttgggcatgtaaggtagaaggatcacttgagttcaagaccagcccgggtaacatagtgagacaccatctctatttcaaaaaaagaaaaaagaaaagatgctgaacattgtacatcattagggagttgcaagttaaaactatgagataccactacacaacggtcaaaattgaaaatacaacaccaaatgctggcaaggaggtaaagcaacaagaactctcattcactgctggtcagaatacaaaatagtacagctactttggaaaacagcttggcagcttcttacaaaactaaacactcttaccataaaatgtgctgactcaatgaattgaaaactcatgtccacacaaaaacctacacataaatattcagagcggctttatacataattgccaaaacctggaagcaatcaagatgtccttcaataggtaaatgaataaatgaactatgaaacacccatacaatgcaatattcaacaatacaaagaaatgagatatgtagccacaaagagacatggaggaaccataaat

SEQ ID NO: 165710 - DNA, 397 bp, Homo sapiens
cagccttgtaatataatttgaagtcagacaatatgttgccttcagctttgttctttttggtgaggttttttgatgattcaggctcttttttgattccatatgaattttggtattgttttttctgactctgaaaaacaacattcataatttgataggggttgcattgagtcggtggattgctttgggcagtatggtcattttaacaatattgattcttctaatccatgagcatgggatgctttatttgtttgagtcttgtacaatttctttaatcagtgttttgtagtcctccttatagagatctttcatttccttggtaaagcatatttctaggttttgtttagttttgttgttgttgctgttgtagctattgtaaatggaattgctttcttgattt

SEQ ID NO: 165711 - DNA, 142 bp, Homo sapiens
agagcatgggctttgaagtcaccgacatgggtttgattctggctctgtcactggttcctcactgtgtgaggttgggctagtcacaatcacaatctttgagcctcagttccctcacctatataatgagggtaataatgcttac

SEQ ID NO: 165712 - DNA, 182 bp, Homo sapiens
tgggaggtggacgagggacagtggcaggaagaggaggccacagagaggcaggaaataagccctcagggacctgggggaggcagtgctgtgcttcaggtgacaaagctatgtccatttgactaacatcactatatgactcgaaggggcgagcctgggcctgggagacccgtcaggaagtggtt

SEQ ID NO: 165713 - DNA, 312 bp, Homo sapiens
cagagtaatagtgtgttatctctgccagaagccagaggagaaatttttactcagagaaagagccattttcctatggctaccttaagacataaaagtatagtaacatccatctcgtaactgatcatgttgtctgtctgtactgtagcatcccatggctcaccttttatgaactaactgaatccctgggcctactctactttgtagtcttgttccctctgctatttgtgtcatataaattaattagctctttagctttttacttttatcatgtaacactgaactaagttacttagccatcttaagtcattttct

SEQ ID NO: 165714 - DNA, 140 bp, Homo sapiens
actcaaggtcatggtgccccatagtaccaccatctaaagatcactagactgagactttggctagtgatgcttgacccaggatagtctgttgtccctctttatttgaactgtttatgtttggcaggtgagcgggtaggtag

SEQ ID NO: 165715 - DNA, 566 bp, Homo sapiens
atgtgccaccacgcctggctaatttttgtatttttagtagaaacggggtttcaccatgttggccaggcttgtctcaaactcctggcctcaagtgatctgcacatttcagcctcccaaagtgttgggattacaggcatgagccactgcgcccagtctgtttttggcttttttgagacaggttctcattctgtcacccaggctagagtgtagaggtgtgatcatggctcactgcagcctcagcctcctgggctcttgtgatcctcctgccttagcctcccaaagtgttgggattacgggcatgagccactgcacccagccaaatctgcttctcttgagctttgcccatgtgtcaggcatgtaggactttatagtccttatctctcatcataaactctgggtacaggctgttgctactcccattttacagatgtacaggaacattctcagactctttaagctaggaagaggcaaagtctgaggctagacctgctaacttggggccagatggcctcattcatgcttcaccccagctcctcggacaggacctggcccacagtggggaacag

SEQ ID NO: 165716 - DNA, 412 bp, Homo sapiens
cagtccaggattataatttaggaagatatagacaatcatggtgtccttgaaagccttagagaattactgtgtagttagttttcctggattatattaggagttaggtatttgacttttccttgaggaactgactgtaagaaagactatgaggctgggcgcctaacgctttgggaggccgtggcaggtggactgcttgagctcaggcatttgagaccagcctgggcaacgtggtgaaaccccatctcaataagaaatgcaaaaattagctgggcatggtggctcgcgtctgtagtcccagctacctgggaggctgaggcgcgaggatctcttgatcccaagaggtagagattgcagtgagccaagatcgagccactgcactgcagcatgggcaacagagtgaggccctgtctca

SEQ ID NO: 165717 - DNA, 455 bp, Homo sapiens
actgtaataggtgcatattttggtgtgatgattctactgtctgagtctcccttgagtgcttcccctcccctccatgctcgggccaccattaggacaagccatgactgtcacctggatcacaggggcctcctcccactccatctccttgcctcttgttccttagcaatccattctgcagagtaattggcctaaaacaagtttggttcatattgctgttctttgtaaatcctttcattggcttcttactgctctacagatggggcacgcatttcttaatccatcattcaaaactcattatgatctgggcccattttacctctcctgcccttcaatagccactcctcattttttttttctggcaaacatatttcttcggttccatagtcctgcttacctatggacggtaccttcggtctggaatagcttctttatcctgccacaacctcacgtccctt

SEQ ID NO: 165718 - DNA, 394 bp, Homo sapiens
ccaaatgggttaatacatgataaatgcttagtttagtgtaagttcaataaatatcaaaatagtggtatgttaaagatagtgtttacatgataacctaaaattaattgccagtttgttttaatttactggtcaagtctatcaaatgattgaatcagcatgtttaagtggatatatctcatttatgtccagatcattttagtatattcatgactcctcactttaaaattcaaatgataataggtacagttagtcctccatatctgtggattcaaccaagtaaaaataaaaaattgcatcacaacaaggcatggtggctcacatctgtaggtctcggcctcccaaagtgctgggattacaagcgtgagccaccgtgcccggccaagactgtctcaaa

SEQ ID NO: 165719 - DNA, 629 bp, Homo sapiens
ggcttttctttttagtgtcattgattactgttagtattctaacagttaatatctgtaggactctttctttccaaagacttggaaaactgtttttcctctctgctatgaattttgtaattattttattgattgcagaatatctttttgaggcaatgattgaaattgcaaagtttttttcatcagttccagattactttctttctgtttattcatagttccttgtttcattttcgatgtttatttgttgactatttgctttatatcagatgactttataggtattttaaggggatttaagaaagatatcactagttacctattcgtctataaattccttgcttaggccaagtgtggtggctcacgcctgtaatcccagcactttgggaggccgaggcaggtggatcacaaggtcaggagattgagaccatcctggctaacacggtgaaaccctgttattaaaaaatacaaaaaaagaattagctgggcgtggtggcaggcacctgtagtcccagctactggggaggctgaggcaggagaatggcatgaaccccgggaggtggagcttgcagtgagctgagatcgtgccactgcactccagcctgggccacagagtgagactccgtttcaaa

SEQ ID NO: 165720 - DNA, 217 bp, Homo sapiens
ccctcgcaatagctgctgttctgtctcttggcccttgctctgcagagcttggtggggagcccctcattaccacctccagacagtactctttcctaccacctcccaaaagctgaatcttctgtcatgagattgcatcattcatgagccttcattgttgccatcatgtaccaatccctagttcactcccctgtttcttaatgattttagccccagctca

SEQ ID NO: 165721 - DNA, 113 bp, Homo sapiens
aaataggaattactaaaattattgagccttattggttaagtcaggtaccaatgtgcaggcttttgtaagtgaatgctagtgaatcttttgtaagtgaatcttagaatcaatta

SEQ ID NO: 165722 - DNA, 454 bp, Homo sapiens
acttccctatcttcattctgaacgtgcattctacttcactgagaaaacagaagcattcagaaaaaaacacttccacaagttcctgcactatctaagaacctgtcatcataagcatctatgtactctgcctttcctccagtctcataaaagtacacatatatatagggccaatccctcttcaaggaaagaacattgccaatttctctttctcctaggtcattcccagtagcattattaaaaaaaaaaaaaaaagggcaggggggtcataaactcttccatcttatagaaaactctgccaactcctcatcggcattccccttctacttcttctgccccctctgtagaactcttaaaagaaatgtctaaactcaatgcctctcctcccaatctctctgaaacccatctgaaataggctttcacctccaccactcccaagaagctacttttgacaaga

SEQ ID NO: 165723 - DNA, 229 bp, Homo sapiens
tgggatgggacctggcccagggtccccaccctctccttttctgttttgttcagggctagttaggtttcctcttccacacctctcttgcctccagaccttggcatatgctgttccttctacctgggacacccttcccactccccaacctccctgccccagcccagcgcaatttctcccatccttctcatcttagacatcacctcttcctggaagccttgcgacatccccc

SEQ ID NO: 165724 - DNA, 522 bp, Homo sapiens
ttttatacctcagatcacaaagacaacagatacccttaataataaaaagacattcaaatataacaataaaaacatacttaagatagctcagtgactagcatttggccttgtgaacataagaacacttagtaaataagtgaaatacttaacattttctttgtatgtcaaagacgagtgagagtcaaataacttttttcccaaaaattcaaattggtctttctgcttataaaactgcttcttgagggcatggcggcaagtgcctgtagtcccagcactttgggaggcccaggcaggtggatcatctgaggtcaggagttcgagaccagcctggccaacatggcaaaaccctgtctctattaaaaatacaaaaaaattagccaggcgtggtggtgggcgcctgtaatcccagctacttgggaggctgaggcaggagaagtgcttgaactcgggaggcagaggttgcagtgagccaaggttgtgccattgtactccagcctgggagacagagcaagactctgtctc

SEQ ID NO: 165725 - DNA, 472 bp, Homo sapiens
cagctccctttagtctcgtcctttcttccctgtgttcaatggctggctgtgcttcaggagtcaaagaaaccaagttcagctgagcactggggcgcagcagccagagccagggaggtgacagcttccaggcatactaaggtgtaccacggggttgcctgagcagtcaccttgcttgggcccctgtgccaagcacctcagggacagagactctgaaaaatgcacatggctaaaaaggtttaagttgccatcaaatatgacatgataagaagctccctagaagccatgttaatggaatgttggctcccagcctagagaaatgaggtgatgacccttaatcacctcctcacctaccctggctctgggaggtacccttccggggctcacttgcaagacccctatttctattacaaaaatgccagctctgtctatagctggcttcacccaatgccatgatctagggtaagactaaagt

SEQ ID NO: 165726 - DNA, 779 bp, Homo sapiens
gatggggtttcaccatgtcagtcaggctcgtcttgaactcctgtcctcaagtgatccgcccgtcttggcctcccagagtgctgggattacaggcgtgagccaccgcgcttggtccaccctgggtttttattcatcaagcctcgctgcccccttggtacaggggccaagaccacagctgggaagctcctttcctcttgccccaagagccagcctgggttgctgctgagccattgcaggctgaggcacagcctctctttctccttttacgcttcctgatgtcttctttaacataatcatggccacctcagcttctttcagagagcaatatgttcctgagctagagacatgggtgaccagctggagtcaggatttggggggtgtggtgtaggtctagagccaactgtggcactggaacaaggcccctaccttgttcagcctcagtttccctaatcagctagagaggcctacttcctccttggaggttaaatagatgacattcataggtcaacggaaatgctgcatttatggcaataactgaccttgtaggtgtttcaaaattcaggccgtttcagaccagagtgcacacaggatgatgtgggaccccccagcaaggcaggcagctccccgtcagcacatatgctagcacttctgcgaagatttctgcagcaaatatatctgctgctgttgatactaagagggagatctaaggacagccattgcagttccactttgccccacaatgagccaggaaaaaagaaaaggatggctttagagatttt

SEQ ID NO: 165727 - DNA, 449 bp, Homo sapiens
acactagagcatccccccccctccccgggtacatggaacttactaactgcagtgttacagggacaggagttaaacagaggtgaatgttaaggttctcactccgccctccgtgtccttgatccaggtgatgaccttgaccgaggcaatgagagtatagagaagtggccatttccctaaagaatctcatagtctggtgtattagtccattttcatgctgctgataaagacatacccgagactgggtaatttataaataaaaagagatttaatggactcacagttccatgtggctggggaggcctcaaaatcatggcggaaggcgaaagccacgtcctccatggcggccggcgagagagaatgagagccaagcaaaaggggaaaccccttataaaaccatcagatctcatgggacttattcactaccacgagaacagtatgggggaaatcgc

SEQ ID NO: 165728 - DNA, 558 bp, Homo sapiens
ttagggctctcagagtgccatgctggtggacagtgaattattcataattactctgcatttggtatttgagccattgtgaatgtgtatcttttgaaattccgcagaatctctgcttctcttgttttgcttccaacaattatggataatcatgtcttagctaaaagggccccaagttataacatactgtttttctctaatatgcttcttacaaatagccaatccctattagctgtgtggcattgaaattcaatgctattactaattttcctttgacatcaatagtaacgttacctcataatttgatagtcattatagctatgaagggaactaatgcccaagattctcaaaaatgcaagattgatgtgtttctttcttttcccctctgtcataatttacctatataacagagtatttacagtcatcattcattcctttctttaggaatccaaagtggtaattgcccaggaatatacagtgttcttgattggattaataattatcttcagtaattcagaataacacatgagggaatgaatgaatgaataaataaaaaaaaaa

SEQ ID NO: 165729 - DNA, 429 bp, Homo sapiens
ccctacttgccaaggataatctgtcttctagatttttctatgcctacgttcttagttatcaatatccattttttagaactagaactatactatacatatgactgtgctatgtaccagtactttgtgggcagcatttcatgttagcataagggatctatttcattttttttgtaaaaaaatgtacacttatttagttttagtttttgtcagttacacacacatatggttttggctgggtgtagtggctcatgcctgtaacaccagcactttgggagtctgaggtgggcagatcacatgaggtcaggggttcgagatcagctgtccaaaatggagaaaccctgtctctactaaaaatataaaaattagcgggttgtggtggcacacacctgtaatcccagctactcgggaggctgaggcatgagaatcact

SEQ ID NO: 165730 - DNA, 358 bp, Homo sapiens
ccccctccccgggtacaaggggtctggactcttctccctgtcttcccctcctcactcaatagcagctccatccttctggctgctcaaattcagacccctggagtcatcctggactcttcccacaacacccagccctgatgggctgctgagtcctgctggccctgggtaggttgtgaaggcagagccagcaggactattattaagccccttttacaggtgaggaacaaagaggctcagtaacctgtccaagatcacaccacaagctagtgggggaggccaactttgaaccctgatctttggccccagggcctgtgctccacttttccatggtgatctctgccccacagaaggagacctg

SEQ ID NO: 165731 - DNA, 282 bp, Homo sapiens
ggccttgtagaccggtttcgagtgaagccaacaggagaacactgccaggttaagtagtctgaggtacttctttgttcagtttttgaaaggagttttctgttggtttactcttcacgagataaacatgaacgaggaaatactaactgaatcaagggagaaaattggcttcctccagtatactgagcagtttttgagtgcttactggtagttaccaccatacaattactttttcttctaactcccacacctcccttcactcgaaacccggtaccgagctcgatt

SEQ ID NO: 165732 - DNA, 457 bp, Homo sapiens
atacatagtaacactgagacagagtgtaagtgctcatcagttttaaaaatggctaaataaattttgcaaatttttctaccaaaaagacacatgcacttgtatgttcatcacagcactattcacaatagcaaagacatggaatcaacctaggtacctatcaatggtggattgcataaagaaaatgtagtacatatgcaccatggaatgctatgcagccataaaaaagaacaaaatcatgtcctttgcagcaacatgaatgcagctagaggccattattctaagtgaattatctcaggaacagaaaaccaaatactgcatgttctcacttgtaagtggagttaaacaatgggactcatggacataaaggtgtcaacagtagacactagggactactacagtgggaggaaagaaggaaaggattgaaaaactaactattgggtactatgctcagtacctg

SEQ ID NO: 165733 - DNA, 340 bp, Homo sapiens
gtggcagaacagtgagtaaaaatagctggaatcctcaacacaatggagctgccatttgaacccaggaggacttggggctaagtaagagaggagtaactttgtatcctgttttgattcttcataatagcaacccaaacctgtatctcaatcaacaaataatctcagctccaaccacacttcctgtttgccccatatttttcttcaactctggtcctgagacatagcactgaataagaatctccctcccccatctcacttcccagaaccctgtcctcactacatgctggcatgtagtgaggacagattctttctggtgggtggagataagagggtaccgagc

SEQ ID NO: 165734 - DNA, 431 bp, Homo sapiens
ggttaaaatcttactgttcagttgcagtcattatttcagcccttgtcgttggtacacgtatcacagagcgtctgattgtaatgatcggttgtacatgtgaattttgtccattgccacaatgtttttgaaaatagggagggtaggccgggcgcgctggctcacgcctgtaatcctagcactttgggaggctgagacgggtggatcatgaggtcaggagatcgagaccattatggctaacacggtgaaaccccttctctactaaaaatacaaaaattagccgggcgtggtggcgggcgcctgtagtcccagcaactcgggaggctgaggcaggagaagggcgtgaacccgggaggcggagcttgcagtgagatgagatggcgccactgcactccggcctgggggacagagcaagactccgtctcagagaaaaa

SEQ ID NO: 165735 - DNA, 652 bp, Homo sapiens
ctagtcacaaaatgaaaactataatttcacgatggagaaatttagctgatcctaccttaaccagtaatcaaacttagcatcaataataatgggccagccaaacatcatgtgcctctgatctgctgcatcattcataaagggttgttttctccctaaaatgcttaacctaaatctaatcaggtctctagatctaagttacagtttatagaatacacagggcagagaggaagaacctgaacaataccccaaagaaacaatcagacaaatccataatgtgaaaagtgaattcatgttaagaaataagaagtgtctaaaactgaactcccagcctgggcaacacaacaagagccccatctctacaaaaaataaaaaaataaaaaaatagcagatttagcagagtgtggtggcacatgcctgtagtcccagctactcaggaggctgaggcccccaccatctaactaaaactatccaagaagaccccgagcaacaaccccagaaccaggcaagtattgtggttttaagccactatgttttggggtggtctggtaggcaggacactggtaaatccagcctttcaagagccagccctgagacctgtctctggagtcttatcttgacactcctcaatctaccctgccaaggacaacaaaca

SEQ ID NO: 165736 - DNA, 378 bp, Homo sapiens
cgttgaacgttatcataaaaaattgcaaattaggtcggaagccctggctcatgtctgtaatcctagcactttgggagcatagatggtatatataaagtactattgaaagtaattcaacatatatgtgctgatacacattattactgtctctctctctcctctctctctgtgtgtgtgtgtgtgtgtgtgtatgcaaagtgacagaacggaagaaagaagctagactgcagtgtttaccactgcagaagagcatgtgtattcagaaggaagagaggaatatactgttactttgttagaagttttgtgcctactttttttttctttttgaaacagagtctcgctctattgcccaggctggagtgcagtggcaggatctcg

SEQ ID NO: 165737 - DNA, 399 bp, Homo sapiens
tcagaggattttcacaaataaatcttgtaaaatctttataagacctataggattagaattattatcaatatcttcattttataaatgaagaagcagattcagagagtgctattttcttgggcaccacagctactaattataatagccaggaattggttccaggcctctggatttaaagaccttctcctcttttcactatgtcatatcccttcttcaaacatacagtagaaccatatacaatagctatcagatcaatagttagatatgtagactataagccaggaacctctagaaaacattataaaatgctgtactaagattacataccaaattttggaactgcttttcattttcacacgttttttcccctgagttctctacctgttaacggaaaaggtt

SEQ ID NO: 165738 - DNA, 107 bp, Homo sapiens
ttgtctttgacgattacgggcctgttgttttgtaaaatatacctcagtttgggtttgtttggtattttctcacagttagattcaggttgcacatttttggcaggtat

SEQ ID NO: 165739 - DNA, 482 bp, Homo sapiens
tttttttttttttgcttgtgatctgaacaaagagcaggctgtcactttcatgacccaggtgttcttgaacagactgtacctcctcagggcttaagggctcccatggcagctctttcacttccacaagaccggaagcagtcagggctgaacacagcttgctgtcttcgctttgctgttgttatctacagctggatctactggttctttcagaaaaagacatccactaggccgaaggatccgggcaatttcagccaaaatctcagcactcagtagagtggtgcttcccaggactaaacccaacaaaataatgtcaaagctggattatttgtgggcagactgcaacagctggttgttttccacagacacgcggccctcattgccagttaacacttgaagcttatccaccagatctttcagagcctgcactggggatgacttatcccagaccactgccacaaactggccagcagagatcccaaaat

SEQ ID NO: 165740 - DNA, 1605 bp, Homo sapiens
  misc_feature (2)..(3): n is a, c, g, or t
gnnggaatatgggccaggaatgtctgctgcacatatttttgataattaaaaacgaggatagcagtctttttacatgttgataaggttaatcaaggcaacgtcattgcagttgtcaaaaaatcctgattattctcctgcactccattcattgtgaatctttgctttgaacacaggggagcttctggacctacaggtacaactataatctgattatgtgtttttctacttgaagagactacgtttttaactagtaaggcttaagacagatttcagtttttattaattctcaagattaagaacagatagcggcaacatgtcatgagtttcattaatgcaaaatgggaaccaaagttttgttcttatttttaaaaataatagtgataataataatataactaggcagtaaataaataaaaaatctgaatccagagccctttgttaagtaaaacataacagaaagaaatcagggtagatgccggccaacattcggattaataaagtgtgaacgtaccactcttgcatgcagattagcaagaattagcaatcatatagatgagtatagtaagttttaacctatttgctgttaccctcccaaatcctattttgctcagggcacacctccattttacaactagttaataaagaatactataatttaaagttcatgtttctatggtaacagccaattataaatgcaatctgaagagatggaaggaagctgccaaaactcttaaggaaaaaaaacatgatctgggttggcaacccacaagaaatgttgcttgataagggcttttgccagcttcccctagcattggcctgcaagtttatatctgaacaaacatcttgcacccattttctaagcactgcatctgtaatacattctaaaaggataattgtgtctggggctcaacatatgtgatggtgaggcaggaaaaaattcgcactttttttggtataatttctcgcatatgtttcttataacttcatggcactaacatcaacactagagagagaaaagaaccttaagtgggctagcttttttcagaagcatattcctaagttttaccttaaatattcttatgttcattgtttatacataacaatggataatggtaacatttatggagataataattatagaacttaaataaaatgttagccatcaattgggagttttaatgtttaacatatgtatacctgattacatatatatcttaatataacactgtgattacatatgtatcttaatatcttcttcttaatcactctgtatatgattgtgctttgttttcaggaagctcaatatgcacacataaggcatttccaaaatagatgaattaaattgaagataattcatgttaaaatatatttcacattcattattccatgcatcttattaacaacctagggagagaggatgttttcatttccattttacatataaagaaactgagaaatggaaaagttaaggacttactgaaagtcacacattgttagtagtggaactaggggcaaacccccaccttggacctctagatccagcattgttttcactctacaatatgactcctccactagctcaaaattaaatacacctggatatca

SEQ ID NO: 165741 - DNA, 804 bp, Homo sapiens
acaaactttttcatttgctccaaggaaaacactcttcccctttgcaaatgaaaaagtttgtagaatggctcaaaaatgctgaagaagaatctgaatctgaagctgaagaaggtgactgaattttgaaactacaccctcagtaaagcaaacaggagttgtagataaaatgtcatgtctcatgtgtcctggttcttacatcttcctacctccctgtatcaagcatgatataagggctttcatggcaaattttattttaactgtttctatggttgctggaaatgttgggtttagtttctaaaaccatgttttaagtagctacaggagctatagatttgaatctaatgttgcattagtcttttcagttatcttctacctcctgtattttctactgtaataatgtaatttaaggccttccacaatgaacagttcactttattccctgggttttctataaacagttttaaggatatgatttggttaaaaaataatttgttataaaaattctgtttgcaaattaaactggaaaagtatccagagtctcaaaaggcaatgatttgtgagataatatggcatgcccggagccctgctcatcaatgaaaaacccatatgtaataatcgaattcatttaacatgaatcttgagtacgtggaccattgcttgcatgttaactttttgttttgttttgttttgttttgttttgcatttttaactccagatatcctaaagctcaattgtttggtctctggttttcatccttagagaagccatggagaacagacttgaaaagtttaggaaatcataatg

SEQ ID NO: 165742 - DNA, 227 bp, Homo sapiens
gaaaatagtggtgcttttttataaagctgaagtcctgagcgaggagcccattttgaagtggtataaagatgcacatgttgcaaaggggaagagtgttttccttgagcaaatgaaaaagtttgtagaatggctcaaaaatgctgaagaagaatctgaatctgaagctgaagaaggtgactgaattttgaaactacaccctcagtaaagcaaacaggagttgtagataa

SEQ ID NO: 165743 - DNA, 246 bp, Homo sapiens
agagcacttacagttctctggctaaaacatctgctgcctactgttgaatgtaacaacatcaagtcagtttccggaagaaaaatcgtgaaagatgctctcacttcttctgggatctcaaacttagaccatggcctgggctgcctgcctgcgtgttactatatttcatcaattctaaaaatgtacatttttattttgcatttaacaaatctttccgggtgtcacttatagtcagtggcatattagcat

SEQ ID NO: 165744 - DNA, 489 bp, Homo sapiens
agtcaggtgctgggagagagtctcctccgtctttaggaaccagaagatttcactgtcctgccacaacattctggaacttatatctttcaactctcacacacagtcctcctttaattttgtttttcttttttacctaagttttctctcaagatctaactttaaattcctatggtctgatctcctctgggcctaattcatttcaatttagtatttactaagcatctatctatgtccaaatctaagaaatatgggtttagccatgttgtaaagtccacaaaatgcaattaatgcttttctttactgtgctgtgtatattaaaataaaaagacaagattattcactgttattaacaagattcggcaaatacctcaaacaaatagtaaaatatgatgtgccggaccaacaaagccctgtatgcctcaggcatagcagcttttattctgtatttgaggaggaaacctcttaatttttagattttggtcttatgtc

SEQ ID NO: 165745 - DNA, 607 bp, Homo sapiens
taggctcggcttgatgaggagctgggactacagtggcgcgtgacatagcccggctagttttttgtatttgttagtagagatggggttcaccgtgtgagccaggatggtctcgatctcttgacctcgtgatcggcttgccttggcctcccaaagtgctgggattaacaggtgcgagccaccgtgcccggctgtcactttgctttttaatgaaaaaagctggtgtccaaataaaccatccgcagggagactattctcccagataaaagcgtcctagagacctcccgcctccatctgacctggcagtgggccccagagtctgatgctaattatatcctccagggctggaccctcctgaccaagtggagacacggctcctgactgaggcagccaggccagcagatgtgtttgtgaaggggtagggcttcgagttctggtcaagtttgtggaataactgaattccgatttttttgttgtgtcgggtactgtttttgagatggagtctcactctgtcacccaggctggagtgcagtggcatgatctcggctcactgcaacctccgtctcctgggttcaagcgattctcctgcctcaacctcccgagtagctgg

SEQ ID NO: 165746 - DNA, 484 bp, Homo sapiens
tttagggtattttacctagataggtcttttcagtactgaacttgttcacattgctcacatcgacatgtactatccatgttattgttttaggaattactcttttctgtctatcctgttagaaagactattaaattgcactggttgacactgggttactccatttgtgttcttcatgactagcatgaggctatttttgggtgatacttactgatgacatatatgatatagaagacacaggagaaatatactgcatgaaaatcaagattcagctttagctagacaagatgaatcaataaactaaaatctaacaagatggagttctataggaaaaatgtcttaagagtttggtttaataaatcaatttcatatgtgaagggtaagccataatttaacagcactacatattgaagatttaaggttttagtgacataaagtgaatcagtgatatgtggttgtcaaaataaaaaactaaagtggtattagg

SEQ ID NO: 165747 - DNA, 274 bp, Homo sapiens
gagccactgcacctggcccactttttaaaaaaatatgtgtagaaggttagaacagttgaatccagcacagtggaactgagcatgaattcatccaagtgtaaaccttgactgaagtgacaaaatgggatgggttttccttaagtattaggtataaaatacatgtttaaggaagtggctagtttcttttcatcttagggtgtatcatattcttaaattattggtgtggccagttatttcagattgaaaacgtttgtagtatgtgactttacatttt

SEQ ID NO: 165748 - DNA, 536 bp, Homo sapiens
agtaatggagcagcaccagctccccctcctttcaggaaaggggtccacagagcggccaggacaaatctgctgccactcactgaaatccctccccaagaaaaacctcctgcaattcatccctgtccatagcagggctacagactgtgagaaaacaagcctgatcaactcacgtggacaccacaaagtcaaagtaccctagacctagaatccagtctttgtgttgagtaagttttcatgaaagctttctctgtcagtgtaactgctaaaatgcactcattgatgacaaagcccaaataggaagatgcctccaaaacaccagctctagactactctacaatcctcccccatcagacaagagtagacatgtggctaatgaaaagagccagtaatctaaaactcaagtatgttcatcaccaaaacgaggttttacatttccacagcccctctgccatcaaatggcacagggagaaatctcagaggtcaatgccctctgccccccgctcgtagcctcactctggtttgctctctctttcccc

SEQ ID NO: 165749 - DNA, 386 bp, Homo sapiens
atcttttttctttttctttctctttctttctttttttaaaataatacccccatacttactggcactaaaagattctctccttctcctatctctagaatcagccatttctccaaggagccttggttgcttctattggaaaatggtatttagaaaccaagacctgggtgctgaatgtactcatagttactaaggtgtcactgatgtctaggctgtttctatcaacagagctaggaaatttatgtatgtgtacaaacctgtatatatctatatttttgtatctgtctacctggagaaggggtgtgtgtgtgtgtgagtgtgtgtgtgtgtgtgagagagagagagagagagagagaaagacagagagagattatagcataaacacgagt

SEQ ID NO: 165750 - DNA, 236 bp, Homo sapiens
ccacatctctgtaaatagtcccttcattaaacttcccttaatcaccacttgagttcatcatctccttcttccaggatactgattgacacagacatatctgcttcccacctaccaatcatatcttgaatggaaccctataactcgaactacatccttgccatggacatttactgataatattgaatggtcttggaaggaggcgggaagatcctttgcaagcttagtagaccaaagga

SEQ ID NO: 165751 - DNA, 382 bp, Homo sapiens
tcctagttgtcaaatccagtggctcccctcttagtccccaaattgtcccctctgcagtattttgatactgttgattgttcctttgttgaaacattcctccattcttaatgtccaccaataaagagttggttaaataaaaattatagtgtaccgttttataatattctgttgttctgttgtggaccaaaaaatgcagccagtctttccataagagcacgtgcaaacttctaagatatattaagtaaaaaagtaaggcataaaatattgtgtataatctgacccctttagtacacagtgtaaaaacatctgtgtctgtgcttctttatacttacttttttctcccctggtgaatacaggaaactgtgagtagtacaacacaatt

SEQ ID NO: 165752 - DNA, 482 bp, Homo sapiens
cgccaccttgcccggataattttttttgtatttttagtagagacagggtttcaccgtgttagccaggatggtctcgatctcctgaccttgtaatccgcccgcctcggcctcccaaagtgttgggattacaggtgtgagccaccgcacccggccccattcttttattccttcactttcctaataaacctgttttcactttactttatggacttgccttgaattctttcttgcatgagattcaggagctgtctctttgggttctggattgggaccccttccctgtaacatatgctggcctctgcctgtaccccctgggaaaggccttgtagatgatagtgagaagttcttggtttattttgggggcctgctaacctaacaccatgtgagcagttggtggtgaagactggtaagataaggaaccttcatgggtggtaggaagaggtaagatgtttagaaataggagtcaggggccaggcatggtg

SEQ ID NO: 165753 - DNA, 205 bp, Homo sapiens
ctgaaagtggtcattagggggcagtggggaaaggagcatttcagtttgcaacattcctgattagcattaggcagacatgattctgctggaagaaatactcatgggacactaatcctacttagagggttaacatattgcttgatcagaaacatatgcaataatgaaaagtttcaggaattccttttcctaggggtgtgtgtgtgtg

SEQ ID NO: 165754 - DNA, 636 bp, Homo sapiens
atctatctccatatctcatctgaactctcagatgtttgttcttagatactgctacatgtataaacatgtatatatccaaaactgaagttatagtcttaatccctataactgatttcctaaatttcatagcaaagagtattgcaagagattaagaggatcattttgtaatgaagaaggggtgaattcatcgaaaagacttgataatcctaaacatttatgcacctaataacaaagctctaaaatacacaaagcataaactaatagctgcaaggagagagaaaaatcacaattgtagttggagaatattctttctcaataaacgataggatagatacccagaaaatcactgaggatataggcgacttgaacatgactgtcagccaacttgacctaatgaatgtttatggaacactccccacaataacagcagaatacacaatttttcaagtgcattaaaacattaagcctgatcatattctgttctattaaacaagtatgttatctgaccagaatgatattgaatattaaagtagaaatcagtaacagattggaaaatcctttcaatatttggaaactgaataactcacttttgttttttgtatattttttcaactcacttttaaataactcatgggt

SEQ ID NO: 165755 - DNA, 439 bp, Homo sapiens
agggccctgggttccaaagccatcctgctgagaagagataacagcctgattctaggaccaggacacagtctgtctcctcagggtttattcactggcaaatcttgttagcagatgctagaggtttttatttgcactcctgaactcccaaagaaacatatggcatcttttttcaaaaaaacctaaagaggcggggtgtggcagctcatactgtaatcctagcactttgggaggctgagctgggaggactgcttcaggccaggagttcaagaccagcccgggcaacatagtgaaaccctgtctttacaaaattaagaaaaaacagccaggagtggtggcacacgcctatagtccagctacccaggaggctgaggtgggaggattgcttgagcctaggagttcaaggctgcagtgagccatggtggcaccagtgcactccagc

SEQ ID NO: 165756 - DNA, 132 bp, Homo sapiens
gctgaggggcaaggggaggttctgagacttgctcttaattcttagggaaggaagagacaaggtctgaggaagcctgacttagttctgaagtgaggcgttgactctaccccgtttcctgccaaaagcaacgtg

SEQ ID NO: 165757 - DNA, 427 bp, Homo sapiens
cctgatgcctctcactccgccttttaaatccatcccgctcactcctactcttcctaaaagttccactttaatcatctcattcctcttctaaaaatggtcaaacaccttggctggcacttgaagcccatctctgtagggctccaggacacctttccacccttgtctcctaacaacctgaactgccgaaacccatcctcttaaattttgcacataaactgaatccatcaggccgggcacggtggctcatgcctgtaatctcagccctttgggaggccatggtgggtggatcacctgaggtcaggagttcaagaccagcctggccaacatggtgaaaacctgtctctactaaaaacacaaaattagccaagcgtggtggtgggctcctgtcatcccagctacctgggaggctgaggcaggaaaattgctt

SEQ ID NO: 165758 - DNA, 267 bp, Homo sapiens
tggccacatagggattcatcaggcctgccaagggaaaaagaaagacagccagagaggcttgagtacagggaacaaggggaagacgaacgggaaaagctacagaggtcaacagggccaccctacacaggggctggcagggcagggtggaactgggtctttatcctttaatcttgaagtgtggtccatctgggaccctaagtggtctgtgattacctgggccaacttgaaatgtcacagatgagaggttatctttgccgaatggctaaa

SEQ ID NO: 165759 - DNA, 669 bp, Homo sapiens
aatctcaaatgtttctagaactattcattgattctgagtgaccacagtcacctttattttctcttttgattaatgttcagaagtgatagaaactactaatagcaacacctaagtatgacaaagttattcattctaatgctttttttctgaaaaaaaagatttttatttagaaactgatcgcactcaatattcataaggcttaaatgattgagaaaacatggccagattgaaagattagattgtcttccagttgttcaatgtaccctgagttgatttttatccttcccaccaagtaaccaagtgatgaaaaggatgaaatgtcaacaggagagaggaggatgggggaagtataggggtgaagaattataggtggatggaagctcaatagaaacatctaagacaagagcatgggggtggttcaatatcttgaataaaagggataatagattgttggggagggatatgaaacatcaaaagagcagaggaatattatagtggaataatgctgaaaaaggcaaaaagctacatcatttaaaaagtgggagaaaaatcaatagcctttttatgttgaatgactgaaatatatgactggaaagatcaggttgcacatgatttctattgacatactttttaaacatatattcaatataaatttattatcttttagtc

SEQ ID NO: 165760 - DNA, 493 bp, Homo sapiens
gctgaatatgagtatcctaccaaggcctggtggagcagctgcctggctcgctctcttcatgctggtatcaggtactggggtgacagatcaggtcccaaaacaggtgacagaaggatcactggatcctaatctaccttttctcttatatgctgttctaacagcactaacctgggatgacaggacagtcaggaaaacatggaatgatgtccttctcatcatctggagatgaccatgatacgagaggttcctacattcagctgtcttctcccctacaatttggccctacctcttgtttttttttttttttttgagaacagagtctcgctctgttgcccaggctggagtgcagtggtgcaatctcgcctcactgcaagctctgcctcccgggttctcggcactcaagaaagggacacggaaacccttctcttggcttctaactagaactacggtggtcgattaactgggagatacaatggccaaaccaccagtgaag

SEQ ID NO: 165761 - DNA, 402 bp, Homo sapiens
ggcttagcttatttacttaaatatttaaatattttctttactttgctataaaattagagtgatgttaatatacaatgatgataatttaataatttgtaaataatctgtagactgcaaagtgtcaaacatattacagtaacccctgccttcatccatggtggatgtgttccaaggcctccagcagatgcctataagtgtggatagtactgaacccaatatatactgttttttttcttttacatacacatctatgatacagtttatacattaggcacagtaagagattaacaacaagaactaataataacatagaataattataacactataccataataaaagttatatgcatgtggtctctctcaaaatatcttactgtactgtaactaaaactgctaaaag

SEQ ID NO: 165762 - DNA, 452 bp, Homo sapiens
gcgggtgactgccatctgagactgtgtgaactgctctgatgttgggaaccaacccacactcaagggaaggcagtgctgtccacaggtggccgagcagagggccaggttgaccaccaggaaatagattaggaatcggatgggatgtagggggttccactgggcacctcccagcagaccaggagtcactgatgaggcagccagacaggcgcggggcagcaggaagggcccagcgtgtcccctctgtgtgacctcgccctgaaggctgcagggcccaagaagggccccagcatgctggggtgagtgaaagctcaaatgacagatgtcctcaaacagcctgtttccacaattcctggggcctgcaatgtgctaagggaaagagaggctgaagagctatctctgtattgaaacactttgggcagtacttgccaagacgccgtgactcaggggagcag

SEQ ID NO: 165763 - DNA, 526 bp, Homo sapiens
tatagaatgtgagctcccaaaggaaacacctagtaaagttttgaacacagtaacaaggcaataaatatgttgaaaaaaaggaatctaaattgccttttaaaatcatttatgaatgacagcacagcaattgcaaatgtaacatatcaggctacaataatataaccaagcctccatatattcatttaatcaacaaatacctattgaataccttatagatgccaggctgtgttttaggcactgggcattcagacatatgcaaaacagaaaaagttgctgacttcatggtgtttacacatcagtgacaaaggcacagcatatctggacaattacctgaattaatatgtttaacattctctaaagaacagatattttaatgatttttcaaataattgcaccatgaatacaccaattgactaggtatttcacttccttaagaattgctggctctggaaaagaatgcaacaagtcctatcagattatgccttaaaaatgtgcaaaatgtttgttgtcagatctggctgtacat

SEQ ID NO: 165764 - DNA, 124 bp, Homo sapiens
tgccaggtgctactctaagactaactctgcggcctcattcttgcagcccggtctaccagctgccctaagcctttgctcgggtagccccactggcctgtccctgccttgggtgggatggctggga

SEQ ID NO: 165765 - DNA, 363 bp, Homo sapiens
cttctggaataagtagggcaggaatcatcacctgcattgtacacatgagcatccccatctcagcatgtcggagcacacagatagggagttactgggcagggactatgacccattatttgtaactactgatgcttgagctgtgacctgtacctgcatcaggacagtgtttctcatgcagtgatcagggtggtgatcctggtgtgactgccagtgattaatcctcctgcacatccacctgaggcaatggggaaacagaaacatatccgggtctattctcagctcagctgtctctggctagctctgagtagacttctttatctgaaatgtgaagcctggagatgatgcgtatgaagagttgggtgg

SEQ ID NO: 165766 - DNA, 452 bp, Homo sapiens
agctcctaaaacccttggaatttcctgagtgataagggtgataggagtgttctttgttctaataagacaactcttggaaagcccctagatagcttcaggatgagggctacctagaaagacaaagccttgaccagaagttcagaactttcagtaccacccaccaacttctgatgaggggagaggggcttgagcaaatcacccactgtcaatgatttaatcaatcctgcctacataatgagacctccataaaaacaactacacaaaagggctcagagagcttcctgattggtgaatacatctacatgctgggacggtggcatattccacaggacagagactcctacactcaacactcaggaccctcctggactttgccctatctatctcctcatctggctaattgtatcctttataaaaaactgataaacataagtatttctctgagttttttg

SEQ ID NO: 165767 - DNA, 883 bp, Homo sapiens
agatgaataaatacgacctcatatcagctaataaatcagaacacgattctgccccatggagaaacccatcgcgagtgctgtgacccggcctcccggtccttgctctctacagcatcttgaagctgcagcatctttgcagatgccccctttacaaagcacattctccccttgcttcttccagcctctcctcctgtgtctacacgaacgtttactaggcttttgtcctgagccctctgattttcttcttctgcactctccctttggggagctcatctgtgtccacagatttaagttacctttccaagtaaattgttgctaagactgacatctccagtgctaagcctttccaaaggcctggccccatatttcccgcattggagaggcctgtggaccggtgcagcgaccgctgaggcctgcacatcattacaacccgagagaactccaactgtgcagaccccagctcccctgcggatctgattcacatttagtagttctggggcatggtctggggatgcgcatcaaaaaatttcctcgcagggatgccgatgattagtcagctttgggaacaaccggcctcttgggcagagcaaaatttgagttggacagacctgacttcaaatcttggcttctccactttaagattaagtctgggccgggcgcagtggcccatgcctgtaatcccagcactttgggaggttgaggcaggtggatcatgaggtcaggagatcgagaccagcctggctaacacggtaaaaccccatctctactaaaaatacaaaaaattagccaggcgtggtggcgggcacctgtagtcccagctactcaggaggctgaggcaggagaatggtgtgaacgtgggaggcggagcttgcagtgagccgag

SEQ ID NO: 165768 - DNA, 390 bp, Homo sapiens
cacagttttgaggttctgccctgacttacttatcacattgtaaatattattgttctctgaactatgcatcctttggttaaaaaccttacttagcatttacataatacattcccaaagagtctgtcattttccattatttctatccctttcatcatgtgatctctgttctaggtcacttgttatttggctaaaaccccttcttgaattttctcagaggagttaagtgggtattatatccttgaaatttttgtatagttgtaacatgtttcccctcataggggagaaatatcttcaagggaaatagggatttgggattgtgaaatccccaatctgtaaatactcttctaccatctcctagtttccagtgttgtgaattagaattctgattcc

SEQ ID NO: 165769 - DNA, 316 bp, Homo sapiens
acaggtgcttatcagtttattcataactgccaaaacttagaagcaagattacttagtaagtaggtgagctagataaactatggtaactgcagacaacagaatattgttctgtgctaaaaagaaatgaggtatcatgtcatgaagacatggaggaaacaaatgctattgcttagtgaaagaggccaatctgaaaaggctatattctgattccaactgtatgacagtctggaaaaggtaaaattatggatatagtaagatctgtggttaccagggccttatagaagagatggatgaatgggcagagcacaagatttac

SEQ ID NO: 165770 - DNA, 245 bp, Homo sapiens
acaacaatggaccagggtgaatgctgtggactgcagttgctctagagtaatacagggaaaggatgtcttatctgtggactcatgcagcccaccaaggagctgtggaaaaaatagaggagtttgaactggactaagtagaaatgggggtatattttaggcacaagggacagggattcaggatgctgtcaaagtgaggcaaatagttgttgagggcctcttatttgctaagtgctagacagagtgag

SEQ ID NO: 165771 - DNA, 543 bp, Homo sapiens
tcactacccaaatctcaccttgaactgtaatccccacatgccatgggcgggatgtggtgtgaggtgactgggtcatgcaggcggttttccccatgctgttctcgtgatggtgagggagttcttaggagatctgatagtttaaaagtggcagtttcccctgagctctctctctcctaccacctttgtgaggaagatgcctgcttccccttctgccataattctaagtttcctgaggcttccccagccatgtagaactgtgagtcaattaaaactcctttctttataaattacccagtctcaggtagtatctttatagcagtgtgaacatggactaatacagagaactggtaccagcagagtggggtactgctgcaaagataatctgaaaatgtggaagccactttggaaatgagtaacaggcagaggttggaacagtttggagggctcagaaggcaggaagatgaggaaaagtttggaacttccaagagacttgttgaatgcttttgaccaaaatgctgatacggatatggacaatgtagtcca

SEQ ID NO: 165772 - DNA, 317 bp, Homo sapiens
ggagtttgaggttgtagggagctatgatcgtgccactgtactctaggctgggtgacagagaaagaccctttctcaaaaaacaaaacaaaacaaaaacgggatctttttcagctttctaaaaaataaccagagttctaagaatttgggtcccagaacctacaaattaaattggaatctacgacccaccattcattagttaggtaacactactgaacttcgcaactgggcaactattgaacttctctgagcctcagtttcctcatctagaatatgaaaataattacagcacctacctcctagaatgttaaggaggataa

SEQ ID NO: 165773 - DNA, 612 bp, Homo sapiens
cagccttgacaacagcttgcttcccttcctctaaatggcatcacatcctttccggctagaactttcagggacataactgagttatcacttcacttccacattctcatctttaaacacttttttgagatgaagttttgctctttgttgcccaggctggagtgcagtggcatgatcttagctcactgcaatgtccacctcccgggttcaagcgattctcctgtctcagcctccgaagtagctgggattacaggtgcctgccaccacgcccggctaatttttgtatttttttagtagagacaaggtttcaccatgttggccacctaggctgggctcaaacccctgatctcatgatccgcccgcctcggcctcccaaagtgccgagattacaggtgtgagccacggtgccaggcctaaaaactttttctgatcatggattatttaaaaataaatatgtggcttgccttctcaccctgcagaacactagtcctgtcatccatctctgtttaagggcagggaatgctttctcgtggaaaaaacatgctcctagatgattcagcttctttgaatgtgacagctgatgctaaactaacatgtaaaccctcaggaagaatg

SEQ ID NO: 165774 - DNA, 433 bp, Homo sapiens
tgggtccttagctaaaggtcaaaagcagtgaattatttccattgagttctttgtttaagaacctgtatttttttttaaaaaaagcagtgaattaaaaattatcaccattgaactgaattgaactccacatctagaaacaagcattaatgctccctgcaggagagccaaattcaagcagtagatgggtctcataatcctgtgaaaatcagctcgccttgtttcagttggaggaaaagtgtagccagtgtcaagggcagagcatcctcattgggcaggcagagatctacctctgagtgaaggccagcaggctcaagtttcagaactatagacaatcccttagtttttctgtactcagtggacctttcccttctataaagagaaaacaactaactccctgtttatatcactagaatgttgtaaggataaactattg

SEQ ID NO: 165775 - DNA, 575 bp, Homo sapiens
ttgcatgtggaagcagtcaagatcatacaacttaatatgattttggagttggtgacctgattgtccctggctttagctcaaggtctatgcctaaccagctgggagatattgggcattaggcatgccactcattgtatctgggtctcattcatgaatagggatacaaagtctacttctgcaaagttgttttgggagttgaatgagaagtggcatgaaagcacttggttaaatatgatgcgctgtttgaatgtgaggtattgctattttaccctcaaagaaaaaaaatagtgtcctggttaccatattttatggtcagaaatatttgtttagtgcagtaagatgccctgtgatagaaggatttcatggtcaaagaagcctaggaatccccagatgcctttctgccttcggtgatccccagcgctcacaacccctttttctcctccagaaatacaaacactcattagcctttgaaaggccctgagaagtccagcagcaaagacatcagttgaagtgtgttttatctggtgttttccaacataatttgacaaataaagcttctttgtgtaacatctcac

SEQ ID NO: 165776 - DNA, 387 bp, Homo sapiens
gtacacaactgagtgtggccgggttccaataaaactttatttacagaaaaaggcaggcaggcagaatttggcctacaggctacagtttgctgacccttgacctagctgtactaggacaatggtccccaacccttttggcatcacagacggtggctgggggaagaagggggatggttttgggacgaaactgttccacctcagatcaaaggagcgtgcaacatagatccctcacgtgtgtagttcacagtagggttcgagctcctatgagaatctaatgccgtccctgatctgacaggaggcggagctcaggtagtaatgctcactcatatgctggtcacctcctgttgtgcggcccagttcctaacaggccacagacccatactggcc

SEQ ID NO: 165777 - DNA, 334 bp, Homo sapiens
  misc_feature (220)..(221): n is a, c, g, or t
  misc_feature (270)..(270): n is a, c, g, or t
  misc_feature (294)..(294): n is a, c, g, or t
cacccttaagaagtaggtttctttagagcggatgcaaggtcccagaaggacagtgatggtgctgagaggagaggagtgcaacctgagtttagttgaattttccttcctcacatataaaatatcgcatacatacaaaaacatgtgagatctccgtgtaaataggaatactcacatagtcaccatccggcttagaaggagaatactcgtgccgaattcggcnngggttcaccctgggcatcttcaccttgtcgacctcaagacatagacttncatgttccatcttgagtacttaanggacattcacattagggataagctggctgcaataaaactt

SEQ ID NO: 165778 - DNA, 503 bp, Homo sapiens
tgcatgggattagatttttattcacattggatgttgcctaaacaatcctggctctattttgcaacttcccgcatttgtaaaacttccttttaactgcaacaagcaactggagaaaaggattaataggaaacctggcactacagttcaccaaataacacagtacacaagtagacacaggtctgtagggaaatacagtcaggaccagccactgaacacaattgctttttgagtccaaagataaaacagcttgaatctcagattgtcataagcatttactgtgggaaaggtcctttaaaatgatctggtccaaacccctggttttcttgatgaacaatggtaaagaattagactaatttcaatccaaatattcacgtgcctgctatgtgctgtgtattagttcacaaactgaattttctaaagagacttctttagtaaacacatgaaacatgcctgtttacaatacagtttttgttttttgttttttgagatggagtctcgctctg

SEQ ID NO: 165779 - DNA, 262 bp, Homo sapiens
agctaaaggggaatatggggtcaaggaagaacattttagggatgatacaagtgggaataatccagagaggggaaattcctaaaatgcatctctaccactgctctggtagggtttcgattctggcaacagtaagtactctgatattaaataggtacaaggagacactgtcagtctgagggccttgctgaggaattggaaataactgctgattggaatttgcttttatggtaaatgaggcagatggggtggaaaggcagcaatg

SEQ ID NO: 165780 - DNA, 645 bp, Homo sapiens
tatggcttcttagcatgtggatgtgtgcaccacccccaaagctctccaaaccccataattttgagtttatggaggttttattacacaggcatggttgatgaaatcattggctatgggtaattaacttaatctccagcccctctcccctccgtgaaggttaaggggtggggctgaaagttccaaccctctaatcatgccttggtctttctggcaaccagccccaatcctgaaactatctaggagctcctagtcaccagttatctgattagcagatagaaactcttatgttgggaatctgggactaagactaaataaatatcataacaaaaggtgattctataacctctatcactcataaaatcacaagagttttgggagctttgtgtcaggaactgggatgatgagcaaatatatgtatttcttattatatcacaatcagtgtttgaacattataaggaagaagaaagaggtcaactcaacgtgatagaggcttgtttgttttgttttttgttttgtttttttgaggcagtcttactctgtcacccaggctagggtgctgtggcgcaattttggctcactgcaacctctgcctcctgggttcaagcgattctcctgcctcagcctccccagtagctggaattacag

SEQ ID NO: 165781 - DNA, 191 bp, Homo sapiens
agtaagtctttacctatcggaataattactctgaatgcaaatggattaaattatctaatcaaaacacagaatggctgaatggataaaatgttataggagtcaacgagagaaaatgagcagaggtaggaaaaaggatacaagtagcagatatgtaggatgaacaagtctgaaggtctactgtacagcatgag

SEQ ID NO: 165782 - DNA, 90 bp, Homo sapiens
gaatgaactaaggtgtctaccatgattatttttctaagctggttggttaataaacagtacctgctctcaaattgaaataaaaaaaaaaag

SEQ ID NO: 165783 - DNA, 473 bp, Homo sapiens
ttccttgctcctcagcttgcagatggcctattgtgggacttcaccttgtcatcctgtgagtcaatactccttaataaattccccttcatatatacatctatcctattagttctgttcctctagagaaccctgactaatacagagatggtatttagttacttttgaataatttgattctttcaaggcttgcttttaagttttattagacagtaccagcccagtggttagtctagaactaattttccccgtgcagcagaggtagtactcttctgagtactctacctggtgccttgcaaattgcaaggtttttccacactgactggtgggaatacaaacttttcttgcccagtattaatctggagatcgtttcttctgagcctttctagtggttctctccctggcctcaggtgatctcctgacatatatgtacagatcattcattactcagctgaagactccaggaccccctcggc

SEQ ID NO: 165784 - DNA, 354 bp, Homo sapiens
ccctaatgtaaatgttggcacaagccactctattagatactttaaaagtatatttatagaagtttattcttccagagcctttcaatacagaataacccaattaaagacaatatatctaatgtcattctatttgacatgattttagatgttgctcatagaaggtaaaagttttgatatggttccaaagtaaatttattaaatttctcccagaaaatctacattcctctgcttttgcacacttcagtttatgtcatttagggttgctgtatatatttcattagggatgctaattgatctgaacacattatttacagaaaatacctttagcctacaaagttccgttgaagccgtaag

SEQ ID NO: 165785 - DNA, 700 bp, Homo sapiens
aagacatcagccgctggataaagactgaggctctgtcttccggatcaagtaactgggctacaatgcctaggcagatctccatctgttaaatcagattagcagtctgcccagttcctcaggtgttgaaattttagaaactctccccccaggactctaacaggaatccagagttgagaaccactgctttcataaaagcagattttgtggaggcaagggctgccagggtagaagcttgctaaggaaaattacacaacatgtttatacctgcgaaatctgtgtaaaataaacaccagaaagcaactaaaggagataaacttccaaagcatgggagaaaataccaacccaaagttatagtttaggaagacacatgacattgacagtcattaataaaatgcaaagtaactctaaggtatcgttgcacaactgtgagatgggcagaaatatgtaataatgataaaaggctgccaggattatggcgaaaattgttcccttaaaaactgctgttagcattacactttgattaattctactctgttttgagacaataatctgcaactgtgtaaccaaagctcgagaagtctttgttctatttttagaatatactataagaaaataaagaagaatgcagtttattcaaaattgcctgtagcagtggcatgacataaaagtgaaaaattagaagccatctaaatactgaatt

SEQ ID NO: 165786 - DNA, 751 bp, Homo sapiens
ctctaaagtagagggactctgtgcactaaacctctctttaagctttcctgagctatttgttatcccagtgtaggaagttggttgcaagtcttctcacatggtttttcatgcagaataacttcatttcatatgacaactcttgtttttgatttttaggtttttaaaaatttctaatgacaacccttgttttagatttgttgtgctggttgtcagatgaccatgatcaagtgggtgttaatcataaacagtatgctgcacatgggcacattcttcactaatgtgacttacttttaaacatctccctaatttctactcagacacttgataatatgttttatttgatactttgaagacactaggatggggcatatgactaaataaaagtaactgggtaatcccagcactttggaaatccaatggggggtagatgacctgaggccaggagttctagaccagcccggccaacatggcaaaaccgcctctgtactgaaaatacaaaaaatcagctgggtgtagtggcacacgcctgtaaacccagctacttgggtggctgaggcaggagaatcacttgaatgcgggagacagaggttgcagtaagccaagattgtgccaccgtactccaacctaagtgacagagcaagactctgcctcaccaaaataaataaataaataaataaatggccccataacaggacttcccaagatgggtgtgccttggtgtgggcattctctatctggtcttcagctttga

SEQ ID NO: 165787 - DNA, 499 bp, Homo sapiens
cccgccccctcagggtctcctgtggcacctgctgcccacccactcgtctgggtatcctgacaagatgtccatccgcacccagcctgtgcctagcagagcaggtgagcagctctgggtgtttctggaatcagatttcagaacttccagctgataaagggcttttgtttggccagtgttttgccccagcctcctgtccacagccaggtggcaggtgattctgggacccaacccacatccggaaggggcaggtatctgagcagtggtgcaggatttatcatatggatggttgtttgctgcaggaacgagaggccatcatcattatagcacctttcaatggtcagttctttataaatcctcattgcctcactggggcacttagtctactgtcaggatgagagggcagccagggggaccttcagaactcaaatatagcctcttcatttgatagatggggagactgaggcacagaaagagcacagggcattccatattgcatcag

SEQ ID NO: 165788 - DNA, 314 bp, Homo sapiens
aggtcactctcaggatcccacatttccacgagtcgcaaaataaccaacagagagacagggcaagccatgttcctagcatggattaaatgacaagctccttgctcttactatggaaaagtattttcatctctccgtttttcatggaagagtttaaatagggaaaacaaatgctcactactgtccttgcaaaaataaactaatgaaaaccagtaagagcagccggctttaaagtttaataattatctgcaaaggcagaagtttccagtttcactcaaatttgtccttttatactaaatgcgtgactcgtggaaatg

SEQ ID NO: 165789 - DNA, 310 bp, Homo sapiens
tctaaaggaggggagcggtgctggaggttgtgtgtcagggacccactggaaagtgacacttggctagacttggaaagatgagtgggaattccccagacacgagtgacatgaacagcttggagttgtggacataacgtgtgattttagcatattctagtttggttagagtcctgtttctcaggatgtccacagaccatagggggtctccgaggctaaaattagtttttgtggtaatgtttacatattattgccatttccactgttggtgccatagcaatgatgggtaaaaccgctgatgctttaccaaaca

SEQ ID NO: 165790 - DNA, 249 bp, Homo sapiens
tcccggactcaagcgatcctcccacctcggcctcccaaagtgatagtattaaacgtgtgagccacctcacctagccagatggtggactattcatttctatttcctttctgagccactgctgggaagttaattccttagtttttttaaaaaactctgctttatgtctgagctattctactctagctagagccacatataactttcacctgcattcttgggtttttggacagaagctttcttttcttttta

SEQ ID NO: 165791 - DNA, 237 bp, Homo sapiens
cctattcaaatattttgcttactttagtttttgccttcttattattgagctataggtatttttagcatactctggttacaatctgaataaactatatgtttttaaaacattttttttcccaggataaggcttgttttattattttctctaagatttcttttgaagagaatttctaaaaattcaatgtggtcaaaattatcaactttttattgtgtggttcaaaattttcgctttccc

SEQ ID NO: 165792 - DNA, 423 bp, Homo sapiens
cgactccagaggataaaactccataatgtgatcccagacacctacttacaagagtgctaagaacaggaaactgtcctaggtgcagacaaggctagactcttctagggtccctaaactgtttcttaaaattcgtttttattcctcctagtccttggcaaagtggtgggtgtatattaggtattaataaggtaattgttatttgatggtatacttttgcttcacagaaactttgtttatttctgtggtagcatatgcttgtagttgtcagggaccagatcagctcaggcttttttgcagaatacaggttatttccccatagggttagtatccccaccttcttcccccaagaactgaaatcattttcagaagggagtcattgcttctggatcaagactttaattatgggctttttttcaaaggcag

SEQ ID NO: 165793 - DNA, 542 bp, Homo sapiens
accagccacatccccaccaccgccactgccacgatttcaatgctggtgtcccctctgaagtccgtgctgagatcactactgcggccttcaagcgactgatccatggggcccactcatgtgaatgggatgaggggcccttataaaagggcctgatggagggaggccacggcttttccgctccttgcaacccctctgccgtgtaggaagcagcacagggcctctctggagggttgctgaccaggcaacctcgtgggaacagagagcagccctccccgacacagccctgccttggccttggacctcccagcctccagaactgtgagagattttcgttctttataaatccccaggctgtggggttttgttccagcagtgcaaaggggccgagatgatcgccatcaccaccgtcgtcatcaccagtgtcagcacaacttgtctctgtccctgcagggcgcagcccagagctgagcagcaaagcatacatccccttttgttctaaaagggcgcctcattgagcctgcgtcaccccagccagaagtgcc

SEQ ID NO: 165794 - DNA, 548 bp, Homo sapiens
cgcaactgcttgggatggggagctgctctaatgccaccttctggctggtactagaaagatgaggacctggccaggcacagtggctcacatctgtaatcccagaactttggcaggccgaggggagcggatcacctgaggtcgggagtttgagaccagcctggccaacatggtgaaaccctgtctctacaaaaaatgcaaaacttggccaggcatgatggcgcatgcctataatcccagctattcggcaggctgaggaaggagtatcacttgaacccgggaagcggagtttgcagtgagccgagattgtgccattgcactccagcttgggtgacagagcaagactctgtctcaaaaaaaagaataaaggaaaaaaaagacgaggacccggtcgtggcttcagcctctctgacccaggccagagggcccagcaatccagttgtacattgtctgattggttggttgattggttggtttgctccctgccttgctgcagagaggacctcaggcagcttccaaggatgcgtgatacacaaccagagcagaaaaaa

SEQ ID NO: 165795 - DNA, 264 bp, Homo sapiens
tagcctcggaccagagccacggcgggatgctttcctggtgcgtggcaggcagtcaggaaatattgctggactgaccttgataggagatgcttgggagaattgcccaaaaaactagcttaaaatgcaaatattggccttcttttgcgttggctaaagagtagcatttctccgtttgcctcccgggtaagaaattgatggcgaatgcaatgtctctagggaggagaagaaggtgacaaaaagggtctgtataacggggcacacgct

SEQ ID NO: 165796 - DNA, 255 bp, Homo sapiens
tccttcatttgcagtcaaggacgttttcattctcttgtaaagtttcatatagcaacctcataaatgatagtaaagcaaaggtttgctaaagatatataccatgcaaaagacacacattgccttcagtgcacatgcctgacaaaacctttacatttttcttgattatttacatgacaatctcttgagtggtttccaccattagagaaaagaatcctggaacttctctttgaggaaacttatggaaactgaaatgag

SEQ ID NO: 165797 - DNA, 379 bp, Homo sapiens
actagatccactctttctccattcattcattcattcggcaatcattccttccctacctactctgttttgagcacaaccctcagcactgaggagacgaaacctggacgtgattcttgccctaaaggagctcacagactattagtttaaccgttcatcaaatagaatattttagacaaaaaggcacaatgtctcaaaatgctacagctgaagatgggaagggtgggatccaatcatttttaagaatagcagaagaaaacaggagagaaaaaggaaaataagggaaaattgtctgatttgtgatccttatagataaatgtctaatgaggaaaacatcaccaatttcctccttcaaagcccgggagaaggcatatatgaaaag

SEQ ID NO: 165798 - DNA, 272 bp, Homo sapiens
aaggagatttgcatacataacttagaatgacttaaagatgttcattaggaaaattgtgataaacttcaatgaataaaggaatatcaaaaggagaaccagtttggatattttaaatctgagtgatgatgtgtcaaacgtttggaaatatcacagacaggcagagcaagttttagtcaagaggtcaatcctaaaaataagaatttgttagcagttaattgtcaaataatccatggtgttcttcctttttcttttttattgagccaacacaattt

SEQ ID NO: 165799 - DNA, 123 bp, Homo sapiens
gggtgccagcacacagaccgtgtcttccctcctactggtctccaagtttctccagacctgttgcatctctgggtcatttgaggacaggatgagggtctagagggccagtgtgggaaggattct

SEQ ID NO: 165800 - DNA, 443 bp, Homo sapiens
tcaaatattcgtcatctaattttaatataacattcattcaattcagaatatatttgcattttctttgctaaaaaataatcacccattagtattctgtactgcttttaggaaattattggtgtatgactgtgtcaacagattgagcctcaataagtaactttgatatcttaaattgctttgagggagacatttttaatgccatcagatatcttctcccaataaattcttcaacctttatcaaaataaaactacattttctattgccaaaatgacaaagacaagacagattatgttttaaaaaaagacctcacgtgtttttttttttaatgcagctactctaaatctattaaccattggacagtgatgaattagggttacacataagcacacttaagcagcaaccattatctatattagtcatctatcttagaattcctagggtc

SEQ ID NO: 165801 - DNA, 502 bp, Homo sapiens
atgagtatataagggcacctagaccagcatttcctcatttgcttgcttttagaaaattaacactcattgtgtactagatgcacttcattttgttgaatccacaccacaatgttatggacacatgttttggccccatcgtacagataggaaaactcaagtctagaaaggtaaagtcactggctctaattgagacagccgaaggtgggcagagcccagacttaaactttcacatgcaagtttcaaagtcagtgctctttcgggaggccgaggagggaggatcactggagtccaggagttggagttcagcgtgggcaatgcagtaagaccctgtctctacaaaaagttttaaaaattaagctaggtgtggtggggttagcctgtagtcctagttcctcgggaggctgaggtgggagggttgcttgaccccaggaggttggagctgcagtgagctatgctcaagccactgcactgtagccccggtgacagagtaagaccctgtctc

SEQ ID NO: 165802 - DNA, 326 bp, Homo sapiens
agcccaatcatgtgcatttttgctattctgttattttaagcaaaatactgatttttttcactatcaaattgcagaacaagggccatgtcctaaaaaaaaaaaaaaaaaaaagccaataaaaaatctaatatatgcatgttcccagaattgttttcatttgttgaatctgacattaaaataaatttagacataaattggctcaagaaaaaacgtaaagataatactaaggaagtaattaagaatttgatattttgatttttacgtgcacatacgccatcaaaaaattccaacaaatatatcctgatggcttttgttctgttctaaat

SEQ ID NO: 165803 - DNA, 574 bp, Homo sapiens
cgagctcggcaccccgacagattggcccacggagaaaacccaagatcactgcctcccgcaaactcttgctgaaggtgaggctgggggctgcagaactggaattctggtctaggacaagacaagtgccagccagcgttctctatctttatccggaatcctctgctcaccctacggtgccttaaaagctcatctttgttatttaacctctgcagttcagagaaggctgcagtcagctaccttgacctaggggctgaagccttaacttcccactctgattctgctgctgctgaaatcttgtaagatactatgagggccacatggcttctacaggcacctccttcctcatctgtaaataaggatattaggacccccccccttacttagttcacagagttattgcagatgaaatgagatcatggatgtgcaaatcctttgaaaatcgtaaaagctatgtgttttcacactccaggtagtaatacagcaataccttgatgatccgtcatgctgcataaataagctgtgaatttcccaaataaatgaaacgtatctatgtagacctcaaaacttttaaaaa

SEQ ID NO: 165804 - DNA, 647 bp, Homo sapiens
catgtcactgtactccagcctaagtgacagagtgaggccctgtctcaaaaaataatactaataataaattttgagaagctgtgaagcccatgtacaagttttccaaagcatttgatttttttatgaaagcccagttgtgcatttctggtttctaagaatcaaaccacttggctgtttttaggagttacttcccatgttataaagctgaggaagctttttttttttttttttggaaacagagtttcgtggtcacccagggcgggagttgcagggggtgcaatctcaggctcccgggtctcaagcaaattctcgcgtggcctcagccttcgtggagtagcctaaaattcacggggtggtgcgccaacacggtcggggcttatattagggggattttaagatagagagggggagtttcaccagtggtgggtcagggggtgtctcaaattccgtgagctcaagtgatccgaccaatttcctcccaaaggtgcgggatggcaggacttgagcgcctagccgaggaagctatctatctggagtgatgaacccttggcaacgcgggtccaaatgggggtgggccctccctatagcttccatatttctcaataattccgaagggcacatacctgaggtctcacaggggacctctg

SEQ ID NO: 165805 - DNA, 729 bp, Homo sapiens
ggagttcaagaccagcctggccaacatggtgaaaccccatctctactaaaaatacaaaaattaaggcgcctgcaaccacaccgagctaattttgtatatttagtagaaatggggttccactaccttggccaggctggtctggaacaactgacctcaggtaatctgcctgcctccacctcccaaagtggtaggattacaggtgtgagccaccaggctcatctcaagccttacatttaagcgtctaatttattttgaaatggtttttatatacggtgtgagatgagggtctcattttatttctctgcctgtggacataaagttttctcaacatcatttattgaagttactgttcttttggctcatgcctgtaatcccagccctttggaaggctaaggagggtggatcatgaggtcaggagatcgagaccatcttggccaacatggtgaagccccatctctaataaaatacaaaaaagtagccaggtgtggtggcacgcgcctgtagtcccagctactcaggaggctgaggcaggggaatcacctgaacccagatggcagaggttgcagtgagccgagatcgtgccactgcactccagcctagcaacagaacaagagtccatctcaaaaataaaaaaagaaattgtcagctttattccaaatcacttagctgtaaatacatggatatatttctggtctctttttttctactgcattggcctatgtgtctgtt

SEQ ID NO: 165806 - DNA, 154 bp, Homo sapiens
gaatggaaagagagaaagaataagagagaggattcagaaatgggagaagcttgggcagtcgagggctatctcctggtctgtgtcctgtctcaggcccctgcctgagacatccttgtacccaagcctcctctgacaacttctcattccagaccag

SEQ ID NO: 165807 - DNA, 353 bp, Homo sapiens
ttaatgacagttgttgcattcttcatatttgtaataccttttgaacaaggggctccatgttttcatttctgctaggcctctcaaatcatgtacctggtccagttggcaccaataagaatatcaaactactgtccaggtggtcacgcaaggaggtgatgcacaagcctaatttgggcagatatggagtgttaaagaaaggacctggggttggtctagatattatttgggaatctgggtggagatactatttgggaatcttggtggagtcgaagaaaaaacacagatggagaaatatgtagtattgcataaatttgtgactctaagctcatctgtcagtaaactgttggggacag

SEQ ID NO: 165808 - DNA, 253 bp, Homo sapiens
ctcggtgtggtggtgggtgcctgtagtctcagctacttgggaggctgagaaagaactcgggaggtggaggttgcagtgggccgagatcacacaatggcactccagcctgggtgacagagcaagactctgtctcaaaaaaaaagaaaaagaaaaacaaagccataaaatcagcctatacttgcaaagtgtaaagcagagtttggccatctgtcctacaacagagaaagctgggtccagtggctcacgcctgtaa

SEQ ID NO: 165809 - DNA, 720 bp, Homo sapiens
cagtgaacaagacttctagttctacatccttaccgaacacatataatgtcaatttttttaagcccttctagtgtatctcattgtagttttcatttgtacttcccaggtgattaatgagattgagcacctcttcttacatttattggcaatttggatagtctgtttcgttacattcaattcaagtcttacctctttttcatttggactatctgtcgtctcattgattagaggaattctttattctggagattacccctttattggatatatgcttttcagataccttctcccactctggggcttgcctgttctgtcttaatggtgtctagtgagagcacaagctcttaatttcagtgaaatccagattattagtcttttcctttacagttagacattttaagtcctgttcaataaatctttgtcctacctcaaagtcatgaagatattctcctatgttgtctgctagacgctttattttttactctttacacatatgtacctaatccacctggaattaatttttataagagttggaggtaggagtgcaagatctgtttttctccataaggatatctacctgacgcagaacctgttattttaaaaactatccttcccctgctgcaccaagtggcacctttttttcataaatcaaggatccgtgtaccgtgggtctgcctccagatctagtctgttccactgcaccatcaccacccaacccta

SEQ ID NO: 165810 - DNA, 343 bp, Homo sapiens
acctaggtaaccaacacccaaatcaaaaaataaaatatgaccaacaccctggaagctcctctcatgttatcttccagttaccacttccccaaaatgtaaccagtaatctgactgttataacaatctctggtactttttaaaaaaaaatcgaggtgaaatttacattataaaatatgtgaaattttcatcacccaaaataaaacactatttcccttaagcagttagtccccattcccacctacctgcagcccctggcaatcaccaatctgttttctttctatattgatttatctattctggacatttcatataaataaaatcatacaatgtgtgacctttcatc

SEQ ID NO: 165811 - DNA, 255 bp, Homo sapiens
ttttttgtacagctggttggataatacttgtcttacagatgatcaattaattaatggatgcttatatatatgggggaagcaatgatttggggaacatggtggttggtacctgaacctcggatcctatcttgattgtctctttgaagcctccaagtgcacacagtgcggcaacggcctggcgtgcaattctctgaagtttggcaagtttcctgccactgctgctgccattttccagaatgctttctgcgtatttcc

SEQ ID NO: 165812 - DNA, 641 bp, Homo sapiens
gggatttttcacctcttttgaggttcaacccctcgtaatggggatttctcagttctttgaggttcagcccctgaaattagcggaaggctcaacccatcaaaccaggggtgtcttccctcgcctgtcctggaagactcaacccctcaaaccagggatgtcttgccttgcctgccgtggaaggctcaacccctcaaaccagggatgtcttgccttgcctgctccggaagcctcaacccctcaaaccagggtgtcttgacttgcctatcctgggaggttgacatgtttcctcccctttccccctctgaaggtcccttgcacacttcccactcatgttgtcctctctggctgctcccccaagggagaattaggcccttcttagtgttggcgtgctggtataaatcccacagcaggatccgccctaagccatacgaggtagctgtggaactgcagagaggacgcactcactccatccagcagtaggacttgtcaccatccacacaacaccacaagcagggttgtctgtgatcattcacgcacacacacattcagccctccagactttgaccaccaaggaagtactttactggctcccgtggtttcttcttcattggtctgtgcacagtcattgctgtggtatgtga

SEQ ID NO: 165813 - DNA, 417 bp, Homo sapiens
ttgaaccctagctggaatcctcccgtcacttagagtttatggttctaccttccatatgaatcttatatgctgtcaaaatcaacaagaaatgtaaatgcacatgccttgaagcactcttcatgtttccttctaccagtcacttccaagagtttcatgagacaaagtcagtaattacccaggcagactttaggtgttaaatatttttcaaacaagcccagttaatggcatcagtaataaagagcagggcaacaaagagattacagtgtttcattccaacccgacaccctcaggagaacagacagcacaaaggcaaacccataagtgtttatatactccctgagctgtacagagaaagttcacaggaagcagttaaagatgcagcaactaaacccaacatttaactgggtttctttggaa

SEQ ID NO: 165814 - DNA, 411 bp, Homo sapiens
gacaatttctttaaacattaaacatacaactaccttacaacctagcaattgaacccataggcatttctcccagagaaatgaaaacttatgctcacacacataaaagctgtacacaaatgtttatagaaggcttcttcctaatagccaaagtctgggaaaacctatgtgcccttctaaaggtgaatggttaaacaaaatgtgtgctgtgtatcatactaaggaatatcaacccagcaataaaaagtaacaaactattgatccacacaacaacttagataaatcttcagaggattatgcttttatgcatgtaacttcacagtataaaggaaatacaaacaatgtctcccttctctagtttattccacttaccccagtcctcctaggcttctgtgaatttcagaaagcaaaaac

SEQ ID NO: 165815 - DNA, 1726 bp, Homo sapiens
cctgcttccaaacgccttcttcgaggctgaagctgggcaggtctccagaggtgcagcagccacaacaatcccgcagttcaaagttaagcagcagttgcacaacttccagcaactttctcagccggctactaatgagctgaaagccaggaacatccgaggagaagagaaagcttccagccctcctcccttcaccctggaaatccagacacccccacccccaccctcagatcactttaagataatttctttattcgtttgcccgacagaccatggctccctttggaagaaacttgctaaagactcggcataaaaacagatctccaactaaagacatggattcagaagagaaggaaattgtggtttgggtttgccaagaagagaagcttgtctgtgggctgactaaacgcaccacctctgctgatgtcatccaggctttgcttgaggaacatgaggctacgtttggagagaaacgatttcttctggggaagcccagtgattactgcatcatagagaagtggagaggctccgaaagggttcttcctccactaactagaatcctgaagctttggaaagcgtggggagatgagcagcccaatatgcaatttgttttggttaaagcagatgcttttcttccagttcctttgtggcggacagctgaagccaaattagtgcaaaacacagaaaaattgtgggagctcagcccagcaaactacatgaagactttaccaccagataaacaaaaaagaatagtcaggaaaactttccggaaactggctaaaattaagcaggacacagtttctcatgatcgagataatatggagacattagttcatctgatcatttcccaggaccatactattcatcagcaagtcaagagaatgaaagagctggatctggaaattgaaaagtgtgaagctaagttccatcttgatcgagtagaaaatgatggagaaaactatgttcaggatgcatatttaatgcccagtttcagtgaagttgagcaaaatctagacttgcagtatgaggaaaaccagactctggaggacctgagcgaaagtgatggaattgaacagctggaagaacgactgaaatattaccgaatactcattgataagctctctgctgaaatagaaaaagaggtaaaaagtgtttgcattgatataaatgaagatgcggaaggggaagctgcaagtgaactggaaagctctaatttagagagtgttaagtgtgatttggagaaaagcatgaaagctggtttgaaaattcactctcatttgagtggcatccagaaagagattaaatacagtgactcattgcttcagatgaaagcaaaagaatatgaactcctggccaaggaattcaattcacttcacattagcaacaaagatgggtgccagttaaaggaaaacagagcgaaggaatctgaggttcccagtagcaatggggagattcctccctttactcaaagagtatttagcaattacacaaatgacacagactcggacactggtatcagttctaaccacagtcaggactccgaaacaacagtaggagatgtggtgctgttgtcaacatagttccaatggctcctttctgacctgctttcatgttttaatgtttgtttaatttaataggaaacctcattttaaatataacactcaaaaaaatgtaaatcatattgtagtattcaatagttaataaaaactcgagaaatgtgttgtttctg

SEQ ID NO: 165816 - DNA, 533 bp, Homo sapiens
atttaaacatcagctcttcagtatatggaagacccttaaacatttctttgtaactgcttgtgtgagtcaatcacccacgttggcaaagtttccaaagtattctgttgttttgacattgcatatatgcagcccaatagcagccaaatcagtggaaaacactcaccgtgtttaattgtaaccacttgagtcagactaaaaagcaaacaaggctaacgccatctatggaaacatcctaaattcacttaagaacctatgaccccactcccaagtatattcatgccgagtatacttttcacctacccagtgactccctcaattaccttttccttcctatcaccctcccaatagatatctaagaatagcagagaaatcttcatctcttttggaggagaatatcattttaatataatcaaagctccattgatgtctatgtaggttacatctattgcttccttcatatctgcatggcctgtcagtctaccatgcaaagatctttattaattctattatgatcatccttgttgtttgaactt

SEQ ID NO: 165817 - DNA, 220 bp, Homo sapiens
agtaaattggacaaattggcaaacagtttcagaattttaaatatgtacctcatttgacccagcaactccactctagaaatacatcctacagatagactttctttttgcacaagatttatatggaaacacagcttttaaaggcagcgttgtttctaatggtgaaaacaggaaaccctgcaaatttctatcaaataaaaaaatgattaagttaatagtggca

SEQ ID NO: 165818 - DNA, 251 bp, Homo sapiens
cttgctaatttttgtaattttagtagagatgggtgaatattggtcaggctggtctcgaactcctgacctaaggtgatccaaccacctcgacctcccaaagttctgggattacaggcatgagccactgcacccggctgtgaaatactttttttattgtggacaagaagaaggaaattctgtctatgccagtaagactttgtgctcctttaagacagactttcttttaaagtgtttttacttgcagaccttaa

SEQ ID NO: 165819 - DNA, 261 bp, Homo sapiens
aaggacttaactttatgactgtgtaagtgctaggattcaaactagctatgaggcatttccagggtctctcgtttctctgctgtctctgagagatctcaggagaagacagaggacccaagagggcccccagctgcctgctggcctgtgatcaggccctgagggtggaaggtgtcagacggcagagcgcacaggctgaaggtgggctgatctgctcactcactgcttcccaccatggaccagagcctgagaaacaaccatctg

SEQ ID NO: 165820 - DNA, 401 bp, Homo sapiens
tctgttctccagtattggcagaagccagcccaccatgtacaattggtataagagcctggttgtggttcttagaggtagctctctttctcgggctgggcctcctacatatactttacccttgacatactcagagcatgttgagtatcatgccctgtggtctgagtttaatgatcaggcacgaccttactaatgtttttagtgttgggttgtaagtttggaaagggttgaaaccatatctagtacaacttactggtagggagaagaatataatcaaggaagaaagtatgtttaggttttgtcacagaacagtgttaaaaaaatgtggagttcagtgtgagatagattgtaagaattcattatttcttttctaatctataaacttaattattgcattggctttc

SEQ ID NO: 165821 - DNA, 364 bp, Homo sapiens
gccatcccagcacgaataccccactcccactaaacacacagagtcacccaggttgcccacctcctagcacccggctaaagcttggggagtgcacagacttctgagatctggattaagagctcattcacacactgatctgagtaaccctccgagaagttttatccacaaactggtatatgcataatctaaatcaacaatcaggagtaaggtactggactcgagtttgaagtgtttgtcactaaactctctcaaactcttccaggctaactagcctcagagggcttctagcccatagtctccttgtattttctgccctcctcacttggagtgggagggaaccagatgtccagtgtggagagagggg

SEQ ID NO: 165822 - DNA, 469 bp, Homo sapiens
tctacaggatctctgacggtctgtaccccctcagtagatgctctgtgatgtctagctctgggtgagaatggctgaatccaaagccgctggtgacaaagtggggtgaattgaaatgaaccagctcccactgaggccaactggaggtagaaaggaagaaaaatgcctaagacaaggggaacgtgcaaagggacaaaacatagaggggtgagggtacagtgtgcccaaatgtctttattgatatctaacaccttttcaaaaaggatttgaggttgttggtggaaatggtggtgtggggagtgcatttccaagtcaagtactatttcccctatgctgaggcctgtgatgttgagatggagaaagaaacaaagaacagaaaacattttggttgccgttgtcttactttgaagaagaagcaattagtgaaagacataaaacttagcagaaggagaacagattttagatgttgtca

SEQ ID NO: 165823 - DNA, 372 bp, Homo sapiens
atagctcactgtagccttgacctcctgggctcaagcatcctcctgcctcagcctcccaagtagcaatgactgcatgcgtgtgccaccacacttggctaatttttaattttaattttttctagagactgggtcttgttgtgttgctcaggctggtcttgaactccgggcatcaagcaatcctcctgcctcagcctcccaaattgctgggattacagggcatgagccactgtacccagctacttttacgtttttcattctcacccctttcttctggaaacactgcagagaccatgagaacaggagcttgtcttacttgatagtgcaaacagtcttacaaatagtgttcaaccatcgattgcccaaaacacgtgt

SEQ ID NO: 165824 - DNA, 113 bp, Homo sapiens
gtgatttgtcagattaatattctacaccagggttgtccagtcttttggcttccctgggtcacgctggaataattgtcttgggcaacacataaaacacactaacaatagctgat

SEQ ID NO: 165825 - DNA, 456 bp, Homo sapiens
tattccaagggaattcaaaacccttgtcttcatgactttcaaaagcaacccaagtcctgaaaacaacatttttgtgaagtatattagtgtaatccaaaacatgataaacactttttaaagatatttgcagataagactcccctaccctcactgttacagtaacagtgtaattttccctggtattgctctgaacattaaggaattaaaacacttgaggctggatttgtcaagagacctatttttgttttgttatgttgtaatagctgttgtttctgatatttttctttttccttcattctgctttttctttctccaatcttggcttaaagggcaacttcctgtgcatgttcaggaatctgtggcaaagggaacaagtatgataatttgtctgctaccatttggatgttactattgtctcagcagccaggaaaacagacagagcccctgtgagcatca

SEQ ID NO: 165826 - DNA, 211 bp, Homo sapiens
tcaggccaggatggcagcaagggaattagtgaaaagaaggtgggtacattttgaaggtagagcagacagaatttaccataccacgtgtgagtgtgagagagaggagtcaaggatgatttgaagaacaaaactgaataatatgccctttctaaatttcagtataaataaaaaaaaaactatagaaaatgttatcactcagtcaaacactagg

SEQ ID NO: 165827 - DNA, 480 bp, Homo sapiens
ctgggacatgagtttgctgcctctcccatctgcaggtgtagcatggatgctcaattccatttgggccaatattcactgagcacccactatgctgaagttgggagatacctgctgtcgaagtgcgttaattacaaacacgcatcattcaaccccagaaccgtgtttgaggaatggcttgggaggataaagcactgtgggtttcaacagtggaggccacatctgctgatgggatgcttcaagaagaaaatggcatttgaggttgggcatgggggctcaccctgtagtcccagcactctgggaggctgaggcaggtggatcacttgaagtcaggagttcaagaccagcctggccaaaatggtgaaaccccatctctaataaaaatacaaaaattagccaggtgtggtggtgcatgcctgtagtcccagccacttgggaagctgaggcaggaaaatcgcttgaacccggaagacagaggttgca

SEQ ID NO: 165828 - DNA, 364 bp, Homo sapiens
caggactgcctaacttatcagcctagaacagacctttctctaaattacatcaatttataacaactattacatcatcaaataaaaacagcatctttatcatcccccctcagagaacttttgaagttgctacagatatgaatttctctccctttttaccttgtggtctacaattacaatttgccacctttttgatggtcataaaaatttatcttatcttctgtgactttgaaaaaaaaagcaattctagtctttcttttctcaggccttgccttgatttcccaagcctcaatcacatacaaaaacatacaatgatgggctgggtgcggtggctcacgcctgtaatcccagcactttgggaggccga

SEQ ID NO: 165829 - DNA, 463 bp, Homo sapiens
agagaagtgaggtcacaaagcaaactgctgcccccaaaattggacagataggccaatacagagaatgatgatgtatcagagcaaaaaatcccatggatgggaaccagtgctggggtaggaaaacctgaatgtaactgctagaagttaggtatggacaagtctgaaagttaaaaactccagtcatagaaggaacccccacactcttgtgaattttaactttagaagcttgacctagttcttacagtaaatattgggagaaaaatccccttccgtttccagcagtgggagggaaaaaagaacattttgaaatatgttagagaactcagttctcaacaaggtctcccttcaggagaagctattttaactagaagctaccctgctggggctttatcaaagcctaactgacctgggaaaaactcaatacccaatccagcccacctagccatcatggcccacctaagaa

SEQ ID NO: 165830 - DNA, 367 bp, Homo sapiens
tctttgttccttctctacttgtactgtttcccttgactagctttaaaaaaagcttttattatgaacattttccaatatacacccaagtgagagaatagcaaaatgaaccagacttttctaactattgaaatattataatgaggaatacaaaggaaaagatggacaggtataatttaaattttttcttccaaattttgactatacaaaactaaaagaagaatattaaattggaaacatacttagaattaatttttggtataaaatattaaaatttataatatatgcataatgtatatgtcagtaaagcaccaagatcctaaaaatgggcaaaaaatacacaccaataattcacaaagaatacaagttt

SEQ ID NO: 165831 - DNA, 314 bp, Homo sapiens
taccacaggccttaatacaacaacagcttctgtcctccaattttccattgggtcaggttcatgtcgctttagttattcagaccccagcatcatcgtgttatatgccaagaataactctgcggactggattcagctagagaaaattagagccccttccaatgtcagcacaatcatccatatcctctaccttcctgaggacgccaaaggggagaatgtccaatttcagtggaagcaggaaaatcttcgtgtaggtgaagtgtatgaagcctgctgggccttagataacatcttgatcatcaattcagctcacagac

SEQ ID NO: 165832 - DNA, 178 bp, Homo sapiens
ttctttttcattctctatgtctctattccacatgctgtttttcatattatgttcacataaccctttaacatccaggctactttcttctgaattaaacgataatgtacagctattaatatatatctggaaggctggtccaactgagaaacagccaccactttctcattctaaatgccag

SEQ ID NO: 165833 - DNA, 336 bp, Homo sapiens
cctgagacatttctctcaacatgggtagatcattggaatggcagtgtgtacagtgtgtgtaccagaacttgagaaatgtgaggtcggggacgggaggtggaagctcctgtgtcgcctgggctggggcctcccgcccagtcctcgcaggccaaagggtgacccatttcttttttccagtcaccaggagctcggatggtcactctgaggtgtgaatagatatgtttttccttcagttcacactgaattcaactcaaaccagcaaaggcctttgggctggggattctgtggttgcagaggtctagagggggtggacttttgcagccagtgtggagagag

SEQ ID NO: 165834 - DNA, 686 bp, Homo sapiens
cttcttttgagaagtgtctgttcatatccttgtgattttaatatagagaacagctaagcttacttggtttggttgtaaagagggcacagaacttgaaaaatgttttaacatacttttcgttttcatattgtacactagaatattttcagtgtatataaaattacatatactacttacagagaattcagaaaaagagaaaagtacaaaaataaaaattctctataatggtaccatcttatgactatgccataacttgttattttaagtttctttgtcatgtgtacttgtgaagctttttggttttatttttaaacaagtgttctgatcaaatttttgactttttttcttttaattttttaaaattatgcctcattttctaaaatttagatgctacttaattgtttctgctgtttgaattttttgtctttcttttttagatcccctattatcttttgttttctttctttcttaatttgttctctcctttttgtgtagcatattttttgatagtttcttgagaaaaagacaatttgggaaatatgtatttgagactttacgtgcctgaaaaacatgttgtagcttcttgcttaatagtttgacccaatttaaatttcataattgaaaatttttttttaagattttgtttctcgtttccaaagttgctgttgagaagtccagtgctaatt

SEQ ID NO: 165835 - DNA, 269 bp, Homo sapiens
ggaggggtgctagggacttcagatgtcatttcacaactttatacaaggaacaagatttttgtggcatcaatgcatattttctcattgtaaattttacttggaatacatagctattagtgttgataatttacaaataccctgttcaatttcaaaaatgatttttgaagttgttttcataaaagacaagttgatcataagtcctttgatgtttacacagcattttgaggccccttctctttttcagtggtatgttcttcccaaatcaattt

SEQ ID NO: 165836 - DNA, 398 bp, Homo sapiens
cacttgctccctaggagaagtggagcatttaaactaagacttgaaagtgtccaatttgtttgtggcactcctgagatgaaaacacattttcctcccgccaccaccgatggcttcacataccagaattcagctggaaacctagggaaaaaaactaaccggaagaagaaaaccatgaacgcttagaaatctggacccaaccacttgggatcctaaccactctgagagttggtcaccttttctttcactccaggataagcttgtccaccggttagttgatttgttgttgttgtttttataaaccatattcctacagactagttgatttttaaaaccaggatgcaaaaatataaggctcagtcaaaactttaaatcacaggacagagatgagatttaaaatt

SEQ ID NO: 165837 - DNA, 209 bp, Homo sapiens
agatacctctagaatggctaaaattcaaagactgagaatgtgaagcaactgtaactctcatatactgctaatgggaatgcagtggaacctcggaagataatttggcagtttcttaaaaagttaaatatacacctgctatgcagccactgttagatttttactcaagagaagtgaaatatatgtccacacaaagacttgtgcactgacat

SEQ ID NO: 165838 - DNA, 475 bp, Homo sapiens
tcagagaaggtgagaatgagagctatgtacagaatgatggagggaagcagtaatgaagacgaagggggaccctgggtgcagatgagcggtgagttgattggatgtgacgatgaagtgatgacatgttgttttctctgtttataaggtaacaaatttaaaatttgtttaaattatacagatgagaatgagagttgccaaactcctgtgtctaagtgtggtgacttttataatgatggcgtcagaggcagcttccctctgcaacccctcttcagccagaggacagtgacttatcagttgtggccccagtgagcctccctgtaacttggagatgaggggctacaccagaaaagctcaacccgagtgaccctggcccctgaaatgattggcaaaatagagtgcgtgtctgggcgtggcttttcttctgtgagaaaggagtgttcagttgtaactagaattttaaataggtgcagtaccc

SEQ ID NO: 165839 - DNA, 341 bp, Homo sapiens
ccactgaacccagcctgaacattatattttttttaatgaaggttataattactatactttttaagaaccctaccaaatggttgttcatattgagtgtatagtcaaacaaaaactttctgggctctttcattgaaaccattattaaaccagatctcttcaaccctgctagtaggctaattgagctgttgaaaccaagggcaggcatttacatttattctcattgatcttaattttcctggtttggtaccatcacttccggcttcttaagatatatttgaatcttattcgcaacatatatcccttctagccttctgttacttcgaaatatgataaccaaaaca

SEQ ID NO: 165840 - DNA, 386 bp, Homo sapiens
agccagggacactgagatacagagacactgagagacagagactctgagacacagagacactgagacatacacacagagagaaggcagcagggagaggagtgtagccatggttgtgaggagaacctgctgagatgagctttgtgagtgagcctgtgcttttggaggggagatgaaggcggcttgggttaggggatctcaaacccacctgggcaaagccagaccccccttggaatgggtttccattcacaagttgaggagggcaatgcctgcgccagtgaaagaggaactctcacggaggaaacaggcagatcctcatcacccttcagctcctcatgggcagctcctcatgggcagctcctcatgggcagctcctcatgggcagctcc

SEQ ID NO: 165841 - DNA, 124 bp, Homo sapiens
ctggctgagccccaagaagctgaagacggaaggcacgggcgacacacagacacagggaaaacatttgtcctggcttccccagcacaggggcagagggaggaccctatggaagccctcaggagca

SEQ ID NO: 165842 - DNA, 435 bp, Homo sapiens
tcaagtttacatgcagtgattgcttgtgtagtacaggcaggaggtacactgagtttacaagggagaggaatgagtgtgaattgacaaagagttgaggtcagctggtccggatggagaggaaataatatggggaaattgtaacaccaaggcgagagaagtaactgggttggacccagtttaaaatatgcaaaagtggctgggcgcgttggctcaagcctgtaatcccagcactttaggaggccgagtcgggtggatcatggggtcaggagttcaagaccagcctggccaagatggtgaaaccctgtctctactaaaaactacaaaaattagccaggcacggtgacaggctcctgtaatcccagctacttcagaagccaagggaggagaattgcttgagcctgggcggcagaggttgcagttagccaagatggcgcc

SEQ ID NO: 165843 - DNA, 215 bp, Homo sapiens
gcaagtgctgcagacatctccctaaagatgacaaccagaaacaaaatgcagacctctggctcaagtaaagccattcccaccaagatttcttatttggtggccacacccatgtcagaagagcatttcaggtctgtggcatccacacccgaaacattaattgctgtgccctgtgcagctgtacattcacaatctctaactagccagtggtaatggag

SEQ ID NO: 165844 - DNA, 594 bp, Homo sapiens
  misc_feature (576)..(576): n is a, c, g, or t
aagctacctctgaaagacatcatccattatctctccataccaccaccaaaaatttttgccaccccaacacttcactattttgttttatttttcttattaatataagaagacaggaatgtcaggcctctgagcccaagactgcaggtatacatccagatggcctgaggcagccgaaaagtacaaaagaagtgaaacagccagcccctgtcttaactgattgaccaaccttatgactttccattatgacttgttcctgccctgccccaactgatcgatcgaccttgagaaattcttctggacaatgagtcttatgatctccccacaatgcaccttgtgacgctctcctctgctgacaatagataaccacctttaactgtaactatccactgcttaccccaggcctataaaactgccccaccccatctccttttgctgacttctttttcagacccagtctgcctgcacccaggtgaaataaacagccttgttgctcacacaaagcctatttggtggtctcttcacacagacgagcatgacactgcagtctagttgaatgtctttcagaggtaagggatnctctagaatctcacctgc

SEQ ID NO: 165845 - DNA, 307 bp, Homo sapiens
agagaatcccatttcactaagtataaaagaggggattttagagaaggtctcagaagaaagagatgtgggggtttggtgaaactcaccagaggctgaaccctctccagcataacacagggattgggaggagcagggcagcattaggccagatgtatagcccagtgctgctctctctggacttgtttgctagctgagctcatccatttacataattttcagtgccatttctcagctaatgagtcctgaacttttgtcttgaggctagaattctccttcaaacagcagttttaacactcaacttctttct

SEQ ID NO: 165846 - DNA, 332 bp, Homo sapiens
ttttcacaaaaataggatgtaaaaaaattgagaaattgttagcaatgggtgacctgagttcatcaactccttggcatttgcagcctacctgtgcaatcataggagatggcctaaaggaaggacttgagaaactacatgatatgatcattaaaagaagaaaaatgttgcggcaacagaaaaagaaagatgaatatcaatacctattatatctgtgtggagtaggttttctctggtctgattttgacaaatagaagagtgtctacagcgtggtttgcctgcctgtctgccctcctggatgctattaaagctttgttttgttgaacaatcagatg

SEQ ID NO: 165847 - DNA, 212 bp, Homo sapiens
ggatcctccgatctcggcctttcaaagtgctgggataataggcctgagccactgcacccagcctcattcaatgttcccctcttatagttacatttcaaactgccttttactataccaaaaagtatagtcattaacatgtagtttatggaatactatcactgcagcactcatccaaaaatataatatggtatatggtatataataaaatataa

SEQ ID NO: 165848 - DNA, 355 bp, Homo sapiens
tgtttatggaatggaaaggaaagaaagaggataattggattccagggatttcccatgggtattcaccatacaagttacaaaagcccatggggactcttctacatcctgacatatagctccacagagaaagccagaagccttgtcaaacaggtaacagcccgaccatccagagctagatctgttgaacaaacaaagtgagccctcagaagcaattttcggcagagactattcccccagggcactgagggaccacagctgcctttgtggggagaacaaagggagtgacctgaccaccagagtcacaagaagtcacatctaggagtggatagcaacccttccaggcccgaggagagga

SEQ ID NO: 165849 - DNA, 391 bp, Homo sapiens
tgaatcaatcatctgttaccttaaataacttccaaagcaaaatacatatcaaaccataaggtgttgtttctttaattgtatgggtgccataagtctctttgagaaaactaatgataataatagtaatatttgtcatatacttgagtacttttaatttgccatgcacaactttaaattctttttttctatatgtctcagacagaatagatggagtgtgcaaggatagatggtgaatatgtattttggtaaatttgtagagaaaacgaagaaaacatataattcactaaataatgataatatccaatgtctgttgggggcaaagagcctagaatggacaaaagtagtatgtaaatttagaagggtgggagatcagatttaaggcatcctgagg

SEQ ID NO: 165850 - DNA, 236 bp, Homo sapiens
actgccaaagtgctgagattacaggcgtgagccactgtgcctgaccttccatgttttattcacttttttctttcatagggtttattttaggttctatgaccttgaaaaagtatctaaaaacatcattgagccttacctaagtattaaattgaaaaagtaaaaaatgcagtagcatttgactcttttctacaggagaaacttaggattcttgtctttttctctgccttgcctttgtt

SEQ ID NO: 165851 - DNA, 511 bp, Homo sapiens
acgtgtggggcaaggccaggaccctgccaggactggctgcttggctgctgctgcccacaaggctgcacaggtgcctcatgtcggtgaatctatctggtccagtgcttccctttatgcctggggacttagcctcctgcaatggcagcacatcaagaaggatccattgtataatgcagttcacaccaacaggtttataaaacctcaaggccagtgcattaatccataaagaatgatacaattgagagaaatacagatcaaacacttctgacagcaaatgtgcattttctctcccaagacagatccgtgtgggaagtcaaatcacaggaaacagatgttggttaggtcttaaaatgcattcccttgccagtccaggtgtggtggctcacacctgtaatccaacatttcgggagcctcaggtgggaggatcccttgagcctgggaggtgaaggctgcaatgagatgtgattgtgcctctgcactccggcctaggtgacagagcgagaccctgtct

SEQ ID NO: 165852 - DNA, 244 bp, Homo sapiens
agatggactgccctctgtgccaggaggtggctttgagatttaatcagcagggtttgtcaaatattcttttatccacacaagtgctttccctgagcagagtgcaggtcagtaaaaatgtcttcattgtaatacactgccagtgttgctttcgcgacaggcaaccttagccgttggtacaccctggtccaccttccatgtctgcttggttgcagagaacttgatctgaaccagctggtatcctaga

SEQ ID NO: 165853 - DNA, 203 bp, Homo sapiens
tctctccaccctgtgctgcctggggctggggagggggtaagctaggtaatgtaaaattgtccctcctatcctctttagtacatcttatttctgtggtacaccaaggtgctgtaatctctagaggttccttaactcttgcttcctgcttctgccatcgtggtcactgccagctaccgagatgggtgtcttcggcttcctgagtt

SEQ ID NO: 165854 - DNA, 186 bp, Homo sapiens
agtagtggaaaatctgacgttagtggcgtaaatattctgttttttataagacaggaattctgaaggtgggcagttgctaatatcaggttaatgacagtgatatcaatgttaagatatttgctgttctcttggctgctccttcaaggtggcagaatggctgctgtatcagccatcacatctgcattc

SEQ ID NO: 165855 - DNA, 850 bp, Homo sapiens
tcactgctacagctgctttttacccatgagggagacttcagtgcagcattatgatttgctgccaaatacataaaagcattacctttaataaaatccccaagacatttatgtggaccaggtgagggctaattctatcttttttgactctgatagctctttaagaattttaatatatggagggtattagatcatgtagtgttgattacatgtctttcattttatagacaggaaaactgagatctacagtagttaaaccccttggccaaggttacacagttcgcggccgatctcctgggtccttagtaaggctccttctacataccaccctagggaagaaagcgctgctagctgggacctggaactgtgtagcaaatgcaaatggctaatccccaaaggaggcagcaagctcaattctccggtcaggctttccccaaaggcactgcttcatcctcttggctgatgacaactacggtgaatttaatcatttgctactggcagtcaatataagtggtttaggcagcatctgatttaataaatcaaataaagaacgcagtaaaacttgatgtgatcatcagatctactgaataggacccagagaaacaactatgggctccagcacaaataccagaaaaaagaaaattctgtcttctctggcacctatctctggcttcctgaaatagtaaaacaggatttttaaatacttatctgtccatatttgttttacagagcattcttcctaatttatcttgtattcaatcagtacccttggagggggtattagttcaccttcctcactgcaaatgccagccattcatatttaataagcaataagaatcaggataatatgctt

SEQ ID NO: 165856 - DNA, 224 bp, Homo sapiens
caactcatgaaaagactggcagtcacctaatttcatattaatagcagatgagatgaatcatacaacacctatatgttggagtagatccaaccataggaaagagtggggtctctgatgtgaggacggtcgggctgtgacgcctgtcaccccactggtcaccagtgttgattcggctgatgtggctggctcagaggcaggtgtccccctccttccccactgttccc

SEQ ID NO: 165857 - DNA, 605 bp, Homo sapiens
cacagctcgtgtttattcagtcactgctccctgaaaaagtggtcctcaaagtgcactttctggctacaatggccacagaggcataaggtctgggttaagaaatatctaagactgcttcatctgtgttccaccctcatagactcatgagtcctttctcaagcaagcataaaatcaatgcaattgaatctttttgttgttgttgtttttacaaaacactttgtgcagaaggctgaattttaatctaagcaaattgtttctggtgattataggataactaaagtttactgttctagatcactctacaagtcaactttccttctctgattttagatctattcagagagcatctccactgtgaaaaacatttatgataatttgctgccactacacggacttccacaaactcaaccttccttaaccccagaaaccacaaactttcaaaaatgatgacaaggggaagagatgaaagatgctggagcaatgcagcataaatcccaacccactcctctgctctccacactgtatggatggaggtgctgaggaagttggtggggtgaggagaggcctgagaacactcactgatagcctccagtttggagtgacat

SEQ ID NO: 165858 - DNA, 471 bp, Homo sapiens
atttatttgtcagttttttatttggaaagaacttcaaaattatggaagaattataagaacataacaaagaacttatttgctttatcattctctctccccatttatatatgtgtatgtatatatggatgtcagaaatatagttagatatcagttttttctctgaacaatttgaaagaaagttgtagacatcatgtccttttatcctttgagaggaatcagcatgtattcctaagaacaagaatattctcttacataaccatataaagatcagattaaggaaatctaacactgatattaaaatgttctaatatacagtctgttttcaaattctgccaattgtctaaatagtgccttttatggcaataggccatttccctaaaatatccctctgagcccagttctggtcactgaaagtcacccataagaatattccttcaaacagaataaaagctatttgaagacggctatgca

SEQ ID NO: 165859 - DNA, 424 bp, Homo sapiens
acagaggtgttccgaaagtatggtaggataaaaatttatttttctttagactcacatagatgattcagacctcagaccagatgtgttctcagaaaagtcttccctgacattcaatttacagctacccttccaaatctcttttatcatatcatgaagtttttaagagtttcattgtcttcagaacacttatcgctatctgaagttacctatttatttcttccctgtttattgttcttattaaagtgtggaccccaagaaagtcaagatgttctttctcttagaggaaatagagtgtaatggtttggtgcactagggccagactgtctccacaactttccagtatgatattgacaaagctgtttcacctctttgtaccctgaaatggagctaataatagtcctaacaggcaacaatagttattgca

SEQ ID NO: 165860 - DNA, 348 bp, Homo sapiens
acctttcggctacctgatttggataaatggagaaaaaccggggcctctaactcataatgccctcccgcgttcaagatgccagttttggggcggagatttctaaattaaagcctacatcccgcgcgggaatatctgctggtaatttctcgcctgccagaaaactcctttgatctctggctgtggagactcgggacccctacccaagtatgggacactgcctccgttggggttatctcagatcaatggaatgggaacaagctatccggcctgggcgccgttcacgtctcacatctgagatcgtaacaccgactgtgcttaggacctcagcaataactttttgccgtctct

SEQ ID NO: 165861 - DNA, 269 bp, Homo sapiens
gagcccagatgcctgaaacaactgagaacaaaagaagggtgagtggcctcctacagatggcactgttctgcaagattgggaaaaggcttggaacctttccctttaggagggaaatgaagtgagccttgtctctaacctttcagtgtggtacccaaagggctcgtttccatctcaattcatgccacctactaaaggactggtggagcctggatgcctgtgacaactaggaataaagggaaatgagtgggtaccctctacagcaaacagta

SEQ ID NO: 165862 - DNA, 261 bp, Homo sapiens
tccaatccagagacctttgtcgggaattctggctgctgccatcaataaaatggaagagaaacagccaaggtaactgagttggagtcccaactctgccattaataagatgagtgtgcctccaaggttcagaacttgtgggtatttcaaacattgagtgggaacttctagaaggaaagagctgccataaagaagccccacgagggctgaagagctggcaggggtagagggcccaagtcccgtccgctggtcaggaggcttttc

SEQ ID NO: 165863 - DNA, 155 bp, Homo sapiens
atcttgagttgatttttttatatggtgtaaggaaggggttcagtttcaatcttctgcatatggctggacagatggaaatttcaagtaaccataatagcaatgtattaagagataatagcatatatgtcaataaaataaatgcatggcagtaatta

SEQ ID NO: 165864 - DNA, 477 bp, Homo sapiens
tcctcacgataagtctgtgaggtgcaggtgctattaagcgtctcaccttatcgaagcggaaagaggcccggaggtgacccagtgcacctgccagcaggtgcacgactgtgtagggagtgaggattcacaccaaggggggcagtccacctcgtttgcccacggcattcccgtgttgcagaggaggattccaaagcttgtggttttgttcatttgttttcatttgtctgtccttgcattcctctcctcccaacacatatttactaagcacctactgaatgctgtgcactgggcaaggaactggagattccaagatgagtaaggtgtggcgccccttaatctggtgagggaggtggatgggcaacagctgaagggtgggcggtgcctgatgcaggtggagggactccgaggaggcttcccaggggagtgtccaagccaagcagtggaaaaggcagagttaggtcaggaagcaggaggcat

SEQ ID NO: 165865 - DNA, 155 bp, Homo sapiens
gagaagtgaaaggaggtcatcaaagaacaagcgttagcctcaagctgcttgctgtcccccttaacagaggtggaacacggaaaggtggagatgaaagtttggttttacacacgtttgagtgttttttgcttgcctgtgatctctctcaggttgtg

SEQ ID NO: 165866 - DNA, 425 bp, Homo sapiens
tgccatccatccagaaatgccccaagtgtgcactaaacccaggaaagacctgagataggaataatctaggtagctttaaatgttcctgttctctaggatccaaacttagccatccccactaagatgctgggcaaacgttctcattggtacataagcatcacagaaggctggtgagaaggggaccagccttttctagtcattatcaaataatacagcagcactgtgctccagcctcacaggctgctatctgatgggacgggtgtgcattttggccactgatcaaaagaccttggttatcacaagaaccttatcagaaaagccccacagcattaaacctgagtgcagtattcaaggcaaggttctgatggatttgttcaatggctatgggattcagatggcagacactacatagttgcaaaagcttt

SEQ ID NO: 165867 - DNA, 330 bp, Homo sapiens
actcatggtaattagtgtttctaaacaactactgtaggcatcctagtaaaaactaagatcaaaacttactgtgttctgagagagtaaagacgtactctcactcttcttttttaaaattcaaaagaaaaagtaagcgagactccgactcaaaacaaacaaaaaccaaacctctccttacatttaatctatgctgaaaaccagcatgagtcctgattcacgggtcttctgctgaagcaaattctagcaatataaaacacagctgtgtcctggaccccttttctgtatttctttctttttttattttttttttttgccccgagacggagtctt

SEQ ID NO: 165868 - DNA, 249 bp, Homo sapiens
ctaacaagcctcccaagggaagtcctccataatgctgacacaaggtctggcacacaattggtgctgaataaatggatggtcagtaccacggtgaagaatggaatgaggacaggagcactggctcatgccagtagtcccagcattttgggaagtcgggggggcagatcacttgaggtcaggtattcaagaccagcctggccaacagggcaaaacccagctctactaaatacacaaaaattagctgggcgt

SEQ ID NO: 165869 - DNA, 238 bp, Homo sapiens
ctagggtcttaagccagctccataggaatcagctgtgtgctgtgccctctaacaacacaaccacagtgtctagaatctacattttaaaagataaccttatttttggtcctctgatctggttaggtaaatctgacattaacattttagttctgggtagaaacctggcattcatgcaaacaaagcaggacttggtgtctagaaaaagacgacatagctgggcgtgatggctcattgaggt

SEQ ID NO: 165870 - DNA, 440 bp, Homo sapiens
  misc_feature (103)..(103): n is a, c, g, or t
actgtctggcactccctagtgagatgaaccccgtacctcagatggaaatgcagaaatcaccgtcttctgcgtcgcccacgctggaagctgtagaccggaactnttcctattcggccatcttggctcctcctcgcagcaatccagcctgaaggacttagctcatagatgtcttctgaaatgtggaagaaatactttcgtttgtcataaaacctcagcaggagattggagtctggaagagggaggggagaagaggaggacctcagggagagattgttttgcttattggtgtttaattaaaaaccaaacaacttttcctattaacttgatgctacttattaattgaaatgaggagactgactctggatattgggaaaatttatgggcacatacagaggaaaagacatgtggggacataatgagaggacagccatctgcaagcc

SEQ ID NO: 165871 - DNA, 504 bp, Homo sapiens
atggagatgacggcgcttgtgagttaggtggaaagctaactgagaagctgagagaggaggaagaatggaaaaatcaccatttagtatgaaacatggagacggagatagcccgtgactttgaccgggccacctcagtcattgtgtaggacaaaagtcagattggaatgtaaagaggcagtggaaacgtcaatatgacaactctgttctctgacttctaaaattctcttttaattacctctgtcagtgaacatgattcagtaaaagtaattatgtggggattttgacggaaggggccaacaaaatgttagaaccaccataatgtggaggacaaagcactcagcattctggtttactctgaggactgtttaaaagtacaaaatgattggacttggtggtgaacacctgtagtgtcaactactctggagacagaagtgggaggattgcttgagcacaggagtatgcttctagcctggacaacatactcaggcactgtctccaaaaaaa

SEQ ID NO: 165872 - DNA, 177 bp, Homo sapiens
ccagaggaggacatggctgcccactggaggtcagccagtgactgcccagcacagtatcccccaaaaaaggctcagaacaggtcaaaaactcatagcaacccggtggactgctcaatgttgaaaaagcaaatttccaggaactgtccctaaagatctattcttccagatttttcttgg

SEQ ID NO: 165873 - DNA, 109 bp, Homo sapiens
ttaaactctcatgcaggccaggccaggagaaggacatgtttagagaccattgggagcaaggtggtacactgtgcagtgtctgcaactcagacacacacagcaaatttca

SEQ ID NO: 165874 - DNA, 287 bp, Homo sapiens
acttgatatgcataaaataagtaataatgacaaaccacagaaaaagattgataaaatgaatcgtgaaaatatgacaagaaaaatgcagttacagattcaaaaaccaagaaacaatacaaagaaatgtaattacatactacttgcctctgctgtgaaaaatattacatgatcataataatgtagaaactattcattaactttttttttttttttttcactctgtcacccaggctggagtgcaatggcaccatctcggctcactgcaacctccgcctccggggttcaag

SEQ ID NO: 165875 - DNA, 371 bp, Homo sapiens
tgctctttataaaaagttcaaaggaagatagcaataatatgaaaccaatagttacaaaaacagaaagaaaacccatcgtggtaggtatatctgtgaccagaatgactacatgttaagagtaaaggttaataattaaggcttatgacaaaccgatgaataaagattttagctgaacccaactgactctgagatattaaatgaatatatacgtaaaaataaaaaatataaaggtattgcacctattgtgcatggattttttccctcactttttcctcagaaagtaaatgacactttaaaatggatactagtagaagccacactgtggtatctatgatagaaaggaatatttcatacatgtggaagcccagaga

SEQ ID NO: 165876 - DNA, 354 bp, Homo sapiens
ggtgacaggggtgggcctggtacttctctaagctgccagtgggcctcctgagtagccatgctctggtgagtgctcgggcacacggaggctctcgaggatttggccaggcgtaatgagatatgtggcctgcaggcttgggtggcactggagtcacgtgtccctctgtatttttagctgttaattggagggatttttcagccttgttcaatcaggtgcctgaacatctaggcccttgggctcctgactcctgagtcaggccagattgttgcttgaggctctgcggtcaggcttgtagaaagcagctcagagccctgccactgctagcgtccctgtgctgggcggggtacctggtgc

SEQ ID NO: 165877 - DNA, 1150 bp, Homo sapiens
aaaaaaaaaaaaaaaaaaaaaaaaaaaaaaaaaaaaaaaaaaaaaaaaaaaaaaaaaaaaaaaaaaaaaaaaagaactgctgcatgatgctttcacttatggattgttggctagacttaagatacctggccccaaccatgtggcccccagctctgagaagtatggtttttgttttgggtggtcaggaatcccgctaaaaatcagatgtctctgactacagagaaagtattagggaacaaccagcagttcctagcagcatatttcagggaatgtgatttggcatataatctaaatacacattggtatctccccattaaatttaatctaggctgcatattttgtaccatcatctcattatggtgtcttgtaattctttccacttttctttccaaaggaaaagcggtgtctgatttggcaagaatacatttctgcattcaaagttgaaatgtgaagataaacctcacccacttggaataggataaaagaaaatcccctggatagagggaaatatgcaaacagttctattaccatgtgtatcttttcctgagctgggtctttatgcaacaaaggaactggaggtaatccatgccttaccgtggagtgttcctgactcagcaaccagatcccatcatcacagtaataccagaagaatggaaaaaggtgcaaagactggactttcagaggaatctgttgttgtttttttttttttttaattttaaagcttaggtctgaaatgggcgcgttttaaatatttcagcacagtgcctaagaggataggctgcaaagtcagctaggcccgagttgagaaatggcatttctacttacagctggctatttttgaacaaataatcactgatctcagtattatagttgcctagcttaaggtgacaacacacaaagtggatcctgggcacgttagagggaatccatttggcccaattgaaatttggacaacattgcctaacacccggaaagcaagatgcttgttttaatttgtcaccctcctaacaaagggtggcgtactaacagattcaggccatattttgagtagaaaagagggacatttatcttttcacagaaatctttagggatatcgggcactcactttgtgacacaatgacaactattgggtcaccctttcccaaaattg

SEQ ID NO: 165878 - DNA, 190 bp, Homo sapiens
gtcagtacctcagttagataatctaggcttctgcaatcatactgaagtgtaatatccatacaacaaattgcacaaatcacagcatgtaacttgctgaatttttacacagtgaatatgccccaaaaaccaatacccagttctagaaatagaacattagcagcccctcagaagcccctcaggaggctgcttt

SEQ ID NO: 165879 - DNA, 428 bp, Homo sapiens
gataaaacagtctgtgaaggagtattgaacatttatttatttatctatttatttttaatgtaggtaatgttttctaaagagacaggtctcactatgttgcccagtctggtctgaaactcctgagctcaagtgatcctcctgcctcatcctcccaaaatgttggaattacaagcatgagccaccatgcctggcctaaactctaaaagcctgggcaaaataattcagagagactgtaaataaatggcctccttcaataaaacaaattataaaatttctaagatgttagatgttgaagagctctagaaagaaaatctctgagtgagagcaattacatttaaagaagccctgagtctctcacttgagttttttctctagagctgcattgtttcctagtgtagccatttaagtcaaaattggccatttaagtc

SEQ ID NO: 165880 - DNA, 371 bp, Homo sapiens
tgtgggaatcagaatgtgtgccttactgtagcacgaggtggttgggaggcccatatgacataatgtgcatgaaaatgctttgaaaactttcaggccatttaaagtcactaattgaacttcgacaacttcttgctgctggaatattcctttcttccctttcttaataaattctgcccgtcattcaaaggcttctcttagctcttttttgatctcaaaggtttctttggagcccccagaggtccctctcagaaagaggaagtgagcgaattttgccacccgtgtccctcctgccccacccaccagatgacttcactattacactccatgttttcacacctccacgctctgcccagttctgtccctgtgctctg

SEQ ID NO: 165881 - DNA, 131 bp, Homo sapiens
gtgatccaccaacctcggcctcccaaagtgctgggatttgagccaccgtgcccggccctactcttgattaaatattttaaaggaaggggttagtcttttagaaggtaactaggggaggagtaatactctta

SEQ ID NO: 165882 - DNA, 844 bp, Homo sapiens
caatatccctgaggagcagcctgtggcttcaacccccaccacagtgtcagatggggaaaacaagaaggataaataagatcctcactttggcagtgcttcctctcctgtcaattccaggctctttccataaccacaagcctgaggctgcagccttttatttatgttttccctttggctgtgactgggtggggcagcatgcagcttctgattttaaagaggcatctagggaattgtcaggcaccctacaggaaggcctgccatgctgatggccaccctgtttctcctggagctggagctgcgcgtgttctcagcaactgtggtggctgtcctgttttgtttgcatcttataaacctttacctgattacattttcctcttcagtttagctgctagagaacttaaagtcagattggtggctcgccagtaatgagagtttagagtagaggtaaactttatgacatagtcttagactcttccgtttctcctcagccaacatgattcacatttactttattttgctgtactgtgagtgtctttgtgtttcctgaattccttctggaataaggcaggctggtagtaagcacaggtttctggtccatctcatagcctcaggcagtgggtggtgctgtccatgctccctttctgggttacctgtggtagctctgaagttgcagggctgcgatttgaagcctgatttagtacaccgtgtttctgtcatgttctgtggtggtttgctcctgacatgtgagcattcaccctgtggccctgtgtttttccaccacacctctgcctggtggcatcctactggatgtctcagccgagccactctgttctgaagatgccct

SEQ ID NO: 165883 - DNA, 160 bp, Homo sapiens
tcaacagtaagctattagtagttagcctactgttagtagaagttaaagtagcattatgaagtgagagggaacaaagattttacaaggaaaatgaaaacaggaatacctcttaaaaacgatcaaaatccctacaaacatttaaaacaactttaccttacag

SEQ ID NO: 165884 - DNA, 382 bp, Homo sapiens
catgacagattttcattatgacacagaatgtcaggtctcccagatgccagaaaatacatttacttaaagccgttgatacgtcttaaagcggtttccttacagtgtcattggaggacagtgtggagtgcagagagacatgctttgaaatgggattgatccagtgctccttccttcactaccacatgaatgctgggcagcccagggtcaacccaccgcaccctcaactcagacggttacctggcacgctggccacagtctacctcactcttatcagagtctgagctactggcagtgctttcagctgtgagttcaggcacctcaaaccttgtttttgtggtgaaggatcctaaagtgctgtggggagtgatcacatttttcacaa

SEQ ID NO: 165885 - DNA, 251 bp, Homo sapiens
aaaagtacagaagcatattgaatcatatcactactgtttaaaaaataccactgtaaataaactattatgaaaattaaatatagcttaattcatttctatctcatttaaatactctgttgtgcatatattttctaatatacaaaataggttagtacaagtagtggatgcatatgatttgtaaataaataaatatacacatatcgaggtgccagtcccctcaattttttagagcaaaggaataatcaaagagg

SEQ ID NO: 165886 - DNA, 303 bp, Homo sapiens
ccagagtatcccccgccatttacaactatctagacaaattatatcctgtcaaattgaagaaaatgagttgggccttattttaattgtaatattatactaattgtctaggttgtcgtaaagggtgatataatgaaaattgaatagaaaatatgacttgtattttgaaactttacatcttgaaaaaaaaggaacataggatgagtgataattttgggatggtgagttcagcctgggatcttttgaatatgtgctgttggcaaggcactgttgatggaaatactaagcagatagttgtaaatggcg

SEQ ID NO: 165887 - DNA, 381 bp, Homo sapiens
acactagaataaaaagtgatgttagaataagtaatagcaggtcacatttattagtttttgatttaagcaaaagggaaataattttagccaaagaaggaaaactatgagaagacaaattatatcctgtcaaattgaagaaaatgagttgggccttattttaattgtaatattatactaattgtctaggttgtcgtaaagggtgatataatgaaaattgaatagaaaatatgacttgtattttgaaactttacatcttgaaaaaaaaggaacataggatgagtgataattttgggatggtgagttcagcctgggatcttttgaatatgtgctgttggcaaggcactgttgatggaaatactaagcagatagttgtaaatggcg

SEQ ID NO: 165888 - DNA, 389 bp, Homo sapiens
agatctcacctctttctagctgctcccatgtttcctgccctgattgtcaaggtagcttcactcccagtttaagtatctcttttttcagtgaaatgttcagccctcacctacccagtgtgctcctagaacaacttctcctaggtctttctttttttttcttgagacggagtctttaaaagagcagattgcaaggcgtaaattccggccagacacagtggttcacacctgtaatcccagcactttgggaggccaaggcaggtggatcacttgaggttgggagtttgagaccagcctggctaacatggcgaaacccatctctactaaaaatacaaaattagccaggtgtggtggcatgcacctgtaatcgcagctactctggaggctgaggc

SEQ ID NO: 165889 - DNA, 268 bp, Homo sapiens
catggtatgtttaaatgtgggtgtttatcgactgagtgtacatatgtgggtgtccacatatggtgagtacaagtatatgtagctattatttactggtgatccagtttgtagagatgttctttttttttgaaatggaatctctgtcacccaggctggagtgcaatggcacgatctctgctcactgcaacctctgcctcccaggttcaagctatactcctgtctcagcctcctgagtagctgggattacaggcgcccgccaccacgcctg

SEQ ID NO: 165890 - DNA, 476 bp, Homo sapiens
cgataccaaattactcagtattagaacaattctcattcgataccaaattactcagtatttgaacaattctcattcgataccaaattactcagtattagaacaattctcattcgataccaaatcactcagtattagaacaattctcattcgacgagcttgtttctgactcatcgtagcaacacccagtcatgcgttcatctacgttagcgtttctacgcagatggcgctttccagtgttcactgcgttttcatctgataagctgtaatcttaaatttggaaatgtgttgctttcttacattcctttaacaagtaaaaaccaagatcaacccacagcctgcaattaaaatggataattaaaatacaacatatagatgattaaaatacaacatataaaggagttaaaatgctttggttgtgggcatgagttctgaagaatccaacttttcatatgaatattcagtctgtgtcttacgtc

SEQ ID NO: 165891 - DNA, 552 bp, Homo sapiens
  misc_feature (19)..(19): n is a, c, g, or t
tacatgatacgaatcgagncggtaccctcgcgaacgtgttatcccagctacttgggaggctgaggtaggaggactgcttgaccctgggaagtgaggctgccgtgtgccaagatcgcgccactggactccggcctgtgcaagagagcaagaccctgtctttataaaaaaatctaaaaacaattgtcttatttctaactctgaactactttctatgctttggtgacatctatggtgaaaattgaaaactagcattaacagctagaaagaagcaaaggatttttccacatgaattccatctttcttagctttgcttttatttcacagaaacagaaaataaagaaaacctaatcagttaaattactcctctctggtgtcacatcctaataaataactgttatccttatgtccttcaagaaagaaatgatactagtaggacataaggataacacgttcgcgagggataacacgttcgcgagggataacacgttcgcgagggataacacgttcgcgagggataacacgttcgcgagagataacaccttccgagcggat

SEQ ID NO: 165892 - DNA, 631 bp, Homo sapiens
gtgcaatggctcacgcctgtaatcctagaactttgggaggccaaggcatgtagatcacgtgaggccaggagttcaagaccagcctggccaacatggcgaaaccctgtctctactaaaaatacaaaaattagccaggtgtggtggcatacacctgtaatcccagctactcaggaggctgagacacgagaattgcctgaacccaggaggcagaggctgaagtgagctgagactgcaccactgcactccagtctggacaacagagactctgactcaaaaaaacaaacaaaaaagaaatgatgattcagctttggggagtgatgacaaatgaaacactgaagtcctaaaaaaatgacaaagtattactacaagtagacatatcagtacatacaattggagcacccaaaaaaatgaaatacatttctggaattttttaaatagagtaaatctgaaacaaaaggaaccaatttagaaaatatcatatgccaatatccttaaatcaatagatgggatgtttagaactcatctaccatagaaatgataatatttacattacagacagtgttttataatatttacacgtaatgctcacccactagtatttttatccctatttgtaaatgagactgaggtt

SEQ ID NO: 165893 - DNA, 760 bp, Homo sapiens
tgacagagtgagactccgtctcataactaaattaattaagtaaataaaatcaggccaggcgcagtggctcatgcctgtaatcctactactttgggaggccaaggtgggcagatcagttaaggtcaggagtttgaaaccagcctggccaacatggtgaaaccccatctctattaaaaatacaaaaaaatcagccaggcatggtggtgggtgcctgtaatcccagctactggggaggctgaggtaggagaattgtttgaacctgggaggcggaggttgcagtaagccaagattgcaccactgcactacagcctgggcaacagagcaagactctgcctcaaaaataaaaagataaaataaattcctatttgcatttggataacttaggagaacctgtcttccccggtttgctgacggaaagtcaattgtctgaagtactaagctgacattctcagtttttgctttaggtttgggtattcatttaaataataatctcacaaataatgaaatagtttctgggggaaaaattattataaccttatgcccatatctaaccccattcccttgagccctggtcagtgccaagtgccagtagcttggcacaaacattagtgccctgccaaaccccaattcctctcccactcttttctcacatagctcagctggccgcaccttcatggctaaacaacctgagctcttggagatgccctggctcccctctctctgctccttatcacacaaggttctaggcagctgatgaggc

SEQ ID NO: 165894 - DNA, 279 bp, Homo sapiens
aagtccttctgggctaaaaaactaggagcttaggaatatgggttccatctctagttcctgatagttcactgtgtgtctgctgaaagattctttctgtatttaaatgttttgattttatgacttaatgttttccccaaatataaaaattgtgttcctgtgtaacacatcacataaagacaacaaaaaatataagaaaatgtaaacaaaattcatgtgtaagatactccaccctcaaaaaccccactgggaacatcttttttttttttttttttgaggtgg

SEQ ID NO: 165895 - DNA, 104 bp, Homo sapiens
agaatttagcccagggcccagcagctataatcactcatgaaatattagcatttgctataattgcttaatctaactgccaattatacctttacttaatctgttct

SEQ ID NO: 165896 - DNA, 267 bp, Homo sapiens
cgaattctttttcttttcctcactaaataatgtatcttctttcaaatttccattaattaaaacctagcttgattttcattttggcatgatggcttgtgctcctaatctgaattactattcactttttctgggctccttccttttgttgttaattaagaaattcaatccacaagaatttattgagcatcgactatttgtaaaggctttttcttgttagcttctttatgtgattactctctgttctctatcattttacatgcagatgca

SEQ ID NO: 165897 - DNA, 376 bp, Homo sapiens
ttcaagaaaaactatggcttctccagtgggattcaggaactagaggagagaaacccagatggttaggacagacgactcatttgctgatagaagagacggagagatgaagatgaaaataatgagcattctcaaagatgtgtcattgaaacaccacaaagatcttctggacctacgttcatgatgtctgcactgaaatagctattagatgaatgagggaaaaatggcataattcttgatagcaactgaattagagagctgcaggattaagtaaaaggaaatacaacatgccgcaaagatggaaacacatgagtgaaaacgtaggtgacttaaagcacagatccaggaaatggaacatgcaaataataagccatccaga

SEQ ID NO: 165898 - DNA, 391 bp, Homo sapiens
agcaaccaggccccgcccgtcatcccggcacggctgtggaagcacagcacctgtcagaggagggcccggctcagcctgggcaggagacggtgccagccctgccccctctgaagggcctgctggccacccccgccccagtcctccgacaaacttcgctgcggggtcaggcttatccagaaatcgtgcacagttctgtttgtccaatccctgcccttcagatgtttttaaggtttgggggccgtaggtcttcctgagataggagccctgcagcctgccctgccatcctagaggtgggagctgcagtgcacctggcagccaggccctggccagtcgagggtggggctgtgaggcagcagggagaccttcgtgctcccagtgagcggagccgact

SEQ ID NO: 165899 - DNA, 300 bp, Homo sapiens
tgtgcccagcctgggcagcataacgaaatcctgcctctacaaaaaaaattaaaaagcagccaggtgcggtgcctgtagcccttacatccagtctgattgggctagcttcgatcatattccctctcaggacaaacaacagtcaccaaaggaatgctgtgctctgacgagctgagaatagttagagttcactgggagtctaggatgggatccggttttcccgggcctgccagggcctcatgtaactaaacaaaaccaggacttcactcagaggaaaaataagataatgggcacactatggag

SEQ ID NO: 165900 - DNA, 108 bp, Homo sapiens
atattttgttaattctattccagaaaacttttttgcaagttgttttatttacaatgccaacttttaaaaggtcactaaagttaactggacaataaactaggcagacat

SEQ ID NO: 165901 - DNA, 390 bp, Homo sapiens
ataatgccataccagctatctaagtatcctttaattcagtcagatggacacctaaaattagtcatgacaggtcctttgcctcttttaatcaggttgttttcttgcttttgagttgagtttattatatactttgaatataaattctttatcaaatatacggtttgctaatatatacatgtgattttttttttttctgtgcaaaagctttttcatttaatgcagtcccatttgccagtttttgtttttgttgcttgtgctttcaggtcatatccaaaaaaatattgcccagaccagtattgtggtgcttccccgccttgtttatagttttataatttcaggtcttatatttaagtctttaatgtattttgagctgatttttatatatggtat

SEQ ID NO: 165902 - DNA, 205 bp, Homo sapiens
aagcaccgttttgaattgtccctatcaggaagcccacaactatctgaatatgagtagattccagatcaccaaggcagaaaacagaataaggatgagggaggatggggagaaacaatgagagacatagcagtaaaatccttaagcagtgaggttggagattcctgttttcaattatataacccctccctgaataaattcacagtta

SEQ ID NO: 165903 - DNA, 306 bp, Homo sapiens
tttaagaagctttctgttgcttaaccagtctccttagcaaatctggactgctgccttaagtactctggcattaggcagttagattgctcggtgtgatatcagcttgtcacaagaagctcagctgcccacctttcagtttattgcagcctgataggctttatacttaacaaattaagctgaatttctgacattgaaaacaaaaccagtcacaatgcagtcattattagaaccaacacttggagcataaggtgacttgatttgtttaatttttttttccagttcttgccacacagcactaaatttaaa

SEQ ID NO: 165904 - DNA, 790 bp, Homo sapiens
  misc_feature (708)..(708): n is a, c, g, or t
  misc_feature (711)..(711): n is a, c, g, or t
  misc_feature (715)..(715): n is a, c, g, or t
gtttagtatttttctaaaaaaattaactcatgtttgtgtatttatttatttattcatttatttatttttgaggcggagtctcactctgtcgcccaggctggagtgcagtggcaggatcttggctcactgcaagctccgcctcccaggttcatgccattctcctgcctcagcctcccgagtagctgagactacaggtgcccgccaccacgcccagctaattttttgtatttttttagtagagacagggtttcaccatgttagccaggatggtctcgatctcctgacctggtgatctgcccgcctcggctcccaaagtgctgggattacaggtgtgagccaccgtgcctggctgtgtatttatttttgaaagataaaagcttgtaaagctattaatttgcctgtaagtgtaactttggctgtgttcatggacaaagttttggggaattggagagataatgattgatatttgttaagaattattcccttttattaggtgattttcacccattatttaatccccatgacaaccttgatttcttcttccctattctggatttgaagaaacaggtagtacatttttcccaaagtgatacaatatggaagtaccagaaatggaatttaaacttagtgctgtctgattccaaacatgttttctttagtcttgttagaaactcctgagtgttctcattgtcatatttctgaatttanagntgantcttgggccgaagtttttttgaagacttatctgggatggaaattcttttttaaccggggggggctccgggaatat

SEQ ID NO: 165905 - DNA, 505 bp, Homo sapiens
tctctctctgctggattgtctctcactctctctctcggtctccctcttactgtctctctcactgtctctcttgctgtctccctgtctctttctctcactctttctcgctatctctgtttctctcaacgtctctgtctctctcgctgtctctttctctctccatctctcgccatctctctctccctctctgtctctgacacactctctctatttctcccatcctcccctccatggggctttcctgtttcctttccatcctcaccttcactcgctctttcctctccgttttctccctcaccccacaagctctctcccctcgcctctagtcccccaagtccttcccagctccgcctctccatgcccgctccttcctttccagttcctctgccagtcattgtccttgacccttccctctcctcgtctctgctcccaccggctcgtctgagcctggcgctgacagccttctccgtcgacgcggccgcgaattcagtagtagtagtcgacc

SEQ ID NO: 165906 - DNA, 538 bp, Homo sapiens
aaggcaggaaataaaacaccacttcagacactataaaaagaaagagatttattataggtaattaggtgctagcccagaggagttgttaagagccagagcagcaggctctaggctgggcttccaaggaggcctccaatggaatggctgggttttaagcccagactgctatgtcccagtgcaaggatgggaagcccatggttgggatctggtgtgtactcggtccacttcagcagcgcccggtcaaactggattggaaccttggttgactgagtttggcctggcaggcttgaatcagcatctcccaggagggtgggggttgcaagcccggtcctgggcaagggctggtagttggatgtaacttggtttgttctcctttgcccttttattgtgctggtgaggggtgtgcacattactgcctgcagatacccagggtactggtgtccagcatgcatgcacctgggaatgggcccgggtatgggtggggtgtttgtacagcatgtgtgctcatgctccccgcttctgcatgccatagccactc

SEQ ID NO: 165907 - DNA, 149 bp, Homo sapiens
atatgttacagtacaggggatgtaaggatcctgcccctacaccccaggagtttctgatctgttctttgacgaccccaggggtgggactactaagaccctagtccaggtgttgccaatgtgaaggtgttgggaggtgatcgggccacaag

SEQ ID NO: 165908 - DNA, 249 bp, Homo sapiens
tttctcttctaatttccttctttctggggtaggtgaaggaaataatcatctcctcaagcttaaaagctgaagaaatactttaccttcttacccacaacttaagctgttactaacttcagtctcaaaatggctctttttcttccttttgcatttttgtggctaaagccctgatccacattactttcagaattagattaatagcaaattgcatgccagacactgcgtaaggggcttttgtatccagaaatg

SEQ ID NO: 165909 - DNA, 298 bp, Homo sapiens
agagcgggtaactaagggcaaggaggcgcaaagaacaaggaagttagactttgaagatggagaacaaagaagaagggagttgaacaagctgaacctttgaggaggaactcactcaacctggatatctaatatccgggacactgagagagggacggagttgctggacggcggctgaaggggagagtctacccgggcgtgtggtttccttggcaacggagagtgtggtggactctgggtgcccaatgggcagggctttggtatctgtaattgccaggaacagcctttttctccccagggg

SEQ ID NO: 165910 - DNA, 335 bp, Homo sapiens
cccagagccacccttgcggcaggcagggtcctggcccttccagtacgaagctgggaaaaggcagcaccaaagatgccaggggcgcctcacggatccccccgggggggcctccttgagggggagcaggaggaggggccaggctgagggctcaggctgtgtgaaagacaccctggttttgaaaagggagaggggctagagaggtggggcccgagggcctggtggggcttccagcaggggctggcttatgttttcaagcttactctggggtctggagaccactgccgaacatacgccctccaagcagtggccacaagaagaccatgaggagctcgggc

SEQ ID NO: 165911 - DNA, 237 bp, Homo sapiens
gtcagactgactgtgattttgacatcagtgcctttcacatggactgtggaccttgttatgtatcctgaagaaaagtctgagtaacagagctcaggccctgaagcagcccctagtttaactctgcagtcccttaatccagcacaagctgatgtgtgtccccccactgtcctccctcctgtcgacattgcgtgctcctttgtgaagatgatggggccaaactgctgtactgggtggcct

SEQ ID NO: 165912 - DNA, 383 bp, Homo sapiens
caggtcagggaggtgaggcagcccaaggtcacactgagagccagggcaaagctgagcagtgagccaccatctgcctgattccagcagaacagccctcggactcaatcacaacgcagctccagtgatgcactacaccttatcagagagtgaagaactgctctaaatcttaaaacaaacattttaggggcaagaagtgccaaccttgaaactccagactgggataaaagaaaaaatatttcaccataaccaagaagactaaacacagctcaagcaagtacagaaaacgctgcagggaccagccccacacttacctggccaaaggagcaaaactctgaataaaaaccttgatctttctacttaatgaaacatttttttttttatca

SEQ ID NO: 165913 - DNA, 280 bp, Homo sapiens
ctgatatttaaatgaaaaagcagtggtggtggggaaagatttatctaacctccaaatattttctggaacagtgcctgaaattcccttgttattggttaattattttagttaatatttggtctttccttttactcatcttcaaaatggaactgttctgtggtacataatacatgaagacataagcccattagtgggatggatttgtcaggtcacttttctctgtagcccgagtctgagctgatgtaggagggattctggaaggtggtatgatgaggggagg

SEQ ID NO: 165914 - DNA, 188 bp, Homo sapiens
cagggcagcggcctccagagaggagatagacaggaacgctggcctcccaggattgagagtggacagaggttcaggtgaaaagccctcagctagccctggagcacctgtggggccatgctctgtgctggacacgcgctgcatggtgaccctgtgagctatttgctgccggtggggaaacggaggcttat

SEQ ID NO: 165915 - DNA, 175 bp, Homo sapiens
cacacattctgctcattcaaatgtccatgcctaaaaccaacatcttaaaatatgctgcatccccagggatcctcctcccagcttgaggccaggcagtcggatggaggctgggcggcccctgaaggctggggctgttctcagctcctgccctgcctggctccaccccataggtgcc

SEQ ID NO: 165916 - DNA, 454 bp, Homo sapiens
agccttaggagctaccaggtaagtggattatagcaacagatcagacatagttattttgccttcaaaaattcatagaagctcatcaagcattatgctgctctatttattgtgtttggtgcaaaacgatgcaacccctttcattttagagggaatattcctttattccctatgtcaagcctctgaacttttacagcatttatctcctatcttctggcatgcatgtgtcttaccaccaaggtcaccagaaaacagaatgctatcagtgtaatggatcaaggcccctcttgactacattgtgatagagaacccgagagctacaaaacagtgactgctgtctctgtcatatgaagatatattgcttttgagtttctttgctgataggaattaaaaagaaagcatttgctaagtgaacaatttcatttgaggtcccatgggttgtgttgacttgttccag

SEQ ID NO: 165917 - DNA, 192 bp, Homo sapiens
acttgcttttttgttactatttttgagatacagtcgtgttgatgttatagctctggtgcattcatttgtaactgctgtctagtatcccactaaatatatccatggaacttacaacttatccattcacctcttgatgaatattttctccaggattttatgattacaaacaccatagggtttttaaatctggga

SEQ ID NO: 165918 - DNA, 617 bp, Homo sapiens
cccttcgctcattctctcctctcaggctcccatggcttggtttgattttggagatcaggttctcactgtgttgccaaggctggagtgtagtggcctacagcctcaacctcctgggctcaagctattcttctgcctcagcctcccaagtagctgggattacaggcatgcatcaccacgcccggctaattttttgtatttttagtagagatggggtttcaccgtgttagccaggatggtctcgatctcctgacctcgtgatccgcccgccttggcctcccaaagtgctgggattacaggcgtgagccaccactcccggcctcaagtgagtacttgttattttgaagttctgagatccatcagatgtgccattgcttccactagaacagatggtgataccatgctggtcttgtggctattagtggtttatctctacccgttttttgtttgggggtttctggggatacctagttttgctgtcaagttgtccaaggtttccaggtttcctatcatggctgctttgtggtgctttaacgggtaatttgagaaatagtaaaaccatgatttcagaatccctgccagttaattttttaatgcaggagcaggtaaaagttacaaga

SEQ ID NO: 165919 - DNA, 379 bp, Homo sapiens
cacaattcaagtcacaaaaattaagtttcagggtcaggacttgtgggtaaagcaagtttctggctgcactcgtagctcacttgatttttatttcataagctctccagggaatcatagcccaccagtgtgccgcgttcccagtgatgagtctggaagggaataagggacttcatccaggctatttaggacataaaatattctaggaaaactactccctgtcctctcctggaaatctctagccagcagttacacttacccttggggttgagcatattttgttggcttttgttgtatgtaaccaaatctttcctgcttctaattaaatttattcctttagtaaaatccttcccagaaaccatatggctattttccactaaaa

SEQ ID NO: 165920 - DNA, 395 bp, Homo sapiens
gactccgtctcaaaaaaaaatatgactccagatcaagattaaatagtatattcattactttagattgtattttgaatgggggacagagaatgacaattggaatagaaaacaaaagaaatctgagactgggcaagtctcaggcacagatttggagtgatcacatgaaaaaacctcccaatcctagattcctctgtccataaaactcatcttcctttccccaccaagacatttgagtggatcagagccaccctgaagattccaagcttcaacctgggtttcaaatcctactctaaagtaaactcacactcctggtgatttaagccaaatctaccatctcagaaagcctccaaattggggtgacctcaaggatggacacattgcccaaggttgtttct

SEQ ID NO: 165921 - DNA, 367 bp, Homo sapiens
ccgcgccgccatcatggacaccagccgtgtgcagcctatcaagctggccagggtcaccaaggtcctgggcaggaccggttctcagggacagtgcacgcaggtgcgcgtggaattcatggacgacacgagccgatccatcatccgcaatgtaaaaggccccgtgcgcgagggcgacgtgctcacccttttggagtcagagcgagaagcccggaggttgcgctgagcttggctgctcgctgggtcttggatgtcgggttcgaccacttggccgatgggaatggtctgtcacaatctgctccttttttttgtccgccacacgtaactgagatgctcctttaaataaagcgtttgtgtttcaagttaaaaa

SEQ ID NO: 165922 - DNA, 309 bp, Homo sapiens
ccgcgccgccatcatggacaccagccgtgtgcagcctatcaagctggccagggtcaccaaggtcctgggcaggaccggttctcagggacagtgcacgcaggtgcgcgtggaattcatggacgacacgagccgatccatcatccgcaatgtaaaaggccccgtgcgcgagggcgacgtgctcacccttttggagtcagagcgagaagcccggaggttgcgctgagcttggctgctcgctgggtcttggatgtccgccacacgtaactgagatgctcctttaaataaagcgtttgtgtttcaagttaaaaa

SEQ ID NO: 165923 - DNA, 545 bp, Homo sapiens
tccgtctcaaaaaaaaaagaaggaaattctgatacatgctataacacagttttaccttgaagacattgtgctaagagaaaaaaagccagttacaaaagaacaagtactgtatgattccgcttatataagctacctagaatagtcaaactcagagagacagaaagcagaatggtagtttccaggggttgggggagagagaaaccaggagttgtcatttaataggtacagaacttcaggttgggaaaatgaaaatttctggaggtggctggtggtaacggttgcatgacagtgtgaacgtacttaatgccatagggctgtacacttaaaattggttaaaaataagttttatatgtatttaatcacaatttttcaaatttaaagaaatggttagaataggactaggaatataaaagaaatgtatatgagagactattaagtacaaaggcgtagaaaacaaactgttaatgtattttagctctaaaagtatgtatgtaaggcctgaaaatgatatgaaaaataaaaattgtattagtatactaggatta

SEQ ID NO: 165924 - DNA, 310 bp, Homo sapiens
aggtgggagaatcacttgagcctgggaggttgaggctgcagtgagcatgatcacgtcacgtcactgcactgcactgcagcctaggtgacagaatgagagcctgtctcaaaaaaacaaacaaaaaaaacctccagaagttaccaaatgaccctggggcaaaactatcctaggtgagaaccagtgtcttagaaaccagagcagccccacagttacctatttattggggtctgggtaagattttatttgaacaaatacttttgcactttaggaaaaaataaaagtggatggagttttgtaaagaatgacaggt

SEQ ID NO: 165925 - DNA, 507 bp, Homo sapiens
aataaggaacttgcccaatggaaacccaaatgtccttagtcctaagactgagtcctaatactaaaaagccaaatgaatgttttgggaaaagcttgccaaaaaatctagcagaatactttatactcagtggacactatttctccatcacaccaacccctccaatctatgcctcctcaaattgccctgcctcatgagtgcaaaaaccattgtttttattttttcccccaggagaggttaggtcaaaaataagaaaataatctagtttctttctgccagatttctggcatagtgggactgggtaggaatgtacctactgtagaatcttcccacacccctgggttgttaagagtaactagcagaggcacgtcccatacactccccaaatatctgagctggcaacaacaacagatattcagagaccttagccctaggacaatagcttctgtcagtcaactacagttctcacgactctgtgtttctgttcttacttcaacctcctaccaaatg

SEQ ID NO: 165926 - DNA, 410 bp, Homo sapiens
  misc_feature (370)..(370): n is a, c, g, or t
aataaggaacttgcccaatggaaacccaaatgtccttagtcctaagactgagtcctaatactaaaaagccaaatgaatgttttgggaaaagcttgccaaaaaatctagcagaatactttatactcagtggacactatttctccatcacaccaacccctccaatctatgcctcctcaaattgccctgcctcatgagtgcaaaaaccattgtttttattttttcccccaggagaggttaggtcaaaaataagaaaataatctagtttctttctgccagatttctggcatagtgggactgggtaggaatgtacctactgtagaatcttcccacacccctgggttgttaagagtaactagcagaggcacggatngtgggcgagcacagattgcagtcgaggcacagattgcagt

SEQ ID NO: 165927 - DNA, 464 bp, Homo sapiens
agctctattatgtggtaatttttcttccatatcaattttaatcatagatattggatggatgatatactttgcttttaccactgaaaggtgtttagaaagtacagaggtttgtaggaagcctcagggactaatatatcgtttgttaaatagttgtaaatagaggatgggattggacattaaacttccctcagtgctgccatctcttctacgacctctagttctgtctcaggcacggaagccttagctttgtctacttgtatttcacccttcctgaaacttatttcttaaatatcttctgtatattagcttccacttcatgtttttttcaagctttagactgataaggttctaagttttatctataaacttttgcaccctttgtggaaacaaaattctaatgataaagtgatatgttgaataagtaataacaaattaagacattcataaatttcatagtaaaaaaa

SEQ ID NO: 165928 - DNA, 264 bp, Homo sapiens
tgtttgcctagttctgaaaactgtcttcgtctcctcggtcagaagctgtggaagggctgtcactgggccttggctccggtaccatcgctgggttagccccaagtggtgactgtttttctccttccgtgtcattgacttagaggcgtgttaattatgcactcccaaactgcaggcttcacaacaaggcctccacccagcaggaagcacgcagctcagtggaatctgacaggccctgcctgcctggtgcacgctggcatgtgcgat

SEQ ID NO: 165929 - DNA, 123 bp, Homo sapiens
tacggagcaactctactatactcctgtcttcatcccctatctccacattaaggaagatcaagaatcagaaagggtgtatacattcccttcaagcaattacctctatcttcaagcaagagtctg

SEQ ID NO: 165930 - DNA, 379 bp, Homo sapiens
ccttatccatgataccttccctgaccacctcacattagtagttaataccaacattaaaatttttgtggaaaggcaaaaaaataaaaagttaaccccaccctctatcttccttttccagctcacttatttccacaatgaccatctacaactttgtttccccaccagagcagatttcgttttgatcactactatgtgcccaaaagcttagaacacatatttggcattcaataggcatttgctgaattgttctttaaaataatcaaaaattctgacataactgaaagatgggatgaaaggagaatagtgggctcatctaccatcaaaaattggttaattctctgcagcagcagttatcttttttttttttttttgagacgga

SEQ ID NO: 165931 - DNA, 450 bp, Homo sapiens
ttcagcctcccaagtagctgggattacaagagcccaccaccatgcccagctaattttttctatttttaatagagacggggctttgccatgttggccaggctggtctcaaattcctgaccacagggtgattcacccacctcggccttccagagtgctgggattacaggcatgagccactgcacccagcaagttttagattcttatatgtagggtcttgtgattttttagaaaggttatcttttatagatgggagtgagggtagaagcaccatccttcatatattttgcaggctgccatatccagcttgtctcagccaccatttcattggaaaagaatcatctctttccacttctcaatggatcttggcaccattgtaaaataatgactaaagatatatagtttatttctggactcttaattctaatccattgaactgtatgtctattctta

SEQ ID NO: 165932 - DNA, 3692 bp, Homo sapiens
cttccttttttatcgctgaaaaatattccattgtatgaacatgtaagtgtttattcattcaccttttgaagaacatcttgattgcttcctttttttggcatttatgaatagatctgctataaacattcacatacagatttttattcccagttttgtttcactgatctatttgtttattctttcgtgagtaccacattgtcttaattgtcgcagcattatagtcaggtggtcaagtcatatagtgtcagtcctctgactttgttcttcaatgttgtgctggctatgctacgtattttgcctttccatagaaacttaatcatttgattgatagccacaaaataacttgctggggttttggttggaacaatgtgtcctctgttctgtttctctttgtatgttacatgaagagggttgagaacggtgaaatactatgtgcactactttgctaaatgagtttataaagcagtgcaaatggtaatctttgggtacctggctatatttttatcagtataaattctgatttttcaaatatttcgatgtagacagggaaatcattcaaaactgtggattccattccagcagatgtagctaaaatgggggggcaggagaaaactgtggaatagggaaggttttttctaaggcttcattattgtgccagtctcaagttgaaaagaggctacatgattgtacattcaagtcttatgttttcctatatttgaaaaataaaaacatttataaaatatatgcaatgtttactgggtgcttttcctcgtattagtgttttaaagcaattgaagaaaataaatatttcagtataaaaaggagcaaatgtatatgaataagtacttaagagaaaaaaattttagtgacagctttaatggttgataattcggtacccttcagttcacccatttaaagtatacaattcattgatttttattatagtcacaaatgtgtacaactgttaccaaagtgaatttgataattttttttttatcacctcataaagaaccctgtacccttggccaggcacatttgctcatgcctgtaatcccagcactttgggaggcccaggtgggcggatcacttgaggtcaggagttcgagaccagcctggccaacatggtgaaccttgtctctactaaaaataaaaaaatgagccgagtgtggtggtgggcgcctgtaatcccagctacttgggaggctaagacaggagaatcgcttgaacccgggaggcggaggttgcagtgagctgagactgtgccattgcactccagcctgggcaacaagagtgaaactctgtctcaaaaaacaaaaaacaaacaaaccctgtaccctttagttatcatcttccatcccctcatcttctctagcactaagcggctgataatctactttctatccttatatagagttgccttttctgaatattttatgtaaattggatcatataatatgtggtctttttaaattggctttttccatgcagcaaaatgttttcagggtttattgatgttgaatgtatcagtagttgataacttcttcgggctgaacaacattccattttatggctgtgtactacattttgcttttccatcagttgatgtctatttgtttttgcattttggcagttgcaaaaatgttgcagtgagcattagcatacaaatatctattggtgtttctgctttgaattcctttggtaatatacctaggatggaattgttgagttacatggattacctgacttttaaaattacaataatcttactgggtgtgagatggtatctcattgtggttttaatttgcatttctttgatgactaagtatgttaagcatattttcatgtgttcattgactattcacctatcctttccagagaaatatcttttcaaattctctgccccatgagtgggggctggctagaagaggggattgaatgtcaacttcttagccatgtgtaccttctaacttagcagcaggaggttgctgtggtaggatgggaaatgctgacatcctgcccctcaccccgctaggaaggcaggctttcagctctgtactaaggcatagctttccaacttggacctctgggagagggaggcctgtgttcttggctgtagccagctagagtggtttttctttctcattgagctgagggtggggaagaaaggagcagcatcttgattcacataccacagactcttgcttttcttactgagttttagtacattttcttgaataaacgtttcttcatttgctgcatactgttaggaccacttccagagattttagatagttgtgttcttttaaagagtatgtaccagtttcactggggatctgatctgcagggatcttccctctcatgctagcaagaaaaattgagttctcataaaccaagtaaaatattcaagctttcctactaattaaatgttttagaaccttacagtggaatattttgtatccatcaagttcttgaaagtagaaaccatctatcttgatattgggtagaaagaggaagttagacactatggagtatctagtttttataaaattcaacacatacctaaatatacaatatcatgtacttctcccctataagacatattttattaattaaattacatcaggtttttcttaagtattctgttctccacattttaaaattcaaaagctttaaggtggtatctaataaatagctgttttcctgcctctgtcctaccaataacagctcattagggataaactatagttatccctatagtactaatctaactaatagtactaatagttacagatagtactaaccagtgctactaatttcttatatttctttataggaaatctatgtataacaagtaaatataaatacatattagttcattgtcacactgctataaagaactgcctgagactgggtgaattataaaggaaagaggtttaattgacttatagttctgcagggctggggaggcctcaggagacttacaatcatggcagaaggggaagcaaacatgtccttcttcacatggcagcagcaaggaaaagtgcagagcaacgcagtgagagccccttataaaaccatcatatctcgtgagaactcactattatgaggacagcatggaggtaaccacccccatgattcagttacctcccactgggttcctcccatgacacatgagggttatgagaactacaatgcatgatgagttttgggtggagacacagccaaaccatatcacatagtctccctctttttatgtttttgttatttgtgttttgttttatgtttacccaaataatcatttattttttattaacatttatgggttatgtttaccatataacccatttttataccttactgtcctatccccaccccaaaatgtcattatagtacttgcgaatttgctccagtacagcataaagcatattctaattttttatggctacataatgggcatttagtaattaaaacagttgcatattaataaacataaataggttcttttttgagataaggtctcactctatgtcccaggctagagtgcagtggtgtaatcatgactaactgcagcttcccatgcccggctaattttttaaattttatacagacaggatcttgcccaggcttggagtacagtgagccgtgatcataccactacactccagcctgggtgtcagagtagaccctatctc

SEQ ID NO: 165933 - DNA, 365 bp, Homo sapiens
caggaccctcctcatggttatgagatcgtaaatgtaatgtcagaacacaatgcaattacgtggtaagcgccctattaaacgcttctcttattgtgtgttagtaatgtgtattagtttgctaggccagccatcacaaaatatcacagactgggtggtttaaacaacagatgtttattttttcacagttctggggctggaagtccaaaatcaaggtgctggcagggttggtttctcctgaagcctctctgcttggcttgcgggtggccaccttcttgctgggtcctcacatggattttcctctgggcacacacatcccccaagtctctctctccttttttttgttttgttttgttttgagacggagt

SEQ ID NO: 165934 - DNA, 559 bp, Homo sapiens
tgtgatctcatcagacatgtattctactctgtgagaataagcttatttgactacattgactccaaattaaaaacaactaaaagctttttcattttatattttaggattgactgctttatgtaggcaataatgccttttcccctaaaatacatcagccttcacatgtgtttactaatactggtatctcccatgggataggaaaggaaaacagttccttttctttaaggacctgtctgcagcagcctccaactttgggtatccctaattatgctaagtccttctgtctttttgtttatgaaagaggagattgtgaattaggactactaacatggtaaagtagttttataccagacccatgcttttagcctaaccctccactcaaaagggtaaagcatagatttctgcttgtgtgaagtatcagtggcggccaaactgctctgtgctaacttgacaggttccacatgcagataactctggttaattcttaatttaccacatgaagactcatgaaaagtttttattgtttgtactaccattaaactttgttaaaatcttaatc

SEQ ID NO: 165935 - DNA, 454 bp, Homo sapiens
gtatatgtgtgtgtgtgtgtgtgtgcacgcgcacgcatgcgagctatgtgtgtgactatgtgagcatgtaacacatgcgtgttcatttgctaggtcttgttcctccctcatctgtcaaatagcaatgatattacctgacccatctacttcacaggattgcctggtagatcaaaaaagaaattgatgtattagggtttgtattagtccattctcacactggtataaagaaccgcctgagactgggtaatttataaaggacagaggtttaattgactcacagttctgcatgactggggaggcctcaggaaacttacaatcatggaggagggcaaaggggaagcaagacaccttcttcacaaggccacaaggcagcaggaaggggaagtgcagagcaaagggggaagagccccttataagtaccatcagatcttgtgagaactctttcactatcgtg

SEQ ID NO: 165936 - DNA, 274 bp, Homo sapiens
taacaggtgaaacccaagcatctgcttctggctgccctagtaccatgatcatgtgaagttcagtatgctgccaagatctctgtagattcccatgggggttggggcaggcattacatctcagtcaccactcactcacctcttagagttatcctctttttccataacactttgtccccataccctttcttccacaaaagcaacaaacaaaactgttgtatacagtgaggacatgtagatgggtgatggcagcagttgaggaatgggatccgctaga

SEQ ID NO: 165937 - DNA, 144 bp, Homo sapiens
cagctgggctgggaggaggttgtcacttattgcctaggaagccagtgggtgactcctactagagcagcagcagcagtgcagagatgtggaccaagagaccactaggagggagaagcgacaggacctggtgattgactgaatgtg

SEQ ID NO: 165938 - DNA, 359 bp, Homo sapiens
tggccacgcgtagaatggaatggaggtgccctgtgagctaggagaggctcagggaactagaaggagatggaggaagtggaagttgaggaataattggtgtttaagggcctggcatttggagcttagactagtctggatgtaggagaactgagcctagactggaaaggaaccagaccagggcctcggtcttggcagggagggcccttgggcaggaggagctccagggtgtcagaatttgattggagttgagttccagaagtaagagggatgtaggggcagggagttcctaggcctcactgaggaatagagaatggggaagaatgctgagaccgcattctgggaaaagtccaatgcctgga

SEQ ID NO: 165939 - DNA, 436 bp, Homo sapiens
gcctcgaggtgtaagatgctttcagacccaacagaccactgattcccttttcttcatagtaaactgttagaggtagacagtattatctgttcttcctttcaacacctgccctcccccaaaccgaagcagtgcactgaagacggtagctctgcaacctcctcccacaggggcacccaccgaggggctcgcgcggctctgggcacctcccctccacctctgggggctttggttagcgcagcacaaccgccgaggtaatgatcccgaatcctcgaggaggctaagcaggaccacggggctgaggctccgggatgctcgggcgaggcccgaggcggggcggcccacgggcgccggtcgccgggctctggagctgtgcattgacctccgcccgccccgtccctgcctggctttctcgcccaaacggcccgtggcgcggccg

SEQ ID NO: 165940 - DNA, 554 bp, Homo sapiens
gacctcagggtggccagccccaagactcggcacttgttctcaaaagtcggttcctgggatcaggtctctcggggacggaagtccccatttaatgctgtccaccagcagtcacgcatcatggcccttagtgtcagcctcaccccttcctggctgaatgaccttagcaggtcatttctccgagcctcagtctcctcatctgtgaaacgtgcttcataaacccactttgcaaggttatcgtggggcttcaacaagtacaagtagaaagggccagaacaaggcccagggcacggcaagaactcaataaacaatgtcagctcttagctatgattgcttttgtcatctcaatgtattctcccagcaactgcccaggttgcccttctccaaggccagggcgtcatagaaggaatcggtgccctctctcctggcccaggctgcagctgtgaagtgggtggagtgagtcaggatggccgtgtgtgtctcgcgtcactcaggaactgcacacctgctccccggggcgagatgtggacaagacacagctgggacagagcaggaag

SEQ ID NO: 165941 - DNA, 418 bp, Homo sapiens
tcttgaggaccccatgccccctagcgggcaaaggccacactatcattctacagctgagtgttcagaaatcccagggagttgctcaatgtcacacaccacctgaaaaagccagttctaaagtctgaagacccagctccgaggtaacgtcccttccccatccgccttcataggatcacaggcttcacagccagacagacctgggtgcaaaaatcactgttatccactgcctgggaggttggaaaaatccatggtcactgagaatgcttctgcagctacaaaatgggaatgagaatgactctattttggactaacactttttcaataagaaagcagagtaacaaagagctacagaagtaaggagacaattttgcttggggtggagggaaatctcccccccgctaggggacatgggtatcct

SEQ ID NO: 165942 - DNA, 559 bp, Homo sapiens
ggatagttgtataatatctaggatctaactagcctttacctctcactttatatacaatttattataatacaatagagatggggtttcaccatgttggccaggatggtctcgatctcttgacctcgtgatccgcccacctcggcctcccaaagtgctgggattacaggcatgagccaccgcgcccggccgtccagtgcctttttaaccaaacagtgcactgtgtacatttctagacaagtcctggagctccctgcaggccggaaaaaggggcctccgggaatgtctgacgtgaaggggaagtttcagtcttgggttcagtgctttgaatggggccgtgtggcagaagtttgcttggagctgtttgctgaggctatctgtctgcattggtggtggtatcacttagtgtatattggggtgtccaatcttttggcttccctgggccacataggaagaagaagaattgtcttgagtcacacataaaatacactgacactaacaatagctgatgagctaaataaaaatcacaaaaaagtctcataatgttataagaaagtttatg

SEQ ID NO: 165943 - DNA, 281 bp, Homo sapiens
tcctcccaccttggcttcccaaagtgctgggattacaggcatgaaccaccatgctcggcttgtcagttcttatttcactgtttgatcatctgttttctgagttgtgatttttgtatttgtggtattatttaatatcttcaattgcttatttaattattcctaataagaccccctcccagatataaccagtattctgacctctagtgatcctcccaccttggcttcccaaagtgctgggattacaggcatgaaccaccatgctcggcttgtcagttcttatt

SEQ ID NO: 165944 - DNA, 741 bp, Homo sapiens
gatgagttgggatgctggcaagacaaagggcaaagtggttcacagtggaattcagagacaatagtgaaagaaacccagagcaggaggaggaggaagatggtgaactgctggaattgaggaactgggtgtctccataaggttgaagaacaaacactaagtgtgaagattaggaaggtaggtgatgtgacacaattgactatattagcctctcttagagacccacatatagtaatctgaacttcctgtcaggttttatggacaataatcaaacatttcagcaagtgacatctcaaaaaaggtcacattctaagttttagcttatctcttgcattgttagtaattaaataatttctattaaatgaaaacttctgatgaagttttatttgaatgtttttctctaacatcggccattaattggttcaataaggtagtttttaataatgaaggttaattgagggatgcaaatggtcaggttttatatgaaaatgaaacaccaaaaataaaaatctattgcttcggtaaactcaaatgaaacaggttgggtgcatttcctaagccattcattatctttggaggcctggtttgatccactctctattctctagttgtgtttcctggctgctacacattgaaataaataatacagtgtgttaaaatctttggtttaaatttagcacataaaatgccccatattgtgtgacactctcagctgaagtctagagagtgaagtttatgttttta

SEQ ID NO: 165945 - DNA, 667 bp, Homo sapiens
cctactcgctctttccactcgaaatagccatgccccctttccttaactttggagcccacaacacttaagattagctgacatttaatatgtgtgcctgctaggttccaggctctttttatatcctatctattctttatgtccatctgcttgggaagtaatcttattccctttttgcagctgggggaactgagcattggaaaggctggtctggccaatggacagctaaggtctttctgatgccaaagcccatttttggtacaccatatcatctgctactgagaaaaaaaggctagaagtggaaggaggtttgtttgtactttcaggagcatcccagagaatcgtagaattgggttcagtatattcttcatggcttcacctaaaattttcagctcggggcatttttataggtttaagaatgattatatgtaaaaacaggcaaaatttccagaaggcaacaaaagataaatgatagaaccctgtcttctgtccctttccccatagagatacctacacacatttaaactgggaaaggaaacaatgatccatcgtaaagcttacccgtaagacaaattgcctttggcaatataaaccttaaatgctcatgaaggcctcacatgagttaagtacagtttaacatgattctgccatttgagcacctactatgtgc

SEQ ID NO: 165946 - DNA, 364 bp, Homo sapiens
ctggccacatctacttagcatgtttttgagatttttttataggcaaaagatactccttcatatggatatagcacattttgtttatccattcataagtagacaaacatttgagttatttccaccttttggctattatgcgtaatgctacgaacatttgtgtacaagtttttgtgtggacatgtgcttttatatttcttggatttatttctaggagtgaaattgctgagttgtattctaattcttgatttaaccttttgaggaaatgccaagactgttttctggagctgctgtaccattttaggctcccaccagcaatcttgtgagagtcccaacttcttcacagcctcatgaacacttgttgtta

SEQ ID NO: 165947 - DNA, 419 bp, Homo sapiens
tatttagtaaatgatgtatttaacagttaagtatccctaagtgtatttaatttgtaattaggcggtaacccttcattaaaactgattaggatggtatgctactgcctctaacgaaatgctcaaagtgagcttatatgcacgttcttgatcaagaattattgggagagaagatgaaattcttctttcctgctaccttcaaccatacaggctgaaagaggacccccaagtggtaacactggctgttgtcccaaatgtgctccatggctaccacttacctgggaagactgtcaccaccagccacttagggcgggcctggcaccattaaactattgtgctgaaaaccgcacagatggaatcaagatcaagtggtgcttatacggtcaatgtaggaaaaaatggaaggtcattgaagattagtt

SEQ ID NO: 165948 - DNA, 539 bp, Homo sapiens
tatagtatttcatttactactttagtaatagtgatatctatataatatttaaaatcacttatttataataaataaatttagaaatactgttcttgctcactcttttgtttcagtaaaactactttattgcaattcttcacatataattcttgattcagtctaacgtctctttctcaagcagttgctatttaaaataaattagttgagaaagtaaccttcatgtgtgagaaagtcatgcccaaattgacagagtcttagcttaggaacggttttaaggtgtagatgccagtcttatataccagcatttacagtactgtggtttgagggctgatgaattgttgacctggctggtgagagtgggtggggtggctgggagctggttgctggaagctctgagaatgaagaggtgagagcaaaagagagaaggcagatgaagccaagctggtcccggtcagattgcactgacttttaatctattttttttttcattataaaagtaatacattgctgctggaaggcatttggacaacatcgaaaag

SEQ ID NO: 165949 - DNA, 519 bp, Homo sapiens
tagaaggtggaacacacccaggagcatgtcaacggggtgctgtgggacttcagagtaggcagatcgtcaccaagcttcaacggcaaagatgccactgggggaaagaaggaccaagcttggaagagagagtaagtctggaggcaagatcttgtctcaccagcaggggccaggtccatggtgaccccttccccaggcagtcacctctctgagcccactttatatcctaggcctggattcaaagacacttgagccctgctccagccttcctttgaggtgctatcttggtgcccttcctataatcactgctccagtcccatgtcatctggtccccagttaccacatcaagcttcccgaagctccacacagaccatgccacatctttaccaaaaaatcagcagtgggtcccctcacctccaggacaaagctccagctcttcgacctgcctgtcaatatttgcaatcactgcctgcacaaattagctgggtgttgtcatgaaaggatcacttgagcccaggagtt

SEQ ID NO: 165950 - DNA, 1316 bp, Homo sapiens
ccctcccaagtaaactagtcacccaaaccatatacacaacagtcagactcatttgctcacagctttaaagcaggttcttttccatttccactgctattacctattccaagtgccttgcacaactttgcctaaggagacactaagaattcttcattgaagagatgaagaaatgaatgaatacagggatgagttttcttcatttcattgcttctgtctagaccactggaaaaacgtatcttcctttattctgacctcttctaattcatgttctacaaagttatcaaaatgttattcttaaaatgcaaatcattcttaaaatgatatacaaacacacatcattccaggattcatttagtttagtgccaaggcctttcatgctaagttccctgcatctttctggtcttacctcccaccatgtctctttactgactttgttgcatcatcacgtggctgcatactccatttcctcccatgtgctgttcattctgcagaacatctcactgaagctttacctggagaactctactcactttgcctgtcggattcagatgtctttcctacttgttctcatagacatttatgtacagtctcgtgactcttttcatattaaactgttatcatgactgacttacttatctaggggctttctcttaatcaacacaggttctttattcctggatggtatccaacattccctgaataaccagtgattgtttattggctgtttgactgaatatagaatagaataagtctgtagcttatagtccattctaaccactcattcttttcataacttttattgagtgcttactatgtgccagcttttgtttaagagattggcaatactatagtgaacaaaatagtacctgcccaggcaattaaaaagtaagcaattagacatacaatgttgggtagcattatgtgtatattaatccagtttcactctgctgataaagacatacctgagactgggtagaaaaagaggtttaattggacttacagttctgcatggctcgggaggcctaagaaccatggtgggagatgaaaggcacttcttacatggcagtggcaagaggaaaaacgaggatgatgcaaaagtggaaacccctgataaacccatcagatctcgtgagacttattcactaccatgagaacagtatgggggaaactgccccaatggattcagattatctcccaccaggtccctcccacaacacatgggaattatgggagtacaattcaagatgagatttgggtggggatacagagctaaaccatatcacagtgttaggaagaaaataaagagggataaggaa

SEQ ID NO: 165951 - DNA, 310 bp, Homo sapiens
tgggattacaggcgtgagtcactgtgcctggccgagaatattagtgatcattcagttgattgccttgtatatctctagactcgagccgtaaagtttcccattcaactttctctatcagttgcagtgaagagaatcaatttttaataagagagtttcaaacttgttcttaatatattctttctgaaagaggaaaggctgtatcctttatttttggataatgcttttgaaatatttgataacttgtgcttgactattttagttgtctaacatgacccatcctattgctaagtctaagctcatttccacttgt

SEQ ID NO: 165952 - DNA, 477 bp, Homo sapiens
aaaagccaaggaacagtggcattagcatattatttagagatatggaagttactcccagaataaagagctaaaagagttagaagcagttgcctctggggagcaagactaggggtgggagggatgaggtaggggactgtaagctcttctgttctagtttatttttaaccatgtgcatgaattactttgatacaaaacattttaagtgtgtcacaagacagatgagaaggtggagggcagaccttttgtggccatagatgagttctgggggcctgattcaggtaggacaccagagtcatgaaatcccttgcaggtaggactgaaaaacaacctagatacttgaggacagtggagatgggaaaatgttccgatttttacaaggagacagaaggtatttctggaaattatagaccaaacggctcaatatagaatcctggcaacattctggcacagattattaaacagatggcttgggagtgc

SEQ ID NO: 165953 - DNA, 232 bp, Homo sapiens
cctcccatctggatgcttgctcccccgcctctgatgtaaaaagcttgagcagaagagctctttgcagtcacccgcccctcaaggaacagaaaaggaaagtatgcagcctcagtgggtgaagtcagcagatcagtggcaggcttagaggggaatgaggcggagggaagttgctttgtgattgagaagataatttctctgaattagggatagccttcaggtgtgttaggccaag

SEQ ID NO: 165954 - DNA, 406 bp, Homo sapiens
tctcaaaaacaaacaacaacaacaacaaaaaaaaacctgacagattatcacagcaagaaaacatgatggtggccatctctcaagatgaggaacagatgaggggaaattaaaaggttgtatttcctggaaaacaatgtttcccaaactcaaagcagggcctactggagattaagaaagattccaaatagagtttcaaagaccagggctgtaaagccctaaagacatgtgaaggaatttgatatgtagtcttatctctcaattatccctgactagcttagtttgagttttcctgtaactcttcccagtgctcatggattttcgtcttatggtttcaggtaagttatagtagcctctggggggagaaatggaaagtatagtgcctctattgttggtacccaacagtagt

SEQ ID NO: 165955 - DNA, 401 bp, Homo sapiens
tgattttctataagccacttttttctatctgtttcactgaggacaagtgtttgtgactgtacttagtgttccgggaagttgcatgtcatcactaatacacacccaagcgggaagaagtgaggtgaagttatttttcccttaccttggtcatggcagtactttttgttaaagaaataatctattcattacttatgaatatttcatggatattttgtatgtgtaaaataaaaattaaagctaaattgtccaccaagttatgaattgagaaagaaaatattttctgtggtcaactctcctatccatacaaaacgtgcttttgattttattgaacacaaataccaaacaacggtatttcagtagaaatacttgctttgaatatttagcgtttttaaaatgtgctt

SEQ ID NO: 165956 - DNA, 455 bp, Homo sapiens
tgctgggattacaggtgtgagccaccgtgcccggcctcccacaatttcttttcacactgatgcttttcacattgcttgcagacatcatgatccactttcattttctatctgctaacttgttttcaaattctagcttttcatcctgtaatgccagaagtcttttacaaccttcttccttggcatctggtgccttacatattaatatatgatctttttttactaagggcactttgtggtgttcaatagctggtctcagaatttcattgtctgacagtaaaccatccagttcactttgaatctttttcctttccctttctagctcactcttgctgcctctagtttcatggctgttatttctagtatgcttgaaagtttcgttctttgactttagtgctcagtgtatttctttctttctctttttttatttttatttttatttttttgagacggagtct

SEQ ID NO: 165957 - DNA, 346 bp, Homo sapiens
catctttctctgtaacccctaccctggcaattctccatggcctcagggagtccagccggaagctctgcgatgagtcctggggaactctcatctggaaaaaggcgctcatgacaggtggtgccaaccttccacggatgcttttcagcatctcttgggatgaggatacagaatttctctttcaccctgtaaacgtggtaaatgagggaatagaatttccagctttaatttttctgaataggattcaaaaatgaaattgtataaaaaggtatccagtgaaaaacacacacccatccccatctcccatccagttccctccgtaacccttttcttagtttcttatatgtcc

SEQ ID NO: 165958 - DNA, 235 bp, Homo sapiens
gccaaattattttctagaataatggaaccaatttttgctgccactaactgtgtaacagttttaccataccttcataagcagtgagtacctcataagcagtgagtacctcataagcagtgagtattttatatatttttggtaatttactgagcataaatcggtacctcagtacaattttactttacttttctttgactgtcaggactattaaagatcttaaagcaagtcccagaat

SEQ ID NO: 165959 - DNA, 541 bp, Homo sapiens
aggcccccacagggtcaggatcatcaatatcactatcttccaccttaacgtattaacccactggaaggtctccaaaggccagtaacacacatggagctgtcatctcctgtgataacaatgccttctcctagaacacctcctgaaggacctgcctaagcctgttttacagttaacatttttaagtcgaaggagaacactctaaaataatgataaaacatgtagtatagtaaatacaaaaaccactaacaatgtcctattatcattattattatgtactggacataattgtacatactatatagtacttttaaaacaactggcagcaaagtaggtttgtttgaactagcatcatcacaaagcagtgagtaatgtgttgtgctgtgatgctgcaaggttacgttcagctccactataatcttacgggagcagcaccacagctatctgagaagtttgtcttgaccaaaacgttgttatgtggcacatgactatattctaacacatgtgcattcaagaggagacataatgaatatcaagacggaaa

SEQ ID NO: 165960 - DNA, 551 bp, Homo sapiens
tacaaaaattagccaggcatggtggcaggcacctgtagtcccagctacaaaaaataaaaattaaaaaaaaaaagttggcatctattcattatctttgccttatcatattccattatatgagtccctcacaaatttatttatccattctattacagatggatatttgggttgttttcaggtttggctattatgaataatgctgcttcgaacatatcttggtgaacatgtctgcatttctattgggtgtatagctagaggctaaattgctgggtcataaggtttgtgaatgtttagctttaatagacactgctaaatgattttgcattgtggttgtatagttataccgaactatactttcaccagcattgtttgaaaaatgggttgcttaaaaaaaggaggggttgctcccatccttgctaatgcttggtattgtctgccttttccagttctagccattctgattttattctgcctttttttgtttctgttgattagtgaggtagagcaccttttcatatgctttttggtcatttgaatatctttcggtgaaa

SEQ ID NO: 165961 - DNA, 152 bp, Homo sapiens
aatattcaagtatatatgtgttcattagtcagtatttttcaatagattatgaaatgcatttagttggtcaggaccatttaaaagtaaatataggctgggcacggtggctcacgcctgtaatcccagcactttgggaggccaaggcaggcgat

SEQ ID NO: 165962 - DNA, 615 bp, Homo sapiens
agcccaaagtgaaaaagcaccatttcctcaacagttgtaaaagacagggatatctttcaattgaccaagcaggatttcatgaccatctttaaattacgtatcgaatacactgattggctaggcctaggacagtgcctggaacactgggagacccgagcctcaagtcctgctgcatccaggagttgaaattagtgtctcccagataacctggtctgagagttgaggattatttctcaaggctgaacagggtactgatttaaaaaaaacaaaaaattaaatggttgtgatcagcctcttagtgaaaattaagtttttgtaaatattgccctcagatttcttgagacagagacaaaggggtgaaaattggggaataaatcatacagttatttcagcttgatttaatttattcatgaagaccatcataaaatatgcaaagggaagtggagaagctgccccgtgtactataattaaacatccctactagcaagattaattatatttcctccatggtaagatttgcatcagggtgtggtcactagcgagctcttactggctacatttttgacctcagaggatctaaaggtagatttgtgtttaattgttttccattgggtt

SEQ ID NO: 165963 - DNA, 482 bp, Homo sapiens
ttcacttcattgtgtacataaaataccagccaggatacccgtaggaaggtatcttatctcattattctatcgctcctgaacacttgggatctgaatcagtatttcagcatgttattagcttcagtcttacactgcaacacattgctttagggactttttgcacacattttttgaacccccaaaacccgaagcaaagtgctaacacatggcgtttccactaacagttgacttgaatccattatcttccttgcaataatgtacaagaggaaactccctaatagttaaaaatcataacgtcccactggacatctcaggcattcatttctgtatctacagcctggaaacaggaaggtccagaagtcaacagctggacccaagagtgagcctggtcatccttcccttcacagcatcccaacaaacacagaatacatggttaaagttaacatgaattccactcttatcaaacataggcaaaggcttct

SEQ ID NO: 165964 - DNA, 465 bp, Homo sapiens
acatcttaacttaaacacactttgtataagaattaactcaaaatgaatcatctatctagatgtaaaacatattatattactataaaactttcagaagaaaacacagaaacaaatcttcacaaactggggataggcagagttcttagagatgattccaaaagcaggagccaaaagagaaaataaggaataaacttcttgtaagtctatctttatttccaaataaaaagtttaaaaataagcatatgaaaagagaataattataaccatcaaggaaatacaaattaaaccacaatgtgctaccactacacagccaccagaatggctaataccaaaaagactgacactattaagtattgctgagaagatatggaaacaaacttgcattcacttctgctgggagtataaattggtgcaatcactttgaaaaactattgaatctattaaaattgaacatatggttaccaa

SEQ ID NO: 165965 - DNA, 396 bp, Homo sapiens
tctgcctctttttccttctggcttaacaggaatctgtctaaattacatgtaaacccgatgagactatcacagctgaatgaaggccagagacaggctgaggcttgtctctatcaacaacacatcttagggcttggaaacagaagctcagggctgcatgagcctgtgggtcatgaattcactgctcctgctttaggcaggaattcccttccagcctccagaggagtgctcatgtgtcctccccttgaacacttcccctgactgggagctcactacctcaaagagaggttcatgctgtctttggatagctctgcctattagagagctcttcctccactgaactaaaacccattgcctcaggtccactcagcactcgtctgggtccttggggccatacag

SEQ ID NO: 165966 - DNA, 794 bp, Homo sapiens
cgctcacgcaaccgccactgtctggagcgggctcgcctctgcggcggcactcaccgcccgggctttactgaagcggagtctagcatgtgcggctgctccacagcggtgtgggtggcggcggctcctctgcagcagcctcggcagtaggggtcacggtggccaagcccaccgtggagctcatctgagagttgtaaggtacgggactgcctcggtctttgggacgccccgtctggtagcatcccagatccagcacgttccttccggccctgcaccccggcccggtgcctcacaccccgctaccccatgcatccagactctaaggcagcccctgcatctcagtcctgacatcgctgtccctggagcatcctccgctggagctggagcttgacagccaagacaatccaaagcaaaaagaacacagctggaggcatcacgctacctgacttcaaactactgcaaggctacagtaaccaagacagcatggtaatagtaccaaacagatatctagaccaatggaatggaacagaggctgcataaataacaccacacacctacaaccatcagatttttgacaaacctgacaaaaacaagcaatggggaaaggattccctattttataaatgatgttgggaaagctggctagccgtaggcagaaaactgaaactggaccccttccttacaccttatacaaaaaaactgaaactggaccccttccttacaccttatacaaaaattaactcaattttattatgttgtattaaattaagttgggtttaattaagatggattaaaga

SEQ ID NO: 165967 - DNA, 225 bp, Homo sapiens
cagaagccaagggtaaaagcgacatctcgcaacacgaaaggttaatatcaacatatacagctagtgagtgcaaagggcacctcagttggtggctcattatggcgggctgacccatagggaaagtgtcattctgcagagaggcctttctcaggatgtggcagcaaaagttacaaaagataaggacttgcctgtgaaacgcactcaactaatgagagctgaagattg

SEQ ID NO: 165968 - DNA, 577 bp, Homo sapiens
attagtggaacattggaatgtttagcaccaaaagagcagggtctttagtttttcctcactgaattactggtaccttgaacagtacattataattacaagtagacatttaccaactgcctgtaaaacaaatgactgtcagaatgaattaaggtttccaggagtgcattgcacattctgaggccaaccttatcctttttgggaggaaatttattggtgacttcattgagtttgctgcagatcaggcctgctcttgataagtaaccaagaaaaatagtgaatgcaatgaatgtcagactctggatcccgaagacttttgcctgagagagtgagagtcagaacacagcaagaggaaattgagtgggaatgcaagctaattcctcaatttgccccccgcaaactagctgctcaagtacagtcattgtaaattatacataggtttttttggtacaccagcagttcgaatgaggaataatgataaaaaaaaaaatggaaagcactttatgacagagcctgttgaaaatgactaggttgtcttagaaagtagtgactcctctgtaacttcaattgtttaagtcta

SEQ ID NO: 165969 - DNA, 463 bp, Homo sapiens
gaggcacaagaatcacttgaacctggcaggtggaggttgcagtgagctgagactgggccactgtactccagcctgggtaacaagagggagattctgtctcaaaacgaaacagaagcatataaaccagacccatactgtatgaacttgggtcataccattacacactgacaacagctggctaagtgtaaactgacaaaaattaaatttggaatcagacatttatttttcttctataaaattacttgagggcctgggaaactgaatattgttagaggtgatgtattctctgctgtcataattttacaaatgggcattttcattcatttttaaagtgctacaagtgacaaagtcactgcccagttcatatgttgttcattagttgttaaatgccttaagttactaccaagagagtgaaacattgggcagaatttcaattactgccatcacatacagccttcacatt

SEQ ID NO: 165970 - DNA, 299 bp, Homo sapiens
gattattatatgtaagaaaagtggcttcataggctcaggaatcagagttcctgggtgaatacttgttcctacactaactagctgagaccttgagcaggttactttgtctctttgtgcttcagttttctcatctataaaatggcagtaacaaggctgggtgtggtggctcacgcctgtaaacccagcactttgggaggccgaggtgggcagatcatgaggtcaggagaccatcctggccaatatgatgaaaccccatctctactaaaaatacaaaaattagctgggtgtggtgacactcg

SEQ ID NO: 165971 - DNA, 193 bp, Homo sapiens
tgagtgatttggtgtgaattattagacaatctctgacttggaataattctcaacccagcttgcagggaatagtgaattgagaggagttagtgagatgcttcaaaaaagtcttgtaatcctgtcttttgggaggggatatgacattttggtaaattagaaagtagaggttgctggtgcctttcagaagatgtga

SEQ ID NO: 165972 - DNA, 379 bp, Homo sapiens
ctttgcttcttgagcccttaattggccagctgggagggatccccttcttgcttctttcttcttcatgcatgcctgttgctctctaaggtcagggatttgagccagaggcctgggagtcaggtactttatggctcagcccctggcctggggcctcctattgtggggatcagcttggcccagggccttcctagtatgagaatggaatgagcttttgtggaagatggttagtggtctaagcttattatctattttttctgccagtgcctttgcataggaagggagtaggctgctatgtatgatcaattggtatgtgggccagttatctttggctaactttcagataaaacctttgctgtccatcttttttggaaagtagaat

SEQ ID NO: 165973 - DNA, 698 bp, Homo sapiens
atcttgctttcattcttttcctccataatctagagacaggaatattattatggaataagaaaaagatgaagccaggtgcagtggcgcatacctgtagtctcaactcccaaaggagtgatttcagctcctcgggaggctgaaatgggaggatctcttgagcccagagtttgaggccagcttgcacaacatagtgatacccagtctctaaaaaatttaaaacattttttaaaagctgtaccctgtttctgttctggattccctggctagctggttggctcttttgatggtgctcacctatttcctaaggactttgaccatttcaccttctgtccctgccttcctagttttaaggatccactttgagacaaattttcttaagtagaatgagagaaatgataaaagaaagtttcctttcatatttttaagagggaaaatattgaaactgttgtagcaaatgccatttaacaagatttctaggcactgcttatttcaagccatattcaagactacagaatttatgcataaggaagtaattaacttcgagtttatttttataggattttggatctggggtaaaggtcagttttcatgtttgtaaccacttaataaaatgaattgtgcttatgtatttataggcacatgtttaggtaaaaggaaattttagatccattctaaatagagttaaatccttttcacca

SEQ ID NO: 165974 - DNA, 125 bp, Homo sapiens
ctacatgccaaaagtacttaatcgtatgcagtaatgtcatttaattttcaaaacaactctccaaaggaagtgtcactctccttgtttgatttcttgcttcccaaatggaaggtcctttgtattaa

SEQ ID NO: 165975 - DNA, 480 bp, Homo sapiens
caaaacaatctacaaaagttgggataggatttcagaatgcttgtggtcttactgttggatagacctgtctactggaagctgcaaagtaaataaaataaggttaaaaagcaaatgactccacaatgctcccttctgaatgtaggaggggagttaatttttaaaacctgcttctctcctaaatttttttccaaatgaaagcccagggcttctgtcacaccagtgcagtccttgacggtgctgaagtgacatggctaagggtatcagaggacctgcacccacctcagttcctcccattcccctcctcaaactcagttcatgggagggtcactcaatacaggtggctccaagtgatacgttcctctggttactgccctaagcatacgtgaagtctacaataaagtatgcacttaatactaacagaaggttctgtaacaaaaaaacagttgaccagcctggccaatagtgaaacccagtctctac

SEQ ID NO: 165976 - DNA, 128 bp, Homo sapiens
ccgtacgtctaggactgacacattgtcattatcatggacgctaatcacaaggtgtcgtgtgcagtggcgtgcaggtggtgtgcacgcagatctgcgaacagcccacctgcacgcaccagcatacagat

SEQ ID NO: 165977 - DNA, 367 bp, Homo sapiens
catctaggatgatgcatgaaaacaggacagggatttctgcagtttgtaaaaatattttatttggtttcttctgtctccacccctgtagtatattactgtgtcgtctttgcacagcaagaacttagcatcatcctcttgtattttggattttgtttcctatttcctcagtttaatcttctcaggtgagtttgaaagacaaaagttctttacctgttaatggatgaggagttttaagaatctttagaactattttcctggactcttgtttcttgaatgggggtaggaaaagtgtatgttaatactgcttaagcttttttttgataagtcaaattctggaagtagaaaatagagaacaagaagatgagtc

SEQ ID NO: 165978 - DNA, 691 bp, Homo sapiens
atgccctgggccaggtgcccacatgaataatgcgggccacaggcaggcatttattttctcacagatatggaggctacaagtccaaggtggaggggtcggcggggttgtttgctctgaggccgctcctcctggatggcagggatcccttctggctgtgtcctctgtggcctttcctctatgaacctgtactgtacctctggggtctctctgcttccaaatatcttttttttttttttcagacagttttgctcttgttttctaggctggagtgcaatggcacaatctcagctcactgcaacctctgccttccgagttcaagcgattctcgtgcctcagcctcctgagtagctgggactacaggcgtgtgccaccacgcctggctaattttgtagttttagtagagacggggtttctccatgttgctcaggctggtcttgaactcatgagctcaggcgatccactctcctcagcctcccaaagtgctgggattacagatataagccaccatacacaacttttttttttttttgagatggagtttcactctgttgcccaggctggagtgctaaatagcagaatcactgctcactgcaacctctgcctgctgggttcaagcaattctcccacctcagcctcctgagtagctgggattacagatgcccagaaccaatctctgctaatttttctattt

SEQ ID NO: 165979 - DNA, 377 bp, Homo sapiens
aaagtgttaggattacatgcatgagtcactgtgcctggtccagcctagaattctatacccagctaaaacgatcaagtatcagggcagaacaaagttactttctggtatacagtcttaattattttaaccttggtttgaaccacatgaagagagaaacccaaaatgaagcacagaggtattaggaaacgggggacctaacaggacagagggtgaacgtaaagggggtcacagcatcacagcgcagcctctgcccagagagctgccagtcctggctggaacaggaggctgcacagcaagcggcactctctatggaaaacaccagaaccagtggggtctctgatccacttcacccttgtagaaaactatggagatgctgt

SEQ ID NO: 165980 - DNA, 1342 bp, Homo sapiens
  misc_feature (1300)..(1301): n is a, c, g, or t
  misc_feature (1303)..(1303): n is a, c, g, or t
  misc_feature (1313)..(1313): n is a, c, g, or t
  misc_feature (1319)..(1319): n is a, c, g, or t
  misc_feature (1321)..(1321): n is a, c, g, or t
  misc_feature (1329)..(1330): n is a, c, g, or t
  misc_feature (1337)..(1338): n is a, c, g, or t
agtggtggctcacgcctgtaatcccagcactttgggaggctgaggcgggtggatcacttgaattcaggagtttgagaccagcctgaggaacatggcaaaactctgtctctaccaaaaatataaaaattagcagggtgtggtggtgtgtacctgtaatcccagctactcgggaggctgaggcagaagaatcacttgaacccgggagccagatgttgccgtgaaccaagatggcactacggcactccagccagggcaacagagcaatactctggctcaaaaaacaaacaaacaaaaaaaccaaaaacgggccgggtgctgtggtggttcaccggcaaggtgggtggatcacctgagatcaggagtttaagacccgcccgaccaacatggcaaaaccccatctctactaaaaatacacacacacacacacacaaatgttgtgcttcaaagggcaccatcaagaaagtgaaaagacaactcaaggaatgggaatggtagaaaatttttgtaaatcatgtaactgataaggacttgtatctggaatatataaagaaccattgaaattcaacaataaaaagagaaataacccagttaaaaatgagcaaagaatctcagacagttctccaaagaacatatgcatatgagcaataagcacatggaaatatgctgaacgatatcagtaacaaggaaacacaaataaaaaacacgacaaaatacttcagacccacctgagtggctataataaaaaaataataacaaatgttgccaaggatgcagagaagctggaacttttataacctgctggcagggctgtaaatggtgcagccattttggaaaagaaaaccagttcttcaaatggttaagcacagagttgattctgtaattcttttcctatataccgaagagaaacaaaaacatatttccacacaaaaacctgtacaaatatgctcatagcagcattatctggaacaacagccaaaaggtgaaaataacccaaatgccttatcaaccaacgaatgaatacattactctacacaataaaataatattcagcagccaggcgtgttggctcacgcctgtaatcccagcactttgggagactgaggcgggtggatcacctgaggtcagtagttcaagaccagcctggccaacatggtgaaaccctgtctctactaaaaaataataataatacaaaaattagtcgggcgtggtggtgggcgcctgtaatctcagctactcgggaagctgagacacaagaatcgcttgaacccgggaggcggaggttgcagtgagccgagatcanncnactgcactcnagcctngngacagagnnagactcnntctc

SEQ ID NO: 165981 - DNA, 521 bp, Homo sapiens
tcaatgtgccgcagcgggcacggaggtaacgtggacctggacggtgcctgtgagtgatgctgggggacaagacgccacacctgagatgatcagcaacagagcaggcagaagaaaaggcgaggacccaggaggaggcctggtcttggggccacaggtgcttgcagaggaggtgggactttcagctcagatggcattgagattagcagagtagggggagaaggtaccccattggaaggaagttttcctgcctcttggtactccttcctttcagtttgccccttaaatttcagggtatcttatataattcgatctcaggctctgctcaggctacaccctctccctggatgacagcatcactctggtggttctgtctccctcagacctgtagatgcctcagctgtcccaaccagaaacgtggattccccatccttgcccctgtcccccataatgaaaaaaaacaaattccctccatcctgtttcacccgatcaataattataaaatgcaaatatctctctcagag

SEQ ID NO: 165982 - DNA, 490 bp, Homo sapiens
tccagcgcaggtagaagattctgaggccctgggcgggaactagtaagccacaatctggaagagtcttttaccaccatgtggaggagaactagagcactcatgttgaactattaccgagaaaagtaatcaacttcttttgtgttaagtcactgaaaggcaagtgttgatttgttgcagtaattggtgctcccttaacacacctgtcagccgggccaaactctatcacagcataaataatcttttccttaaataaatacaggtaaaagaataaagtagacctaaatgcattaatatgaatataggctcaaagcaaaatgttgggctataaatgttcagagtgataattttttaagttgatgtgtaatttagtacagtaaaatagataaaacctaaatgttcagttcaatgaatttttacatgttcatgcccctgtataatcacctcccagaacaacatagaaaatacttcatataaatggaatcatacagtg

SEQ ID NO: 165983 - DNA, 390 bp, Homo sapiens
cacacacacacacacagaggagagaggggataaagggagagagaataaatgataaagcaaatggtgagatttgctttaccaatggtaagactgtgtggacaaaagtacacaggaactgtactatctgcataatatttctgtaagtcagaaattatgtcaaagatttaaaaacgtgtgagccaccgcgtctggtccctcagtaggttttaaggagcctccagccttccttctccccttctgggcctgaccagctatactgctctgtctcccccagccacatgccccaccaagtactgtagagagtcccctacccagggtccctgcaccatgagataaggtgaaataccaactgtggaccaaatgcaataaaacctctgtttttaagaagaa

SEQ ID NO: 165984 - DNA, 251 bp, Homo sapiens
gccactgcttctggccacaacatggtgttttgatataagtaaaccttgtgtcatgagtcttacaatcaagctaattaatgtatttgttacctgacatagttaccttttttgtgtgatgacacttaagatcgcctttaggcaaatttcaactgtaaaatactgtatgttattaactgtggttactatgctatagcttagatcactagtacttattcatcttataactggaaacttgtatacattgatcaaca

SEQ ID NO: 165985 - DNA, 458 bp, Homo sapiens
ttttgacagctgactattggaatggggtgaaggtctcgaatgaggataaacatgtgtgctgatatccatcaagatacagatttctctgttgtcattaattatgaagggataaggacaccattgttgtcaaattgtttttctgtagggccttatccatgtaaaatgtaaacctgttacatctgcatgaattgaaaggcttgtgataaaggcttagccagtcatgaaaggtaattttagcagatggtaatggctcaaaaattacctcttattagtcacatgaagatatatacatattaagttcaaagcatttttcttcttctttccctcctttccctgagtttctcttctttaagaccatactatgtgacctctggtgttttaggcagcaaacaccagctcaattattttccttttgcagtggctttaaaataaagttcttctgacagtttataaaccta

SEQ ID NO: 165986 - DNA, 421 bp, Homo sapiens
ttgaagcttgtgggacgtgcctggtgaggatattccgttcaatgacacatctgtcatctttacatgttgaccagccaacaagaacttgctgagtacaggacggacaaggttggcattccgctggctctacaggggatcaacgggaaggatggagagaacagcttgtgtgccaggtggggagacggacatggaccaatactgaataacctacaacacaatggtttagaaagagaattcaaggtatgtggactggacttaagccatggctaagctcacaaaagacttcctggaagaagatgtacagcctatggtgaggcacaacctccctgtctgtactgcgagttcttgggtcaagacacaactcacctctacctatctgtacactgacagcaaagtccttttaatatcaaacagaaatgaa

SEQ ID NO: 165987 - DNA, 344 bp, Homo sapiens
tcccaaaggtctcaagcctcaacatcctggtaaccaagtgcacccagagggctggcagggtcacatggaggcaggggacccttggccccagggtggtcgtcttcccaggaggtccgcctgtcaggtcagagggcagcaggaggccaccccacctccccgggttccctcgagcattcctttgtcaggagcagctcccccaggatccaggcatccctggcccccctttgcccccgccctgctctcaggagccccctgccaggtgctctgaccacaggaaacaggagccctcagggccactgccagaggacggattctgctgccaaccagaggtcctggggctggcg

SEQ ID NO: 165988 - DNA, 122 bp, Homo sapiens
ctttgtgtcaaaaataaaacatgctccaaaagatgagacaatcaagcagcctggacttctctaacaaattcttatttgtcatttccctgtgccttttcgagcacactgtttaacaggataat

SEQ ID NO: 165989 - DNA, 332 bp, Homo sapiens
atggcagaggcaggaggctggggacatggggatgatgatgccattcaaattgcaaagtgttactgatgctggttctgttgaacactgctggaatattgaatatctgggctatgagcatttttcactagtaattattcacacctcattaagatcagacatcagttaatgtctttctaggtagagcaaaaagtgaaatatttattggtcagtgagtaaagtcctggcatctaggtcagttaagaagatgaacctctcttggcaacttgggcttttggtgatagacagtatggttggctgtgtaacattcttaagactagtaacagtcagaacaa

SEQ ID NO: 165990 - DNA, 365 bp, Homo sapiens
cagcggtttcaacactgcttagatggcctactgtcttttccctagttaacttttcctactatttttaacagttatttcaacttttcccccctcttcaaaccccaaacttaccccttctcttttatgcttagcaagtgggttttcttcctaatttacagagacgatagaaaccgttggaagacagcttcaatattgtccacttcatctgtgttgaagactcttccagagtctcagtagcagttgttcctgtctaaaggtggatcttttcacctcagctttggattatatctcatcccctcctgcttcttagggaacaaaacaattattttatgttcttttcgtatttcctggacattctgttctta

SEQ ID NO: 165991 - DNA, 495 bp, Homo sapiens
tcgagactccaaagataggcccggccagtgcccccaccctccccagccaagcccctggcctgggagcctgataagcagtgacacatgggcccttcctcctcagggaagctgaggcacctataaacagaggccccaatttccagggagctccagctctgccaaggagggaagccaggatctggctctggccccaaagagccaggaatagattccactggaaacacatggaagagaaacagggcaggatcactcatcaggcccagtataagtggactgggggtcacatatgcgttgctgagagaagggaacacatctgtttgggcaacaggatctccagtacttatcccagtgcttaataaatgtctgtgactgaatgtcctggctgaagggaagcctgtcctctaagctcaagctgttccttgtctgttcagtgggtggtcatttacttaccgctgcttgaaattagatgatagagccatttgtttactagcccat

SEQ ID NO: 165992 - DNA, 321 bp, Homo sapiens
acaacagcttttcctgaccatgctatgtctctcacctggagcactgcaggtgtgctgagcctctccagcaagcccggggacagccgcatcctggccctgacctcgtgcccgtcgccccggcccacctgctgctccccacacccttcgcctgctctgtcctggcccaggcactccaagccagaatcctcctactagaacctggggccccatcatgcagcacagatctcaattcaggaccccctgccatggacaccctgcctgagggccggctcttgtggcctcccaccacatggcctcatcacctgaaaggtgcctgagaga

SEQ ID NO: 165993 - DNA, 255 bp, Homo sapiens
tctgacctcaaatgatccacctgcctcggcctcccaaagtgctggtgtgagccacagcaccaggccttggggcttggaattttatattaacactatctcttgatttctcttatcttctttctctccagatttttccccagattgcctgttctcaccagttcttctatcaatgctaagaacttggctttagtgtaaagtatttaagcagccaaagataagaaccttctaacttttcatttatacttgcattagcct

SEQ ID NO: 165994 - DNA, 488 bp, Homo sapiens
ttcttgagaaacttagtatttgtgaatgcttcctctatttaatatgtatgcaaatgtttttaaagacctaggaatgcttttcttgaggacctggaagccatttctttaaaatgtaaacatcaaggaagatagggccccagtctccttgtcactttgggagtttaacctaggtgcgttattcctaattgtaaacacctgtttcgttatggagctgtgcattacttaggaggaaagccgttagctaacacaggtggttaccccaattaccagatgaattaaagaggaaatataaaagaatgtatagaacactatgttaagccctcttacatgaggacacgttaccagtttccttgagaatgtgtaatggattgtgtctccttggctgtataaaagagggatttccttctctctttgtaacctcattagcagattagccgtgatgtgcatcaaagtctagttgaatgcctaataaaattgttgtctttctg

SEQ ID NO: 165995 - DNA, 357 bp, Homo sapiens
tcagcgtcagagcccagcctcacagctgccccgcaagtggcactccctctccctgcctggagagaggagagtggctaggaggctggggaagcagaagtgagaacatccctgtagaagggccacaggctgagcggaaaccgggggctgagcctgacgccaacaatgtgtttccgcccacacaggctggggggcgcctggcagcccctcggaggcttgaatcagctctcacttccctcctttgcccctattttaggccctggaaaaatgctgacgctgcagaggcaacgggccttcttcccggacagcctgataggggtttcaagttctcttttctccttcaagaaaattttccttaaa

SEQ ID NO: 165996 - DNA, 646 bp, Homo sapiens
gtttttttgtcactgtgaaaaacctgaaataattacaacttcagaatgtgttgtacttctcaattgctttatgttttcaatttagcaaactcattctcaaatttcccacaagctttgcaaatcagtgtgtgtgattaaaagggtatggtgggtgggtttataaaattataatgtacttaaagatctaaagaactcgtataaaagatgaaatatcttattatatccttacttgcttgtttaaaagaatatgaacctgacagcaaatattctaaaattgtctagtatctttcccccaaataagttaaaatcacattacaaagtttatatttatcagaaacaaattagaaacatatcaaatttgaaattatccactattcatcttatacaacataacccctaaagaaatcacttgtattagctttacagcttggatattacacaggaataaatatcaaccaacattgctattttattgctacctgatctactacagattactttcatatgtaactacattagaatgaaaatactggggctactttagaaaaaggactgactgtgaaggtcagtttcctagaaacaagaatgacaaacttctatgactacatgcactttttctaattattcataattaatctttcagaaa

SEQ ID NO: 165997 - DNA, 407 bp, Homo sapiens
gctgggattacaggcatgagccaccgtgcccggccagaggagccctcatttatagcaagaataaaaacattttgtcaggaaatttaataataagcccagactgagtgcttgctatgtgccagacactgttctaaatgctttacatgcatttcttcatttaatcctcacagtgtcctgaattaggtgctttattttattatttccactttgccagtgaagaagcagaggtagtgagagggtaagcaacttgcctgaagttaaaagctagtcagttgtggacttagggtttgtagccaggcagttgtggtcttcagggaggggacataacatcattcccctcctgaaactccatattcctttgtaaatcttattctgtgttacatattttcctgtccttcatttagtta

SEQ ID NO: 165998 - DNA, 338 bp, Homo sapiens
gggcactatgtgacaaaggtctagtgcgattggttggagagaaattttacagtacctcgtaaaacttatagaggtcttatgctttattctaagggtgacaggaagcccctccaattttctctacaaacatcacaaggaaaagtgaggaagaattgtcttacagtgtcacttgatactttgcttttaaataaaggcagctaaaaaaaaactgagatagaattttgacccatttataaagctattctacccttcctccccccattcttctcatttcctccttccactttctctcccttccctttcttttcttttcttttcttttctcttttcttttcttt

SEQ ID NO: 165999 - DNA, 471 bp, Homo sapiens
actcatgcgcatctcctggcttcagccctgtgctgttacgaccacagtgcccactgccccagtggcttctgttgacagacctgtgctcacaatcaaaaagacgccccataaaaacccactgggcagtgatcagcaactcgccttctctaggtagagagaggacccaggtaatgccagagaggcaggccttcaacagtcatggtggcctccgcgcctggcttctgaaaaccatagctagaggctagtcgggtttccagcatcaggaaaagagcctggggaatgcatggggagggaaagccagactccacctgcaaggaacacactcactgaaagcagagcaggacataattaagcctaattgtgtaaaccctgccatgccttcgagtgagagggatgccaaggtctcgtgtttccttccgttctatgcagcctgtgcatccctacctgaaggtcaccctcattaacgttgcc

SEQ ID NO: 166000 - DNA, 314 bp, Homo sapiens
agcctggacaacatggcaaaacatcatctctagaaaaaaatacaaaaatcagctgggtgtggtggcgcatgcctgtaatcccagctactcgagaggctgagacatgagaattgcttgaacctgaaaggccgaggttgcagtgagccgggttggtgccactgcactccagcctgggagacaaagcaagactccatctcaaaaaaataaataaataacgtatcactttaacccttttgaagacttgaactgttaattttttagacattaaaaattgtatccacaagtatccaagatatctgaggtattatgttaat

SEQ ID NO: 166001 - DNA, 463 bp, Homo sapiens
actttgggaggtgtctgcatgtctgtagtggggacgcctgtattggaagatttaaaaacctagcatcctgttctcaccctctaagctgcattgagaaatgactcgtctctgtatttgtattaagccttaacacttttcttaagtgcattcggtgccaacattttttagagctgtaccaaaacaaaaagcctgtactcacaccacgacacagtaccacgacacagtgcaccacgacacagcactgtgtttgtgctggatatccctttatgagttttaagaactctgaaatgtgaaaagtacaaataagtaatctcttgcattcctattttagtcaaaagatcaggctccaaattgctttattcatctttgagtagtattgcagaaaattttaactgaaaattatattcaaaatactgttttcaatttcctaatggaactgtaaccaattagtcaaccacaatta

SEQ ID NO: 166002 - DNA, 345 bp, Homo sapiens
ggacccaccctcagggcagaactgtgggagaaaagaaaataatacagggattctcttggtatttttggccacttgaacctcattcctggttcttcctgccagaaagataggagttttagctgctggctctgccactgctgctaactccatgactgaaggttccagttttgacttccttccacaatctgcctgcttattttacttttcattcttcaggtagttgcttattcagtgttgtccagagtttctagttgtaatcagtggagttgattatccatctttaacatattgaatctttgcctaaattgactgactaataaatgttgactaatttctttattcaat

SEQ ID NO: 166003 - DNA, 560 bp, Homo sapiens
tcccgagtagctgggattacagatgcacgccaccacgcccagctaatttttgtatttttagtagagatggggtttcaccatgttggccaggctggtctcaaactcctgacctcaaacgatccacctgccctggcctcccaaagtgagccactgcacccaggcttaattcctttatattcttgaagacggtcaagggctcaagacaatgaaattagaattttaaaaaaattttcttatttttgagatggggtctcactttcttgcccagacaatggtgtgaacatggctcactgcagccttgaccttctggtctcaagtgatcctcctgcctcatcctcccatgtagctgggccacaggtgcatgccaccatgtctggctaattttttgtagagatagggtctcactattataagctcaggctggtcttgaactcctgggctcaagcagtgtttctgccttggcctccgaaagggctgggattacaggtgtaagccatcatgcctggctgaaattggtttttggatgtttcttatataaattttatacgtggtgatctgtt

SEQ ID NO: 166004 - DNA, 482 bp, Homo sapiens
cacttagaaaaggcctgtgctttgcaggatcattggctcagggagacttaggaacttgtttttcttcttcctgcagtgctctcatctgagtcgttgaaagcggggaaaagaagttttagtaaagccaggtctgaaaacaatttcctctgtctccgcaggactcgagctgaagtgcagatgaccacattcaaggaagaaccttctgccccagctttgcaggatgaaaagctttcccacttggctgttattcttccacaagagctttgtcaggactaggttgttactggttcagcaactctgcagaaaatgtcctcccttgtggcttccgcagctcctgttcttggcctgaagccccacagctttgatggcagcgcctcatcttcaacttttgtgcttctctttacctaaactttcctgcctcccctgcatctgtactccccttgtgccacaaacacattgcattattaaatgtttctcaaaca

SEQ ID NO: 166005 - DNA, 342 bp, Homo sapiens
cctctgtgtcccttcgttgtgacattaagtcttttaggctcagaatctggtttgagttttggccgacacaagggcttcccgcgttgctctaaatttagtcaacttagcaagttttctttttctccctcttacattttgaccttaatatctcaataacagtgttttcctaagacctgagagtgattttgtctaccctgcttagagaatcttaatctaattttctaaagaagaaagagaggtagaggaagaggagaaaagggagagtgggcagaggaggagaagagaacgatgacagaggggtctattgtgacatctgaacggaggagaggagaggggtgaaga

SEQ ID NO: 166006 - DNA, 363 bp, Homo sapiens
atgaagcaaaacacaaaaactttcaaacctgaactgatcctcattctctcctaagtccttatttccttgtctagttatgcctagggaacaatctgttggattcacttcaggaagatatcaggagaagacaagagcagagccatttgcttttctctttctcccacttcacgcaaatgaaaactgatggcagaaggttgcagaaagagaagcccaaagcattctgaggcacaaagtgagttttcattttgggaagaggagtgtgcccaaggccttgggcagctgaagtcaatggtgtttatctttgtgcaattctgaacttaaacccaataaatgaagtacatgaaaagcaccataggaattaaa

SEQ ID NO: 166007 - DNA, 366 bp, Homo sapiens
ttatgttcatcttgagtgatgctctttgcagaaaacctaacttaatttaagaagaggcccttctgagggcttttggggaactgcacaggatttatcctattagggagaaagaggcactaggctgtccgaatctgtggttaccgaatactgcatcatgtaacaggctccctttcctgatttcagactcattaggaagtctccccatcagaatttgttttcccaagtggattttcacagggagaaagcctctggtcaaagtccccgaaggtggcctccttggggtgatttttaaattccaaatcagtaggttagcatatgtccttctgcatgtcctggggacagcagtgttccagtcccactaaccct

SEQ ID NO: 166008 - DNA, 289 bp, Homo sapiens
aatggtactaaataatataaggttaattatgtttatttcaatattaatactttactgacagctgctacagggatgaccgaaaggataagctgtacaaagaaaacatttctaagagcatagttaccaaaattttaattgatgtaagcttcttagtaaattcacccaaatgcacacatattttaaagaaacagcaacagaactggaaaaactctacaggtttgtgtaccacgccctctttggcatccacttccccattccttcagtgccaaagctctggttcgagtgctgg

SEQ ID NO: 166009 - DNA, 536 bp, Homo sapiens
cccagctctactcccacctccctgcaaggcacatacactttcttcttgaggatgattctccaagagaacctcccttgggaacagatctttggagaggatggaagcctcctaagaagatgcctcgtcttccgaatcttccttacctccctccctctgagactcccttaggggtcccactgcttactctgcccttccagtttcactgcacactggccttctcattcagtaagtcattttgaagatatctattgagtctctactgtatgccacgttctgtgctgggccctagggatgcagcaaagaagacaccatggtcgcctgccattatggagtttaccatcctaggaacaggcaggtttgcttgagccatcacctgcactctctccttgttactctgtagtccagaccaggcaaagctgaggcgtcttgtcaatgttaaggtcataaggagtgaccaggggtcctgaagctctggtcaccattgtggggtcacaatgttaaggaaacagagttaggctggcaaaacaagggaaaag

SEQ ID NO: 166010 - DNA, 354 bp, Homo sapiens
tctaatctttgaaaactatgttcaagttaaacatgcatactatccacgctgataaagtcattaacatactttacaaaaatgttaagcagaaacattaccggtaaaaggaaaagggagcaggcaccagcagccatggagcacatactccagagcgaggtacttctcattatctcgcttcctcacaataaccccgtagagttagaagcaaaacgatgagctccacattaagaatcctggtctgccacttttccttaatgtctcacttaaatcttccattagcaaacactaatacactctctttgaacgatttaaggaacacatacatattgttcaaattcatttccagattctaac

SEQ ID NO: 166011 - DNA, 191 bp, Homo sapiens
gcaagattagcacaaagcatactaatgttttttgaaatacacccattgttaacattttgtaccatttgctttatcatttgcactctgtgtgttgggggtctgtgtgtgcagtatgcaataggtttttcttaaaccatgttagagtaagttgcatatatcaaagaaataccttttcccacaaataaacttaa

SEQ ID NO: 166012 - DNA, 289 bp, Homo sapiens
acttagctctaacagaggctcatatgattatgtctgttagaggaagtgtcaaaacaagagtgcctaccatgtgatagacagcaggtagccagtgaatgaaggaaagatgaggtaagaggtataatctttgtgtaaaaattgggggcttaactgggatgcaagagatcttttcctcataagtatgtaagtgtaataagatgtcggccgggcgcggtcgtcacgcctgtaatcccagcactttgggaggccgaggcgggtggatcatgaggtcaggagatcgagaccatcc

SEQ ID NO: 166013 - DNA, 666 bp, Homo sapiens
atcagcagtcacctgaggagttgcgcctccccccacccccttttaaaatagagatttccagtatttatcagcaggtctttctttttttgtccagcaaaaccctcccttcttctcccctgtgtttttgtctccctaggtgcatgaggcaacatgtttcagacccactcttttgacttgtagaatctagccactgttattgtatatgaaacatacgctcattttgatgactagccccggaaacacattttattcctctttagcagaatattgaaatacactacaaagtaagactatataaacttctgtctgatcactatgtaatttgctccattatattccattttaaataactccattgtggatttggagaagcttgcatatttagagatttgacatgttttatttgttgaaattgtaatttttctcacagaatagtcctatgacagcattttattaaacaatagtgggtttatgtccatcacaccaatatacaaagattcaacttaagccataaatgaaaggaatagttatctaattaaaaactgctgttactaaaccagaggcaaaaaaaaattagataacatttatgtaagacttactgtcctacttgaatatgtaatgtttcaatgtttcagcccaataccagtgtttgacctgagagaggta

SEQ ID NO: 166014 - DNA, 455 bp, Homo sapiens
cgagaccactgaggccacgacgtacatgcaccaaccacagccacgggagtggcctggagcccggggccctctggcccgctgaatggtgaggataaatggctggtgctgccttggccccaaagctgtgaggagctctgtgaggatggcgagagcacccccgcactgccgtcccctcaggggcatctactgcctaagtcatgtgtcacaactgtctatggcggcccagggcactggcccctgcggaacacctagagctgcatgcccacttgccataaagtgggacaacactggtttcgacaccggttttggggtgagcccagtggatggtacaccctgaggtctccacaagcaagcagtggcacgagacagactcagtctccctccccagaattccccactcaggggctggggtggggtccagacatggtgcgcccagtgaccacctggagccaggc

SEQ ID NO: 166015 - DNA, 659 bp, Homo sapiens
gccagacttaaccagtataaatttgaaaggtgtatctctggcttttatccttctgaatataaatgatcttcagaaaatttataccatgatctgtaatgttttcatatctctgtttcatctttgtttcattttcttcatctatgaaatcaatgtgttatatttgtaatcccatagttggtctgtactcctctatgtgtagtcatctgggatatgctagcatcacagttacctggagtcatcttgaatatggagatgacagggactgattttgcagattcgttgagttggtgggatatgtaaatatgtttttcaccaacaaatcagatatttctgttgggcagccaagtgtaataaccattgctgtaaatgatctctgtcctctccaaatcacatgattaattaaattatgtgaatgcctagttgactgctagggaatgcttgtactttggaaatattttaaccaaggacactctagaaattctcttgctctcccacctcatcagtgcaacttgaggtttcttagtgcagttgtatgggtctcagaacttcttctgttggtatttggtgaagagataagagattaaaactgtgttgcattttatacctttactcttgcctccatattataattttactgttttaagtttattgcaagtgtt

SEQ ID NO: 166016 - DNA, 487 bp, Homo sapiens
tttatattttgacatttaaggaaatatactttgacattgtccattgcccagaataaattaaaaactttttcagatgataaaggtatttcatcagcactgagattattgcttatagcttcttgtttagtggtatgccatactttgattttggttttataaaattttctgtaaagagcattgagaagcctttcctcatgttgttgctgcattgtgtttaggctgtgtcttgagagaatggcatttcagattgacagctttcttcaggctgtgaggtatacagactttaggacttcataaagctgaagtatagatttttggggaagatattggggattccttgaactccaagagcaaatggtggctgctgcattctgagttcttgctcttttgtaattatacaagagtttctggatttggtgttttataaaaccataaatcttattttttcagctcacttgataacatagcaactttgtagaaactctag

SEQ ID NO: 166017 - DNA, 153 bp, Homo sapiens
aaactgtcattaattgtttatatattgctgatgagagtgttttgaagtatgagaaaaaagagtatagagaatatattactacaaccgctaggaagggcaatttgtaatagtgatcaaaattaaaaagtcccatagcctttgaatcaacaattc

SEQ ID NO: 166018 - DNA, 551 bp, Homo sapiens
aaagctccatgagagggttatctataatttctgtctctaaaatccctgttcctactctctctttttaaaaaaataaatttcattgtgtatgtttatgatatatagcatgatattataagacacacatgcatattaaaatggttactaaaatgtaacagatgaacgtatacatcatctcacatagttaccctctgcccgatgcccttggcaagaacagctataatctactcatttagcaaaattcctgaatataatacaggattattaattatagttttcaggttgtattttaaatctttccacttgttcgtcttacatatttgctattttttttgcaatggataatgtacttctaaaatttatatacatttatggggtacaagcgcaattttgttacatgcatcgtggtcaattcaagactttcagggtatccatcacctgaataatgtacagtgtactcattaagtattttttcctcattccctctcctctcaccccattactcgttcaagtttccattgtctatcattccactctctataccaatggtg

SEQ ID NO: 166019 - DNA, 514 bp, Homo sapiens
cccagcagcagagccttaagatacaggaaagaaaaactgacaaaattgaagggaaaaatcaacaattcagcaataatttggagactttgatacgccacttttaataatggatagaacagcttaagactataaaccaatgaggcctaacagacatctatagaacctcatcagaatacgcattcatctcaagtgcaagtgcagcattccaggatagaacatatgctagaccgtataacaagcttccataaacttcaaaggattgaaatcataaaaggtatgttctgtgaccccaatggaggaaaattagaaattaacaaggaaatttgggaatttcacaaatacatagaaatgaaataacacacttctaaataatcagtgggtcaaagaagaaatcaaaaaggaaatcagaaaacattttgaagtgaattaaaagaaagataaaacatactaaaacttacaggatgcagccaaagcggtggtttagagggaaatttatacttgtaaatgcctgcgt

SEQ ID NO: 166020 - DNA, 182 bp, Homo sapiens
tgctggaattacaggcttgagccaccgcacccagcctcctgacccttcttataagggcactaattccctcgtgacttaattacctcccaaaggtctcacttccaaataccatcgtactggggaggcttcaacatatgaattttagggggacacaaacattgaacctatagcactaccatttc

SEQ ID NO: 166021 - DNA, 248 bp, Homo sapiens
gagttttgaaggttcaaaatcagcccaggataaccatggagctttggttgaaagtgtaagcactcacagggcattatggctccagggtcagggcatgcattgggttggaaaagatagaagttcctttcctgaagcagttcaacactagccacttcctgagtgggggagaggtgtgcagccatttatacctctctggagttccttggtggctgtggtttttagttacctcagtggcaaaacatgctggt

SEQ ID NO: 166022 - DNA, 433 bp, Homo sapiens
ttgtctgctgctgtgacctgtagctcctcgtacttggtctggtaccaggactcagcctcagcccggcttctctgagcaatctcctcatattgggccttgacctcagcgatgatgctgtccaggtccagattgcggtgtttgcaaacacccaatcttacatggatgcttcccacgtgcctgctggaagcacctcagccacataaagtattcatcatctgtatcatgctttggaatccagtagggccttccacagcaccaacttggctaagcctcactgcagtcccataagggttgtcattccccatcttactgatgtggaaagctcagagagccaagagactttactgagtcccaggagaggacagaccagaactgacccaggtcttctgacaccagggtctgggctcattctataagccaacagaatttacct

SEQ ID NO: 166023 - DNA, 410 bp, Homo sapiens
attaatagatctaaaaggagatataggctgcagtataattcaacagtctactttcagcaacggacagacagaaattcaacaaacaaacactggagttaaactaccctctgaaccaaacagacctaactgacatttattgaacatttcatccaacagcttcagaatacacattttttttcatcagcacatggaacattcttcagaacagaccgtatgttaggccacaaagcaggtatcaacaaatttttaaaaataaaatcatatcaagtacattttctgaccacaatggaataaagctagaaatcaataaaagaggaactttgaaaactacaaatatcatggaaattaagcaacacggttctgaacaaccaacgggtcgatacagattttaagaagaaaattttaaaatt

SEQ ID NO: 166024 - DNA, 506 bp, Homo sapiens
gacgccaaggggttaaggtcagcgtgggtgcctcgcagccagagacgggtgagcgttttctgaggctggaagctgattgagccgagtggaaacgggttcccttgggctttgcggtggtggagagctgctcttgcactatcagcagccccatcacgggcttgaatgttgcggaaacagagcgccttgttcttagaggactcggcttgctggatttattgcctggcccaggcttgcttcccgcactgggcgaggacgcgagaactgccagacggtagttgccctgaatgtaccggtagaaacttatttttaagcgttccatgcactacccaggtataaccactttcttccctggggtgtggagaaggggagctttgctaggtctttgtcttagctgtgtagtcctaggcaagttacttcgcttacctatgcctcagttttctcatctgtaaagtggggatgataacagtacaaaccttaaagagttgtatagggataaagtgcttaaa

SEQ ID NO: 166025 - DNA, 240 bp, Homo sapiens
ttcattccttccttccttcctgcctgcctgccttcctgcctgcctgccttccttccttctttccttccttccttcctttttccttcttttctttccttccttttttttcttcctttttggtctcactctgtcatccaggctggagggcagtggcgcaatcacagctcactgcaacctctgcccccccgccccagggttcaagtgattctcctgcctcaacctcctgagtagctgggatta

SEQ ID NO: 166026 - DNA, 238 bp, Homo sapiens
ttaaaaacatcatgccgagagaaaagcttaaaaccaaaaaaaaaagagatagttattgaaagatcatttacatatacgaagacatatgagcacaaaaatacattttgctgggagtcctgacaaaatattgaaaattggatatacgtgaacagtggtctgtatcagaaaagggaagggagatctatagggataaaagggaatgaatgaatgaatgaatgaagaggaaggcataaggcct

SEQ ID NO: 166027 - DNA, 471 bp, Homo sapiens
agccaagctatgtatccagaaagaagaaaaaacaagtgtggtaaagagctatcagtctatgcctcagcttttcaaaatccagtcttacggcgcacagatctagagagaatatgtagaccttatattatgtaaaggcattcacagaactatttttgttgttgttaacatacttgagcttccctacggcaatgttcttgtaggtttcccagactaatagccttcaaaatggaggtgaatatatacatacaagaaaaaaataagtaacttaagtcttctaataagatatgttttataaaaatatgaagaagatatagtaacagctccttacagcagtgtaagacctttctttcatccatctcctcacctatggttactatcctcacaatcccatttccctctatgtacattttactttataacattatgttctcatacacaaaaaatacaataaaaaattttccattatccaac

SEQ ID NO: 166028 - DNA, 319 bp, Homo sapiens
gtacattgtaacagtattaaaaggtgggaccattaagaggtgattaggccaggaaaactgtcctcatgaatagattaatgatgttattgtgagagtgaattttttattacaggaatgactgggttccttataaaaggatgaatttagccccctatttctctctcttgccctctctttgcccttctgccatggaatgatgcagcaagaagaccctcacaagattggtctttcaatcttggacttctcagcctccagaattacgatccaacagatttctgttcattataaatttcctagtctgtggtattctgttatagca

SEQ ID NO: 166029 - DNA, 561 bp, Homo sapiens
gctgggaatattgtgaatgtatgtttctcccaggaatggaggtgggcatggactgtgccttcttgcttggtccaaggaccaaggcaaggcaactggtccttgggggaagggagccagctaccttgtcttcactcttacccaactctgggcccagcctctccctaagtaggggaacaggatgttcagcaggattgctggggccacagagggccaggctcagagcttgcatgtgtgtgtgtgcctaacgctgcctcttttggcagaggagacttctgttgggaagcttaaagattacagagcaaaataagagccccagccaccagctaaggacattttctagcttggacctctagaggagggagggctgagagtcttgcttcctggggtgaaggtggctgatggaacaggccctgagaagttgctctgtccaggtgccaaggtagtgtgtggaatcgatgtgctgacttggagttagaagggagatcaagtcctaattccacctctgccaagatcagtgatggtggcagctgactaaaccaaagtctcaatcttctacttctt

SEQ ID NO: 166030 - DNA, 400 bp, Homo sapiens
ttaagtagcgtgttccaagtaagcatgtgccaccacgcctggctaatttatttgtatttttagtagagacggggtttcaccatgttagccaggctggtctcgaactcctgacctcaagtgatccgcctgcctcccctcccaaagtgctgggattacaggcatgagccaccgcgcccggcccctattgtgtagtttttacttatcttccaatacctctttttcactccttgtgtctctaagattcatccatgtaattgtagatcattgattttaccctgttacatattattccacagtgtgaaccttccattgtataaaacaattccattctcttgttgatggatatttggggtttttccccatagcgatgctgctatgaacctccttgggcacatctgca

SEQ ID NO: 166031 - DNA, 459 bp, Homo sapiens
tgagaatagcctaaatgttcatcaacactagaatggatataggattcatgatttatacataatggaattccatagtggaatgaaaatgaccgaaaagaagctcctctaaaaaatgagtgaatcctgtgcaaaagaagtcaaacaaaagaatgtatgattttattcatatgtacttcaaacagaagataaactagactctagtatttaaagttgcatgcttaggcaacaaactataaacaaaaacaaagaatgaatgttattaaagtcaggaaaacatttacatcttggagaaatagaaggggtttgtgatgggaaggcaggcacgaggtttttagcagtgctggtaacgtgcaatttttcttttaaaccaggattgcaactatatggcgtttgttagacaacattttaagctgtacatctgttctttgtactttttgaatgtgttctatgtttcaccac

SEQ ID NO: 166032 - DNA, 286 bp, Homo sapiens
gattgatttatgaaaactcaactcttccttgtttgtgtccttgaaccctcaagattttttgacatcttcgaatatggcctcctatatctcgttttcctcaccaaccacattactgaattcatctccaaaaagtgacgataatatcctattagtgaaaacacagtagctttttttactctaatttgttttgcctccattgaatttactgttttattttatttattttttgagactgagtcttgctttgtcacccagactggagtgcagtggcacgatctgggtaccg

SEQ ID NO: 166033 - DNA, 823 bp, Homo sapiens
tgcacccgggcttcagcgcctcgctcccgcccctggtaaacttcctgttgtcgggaggcagataccagctttgtgaccaattcaggaaaatgcctaactgatttctggttaggaattgggcggtcggagcgttctggagttcaatggaaccaccccaagcgcagactgcgtgcaggcgccgtagtcggcccgcaccggagggattcaaaggtgaagcgggccccggtcccctcccccgaggagcttaggctctggtgtgagagataagacgagaacacaaataactgcgataccgggaaggaggtgataagtcctgtgaaagaacgacggagtgctagaacggcacccggaaaaaccgaaccgatcacttctgcctcgcagaaacctggaaggcttcctgggcgggggatgctgagcagagtcttgaaggcctgatgggatttaggagaggaggattgcagaagaggtgtgtggaaggggtagcaaaagcgagaagacaaagcctagaaatcatggataattccgtttgttggcatggtgcagggggcggggggtattgggctaaagaggtattttggggccagatccttgaatgctgtagaggagctatttgagcagcattctaagagaaacttagagctcatttctcagtgactcatgagcccggaaatgtaggctagggggatattaaaggcgctcttgtgaaaggagagaggaggaggcccagtcaggagttgacattctgtgccttgaatgtaatgcagtttcagatcgattttgacagcttcccagataatcaagtaaatccatgcccaggctaagc

SEQ ID NO: 166034 - DNA, 238 bp, Homo sapiens
tttcactcagtgttttaacatgcggaatgttaacccaaacacgagccttagcaaaaaagtatcttctcagttgtgcagcctaccactgttaatggcaaataggcacatgagtgaatcacaaaataacagttaactgagggattcagctgacaacttttcatacccaggatttgatctttcctgattcagatggcagaagcttgtgttgtgattacataaacaataagaagtctggatt

SEQ ID NO: 166035 - DNA, 535 bp, Homo sapiens
aagtgtttcttgcccttagccttgggtactttcagtgtcttgctgaatccgtaagggaaccccccaccgatctctataggtttttttttctctctctctcccttccttccccgtcagctgcagctctcttgtctcctttccagtattctgtcctgtaaactctagctgcattcaccttcctagactctcagttccagctcctcaactcacagtctttaggggtgcccctgaggtccccactccctgtgctgtcacaatgagctgggatgattctagggctcacttcatttgtgtcttttctctctctgttctttgttccctaatggccagtgtcttggaaaccattgtttcatgtattttgtctgttttattgttttatgttgtttgttccaggcggagggtaaatctatccttgttactccgtcttgactggaagcagaagcctcattcattctgaatgttttgataagattttgtttcaccaacatacacgttatgtaagaagtctcatggccaggatgaatacacgatctag

SEQ ID NO: 166036 - DNA, 213 bp, Homo sapiens
ttaagttggtgtaaaatcaccaaggacagaacacagtagatgtaagaggggatcagtgatctcctgagcaccagttgacccccttggtcctcagggaatgggagagcagctttgaacctggctctgagaagagctgaaaaggaatctgtcctgcagcatttcccgggggagggaaatgatgcttgattgacttgcccagggttacagagctga

SEQ ID NO: 166037 - DNA, 383 bp, Homo sapiens
cctctcaacagcttctctttacagccaaggtccttgaaagaaccgcttgcatttactgtctcaacccaccttcaactttcaatacaatgtgaccaactttccacctgcgttcctccatggaaactcgtgtggcaaagctcacaaccagtgagcttctaagtgtcaaaaacactggatacttttcaggtctcttcttctggagttttctgtggcttttgagactttggatcaaaccctcagttctgaaactgtttcctcctttaacttctgaaactgctagcagaaccatttctctaacaagccaatctgatcatgtcactttcttgcttaaaacaggagaatgaggaaagaaaatggatgactgaccaaaaaaaaaaaaaaaa

SEQ ID NO: 166038 - DNA, 358 bp, Homo sapiens
cacacacacacacacacacacacacacacacacacacacgcacacacatgctttcactcagcctggtgcctggtgttggcttaattgtccatccttttctctatgaacaaattgcttcacttccacatttctgctgtgttggtttggagcttgtctgtccttcctgggatgtccttggccacatttcccattacccctcccaagccaccgcatttgctctttctctgaactacagactctggtccacttaggcccagtgactttctttatgttagaatcatcaaggtcattgaaattggattactcagtcatgtgtagacttggctaacttccctgtatgcagtgtgtatatatacat

SEQ ID NO: 166039 - DNA, 415 bp, Homo sapiens
accgcacgctatccggttcaatgcacacacacacacacacacacactcatatactcacacacacacacacgcgcacacacagggtttctctctgtctgacactgagtctctcccagagcctggtgcctggtgttggcttaattgtccatccttttctctatgaacaaattgcttcacttccacatttctgctgtgttggtttggagcttgtctgtccttcctgggatgtccttggccacatttcccattacccctcccaagccaccgcatttgctctttctctgaactacagactctggtccacttaggcccagtgactttctttatgttagaatcatcaaggtcattgaaattggattactcagtcatgtgtagacttggctaacttccctgtatgcagtgtgtatatatacat

SEQ ID NO: 166040 - DNA, 298 bp, Homo sapiens
tcaaacttctgtactcttacatctgcaattcacatagttttcatctgggttgtgtatctcaaagggaagaagccaggcaataaatttgaggttagtctgttgatactaatttaggtcacagaattccgtggaagaaattggtaaaggtgattgccgtaggaggactactcaagtcacagggaatgaagagagttctggctgagggaatagtgccacctactgaattgtgtttgtgttttctacaggttctaatttatgcaggcttatgcctggaagtgttactttcctttattgatct

SEQ ID NO: 166041 - DNA, 397 bp, Homo sapiens
cagagaagagagtgggagggaaggaagcagggagtgggttgggagcagaagtttaacaaaggatcactttaacagaaactactgagtaatcgctctgtcctgcgccaagaataacatcagctcaatgtctgcaattagaatcaggtcagtcaggcctcacagccggtgcagccctcctcacagaccccagcatggagagctactcatgctgatgtcaccagtagtcactgttacccaagaaagtccccgactcagctgaaagaaaagttttcttttgccttctccttcaggggcaggaagacagcaggagaagaaagacagaattagaagacatgcattgggctgtatcaatatataacagatttgtttgatcattcctaactcttgagattcagta

SEQ ID NO: 166042 - DNA, 154 bp, Homo sapiens
aaatattgtacaactactgtttaggatgtgatgagggaagagcagaaacctactttagagaaggtggttggagaggggcacctttgtaccagtttcctttaacttaagtcttgacggatgaggagccagcctcatgaggcccctgggggagaga

SEQ ID NO: 166043 - DNA, 318 bp, Homo sapiens
tttttttttagagacaggatctcaccatgttgcccaggatggttttgaactcctgggctcaagtgaccctcctaccgctgcctcctaaagtgctgggattacaggcatgagccaccattcccagcccacagactgtttttcattctgcctgcctggaccgcctgtcaataaatttacagaaaaaatatctaccctttaaaagctatttcatgcaagttttctccatctccaaacaatgtgatttcacactctactatctatggtaattattttttgctcttgttttacccacccccaccttttttttttttttttttt

SEQ ID NO: 166044 - DNA, 165 bp, Homo sapiens
atttcatctgacctctcaccagctcctgttccattcctatttcatctgacatctcaccagctcctgttctattcctgtctatttcatctatttcatctgatgtgtcaccagctcctgttccattcccgtctatttcatctgatgtctcaccagctcctgttccat

SEQ ID NO: 166045 - DNA, 114 bp, Homo sapiens
gtacatttcaaattttaatagggactcccacattatcctctttcctaaactgcacgttaacagtttcaatatgaataaaaggggacggggaggggagatttagagagaatagtg

SEQ ID NO: 166046 - DNA, 378 bp, Homo sapiens
gtgtggtgggctgggtagtcagcctccccaacatgtcaagaattgacatcaggaagaacaattccattttgtgtgtgtgtgcagcccagagagtgggatgaggcccaggagagtgaagggacagcacagcagatgtccagaaatggactgagggctgcacatatccacagagagacttccacaaagtcatcaaacccagtaacgccccaaacgctcaccaacaggaggttgcgtgaacaaatcaatggtatattcatacaatggaacacgactcactaatttaaaaaggaaacaacagctgcgtacacaacacaggtgaatctattaggcacatggcgtggaagaagccagacacatcctctccatgattccacttat

SEQ ID NO: 166047 - DNA, 536 bp, Homo sapiens
gtaagcaaaggcataatagatgtaagcaattaattgttgataaatacaactggtattgaaaataatctggcctcatttgtaattaaatgaaattcaaattttaaaaaattccaatcttgtatcttatattagcaaatctatcctggttcctgtatcataatgacaggtaagtcaatgatgttcactcattcccttttctgccaataatgatagttattagattctgtcctgagcaaatgcaaataaaaatgtatgtgtcaagatatttggaatagaattaattataagatatagaacgtaattatcattaatgtcttatattagaaaataaattgcagcattcatccttatgttgaaatgttgtctaccaattaaactattttttagaaagaattgttaatgataatgaaaataggagtgaaaataccaagatgtgaaattattggctatgtattcttaactatgaatcattaagtcattcacagacaaaagcctaaaaagaaatatgggtatgattatgattattatattcttca

SEQ ID NO: 166048 - DNA, 407 bp, Homo sapiens
gaacgttaaagtctgatttcttcacacttgtaaacaattgtattatatatgcatactgtatattttgtagttataagaagaaaaataccagaatttaaaatgcagtcacaatgtgttatgttttcagatgacttacgtatgtttttgttcatcagtattttaaaaaataatcacctgtttgtgaaaataatggttttgaaaacagcattatgatgagagggaacttcgtaatttcatgagaatgtagatggtgactgtttaagtgggagctcacataggcattaacatcaccctccttttgcacagtccttttaagtctcctgttaaacatcttttattgtgtgtatttaaaggcacacagatgctttttcctgtattcatcttacaaatttacctacatattcagc

SEQ ID NO: 166049 - DNA, 472 bp, Homo sapiens
tacctcatacagacaggagtggcaaattggattggaaattgctttggatcatttggcaagaactgtatttttggggttgtgggaggaggagaggcctgtctaaaagctctatttcttctttactcagaataccttcctgttgactcattggaaatcataacaaaaagcagaaggaatattggagaggcagctgccagcctagggcttggcttctgttggggcagctgtttggggatttagacacactgggctctaagaactgtgaggtttctgcagcagaaggaaatagtattactctgataggtatttattcataaggttaaaaagtgtcagactattgcttgggattattgatgagcaacataagaaactaaaaatattttctcaaatagaattaactggtgatcctaaaaacagaatgaattgaggaatacaagagggagtgggggcaaaattagaaaaggaaaagttg

SEQ ID NO: 166050 - DNA, 294 bp, Homo sapiens
tgtggtttcctgcacaatggccgttccctcttctttcttgttattcttccttgtctacctgacaaggagactgaaaagggaagctactttcctagcctcccttgaagctaagcagtggtttagtgacccagttctggccaatgcaatgtaagcaggactctgctgggggcttttggggatgtatttttcctcctgatggaaggatgtgggggcatatgagtgaagtctttctcaccatcctgaatgccccttatttcctgcatttggaagtggttgggtaaggatgtgatgtct

SEQ ID NO: 166051 - DNA, 490 bp, Homo sapiens
gtaaaattctagttcttccatgaatttaaagcttcactaaaaatatttgcttgtgtcagaatttttaaagttgaaaaatcaagctaaattaataaaaatctaaattatagatgtaaaaggcaatatagcattacatttttaagctttcataaaaagttttactaaatgtctaggtaagaataaatatataatgatttgaatagctaattaactgttctaaacagataagcaactttgggaggctgaggtgggcgggttgcctgcggttgggagctcgagaccagcctgaccagcatggagaaaccccatctctactaaaagtaaaaaactagtcgggcatggtggtgcatgcctgtaatcccagcaactggggaggctgagacaggagaagcacttgaacccgggaggcagaggttatggtgagccaagatcacaccattgctactccatcctgggcaacaagaacgagatttcatctcaaaaaaaaaaa

SEQ ID NO: 166052 - DNA, 346 bp, Homo sapiens
cttcgacacgtcagtacatacagattacctctttcctttatttaataactgtatagtattcctctacatggattctgtgataataataccactgagcacttattctaagccaggcgctgttctaagtgctgagcatgtattaatttatatacttcccacaacaaccctatgaggttgttatgcactattgttatcccattttacagataaggaaattgaggcacacagaacatttaaaaacttgactagccactaagggtcagagacaagattatgctataatttatttaaatatattcctaatacatacttgtttcccatatttctctgaacatccattacatgt

SEQ ID NO: 166053 - DNA, 179 bp, Homo sapiens
agggtggcattggaggtctaacctcattaacagcagatgcttttggaggactagactgtcaccaatcattaaccctcactctctgggaagatcacattctgtcaatattgctgctagttggtatacttcttccatatgtgtcagaattaaagttggaagccttgaaacaaaccattgag

SEQ ID NO: 166054 - DNA, 268 bp, Homo sapiens
agcttgctggactcttagattctgtccaccagaatattagaaccaataggtagagccttgggtcagggattccaggtgagtgggaagaagaaggggaatgggctgggagtacagggcgcctggggtgctgaccctggcatgctttcccagatgtgtgtgggctatgttggttctgatataggcaggaagaggcttatctgcccagagcactgtgtggtcccacaagtacacgtaacagatccccttatggggagaatgacaataggta

SEQ ID NO: 166055 - DNA, 301 bp, Homo sapiens
gagaagtccaaagactgctaatttcagtatcttcagtgacaggagcatggataagagaaagaaaagatatttatgtctttgaagtgatcagttctaggtgacgacaaggtccaagaagcgtctaggtgtacaagatgctaaagtagaataaagataaaagaatgccagagtgcagatagaataaactgtaaggctaaggtgttgggtagttcaacaatatgaatacatagtcaccaagaatgatggtaagagaaacagaaaacagaaaaaagttgagccagatatcaaagtcctcagcgac

SEQ ID NO: 166056 - DNA, 1843 bp, Homo sapiens
  misc_feature (2)..(2): n is a, c, g, or t
  misc_feature (4)..(4): n is a, c, g, or t
  misc_feature (8)..(9): n is a, c, g, or t
  misc_feature (70)..(70): n is a, c, g, or t
  misc_feature (104)..(104): n is a, c, g, or t
cnangcgnngcttttaaaaaattattatcttttatttaaaaaattttaacttacatttaaaaaaatgganatgggctctcactgtgttgtccaggttggtctcnagcttctggcctcaggtgatcctcccaccttggcctctcaatgtgccgggattataggcgtgagccaccactgcacctacacctggccatgctagggcttttacatggattatctcatttaattcttccctggtttccataaggtaggaacttatcctcattttgcagatggggagactgtgcagggattcaaacttgggtgctccagctcctgactctgtggccttggagacgccctgcactccaggacttgtgtttcctcacttggcggtgagtggttgggctggtccttgaggcctccaccctcaccagtggctgagcattcattcaatgggcagagagaacgttgggctgcagcagaatgggatctcccgtacagcagttggcaacccacagcggggttgccaggtcagcattgatgccttggctactgacttcacctttaaccccactggccatttttcaaatgaatgtggttggtcctaagggagagcaggtggaaagaccctggccccagcgtgaatccaggcactgctgtgcctgtctgagtagtgccctctggggaaccagctagccaggcaacctgccatcatgttgcctagtgagctcttgacatcagccatcttgaaaccattgggttcctttcgtccttcatctgtccacccatcagattcatagtcattcagcagtgactcctactaggaggaactgattctaggtataaggcactggctgggtgctaggaatatggagggaaaagaaacataggcccttgtttctgggagctgatggtctcccaccagataccgatgctggaaacccagggagaaggcaggggggagtctgagaaggcttcctggaggaggcagccttcgagattgtaaagtagagacatggtgtggcaagtccagggagcaggggtgggacctcgttcagttgcccagacgcaggcagagctttgttcaggggtgattcaggttggtgaaggccctgtgagtcacctggggctggtgaaacgtttcctctcctccttaggccacgacccagcctctgcataggccaagacggcccgtgaaggcttgtttccttgccccatttcccaggaaatgtgggagtgcaggattccactcccaggtcactcaccttgggggtggatgctgggaacgcggcctgcgccctctggttgtgtggccagcatgtttttctagccaaaggacttgggatgagatttttcatggaatattgagagagacgtaattgttattagaatcagttctgtttttatttattattattatttgaaacagagtctcactctgtcgcccaggctggagtgtactgtcacaatcttggctcactgcaacctccgcctcccaggttcaagcaatcctcctgcctcagcctcccgagtagccgggattacaggcgcgtgccgccatgcccggctaatttttgtatttttagtagagatggggttttgtcatgttggccaggctggtctcaaaaactcctgacctcaggtgatccgcccaccttggcctcccaaagtgctgggattacatgcttgagctaccatacctggctaatttttgtatttttagtagagatggggttttgccatgttggctgggctggtcttgaactcctgatttcaggtgatccacttgcctcgacctcccaaagtgctagaattacaggtgtgagccaccgcgcccagccagttcttctgtttttaaagt

SEQ ID NO: 166057 - DNA, 1767 bp, Homo sapiens
ggaaggtgggcatggaagggaggaagagctgctctctgggtcccatcacagtctcgttattaattataattattaaagtttactggcgtgagccaccactgcacctacacctggccatgctagggcttttacatggattatctcatttaattcttccctggtttccataaggtaggaacttatcctcattttgcagatggggagactgtgcagggattcaaacttgggtgctccagctcctgactctgtggccttggagacgccctgcactccaggacttgtgtttcctcacttggcggtgagtggttgggctggtccttgaggcctccaccctcaccagtggctgagcattcattcaatgggcagagagaacgttgggctgcagcagaatgggatctcccgtacagcagttggcaacccacagcggggttgccaggtcagcattgatgccttggctactgacttcacctttaaccccactggccatttttcaaatgaatgtggttggtcctaagggagagcaggtggaaagaccctggccccagcgtgaatccaggcactgctgtgcctgtctgagtagtgccctctggggaaccagctagccaggcaacctgccatcatgttgcctagtgagctcttgacatcagccatcttgaaaccattgggttcctttcgtccttcatctgtccacccatcagattcatagtcattcagcagtgactcctactaggaggaactgattctaggtataaggcactggctgggtgctaggaatatggagggaaaagaaacataggcccttgtttctgggagctgatggtctcccaccagataccgatgctggaaacccagggagaaggcaggggggagtctgagaaggcttcctggaggaggcagccttcgagattgtaaagtagagacatggtgtggcaagtccagggagcaggggtgggacctcgttcagttgcccagacgcaggcagagctttgttcaggggtgattcaggttggtgaaggccctgtgagtcacctggggctggtgaaacgtttcctctcctccttaggccacgacccagcctctgcataggccaagacggcccgtgaaggcttgtttccttgccccatttcccaggaaatgtgggagtgcaggattccactcccaggtcactcaccttgggggtggatgctgggaacgcggcctgcgccctctggttgtgtggccagcatgtttttctagccaaaggacttgggatgagatttttcatggaatattgagagagacgtaattgttattagaatcagttctgtttttatttattattattatttgaaacagagtctcactctgtcgcccaggctggagtgtactgtcacaatcttggctcactgcaacctccgcctcccaggttcaagcaatcctcctgcctcagcctcccgagtagccgggattacaggcgcgtgccgccatgcccggctaatttttgtatttttagtagagatggggttttgtcatgttggccaggctggtctcaaaaactcctgacctcaggtgatccgcccaccttggcctcccaaagtgctgggattacatgcttgagctaccatacctggctaatttttgtatttttagtagagatggggttttgccatgttggctgggctggtcttgaactcctgatttcaggtgatccacttgcctcgacctcccaaagtgctagaattacaggtgtgagccaccgcgcccagccagttcttctgtttttaaagt

SEQ ID NO: 166058 - DNA, 208 bp, Homo sapiens
ccccccctctcattttgaggtcttgtatagttaacaggatgaggtacagtgtggaaggatgattagggtaaacggctcatgccagtcaggaatgaaactcattcaatgcaactaagcatctctagaatatctccacccccaccccactccccaaagtgttaatgacatcacatcagttaactgttaaccacatttcattactcaattt

SEQ ID NO: 166059 - DNA, 1410 bp, Homo sapiens
  misc_feature (8)..(8): n is a, c, g, or t
  misc_feature (30)..(30): n is a, c, g, or t
  misc_feature (33)..(33): n is a, c, g, or t
ctcgtgcnctcgtgccgaattcggcagagnagnaacctccaggagacccactctgctgtcttgtagctggagaagatggcgcacccatcccccaccaggataaagcagagcctgctgcctgctgaggggacacttggggaaatagcagactcagaatggacactctacaaccctgggttggatccagtggttaggttttagaaaggaacactgaacaaagttcaaaagtagaaataccaaaatagagcagaaaccaagctaagagtgtgtttctgtgtttgaggaccaatatctgttcgtgttcaggagatgaggtgcagactccacactggggtcttagaggcaccagtgggaaagcaggactggggagagatccaggactgagccagcctcaggccagggcgggaaagcaggctgtccaggctgggcttggtggtcaggaacaggggcagctcacggtggctctggagtacgtttcctctgtcagatgcttcaaggtttttttttttttttttatttggctgaggcagtttttgctccacaggcctttggggttacagattgaggccctcggggcttggacgtgcttttggcagaaaacgggtgggctcagccctttgaaaagctcctgaaatataaggtgtgagtcactattccaagctttaaccgtggagtgtgcagataaacctaggaacctttcccacaatgtgtgtttttggggttgggtttgaaatgcaaagctctaaagtgtgcaggtgggtgcaagcctcagtttacgtgataaccctcgtggccctccgtggaattcaagtgtgtttagatagcgtggggattacaaagagcttgtgtgccccaaggcccagtataagtagggaattttcgagtaaacactggggctttccacccagtgttttgccccaggcgtgtgtcatatggaccctcccagatctcaaagagaactgacatgaccccgaaactccccaaaggtggcggggaattacagggtgttaacacacgggtacacaaggcgtgttatagatcaacgattgtataaaacaacgggggtattatcccccgtgttggccccagagatatagttcgacgaacgcgacgacaagagagagtgttgtccacaggtgtctccagagagggggtggaacactgaggggtacaccaaggttgcgcgcgtagtgagggggttagaacattcgacgcacgatccgggggcagagaacttctttttttgtcttatcgtttttcttcacaatacgggaatccaaacaagcatatataatagtcaaaaaacaacgacagaatatattgataaaacgcaaaacttgtgcgaataaaaacttgtatctgtccctcttctatttctcttcctctatcttctcatgaatggaggagaga

SEQ ID NO: 166060 - DNA, 247 bp, Homo sapiens
agttcctagtccagtgagggtgagtggacaagtacattaaaatctacaaggttgaaggtgagtggtgttctaagaggtacaatggaggtggaggggtcttggcagtaagacacagaatgaaaagacctcctgagggtgcctcaaggggagggtgcctatgtgaagaaacagatggacaagaagagatggatatgtgtgttcaaagaagcagcaatttaaagaagcaccaaaggctggtagtgggctg

SEQ ID NO: 166061 - DNA, 316 bp, Homo sapiens
ttatcaagaggtgccagagacaaacaaagacttttgcttcgggcctcgtcctggtcagacaatgccctgcctataatcttgtctttcctacatatcccttttgatatcagcacttatataccacattcaagtgctggaaaacagtcccgaagtctctggggcctgggaatccaagcctgctggatagtcaaatcatgtggacaaggttaactaaaaaggaatctcagcctcctctttggacacgatttagtattaccacggcaacagcatctggactatcttgtttcctatactccccactcctcttcagacgcgc

SEQ ID NO: 166062 - DNA, 109 bp, Homo sapiens
tagggagtggtatattaatactatacataaacattgattgagctcgggggggactttctgtatatacattaaaaaatatgtttttttaatagagacggggtctctatta

SEQ ID NO: 166063 - DNA, 361 bp, Homo sapiens
actgggtggaaaggatcattctgcacagagacagtttctacctgtgatcctgaacatgaccctccacaccactgtagcagaggagcaacctgcatttcattacctcatggatacacctgtttctgtcctctaggaaccactggaatctactgtgaacaagctttatccataaggcatccactttcagaaggaattgggtttcctggaggctttggctccctcaaggtggaaaaaggcaaattcaattccggtcaagcctctcgctccagaggaccctttttaatgctgcacacattaaaacccaatcaggagttttttagccccagggaaatggtcctcactcgcacaccttgcgcagtct

SEQ ID NO: 166064 - DNA, 677 bp, Homo sapiens
gttgcacctataaaacactggatgcatgaacaaagtagaatgcaggtttcctgtgggcagttaagtctcatggatgatagagcgagattccatctcaaaacaaaacaaaacgaaacagttcttctaatagagttttgttttgggggtcaataaccttgagtctttgataggcttgtgatctaaatacacgcaatcctgtatacaatatcaggaagtccatagacctactaaaactctgctagacgtctggttaagttttgcttaatatatatacgtaagtggacatttatcactttgagttttaactctttaacaatgtttatgcattcttaattcattacttgctataacaaacgaccttagactgggtaatttataaacaacagaaatttattactcatagttctagagactgagaagtccaagatcaaggtgttagcagattcagtgtccgatgagggcttgctgtctcctttaaaactagtgccttcttgctgcgtcttcacatgcagaaagggtaaggcagtcccttcaacttcctttataaggacagtcatctcattcatgagtgtggagcctcctaaagccctacttcttaatagtactgcattgggagttaggttccaacatatgaatgttggggacataccaacattcagaccatatcatacattaaa

SEQ ID NO: 166065 - DNA, 602 bp, Homo sapiens
ccacagataaaggactctcgttgtttgagtgaagttaccaactgtaacaattgcataggtttccttgtttctttcttttctccaaaaaactcatttcctcttggcaggtgttactataattcacaggtgtaatgaaaatgtaatttgggatttgaaaaagcatatcagactgcttcccagagtaccagttcttttcagctggtccatttcaacttaagaggtccatctatgcatttttgaagcttcatatttaataaatataatatttcactgctgtgtttgactattccgtttcccacactttctccttccctaccccactcttctggatcctgtgtttccccacaggctttgtgaatgccggtccactgatggctgaactgcaggtctctccccagtggaaagccccagagatgagccagatctgcctcagctgtggccatccgtcagcgtaaggttgctctggtggtcgtcttcagtttgtccagctcttccccttatcccccatcctccctcatgtgtggctgaagcttgccctggaatcccacctttgtagcatgtcactcggtagtagtagaattttattattgttgctttttttc

SEQ ID NO: 166066 - DNA, 251 bp, Homo sapiens
aactcctggcctcaaacaattctcctgcctcaccctatcaaatagttgaaattataggcatgagccagcacacctggccagatcattttaagtaaatgtttggaagaatcaccactaaaactacatagatcttgcattttttttgagggaaagttttaaaattgtgggatcagtttctttagcagttacaggattaattcagattttgtttcttcttgttactttgggttcattgtttttcaaagaatata

SEQ ID NO: 166067 - DNA, 213 bp, Homo sapiens
aaaaagacaaaagtgcaagttcagtaaattcataagataaatacaacagacctttagcacatgaaagtactcatgagaaatgacaaaacagggtgggaggagggtgaggatcgaaaaactacttgtcaggtactatgcttattaccttggcgacaatctgtataccaaaccccatgacccgcaatttatccatataacaaacctgcacgtgta

SEQ ID NO: 166068 - DNA, 321 bp, Homo sapiens
cctattctggatatttcacataaatagaatcaagacttcacataaatggaatcaatatcatacaatatcatacatatacatctaaacataaaaatatttgagacgaacagaccttaatggataagcaccataggagccagtgctagatgagaaaattaactaccctcatgattatcttgtagaaccaactgataaaccaccataaatagggcaggaaaaaaatacaggagtctgtactgatgctttctgtcagcagcttttcttctacagttctctgcagaagacattttaaccagatgcagcccacccagtgtgagagag

SEQ ID NO: 166069 - DNA, 126 bp, Homo sapiens
attttaaaaacaccatagttctgctcagataacccaaattcactaatgttttactgttcgatataaaataaaaatgaaactatgtcatgctgataatgtttaccaagttatacttgaaataagtgt

SEQ ID NO: 166070 - DNA, 386 bp, Homo sapiens
agcgatgaaccctccaaaacatttcctcactgcctctttggggtggttttgagctaggcagtgacactgctgggccagctggtgagccaagcagaggctcccaacgtgggggcagctaggagcaggcaggttgccactggatgtgtgaacgcctgccctacctgtggtagttgtgtgtggagcagagccggtgtgtcatacctggaggctctgggcatctgagccttcctcagctccctcccccagctaggatcaagtccactttaacccttagcaacccttaggctgctagctcctaccctcgcgtcactcggggtgggggagcggatggatatctcaggccctttgtcaagccgcctcttccgctcctccgattcattctcctg

SEQ ID NO: 166071 - DNA, 479 bp, Homo sapiens
tcagacttcagatcttaatttgaaatgggcacagaaattttctggtgtttcagaagtatggtgtaaacagcattttgatccgtgtgcagtctgtgggcagggacacctgcctgtcagcctgctattatgatgaggctcttgaagaaactaccctctttctaagaactggaagaactcaaataatgaagagacaatagaggtttgggcagtaatggaaagaagaaaagacagtgcctagccaagcagatgaatgaggtagaacagtcttgttcatacattgccattatatctagtgcagttgaatgaacattttctgtgtctgggcttaggtgcaggcaaatagttatctgtgttgtattcagataaggggttagaagaatctttatttttctgtgtcggtcatctctttcttgctgtaaaatgaaattgtttaaagcttacattatgacattagtgttgaatttctgtgcccatttcaa

SEQ ID NO: 166072 - DNA, 262 bp, Homo sapiens
ttcctattcttcccaaatctcttcatctcttccaatcaaaaacaaaccttgccctggacgctcacctgactttattcatccttcaaggtcacccccattcaacctcccttgactaccaatgccaagagtgagtcttccaataatctttcttttttttttctttttttaaagacagggatgcactttgtcactcaggctggagtccaatggcgcaatctcggctcactgcaacctccacctcttgggttcaagccattctcct

SEQ ID NO: 166073 - DNA, 285 bp, Homo sapiens
aggttgagtctgcagtgagccgtggttgcggtagtacactccagcctgggtgacagagcaagactctgtctcttaaataagaaaggatacctgctgatctatttttgcctgcttcacaactattagtgttaattcttctagcttgctttccatgcatatgccaacacacacacacacactcacttaaaaataggaattataccatatatacaacatgacaaattgcttttttgatttaatatgaaacaggtatccttcctcatcattgcatttagatcaacctca

SEQ ID NO: 166074 - DNA, 258 bp, Homo sapiens
ataaattaaactgtgataggtgtgtatgtataagaaaaagtatatataaggtttggtactattggagatttcaggcatctcctgggggtcttagaaagtatcacttggggttaagggggtgtgcaactgtaacaaagttatgtttgtttgtttgtttgtttgtttgttttttgagacggagtctcactgtgtcactgaggctggagtgctgtggtgtgatctcagctcatgcaacctctacttcccgggttcaagcga

SEQ ID NO: 166075 - DNA, 456 bp, Homo sapiens
acacatagtaaggtgagatttgcacaacagaatatagtaaagatttgtgcctgattctttttgcattctctttgaatcatttttagcctttattctaagtccccagttacggttatccttctcccaacaagattgtttctcttcaccacggatattctgatgaggctctctgcttaaccatctagacctcctgaacactctgtttgtcctgataacctgatttatgctcaaatgatgctcttccacagcagggcttcctgctttgcccaaagaacattcaatttctgaagccatttagggctgtttcctcacccagtatctatgtgaaaccttagagggaagcctattctttccaagaagagaaccctgctgggttctaccctcaatctgtaaatccactggggtaactgggattagctcagattagcaactggggttagctcagctactccagag

SEQ ID NO: 166076 - DNA, 591 bp, Homo sapiens
ctccatccttacctcaccagtcctgcttcacttctcttttcctctttgtggccagcgccgttgaatgagttgccagtacatgctgtcctcgattcctctatctttctatcatgctttcaccccctccacttcactgaagctgctcttgccaaagttagcagcagccaccacttccccaaccctcccctcacctgacttagcaacatttgacttagcaaaaatctgagtcaaatttttgctgaaaatctgacttcagattttcctcatcacttgcccctggaaactcctcctcactgggctcctaggaaagtacgctttcctcctgcgtccctggccattccacctcaggttctatgccagtcacttattctcttagtgatcctgggactcatcccttggttgtcatcttttctctctccttggtctgttgatgatctcctggagtctgctggctctaaataccatctgtatgctaaaaggaccttaaaatggctgtttgcagagcacccctctcctgaactccacccatgaatccaacggcctacctgacctttctgcttggatccctaatagatgtctcacatctgctgc

SEQ ID NO: 166077 - DNA, 352 bp, Homo sapiens
agtgctggcattacagtcgtgagccactgcacccagccttcatgttcattttaaaggttaaattataatcagtacaaacatacgtaactcatctaatttcattttaaatgatatttggttcctactcagattataagctaaagttttttaagcaattatgtctttattggttatataaatttacagtcttttaaagctgtgtaaatattgccacttaatatagtttcactttttatttgcataacaataataacaatattaaaagctaacacaaagtgctgggcgctttgccaaatatttaacatgttataatttatgtaatccatataatattcttttgaggtatgtacta

SEQ ID NO: 166078 - DNA, 202 bp, Homo sapiens
acatagccggaccaacagcgaacggactgatcagtgatagggcatggtgtggatattattacattagtattggaagcgatggtgtggactagatcagtgatagggcatggtgtggatattattacattagtattggaagcgatggtgtggattagatcagtgatagggcatggtgtggatattattacattagtattggaag

SEQ ID NO: 166079 - DNA, 460 bp, Homo sapiens
aagaagatggggaaaaatggaccaaagaaaaggggatgatttgcaggaaacctcagggcccaactatgcttggagactagttggccagtttgcacaagctatggttttcttctgtgattcttagcaacctagtaggtatgggatgagaaaagacagcttgagaattaagggcttttttgctgagctagtagagcaagagctgggaggaagggggagagtatgtaaagaaatcaggaatcaggaagagcagtttaagtcatcaaccactacatctgggaaggcagtcagggtaggaaggatgcaaggctaaatcaggatagggaaaatggaaagtttgacatgccaaagaactttgtgatataatggttacagtggacatacgtcccaagagagctgaaaagatggaaggttggggtcagagaatgggatgcttaaaattctgaagtggatttattccaag

SEQ ID NO: 166080 - DNA, 440 bp, Homo sapiens
ggagagagtctcactccattgcccaggctggagaacagtagcacaatcatggctcactgcaacctctgcttcctgggttccagcaattctcctgcctcagctgccagagtagctgggattacaggtgtgcaccacctcacccggctaatttttgtatttttagtagagacggggtttcgccatgttggccagactggtctcaaactcctggcctcaagtgacccgcccacctcagcctcctaaagtgctgggattataggcatgagccaccatgcctggctgatctccctaactctaaatctttacccctctgtctctaaagtctggccacctttttaattcttttagagacagagtcttgctctcacccaggcttcagtacagtgagccgtgattacaccactacactctagagtgggcgacgcagtgagaccgtctca

SEQ ID NO: 166081 - DNA, 379 bp, Homo sapiens
cggcaagtcctcatgtccccggggattgccgaaaagttcgtatttccttgactgaaaggaaacgcttttgaccactatccctattcaaacacgcggccttctctggcctgcccgcccgccagcccttctttgacttggttgactttgcgatttgctagctgagggtccctgctccttcctgggccacacaccccctggccgggacaccatgctttttgtgggagccggaactgatacaatttcgggagtcttttaaggaaaaggatttaacaagtctcaacagatgattgccaggacccctcccaaggccttggcagcgccttcagcttcagcttcccttagcttcttgtgctcctgcccctggccttctgtgtgcaaa

SEQ ID NO: 166082 - DNA, 548 bp, Homo sapiens
ttatagaaaaatctaggctctaccagaaaactcttagaactgataaacaaattcaataaaattgcaggatacaaaattaatatacaaaaatcagtagtgtttctgtatatgaacaacaaactagctgaaaagaaattaataagtttatcccacgtacaatcgctaccaaaaacaatagaataccaagaaataagtttaaccaaggaggtaaaggacctctataaggaaaactacaaaacaatgatgagagaaattgggctgggcacgatggctcatgcctgtaatcccagcactttgggaggctgaggcaggtgaatcacttgaggtcaggaatttgagaccaggctggccaacatggtgaaaccccatctctgctaaaaatagaaaaagttagccatgcatggtggcacacacctgtaatcccagctactggggaggctgaggcaggagaatcgcttgaacccaggaggcagagattgaagtgagctgagatcatgccactgcactccagcctgggtgacagagtgagactctgtctcaaaaagaaa

SEQ ID NO: 166083 - DNA, 218 bp, Homo sapiens
ccgcagttacaaaagcacaccaatcagaactctttctagatccttatcactcacacatagatgaaaataagctttcctgcctgggacgtaacaggcaatctggaccagctgaatttgctccaaaagagaagttgctgataaagactgagctaacatgcttgaggacgagcaagtgtgaaactcttttccaaatcacagagtaagttcgaagagtctca

SEQ ID NO: 166084 - DNA, 548 bp, Homo sapiens
tttatacagataccctaagccgtcttgaattttccccctgaaaatcagcttttctttttgacgacttggccaggctgcagattttgcaaactttaggtctccacttctcattgaaatagaagttccaacttgaaatcatttcttaggtcacacataagaacacaggctgtgcaatgcaggcaggacacctcttgtgctttgctgcctagatattcattccaccagatacatcctaaatcatcacccccaagttcatagtttcacagatctccagggcagggtcaccgtgcagccacgttctttgctaaggccaatcaaatgtaaccttggctcctgttcacaggaaattcctaattttcatctgagaccttttaagtctggacttcagtgtttatccttctgtcagccttctgatcgcaagtatttaacaatcctctacagtggtcaaattttcctcatcttgctgtcttccaagctttcccaattctcctgacctctgtcttttacccacttctgaacctgcttctacactgtcagctatctttatc

SEQ ID NO: 166085 - DNA, 365 bp, Homo sapiens
tatttcccaaaccctactgagggtgttatatatggcacatatgccatattgccttcctaaaattcaataagtcttatcctgaaacataactggccccagaggttttgaacaacatattgtggacctgtatctagtagaattaaacatgtgcatatcctagagaaatctatccacatgtgcacaaggagacatgtacaagaatgtttattacagcactgtttataatgatgaataattagaaataacctaaatgttcatcagtgggaaaatagatattctattaatctaatagaatactacacagcagttaaaatgaactatacctacatgggtcaacatgaataaacattttttaaagttattga

SEQ ID NO: 166086 - DNA, 204 bp, Homo sapiens
gcatttcaaatgtggcaagtgtggcttttaaatttaatttaaactaatttaagttttaattatttaaatagccacctgtggctagtagctaccatactagatctcataagtaaagtagaaatctatctgaactgtcaagggcatcactgtacacccttttcactactcggcccagctttctagctttttttctgcttttttgag

SEQ ID NO: 166087 - DNA, 558 bp, Homo sapiens
ggactacaatagcagggttcattcaaatgcacttagtaaaacctggcagcaaaacctccttccccattcctcattgagaaggctttggggccttttttccccctcttatcctgggaaacttacttttccctctctcttcctagactagactactcttccacatctcaagtgattttcactacactactatacagctgggaataatgggaaatggggaaagggaagcacaccggtcagaaaatgagtgaaaaaccctgatcttgagaattcaattccaagtacttgggaaatgcaagtatttatatttttagtggccatagtacttaacactttaaaaggatattataaaattgtaaatactgcacatcaaaaagctgtaacagtttccatgatttcccaatttaggaagaacatcaccattgggaaatacaccattccaacagtatgcatatattatttttttaaggacttttcaaagatttaacttgtcaaatctagcccataatggggcaacttgattattgatttcctggcctagtgtaaaaatttagcaaggca

SEQ ID NO: 166088 - DNA, 143 bp, Homo sapiens
tgtccccaggagagtctgtgcataccacatgtgacttggacaataaaagcaagcctccctcattgacaccgtacaaggttctgcccattcttttggattttgtcccagaaataagcctcagcccaaactgaatggcagattgt

SEQ ID NO: 166089 - DNA, 595 bp, Homo sapiens
cagcccggaccctgcagccgcagagatgttgatgcctaagaagaaccggattgccatttatgaactcctttttaaggagggagtcatggtggccaagaaggatgtccacatgcctaagcacccggagctggcagacaagaatgtgcccaaccttcatgtcatgaaggccatgcagtctctcaagtcccgaggctacgtgaaggaacagtttgcctggagacatttctactggtaccttaccaatgagggtatccagtatctccgtgattaccttcatctgcccccggagattgtgcctgccaccctacgccgtagccgtccagagactggcaggcctcggcctaaaggtctggagggtgagcgacctgcgagactcacaagaggggaagctgacagagatacctacagacggagtgctgtgccacctggtgccgacaagaaagccgaggctggggctgggtcagcaaccgaattccagtttagaggcggatttggtcgtggacgtggtcagccacctcagtaaaattggagaggattcttttgcattgaataaacttacagccaaaaaaccttaaaaaaaaaacaaacaaaaaaa

SEQ ID NO: 166090 - DNA, 782 bp, Homo sapiens
cagcccggaccctgcagccgcagagatgttgatgcctaagaagaaccggattgccatttatgaactcctttttaaggagggagtcatggtggccaagaaggatgtccacatgcctaagcacccggagctggcagacaagaatgtgcccaaccttcatgtcatgaaggccatgcagtctctcaagtcccgaggctacgtgaaggaacagtttgcctggagacatttctactggtaccttaccaatgagggtatccagtatctccgtgattaccttcatctgcccccggagattgtgcctgccaccctacgccgtagccgtccagagactggcaggcctcggcctaaaggtctggagggtgagcgacctgcgagactcacaagaggggaagctgacagagatacctacagacggagtgctgtgccacctggtgccgacaagaaagccgaggctggggctgggtcagcaaccgaattccagtttagaggcggatttggtcgtggacgtggtcagccacctcagtaaaattggagaggattcttttgcattgaataaacttacagccaaaaaaccttaaaaaaaaaacaaacaaaaaaaaagacaaacaaaaaaaaaccgcgggggcactataattgggggggggaaaaaaagggttatagaaaggggcccggtggccaatacgggttccgggaccccagttttttgtccacagggggtagacatcggcgggggcccccataagggggggcggaaaaaattcagaaagcccggggaaccgcggcta

SEQ ID NO: 166091 - DNA, 186 bp, Homo sapiens
acatgtcgctgctgcagagggaaccagccactttccttcctgggctagtgtgaggacctaggggtgaccatcaagttggtgggagctcaactgcctcgcaatctttgtttcatcttccttctctaccacaagtattctctgtggagtcatgtgatgggaagaaacatggggaccaaggcatagggt

SEQ ID NO: 166092 - DNA, 465 bp, Homo sapiens
cctgcctcagccttctgactagctgagactataggtgcatgccaccacaccaagctaatattttttaaccaataggatttagggtgttttgttgtgtggcaatggatatctgaaacagaaatcaatatgttacaccccttcccacaaatataatgacactccgtatcctccttaacttgctgtatttttctcttgttgcatttaccacctggcttactgtgtatctacctatttgttattgtctccctatccccgctggaacacaaactctgggaaggcagagactttgtcttattcattactgtatctgagcgcctggaatagtgtctaagataggccctcaatacatatttgttaaatgaaggcatatatttaatttaacttgataagtttgctttttgtagacatagcaagtccataaaaagaaaagacaaattaatttaaattgcccatgccgacagcctt

SEQ ID NO: 166093 - DNA, 173 bp, Homo sapiens
tacaaaggatgtttattaggataatactggtatcaacacctgtgggaaggaagaaatgggaacagagaagtgagtagagggagaagttgagtgtgatgcagtctcttttttttttttttttttttttttttggggcccccccccttttggcccccaggggggagggggggggg

SEQ ID NO: 166094 - DNA, 336 bp, Homo sapiens
taggaaacccatgccccctagcgggaaggtaacaaataaaatacaatatacattttcaaggaaataattgagatacatcaatagtatttgcagataattttttttactctggaaatacttaaatataactaattaataccataaatatgagccctctatagtacttatgtgtcaatttgtgttttcattgaatcctggacacagcccactttgaggcaggtagtgtcatccccttctccagatgaggaggctgaggcttggtgcctttatttcctggcctgtggtcacatgatggatggtgacagctttgctcttgctggctgatgcccgcagata

SEQ ID NO: 166095 - DNA, 419 bp, Homo sapiens
tgtgtgagtgaaaataactgattttttaagtttaaaaaacctggtagttcccaggcaaatagtttaacttggaatctttgaaatctaatattaaagaaaggtcttcattttattccaaattttagaggatttaaagagctggcaaggaacaaaaggagctggtccattttaaactcagcagaaaataaatgttcaaccttggctgaagctcctgtgtaatcttacagctaacagtgtttccaatgactaaaggcaaacagaaatagcagacggttcaatatccccatgctactgcaagtattttgctccaagtgaaaaaaaaatcatatacttagatattttgtataagacatgcgtatatactagatacacacatttactaagtgaatatatagtactccaatactttaatcatttta

SEQ ID NO: 166096 - DNA, 274 bp, Homo sapiens
caaactcctggcctcaggtgatcctcccaggattataggtgtaagccactgtgcctaacctgattcactatttttaaatccctgaattaagctggtgaactgtaatacccaggggtagggaatgtgtttttgttcaaaactaaatgacttttaaattttgaactcaaagatatcttacctaccattttaaaatacctgtcatttggaaaggaaacacttctgtttgttcagtaactatcattggatagtaccattctgagagtatatgtttaat

SEQ ID NO: 166097 - DNA, 743 bp, Homo sapiens
ggatagaatgattcaacactacaaacaaatcagttctctctaagttacttaataagtttaacacaatttcaataaaaataccaataagctttattttatggagttagatacttatgggaaaacaaacatataagactagccaggaaaacactgaaaaaggaaacctagccctaccagacattaagatatagttaaagcctctataattacaatattgtggtattggcacatgaatagacagatatatcagtagaataaaacacaaagtccagaaagagaccagagtatatataaaaacattcaataaaggcaacatcacaaataactgaggcaagagatggagttttttaatgatgctggaacaactgcatagccatttggtgaaaggaaaaatttgatcagtgtttctcaacctcagcactgttgacattttgggccaaacaattttttgttgtggggaccatcttgtgcattgtgcaatgtttgccagcatccttagcccctcccctcacttgtgacaactcaaaatgtctccagacactgcactatgttccctgaggggataaaatcacctctagttaaaaatcatttaatgggatgcatactaccatacacaacagtaaactccaaatggatcagggacctaaacctaaaaaatgaaaccacacaagtactagaagaaaatatgcatgaactattctttgacctcagtccagggaaacactttctaactttggctaaaa

SEQ ID NO: 166098 - DNA, 415 bp, Homo sapiens
taagtctctatgtgcaatgtgaatacagccacctttgtacagtgcacaacctgcttaaccatacgtgtcagctctggccccacacctgctttgtccatcacaccctgttggcctgcatccctcagaggtccattttgctccatgagcactgagccgctcagagcagaatgacctctccccacatgctgcctgcttctgtgggaagtgtggcccagagcctgagagcctctgcagcagctgtgcatcgtggttgctgcctatcagtatccacaaacccccccggcctagtcccttcctgtacctactgaaatgcagggccttcagatccaggtgccagagcccacacctattaggtctttcttagtcacaggtgcccatccctcccagccagggattccaacgcaaacggcagggt

SEQ ID NO: 166099 - DNA, 527 bp, Homo sapiens
tctgcctgcctcaggctcccaaagtgctgggattacaggcgtgagccaccacgcccagcctaaatgtattaatttaattaaaccttaatccttaaggaaaaggcttttcaacattctgtctgataaagtgggaagtatgcataagacattttgcataccaaagtatgatggttttctggaggaaataacttaggccattctttgagttgtgagctgaactagctgctcttttatggaatgccacgtttactcaaaagaatggccgacaaactgtggttatcagatttaggtagctggcagaacttttctaaaaaggaacaaagtgagtctgtcacttcagggaaaaatctgacagtgtttgttgccaatgatataattcaagctttcaagtgaaaaatcgaattttggaacacttgtatttgctacatgagcttcacagcttcccaaaatttaaaacttaaagactttactgttctccagtataatactatgaagaaaaacaaagactttactgttgaaacctaaaa

SEQ ID NO: 166100 - DNA, 586 bp, Homo sapiens
cattatacagcacttcacatttcaacggaacttttgaaaatattaacaggttatttcgcttcctgataatctatgaaagacacagagaggataaaactagagtgtgtggttaagatgagagtgtgccacagtaagactccaggatggggacattttcggctctgtggcctcagtcatggtcaagtcatttgttccttttgggtctgattcttaatttttaaaatgagaatttgatacttgggaggctgaggtgagagcattacttgagcccagggaggtggacgttgcagtgagattgtgccaccgcactccagcctgggtgacagagccagattctatctcaaaaaaaaaaagagaatctgggccgggcgcagtggttcacgcctgtaatcctaacactttgggagaccaaggcaggaggatcactggagcccaggagttcaaggtcagcctgggcaacatagggagacccaatctctattgtaaaaataaattgtaaatcacgtgagaggaaaaggcagttagaaccagatttagacaactatccaaagttccgttgaagccgtcgggtaccgaggctcgaaat

SEQ ID NO: 166101 - DNA, 333 bp, Homo sapiens
gaatgcagaattttcactgtctatgagcctccaaagtccctgggacctgggaattggaggaggagagctgggtttgagaaacaatggcttaagtgtatttctgtgtccagtgaaaattaaacaatatggcatcaggaaatgtagacattgattttaataatggataatggagatccaagcaggaatagaaatactatttaaagttcattcggttacaaaaagtaaataacacagtcacctatgttaaactcttattcatatgtcactgtcatgcggaatcatgatatcctgaaatatatgctcaattgtttaaaattttgaaaaatgtatttc

SEQ ID NO: 166102 - DNA, 370 bp, Homo sapiens
attattagaaaccatgatacctcaagagccagaaaaagtgtccatgtaataaaaagtcagctgagtatcttaagatgttttttctttaataaaaagttaagaggtagagttaaactaccaaatattcgtttgttcactcagcaaacatgtatttatcttctgacatttgccagggatagaactaggcattggagatagaaagctgaataagtcatgaatggtccctgccaagaaagtgcttgtcattttagtagaagcaggcaaatgtgaaaaaaaatgaacactataaagtctgtgttcaaagagatgtcttctttacctgccatcctctgctcagcccgttgtttccaccacacccgtgaggttatac

SEQ ID NO: 166103 - DNA, 432 bp, Homo sapiens
acatcaagctgaaaagctcagtacagcaaaggaaaaaaaaatataaagtgaaaggcaacctacggaatgggagaaaatattagcaaaccacatatctagtaaggagttaatatctaaaatatataatgaactcctacaactcaacagcaaacaaacaagccaaacaacaacaacaacaacaacaacaacaacaacagaacttgatttaaaatgggcaaagacatttttaaatgaatagacttttttttttttcgagacaaggtctcacccaggctgaagtgtagtggtgcaatctcagcttattgcaacctccgcctcccagattcaagcgttctcgtgccccagcctcccgagtagctgggatcacaggtttgcaccaccatgcccagctaatttttgtatttttagtagagatggggttttgctatgttg

SEQ ID NO: 166104 - DNA, 463 bp, Homo sapiens
gaggatccacctccgtaatgtgagcccacactatattcttagactctttcttattcttgcttttgtgtgttttttctgagacagtctcactctgtctcccaggctgaagtgcagtggcgcgatctcggcccactgcaagctccgcttcctgggttcacaccattctcctgcctcagcctcccgagtagctgggactacaggcacccgccacaccacgcccggctaattttttgtatttttagtagagatggggtttcactgtgttagccaggatggtctccatctcctgacctcgtgatccgcctgcctctgcctcccaaagtcgcattttttaataatgctcatatatctagggcaaagacacaaatttacgttcaaagagaggatttttttaaacaaaaactaagtatacatatgccagtttaaaccgataaaaatggtgagcagatttttcagattttta

SEQ ID NO: 166105 - DNA, 630 bp, Homo sapiens
ttggtgtcccccgatcaggtgggacttctttgaagcaacatgttgccttttaaaagagaattgtgcatgtgagaacttgaatctgtaaaactcatcagcagtccaccattgtttatcttttaagtaactgagatagctaactttaagtaaaacattgcaattaaaaatcgttttctgaattattttttttccaaagagaatagccttattactttttgtcttaaaaatacagaaatgagggaaaaatcacctttaagaattgaagatacagcagcccagttgaactaagaccatagagcacattctttgataactcctttttgctggtctgaactgttgattcttacttcatatttatacttgcagataaatgcctataataggagcaaaacagggtggttgggcatatatctgaattctagagattaagattttctacttgatattgatggatgtggaagcattgctcatctttttgattgagtggtacggttagcaatggagtcggcatcattcttggtctactgctaggaaaagttgagcatcagagagctttttcctccttgggggaaaatagaagagacaggcatggagtcagagggacaagaaaaatgctgaaatattttcctt

SEQ ID NO: 166106 - DNA, 275 bp, Homo sapiens
tcaggctctttagcttaacattctttttaccttttgaaacccagtccctaattcatttatattttaaatgtttatatttgaagcaataacaatttgttaggcagccaaaggtagaaggaaaagaatggaacatgccaaagatctggcttcactctttcaagatgacttctaatctatattgcattcacgttaccttaaattctactccattatcttatatggaatctgtttttgttcaataagcttcttccctactcctagactaaattgagaag

SEQ ID NO: 166107 - DNA, 316 bp, Homo sapiens
aatgactatttccgaaccttggacatgcctaagaataacaaaaccattcttctggagagaacagggagtgactgtaaatgagcatgagggcaacaactctgtatgtttactaaaaaatcattgaatggtacacacaagatgagcacattttatgtgtataaagtatatcccaataaagctgttaaaaaacaacactccactgctgcatccattgctgcatccctatagagttcaccctgcagaagttgggtcactggctctggagagaaagtgctgatcttgctactcccattccctatccctacacccccatgct

SEQ ID NO: 166108 - DNA, 243 bp, Homo sapiens
gttagtaaaaatatactgcatgccaagacattaaaaattgttttaatgtgggaaaattttaatggactaaaaatactgacaagttgttcttatttttgttttaataacagagaaaatggctaaaggaatagcaaaatagttttaattgggatttaatattgcatttttaaataaaagactgttagtcatcaaaatgctttaatctgtgtttatataaatttaatctgaatataatcaaatatt

SEQ ID NO: 166109 - DNA, 290 bp, Homo sapiens
cccatggagatgggcgactactggtcactcctgtcgggcaaggtgaggccgggctggccgctccacgcttctcctctgttcaggaaggaaagtgagcgcctcactctgagggcggtttgcttggtggcccttcctctggttcaggagcagccaccctgtgagagccagttaggcactgggagggttggagttgctggctggagagcccctcaggtgctgggagggctggagttgctggatggattgctattgaaacttctaaaactaggcttcccgctcacatgcgtgtc

SEQ ID NO: 166110 - DNA, 188 bp, Homo sapiens
ctctagcaaaaaggaacaacaaaggggtggtaaatggacctataagattgtaacatttctgcatttgatctgacatggtacaatattaatgctaagttgatataaaaggtaaggatgtacattgtaatccctaggataaccactaaacacataaggcaaaagatacagttcaaaagccaatagataaa

SEQ ID NO: 166111 - DNA, 436 bp, Homo sapiens
ttaagtttcaaggctctcctatagggagaaacatggccaaaaagacaggaagaactgtggcttgtaactcaatgatgctataactccagcactggatcttaagtattctggaatataccagattggtagaactaccagacttgggtatttctcagttaacacacatgcaaggaggaagagagtttttttgaacaaaatgactggctttgacaaaactatcttgctctttttaaatgtcacttgatactagaatgcgatttaaaagcatgtaatgcctcaggagtccggcatatacaaccaaattatcatgctcaggatcttcagaattctaaaggcacatgttagaatgcagagtcctgatgacctgtcaataaacttttttttactaatgaactgtacatttaaataaaagtttatttttgggataattgtgagc

SEQ ID NO: 166112 - DNA, 279 bp, Homo sapiens
ttgctaggtgactgctgcgtgcttatccgacaatggtttggtcaacaagattgctgacaggcctgtttttgaaaatccgagtcacgttatgcttacaaatgtttgctgctagagatctggcacgacagtgacgggtcagctgagtcggagacggaaaacctgttggtctgcgcaccgtttttgcagctgcccggcagactggaggcctctccccaaccctgctcaccctgaaggaggttctcggtcccttttgacctcacactgggcagtggaagggga

SEQ ID NO: 166113 - DNA, 453 bp, Homo sapiens
ggggacacaattcagcccatgacaggtgggttggggttatatttcagagtgttaaagccattgtttaatttgttaaactttccttttagaccaaaggggagtcattaatgctttttatgcaaggaagtaacacaaacagttctgattgtgatgtgaaaaggtgccctctaaagttgagggcaaatagtagatttgaagactatttctattgttaaaatataatatcagctgtcactaattgaataacttactctgtgctttgtacttatactatgctaagaactttgtgcatataaagtcatgggactttaaaggacagaaatattaaaatctcttttttaaatatgaagaaaccaagatttaaagaacacagaatggggaaacagggacagatgtagataatttgtgccatttagacatgttaagcttgaagtgttgactgagtattcctgt

SEQ ID NO: 166114 - DNA, 122 bp, Homo sapiens
caaaaaaataaatgcaatcatatattgcattttgaaagtcttaaccacttcaggggtaggagaggacaataaactcaagaaaaaattctcctggacagatcattcctagggctcttctatcg

SEQ ID NO: 166115 - DNA, 174 bp, Homo sapiens
cacaaggacagagattgataggacaatggagaggcagacacggggcagcaacaaccacccattgcagggataagaagaaaacagggaacaatattttgaaaatcaaaataagttaaacattttttacagtattaatgaaaaaaccaaatgatctttaagcaaggaagttttatc

SEQ ID NO: 166116 - DNA, 288 bp, Homo sapiens
gagtagttgggactacaggcacctgccaccacacccagctaatttttgtatttttggtagagatgtggttttgccattttggccaggttggtctcaaactcctgacctcaggtgatccaccaaccttgggatcccaaagtgctgggattacaggtatgagtcgccgtacccggccacactttctatttgaaccagcacttgcattcaacacagaatgaaggaaatagtgttctaagaaacacgaatggccaagggacactattagattctaacctactctggaaagtg

SEQ ID NO: 166117 - DNA, 105 bp, Homo sapiens
ttaagacccagctcaggcctagttcagggtaggcactcaatacacgtgcacggcaagccaactatgagataagttaatgcatttcaacaaagaagatgctgggcc

SEQ ID NO: 166118 - DNA, 413 bp, Homo sapiens
ccgaaacagccccagaccaagcagctgtcacaggctgggccacgtattggccagtcctgcccttcatccctcccagcttcctgacagtgcgcatacaccctagacggagctaggagggtgagagcctttgttcctcccaggaaaggtcacccctgccctccagcccctcccacatcagccagcagagtctgaatctcagaggtgcccaaaggttgtgtcctcctaaccagcccaggtctccagcgagtggaggatgcctgtggcagggatggctccaaggctaggagggagaagaggggatttactccccagagcctggccctgcccctgctggcctagagagttctcccaaagtggggtgtttcttaggagtcaggctggcggcagaacagcccctccagagccctctaccc

SEQ ID NO: 166119 - DNA, 610 bp, Homo sapiens
cagcaaaggggcactggaacttttgctgatgaaggaaatgttctacatttcagttagagcaatggctaaatgacaatatacatttgcctaaattcatctaactatacactttcaaaggatgtattacatgtgagtaagttatacatcaataaaaagggcacatacaaaaagcgacaagccattggatataaggaaactatagaaaaaccagttgtatttttgtgtacaagcaactaataaaaattgacattttagaataaaacatcgtgtaccactgcatcaaaaatatcagagaataactctttaaaaagatgtgtgagaccttcacactgaaaattgcaaaacattactgacaaaaatcaaagacaaaaaaggggacaaaccatattcatgaattggaagactcaaatactatacagatatcaactatctcaaaattgatctataaattcaatgtaatcccaatttaaaaacttatatggaaatacaaaaggcctagaaaaaacaagtcaacctcaataaacaaaactggaagaactatattaccagacagcaagacctattataaattactcataaagtacttaagacacacattatttatcctgct

SEQ ID NO: 166120 - DNA, 116 bp, Homo sapiens
ctgagtaatatgaactgttcatgaagggaagaaacctttgcctatttgatccttgactgctggctatgaagagaaaaacagaactttctgggagatgaggactctccagtccttct

SEQ ID NO: 166121 - DNA, 887 bp, Homo sapiens
cgtgttgccatgatatctcgtgtggttgtaattttgatttcctgattctgaaagtgggcaggcaactttgcataggatcttaccttcagagaaaggaagagacggggatgagtgttttttctttcaatccgtctttgcatatcatagtgttgtgagttggggtggcaagtaggcagtttagatttttacccagtactcatgaattccaaatggtttaacaaaatatacaaacacttcagcattttttctttgataaactgtctgattaaaaaagataggtgtctcaataaaaatttcaatgaaaaagtggccaaaagatttggacagacatttcatccatttcatatgaatgagagtaagcacacaaaaagatgttccacattagtagtcgttaggaaatgtaaattacaaccacacgagatatcattgcaaccctattagaatggctgatgttaaaaaccaaaaagaaggtgacagtgccacatgacaagaatgtgagacagttagtactctcctgctttgctggtggaagtgcaaaatgttatgattgctaaagaaatcagtttggcactttcttatgaagttgaacatagacttgtcacccaacccagcagtcctacttctaaatatttactcaagagaaatgaaaacattttcttacaatgacctctatgtgaacatttatagcagctttattcgtaatcactggagacagctcaaatatccatcagttggtaaatggataaacagattttggtacacctatacaatggaatcctatacagcaataaaaaggaactaactgctgacgcacctaacaaaatgggcagatcttcaaagcagtctactaagtgaaaacactaaactccatataactgtgatttcat

SEQ ID NO: 166122 - DNA, 332 bp, Homo sapiens
ccgttgtgtgttggtgtttggatgtgctaagtaagatgatcatgatgagcaatatacctagacacatccaaacaccaagacacaactaggaagacatccacacaccagagcctaacttctgaaaaccacgttaagctctggggcaggcgcacatcagctatggcaccagaaatcacatcagtggtcacctgaatctaggggattgactggaaaggggcatggaattttggggagatggtaatgttttggatcttgatgaggggctatacatttgtcaaaatgtatcaaagtatacactaagtctgtgcatttgattgcatagaaataataat

SEQ ID NO: 166123 - DNA, 279 bp, Homo sapiens
aaaaaatctagaaagaaggcctctatagtttgtagtcttattaaagacagagaccgtaaaatacacatgtacgtgtatagagagagaccagtggcttggactctatgaaggatattttagaggtggaggctcccaactgcttctttcctgttacagattagagagttcgtagaagtaggttaggagagattacggctgccttgtgtgatgttaggcctcttctggccagaccttagttcagcattaagagaaagttgctctttagcttcaaagcaaggg

SEQ ID NO: 166124 - DNA, 894 bp, Homo sapiens
taagagattatgtcagctggtggcttcttatctataaattaattgcattaagaaattatctattactagttttaaaaggatttcatttaaatgattctatttggagaaaaaaacaaaatggatatggagtttgttagatgccttttagccttttcctttaacctatgttctgtggaatgcagttgtgggagatcattcgtaagtgttcaaagaaaataaaagggttccatagtcaagtaactttgggatatgctgtgttccataacctcctcatgacgatttacagtactcccagatcaaagagtttacaacctaaagtctgttgtcatactcctaaattacaagttacaacatcaaaaacactcaataaatagtcattgcatgactgaaagactggaagaacaaatagaactgtaagaaactgatttgattctagtgaaattcccctccctttctttcaccctcctcccaaaacagcatggaaggtggagtggagcaacttacaggtaatggcagtgggtagacagcagtgtgctttcaagcacatctcagccctgaggagtataaatcccatccatagctggaaaaatagcctgagatacgaaaagttttacccagcaaattccagtttattggttcaatgacctaatgtccattcccttagtaggcacagcagtttcaaaggtgacatcatctgaacaaacagtcctggtgataacatgtcaatgatttaactaaaggaaaaatgaaaataaaacttagttttcacatttaaaatgtaagtgaggctggcgcggtggctcacacctctaatcccagcattttggaaggctgaggcgggcagatcacctgaggtcaggagtttgagaccagcctggacaacatggtaaaacc

SEQ ID NO: 166125 - DNA, 306 bp, Homo sapiens
tactactactaaattcgcggccgcgtcgacctcctggctgctggattgtctcgtcataaattcatttcccctggctgctgcactgtgatgtcatacattcatttcccctggctgctgtgccgtgacatcataaattcatttcccctggctgctgcaccgtgacgtcataaattcatttcccctggctgctgcaccgtgatgtcataaattcgtttcccctggttgctgtgccgtgacatcataaattcatttcccctggctgctgtgccgtcgacgcggccgcgaatttagtagtagtagtcgacc

SEQ ID NO: 166126 - DNA, 745 bp, Homo sapiens
aaatagccctggcttcaattttagctgaaacttcagctctgactttggttcggacttcaaggaaatggaaggaaccaggatctctaagcagacccccttctgctcccttagggctgttgattttagagctaatgatgggattcggttggggcgagggggtctccacatctttttgcccaaccctttgctaagtcaaggaaccccagtctgggctgggcatggtggctcatgcctgtaatcccagcactttgggaggccaaggttagcggatcactggaggccaggagttcgagaccagcctggccaacatattgaaaccctgtctcagcctcccgagtagctgggaccacaggcttgcgccacgatgccagccagtgtttgtatttttagtagagggtttcaccaaccctctactaaagaccagcctctagttggtcaggctggtctcgaactcctgacctcaagtgatccatccgcctcagccccccaaagtgctaggattacaggcatgagccaccacgcccggtaattttgccatcttttatcaggctttctgtgtcgaggacgctacccacatagagtagaagctaaagggaagggatgtgaagtgacctcaccctcagcttctagctcatggtgtcaaggcttgtgtgatcttagacacgtctgcctcttctgagcctgtttcttcatctgtaaaacagggatgggaggttgtggtaaagattccacagcaacactgcac

SEQ ID NO: 166127 - DNA, 334 bp, Homo sapiens
taacgcgctgatagcctcctaacgcgctgatagcctcctaacgcgctgatagcctcctaacgcgctgatagccccccaaagtgctaggattacaggcatgagccaccacgcccggtaattttgccatcttttatcaggctttctgtgtcgaggacgctacccacatagagtagaagctaaagggaagggatgtgaagtgacctcaccctcagcttctagctcatggtgtcaaggcttgtgtgatcttagacacgtctgcctcttctgagcctgtttcttcatctgtaaaacagggatgggaggttgtggtaaagattccacagcaacactgcac

SEQ ID NO: 166128 - DNA, 260 bp, Homo sapiens
tgatattgagtctgtttcctttcaaggggaaacaggctacccaaggactggggctgctgccttcatttctgtgtcgaggacgctacccacatagagtagaagctaaagggaagggatgtgaagtgacctcaccctcagcttctagctcatggtgtcaaggcttgtgtgatcttagacacgtctgcctcttctgagcctgtttcttcatctgtaaaacagggatgggaggttgtggtaaagattccacagcaacactgcac

SEQ ID NO: 166129 - DNA, 702 bp, Homo sapiens
cactgggctctttttctcccccttcttcatcctgttcctcaaacatacaaggcatgatccagctcagagctttgtgtctcctgattcttctgcctaaaatgctcttctcttcaatatctaaaaggtccctccattgactccttcaaatcttggctcaattcttgccttctcattgaaaggtaccctagtactctatttactactacaaccaccccattcccaaactctcaatcctccttacactgctttatctttttttctccatagcacttaacaccttctaactactacataatttgcttactatgtttattgttaactgtctccccctcagccccacttgagtacaaaaccctcagggcatagctctttttccactttgtccacttacgttcccccaatacttgaaacagcgactatgtaatacgtattcaagaagtcttttttcaaactctctcctttgtaaagccctatctctctctttctaaagtatatgacccctcatgtcatcaattattctcataccaattacttttttcttccaaatcctggcttgccctctggtttctctacctaccatatttatgaatttcttcttccaaaggtcaacaaatgtacttttcttagtctttatccttttcatccttacataactctgggcttcctttcttaagagtacttcccttcttgagagcctcactc

SEQ ID NO: 166130 - DNA, 599 bp, Homo sapiens
aagtgggcttaacttagcctcctccagataagagtctggaggttcttgcccaatgttgctcctccctcatgcgctttgctcagtgccagggagggggagtgcagtaagtgtggattgcaccccaggctggttccatggagatggaaatagcgttggcacatcctagctcatgaatggatccacatccatccagatgcccagccaagaagcccttccccgggctcctcatcatcatgcaccaggtgctgttcatcacttttcctacggacttgccctcccacgtccctggaacctatctgcatctccccatctccactcctccattctaatccaacgtatcttcactgcttctcctagaactgattcaatgccctcctaactgaactgccaggatccacatggcccctcttcaccactctccacactgcagccagggagctattttcagagcaaaaatatgatggtgtcatatagctgtttaaaattctttaattaggccaggtgcagtggctcacacttataagcccaacattttgggaggctgagggtggaggatctctcaaagctaggagtttgagacaagcctgggcaacacagat

SEQ ID NO: 166131 - DNA, 324 bp, Homo sapiens
agaggctagtcaatttatccaaggccacgcagcaaagctgggactcaaactcaaatcttctagtcctagtttcattcagttttttttttttcctacattgattctagactttgttctacaagtgactacttttctgttttgttcctgacatgaacatgtccatggctgtctcagacttgtttggttaccctaagtaaccatttagcagccaatttctgatatgactatagatacatctctataagtgaattctataggtgatttggcatgatcaaaatgaaaaggctttgtttgagttccccaatatactgctcaaatgaaagc

SEQ ID NO: 166132 - DNA, 209 bp, Homo sapiens
aatagtggatatataaaggtgatgggattatgaatatggtttcttgttaatgtccccttaatatatgatatttttcaaggctacagagtctataaaataaggaaaaatgtttacagggaagatgggagtgataatttcctggaatgggactggtttttctggacatcatgagatactgctctccatgattaaacagtaattgacataaa

SEQ ID NO: 166133 - DNA, 382 bp, Homo sapiens
acagctccagtttaaaatcaaacaattacctatatgtgaacctacaaaaatacctgcattcatacctgtatatctgagttttcttttaagctgaaagctcagcaactctacacagaaacagaaccaaaaggatcaatggaagcttttgtcctctccaaattttacacaatgaaaatatttaaagctaaactccctgacttaagaccgcgagatggaagtaagggagggagcacactgactgactctaatttgagagaggtaagaagcaaggatggacactcccctcaggtatctgctccccctaaaacaaggcccccgaccacagtgctgccagagccagcttcatgctcccaggtttctgtgagtcccattcttctgaata

SEQ ID NO: 166134 - DNA, 481 bp, Homo sapiens
aaaaaaatgcgtgcgctgagacagaggcctggatttgaatcctggctcttgcctttatatgaccttgggcaagttctttatcctttctgtgccacagttttctcctgtgcaaaatagggattaaaatggcatgtatctttcaggatatcacaaggaatatgtaagatattatacatcaagtggttagaacgctggctggcacattgtaagtactcagcatttgctggctttgtagaaaataaggctttgagaagcatctaatattgtgcctggtacctacttggcaacccataagtggtaactcttacgattaacaagggacagctcccatccttagagtgatactgcctcagggtaatctgtccctcggtggattgaaggagcagtggaccctgaccctgcttagcaataaacaacattttatgtaactcaatcaaagtacaaagggtcttcatgtactctgcccatttcatgacccata

SEQ ID NO: 166135 - DNA, 245 bp, Homo sapiens
attcatattgctatttgttctaaagtagcatttttattaccttttattcatgtcttcctgaattacctctaggatcctttccacttctaaaaatgtctgtttttttctctctgcatcaggtaattacctttgttaatttaaagggattaaccaaagtatcctgtgtttattttattttttttctattttttattttggagacagggcctcactccagtctgggtgacaaagcaagaccccatctc

SEQ ID NO: 166136 - DNA, 258 bp, Homo sapiens
catctaaaaggggcttttttgatttcctttgatttatttattctcctttcttcctttacttcccatacttggaggaatccaatggagaaagacaatattaattagataatctttaagggagtcataccctctcctgtgacataggcatgcttctcagttccaaaataacagagaaatttgacctctccaaacagaaattagctggcgactgaatgcatttatgttagattaaaaaatgtaaagttgacgcacctctct

SEQ ID NO: 166137 - DNA, 1233 bp, Homo sapiens
ttgtcctaaaaatagctgataacagcctacatttagtgagtggatagtaggtaccagcctccatgctaggtactttatgtgcattgcatttatcacttaatatttataaaccctggtatagtacagtggttagaacagaggctttggagtcaggcaacctttcactagttgtttgactgtgggcaagtcacagaacctctaaattacattccttatctgtaatagtaatgactaccccataggatgtgaagattaaagtgatctaatgaaaaccaagcagctggcccagtcctggcatggaattatcacaactaccaccaccaccatcatcattgttttacagatgagatgagaaactaaggtttagagatgttaaataatttgctcgagaccatatagctaggaagcaaccaagtcagaattaaatctagatctgtcttcctccaaagccattgctataaaattagaactcagccaaggggcaggggaaaaaaaagctccttttctaaacttgctttctaccttttcattcaagaatcctctactccagtcctactgaatctttgaccaacattccaggtcctcttgtaaatctttgcttctgtacatgctgttgaatggccctcaccccttcttcctaacttcaactttccagaagatctaacttaacatccacctcaactgtgcagacctctccatatacctgaggcagagttagtcacttctttgtgtaataccagaaacagtggagagacccaataaaagcctttttagtaaattaattctcttcttgcaaaactaaaatttatttttatgcacttcacccaagatttgtttgctgcctacatgctaggcactgtgcttgggtttcagaaatacagagggaaataaaagtctctcccatcaaacgttcatagtctagcagaaaagatagatatgcaatcaagccaagcacagtggcttatgcctgtatcccagcaccctgggaggctgaggcaggtggaccacttgaggccaggagttcgagaccagcctggccaacatggcgaaaccctgtctctactaaaaatacaaaaattagctgggcatggtggcacatgcctgtagtcccagctactcaggaggctgaggcacaaaaattacttgaacccaagaagcagaggttgcagttagccgagattgtgctactgcactccagcctgagcgacagagcgagactctgtctcaaaaaaa

SEQ ID NO: 166138 - DNA, 1843 bp, Homo sapiens
tcagctcttgaatcagaattttcaaagactcacctctcttacctgggcttgcacatatttgtcctaagtaattctctatcccttaaacctctgagtccctctgttttattacttgccccactcctcctacttgaatatgtttgttttcccagttgaatgtgatttttatctactgttcatattatcttttatacccatgagtataatttcatagtcctttcaggttccacatcatcaaagagatgaccataatttcacttttttttgaaatgaagtcttgctctgttgcccaggctggagtgcagtggcacaatctcagctcactacaacctccgcctcccaggttcaagcgattctgccttagcctcccaagtagctggaattacaggtgcctgccaccatgtctggctaatttttgtgtttttagtagagatggggtttcaccatgttggccaggctggtcttgaactcgtgaccttaggtgatccacccacctcaacctcccaaagtgctaggattacaagagtgagccaccgcacctggccaattcacttttaaatactaaaaggcacacagcacacagacattttcggggcagttttctttgggagggtctttgataaattttgtaatcacctctcggaagaaagcccaaaatgacatgtgaaaataatattaaaccatttaccagatgtccagcaatataaaaatagacctcacatgctacccttcacatgctgattctcttgccttgctgtttaaggatccagtttcttatgttaaacattttccttaccttttgcaataatattattggccatatactaaattctcattcacttagctttctaagaattctttgaggttggaatcctgaaatcataaagctaccagatctgcacaacagcagtggtagtatctgagcccaaactctgagacgctctagagttttagtttacaaacatgagccagaccaaacctgacctggtgaaaatcaataggtaataaactgcttgtatatgatagcagttcaagggctttctgggttccatttcactgaggaaatgaaaatataactgattagccaagacagagtggcaataaggaataactgatcctcctccaagttgcagtgagcaagccctcaagcctacctcattcctgaagagttgaaggagaaaatgccgtgctaattttctgccctgctatttttaacctgaaatttagaattacatcaggtattcaaagaatgttccctatcaaaggaaaatctgtaaacgatgactgcaaaaagcaagtgaaatgatgcaaagagaaaatatttgcaaaacagaatctaaccagacatcatcatgaagataaaatggcatctcttctgtgtggcctgggtgtgcttggacaatcctgtcacacgtttctattaggacatgttgcccttttgaggattcactctatgttggccagatggtttaactgattaaacaattgaatcaatttattttgctttttgaattgaccagatatttaactaaatgtactgggtttggcattttagacacactgccttagattcttgtagtgcatgatgactttgaaaatgtttggccattttagttaaaatgcagggtaacatttgatgcagccatgataacaggaaaaatctgttctgttctaaaaatgtttctagcaatagaagtatttctggctaagagaatactcttgacttgtagggaggctccctcggaataaatgtatgcaacacaaataaggcattttattttttaaaagattgtctatataagatacacttattaaataaagaaattgttggtgaatgctctga

SEQ ID NO: 166139 - DNA, 2020 bp, Homo sapiens
  misc_feature (211)..(211): n is a, c, g, or t
  misc_feature (504)..(504): n is a, c, g, or t
  misc_feature (644)..(644): n is a, c, g, or t
agaggggaggggagaagaaaagagaaaaaagaaaaagattctggaaaccattaataacctaaagctcttccaatgtacaccacccatttcttctcctacccataaagagtggcaacggggaagagagggagggtagggagggggttcctgcagctgagcagcagtttcacaaggtatctcttccagcctagctgaggatgcctgctatganggactctgcttaacctttcttttccaagcaataagctttactacttggggaggattctttgaaatcacaactagttcaaattgtaaaatccctttggaaaataatttgtcaatcaaggtatcagggtccttcatatgttcttatcttgtgaccctgtatttctcctaccacactatatacaaaacaaaaaaaaaattatgcatgaagctttttgtagctaaaagtttgacaagcctgggcagcaaagtgagaccccttctctacaataaatttaaaaattaaccaggcatggngtgcacctgtagtcccagctacttgggaggctgaggcaggagaatcacttgagcccaggagttgaaggctacagtgagctgtaattgtgccactgcactccacctgggtgatagagcaagattgtatctcaaaaaacaancaggttgggcatagtggctcaagactgtaatcccagcactttgggaggccaaggtgggtgatcagctgaggtcttgaactcgtgaccttaggtgatccacccacctcaacctcccaaagtgctaggattacaagagtgagccaccgcacctggccaattcacttttaaatactaaaaggcacacagcacacagacattttcggggcagttttctttgggagggtctttgataaattttgtaatcacctctcggaagaaagcccaaaatgacatgtgaaaataatattaaaccatttaccagatgtccagcaatataaaaatagacctcacatgctacccttcacatgctgattctcttgccttgctgtttaaggatccagtttcttatgttaaacattttccttaccttttgcaataatattattggccatatactaaattctcattcacttagctttctaagaattctttgaggttggaatcctgaaatcataaagctaccagatctgcacaacagcagtggtagtatctgagcccaaactctgagacgctctagagttttagtttacaaacatgagccagaccaaacctgacctggtgaaaatcaataggtaataaactgcttgtatatgatagcagttcaagggctttctgggttccatttcactgaggaaatgaaaatataactgattagccaagacagagtggcaataaggaataactgatcctcctccaagttgcagtgagcaagccctcaagcctacctcattcctgaagagttgaaggagaaaatgccgtgctaattttctgccctgctatttttaacctgaaatttagaattacatcaggtattcaaagaatgttccctatcaaaggaaaatctgtaaacgatgactgcaaaaagcaagtgaaatgatgcaaagagaaaatatttgcaaaacagaatctaaccagacatcatcatgaagataaaatggcatctcttctgtgtggcctgggtgtgcttggacaatcctgtcacacgtttctattaggacatgttgcccttttgaggattcactctatgttggccagatggtttaactgattaaacaattgaatcaatttattttgctttttgaattgaccagatatttaactaaatgtactgggtttggcattttagacacactgccttagattcttgtagtgcatgatgactttgaaaatgtttggccattttagttaaaatgcagggtaacatttgatgcagccatgataacaggaaaaatctgttctgttctaaaaatgtttctagcaatagaagtatttctggctaagagaatactcttgacttgtagggaggctccctcggaataaatgtatgcaacacaaat

SEQ ID NO: 166140 - DNA, 320 bp, Homo sapiens
accttcgatgggcgggcacttagtagaagataaattgagtgtagtgtttctgtagttgagaatgagtgaatggaaacctgtagaagcaaagcagttaggagaaaatcatctagagaaatgttagccttgagagtgagttccacaaccacttagctgtagtggttgaaggaggaaagaatcctacctccaaattacaactttacaagaaacagaactactaaccttgagaaaccattatttatgccatttatcagcccaaactgaaaatttagtgctcaaagctggcactattgtataacataagttgcccgccaatcgaa

SEQ ID NO: 166141 - DNA, 465 bp, Homo sapiens
tctctttggggtaaacattcagcttcagatcctgcaggtagcagagagagagagagagagagagaggagtggttaagagtgtggccattggagtccagggagtctgcgttctaattctggctctcctcttaaatagtcctgcagcttgggcaacttactcaactgtgtccttcctcaacttccacatctgtaaaatggggagaacaccttcctttcagggttataggcaaatgaggtaataatctcttttaaaatacttagcccaagtaaatgctcagtaggtgctagctatcatctccagtttctatttcctgaactgtgaccttgactaaatgtggcccagtcctttaagagaggggatttgtggtcactttaaaaaaatcttcagctgtgctcatgtggtccggagtactgtgttagttttcctgcctgtggctcatgggccagtggtcaccatggaaatgg

SEQ ID NO: 166142 - DNA, 129 bp, Homo sapiens
acgaaaactcgatctagggggagaatcttccaacctaccaagaagaggaaagaactcagaggtttaccagagggcaagggatcaaaatcaaaactcaaaagctcccaccagccaaaaatgggccaaccg

SEQ ID NO: 166143 - DNA, 190 bp, Homo sapiens
atcctttgaggcacagaagttttaagttttgatgaagagtagtttatatatagatttttgttgttgctcatacttttattgttgagcctaaggaccctcatgatcgaaggtcatgaagatttactcctatgttttcttctaagagttttggttttagctcctaacatttaggttgttggtcaatttgtgg

SEQ ID NO: 166144 - DNA, 395 bp, Homo sapiens
tctctgtttctgttcctccctctgcctaacctatcctggctctaagctggctcagacactgcgtttgtgtcttttcacgtggcatttttcttttttccctccaccttgctaagtgctgaaatttgcagtcagcatttatatatgccctatagacaaggcacatttctctagttttacctttcttgtcatttgtgatcttttaaattttcagtcaatggaaagtaattgttaatatgaattgcagtttggaaactttgtgccagatgatgaaactgaatgaatctgtggtctttacgtaggcagtgccttacgtatggtttggtttttggcccatgtactagatgtttgcctttctgtgggctgtcacagatctggcatgtacctttatttttttg

SEQ ID NO: 166145 - DNA, 367 bp, Homo sapiens
aaaattcacttcacttgccaacttattattatgagattcttcatcaatttttgaagagatttgggagtagggaattttttatccctaaagtgagctttattagcattttatattatactatttgaaatgtgcaaaaatgcaatcatgttatctgtgtattgcctggaatattgtcttggtgactaaggaacccagaaatactgtggaaactgctgctactgtcaccatgtgcatagacaatgtggagggatttctggaaaatttctgcagtctggcctctctggatttcgtgtggatacctacaaactgcactaagtgttgggagattctttagtggtatatgaaactaagttgcaagcaatatcaa

SEQ ID NO: 166146 - DNA, 415 bp, Homo sapiens
atttccacgtgcaacatcacttaaaaacccattctctgggctcagcaggcagaaccccctgatatatggcagggggtaagaagccagggaccaatgttcaggcaaaccattaaggtatggaaagaacagaggagttcgtgttgatttcactgtccttacctacatagcccaggaatgaatatatagatttataatacataaagaaaacatgcagtgaatgtggccaaatcccaagcttgaccttctgggccccatatgatatgcacggtgagcaggcaaagttccaatgagctcttgccacctgccaagcccatctgctacaaacacactggcagccaggaagtcacacattataaccctataggattcctaaaaagtgccaacagtcttcttgaggagtaagagggtaaaggga

SEQ ID NO: 166147 - DNA, 260 bp, Homo sapiens
gtgtgtgggtatgtgtgattaaagtatagaaatacctaacaattatccttttattaattcaacaagggtcaactaagtacatgttatatgcataatgtgaatgtagaaaaagaggagttttcataaacatgttcaaagggaggttaaactttaagcatgaagccaggcccagtggctcacacctgtaatcccagcactttaggaggccaaggtgggcggatcacttgaagtcaggggtttgagatcagcctggccaacat

SEQ ID NO: 166148 - DNA, 421 bp, Homo sapiens
ggacagatcacctaaggccaggaattcaggaccagcctggccaacatggtgaaaccccgtctctactaaaaatacaaaaaaaaaaaaaaaattatgtgggcatgatagtgggcacctgtaatcccagctacttgggaggctgaggcaggagaaccgcttgaacccaggaggtggaggttgcagtgagccgaggtcgcgccattacactccagcctgggcaacaagagtgaaactccatctcaaaaaaaaaacaaacaaacaaaacagctgtgcttaattaaaattgtgctgggttagaaaaattctttaggaaaaactacagactttttatttataaactacctatgaagccctcctatgcagtcctcatgacttacataacaacgaagtattaatagccaggtatagtgcctctaagaac

SEQ ID NO: 166149 - DNA, 241 bp, Homo sapiens
tcccagtgattttgtccttgcagtatctgggcaaagatgaagcaaggagggtcagatgtttgagacccaggctttcaccttggcagaccacaagcaaagctaccttccctggggatcagcattcctgggagcgcctctcaagaccagccctccaccaggaggcaggggcagcaggctccagggcaggcagagcccaggcagcctccacatagcagccaaataagtcaagaggtgtctttcc

SEQ ID NO: 166150 - DNA, 423 bp, Homo sapiens
gagttcatgtcctttgcaggaacatggatgaagatggaaaccatcattctctgcaagctaacacaggaacagaaaaccaaacaccgcatgttgtcactcataagtgggagttgaacaatgagaacacatggacacagggaggggaacatcacacagcggggcctgtctgggggtgggtggctaggggagggatagcattaggagaaatacctaatgtagatgatgggttgatgggtgcagcataccaccatggcacatgtatacctatttaacaaacctgcacattctgcacatgtaccttagaacttaaagtataattatatatatagtatatatacatacatacgtatatacatgtatatatattacatatctgtcctcattagttggaatacagcaggctttactagtgtatctgaagta

SEQ ID NO: 166151 - DNA, 254 bp, Homo sapiens
ttgcagctattgtaaaatggattgagttcttgattttattctcagcttggtagctgttgctgtatagcagtactactgatttgtgtacattaattttgcatccagaaattttgctaaattcatttatcagttcttggagttttttggatgagtcttcgggttttctaggtatatgatcatatcatcagcaaacagtgacaggttgacttcctctttactgatttggatgccctttatttctttctcttgtctga

SEQ ID NO: 166152 - DNA, 181 bp, Homo sapiens
ctcccactgtgggagatggcctcagcagaggctcaagggcctggatacagaatcttctttggttcaaataccccctagaagtttcccattggccacctcatgtaagtggcgtggtcgcccgaaataaatctgattggttgcagaaaggagacaaccagaggctaaactgaagttacaaagg

SEQ ID NO: 166153 - DNA, 744 bp, Homo sapiens
tcctgcagaaaggatatcttcatggtgtcagtgtaaagctggtgttaaaggatgcaatgtgtgaaggggaaagaaatctctgctttccagagctgtgctatggttaatagagttgcttagggaatggggaggtgaaaataaaggcaaagaggagcaggcctagggagcaggatgtcagcagtacacatgtgctaaccagacccagcgtgtgttccccagggctcctgccttttctgcgtctctggacttagaatcacactgatctgatctcagtcttttgctgcttctgtgtagctttgatgagttgctctaacttctctgtgcttcagtttctttattttccaaacaggaataatgatacctaattcctgggggttttgaacatattaaatgggtgaataaatgaatgaatgagtatcaggtgtctatatgactcactccagtagggaggttcccttttccctttgcagaagcagcagaagaggcaggaggaatagtacagtcccaccaccaccgcaaccactaagtgatctctttaccacttactgggtgccaagcctgtgttcaggcactttatcagcaccatttcttctggggagaccaggatgttgctttcagttcttacttatcttcatccttaattgattttgaaggggttaaattaaaaaaaatactaaaacaatttgaactgatatatattatagaaaatcttgatggactgagatgaaaggggcaaaaaaaccc

SEQ ID NO: 166154 - DNA, 331 bp, Homo sapiens
gttggtgagagaatgagcattattttagataccctgagtttgagatgacagttccattcaagcaggaatttcattaggcaagtgacaatgccacccccatccgcctttcattaaatctgtcattttcttttcttctaaattgggaatgttgcagagaaactgtgaaatagatgacacccctcttacgtgccaaatacctgacctccttttgcagcttcttacctttcactttcagaaatattctcccttgaaggggcttcgtgtttgtgtgcaggaattaatagcattttctatccctgtgccctgtagggaaagagcacagctaaacaag

SEQ ID NO: 166155 - DNA, 279 bp, Homo sapiens
catcaggcaggcccacagggaggacggtccagagcgataggcccatcctctttgaaagcatcatgacaagggagggccaaggccctcaaccagaccagaggagacggggaggggtgacaattaaatgcacatggaacctggaacagggaagggcactgggggagtctggtcacattcacatcaagtctgccattcagctgccaggactgcgcccacaggggactctcagctgtgataaatgcagcatgagtatgcaggatgctgctttgaggggaggcg

SEQ ID NO: 166156 - DNA, 451 bp, Homo sapiens
ctggtttccacaccttccttagatttccctgtgtgtaaaatccaacaacaatctttgacaaattgcctcccccaggagagagatggaggaagtgttaactttgcttttttttttttcttttttcagacagagcctcactctgtcactcaggctggagtgcagtggcgccatctcagctcactgcaaactctgcctcctgagctcaaatgattcttgtgcctcagcctcccgagtagttgggactacaggcagatgccaccacaccgggctaatttttgtacttttagaagaggcagggtttcgcatattggccaggctggtatcgaactcctggcctcaagtgatccaaccccctcagcctctcaaagtgctaggattacaggcatgagccaccatgcccagccacttagctattttttttaatagaaagcttcgaggtccagtatgattt

SEQ ID NO: 166157 - DNA, 415 bp, Homo sapiens
gcctcccaatcttcacacatttaccaagtaacaggacaaggttatgagcaggccagaaactcaaaagccaactagtccagcacaggaggctcctgccccagcacggcatcatcagaagcagcagcccagcagcctgcgccctgctccagcatactgagaacatttccccagtgagacctgtgtgccagctcaatgttatgaccttcatctgtcagtctagctccctgctctaggtccccttcttgttatttctgacccaaaggctgatgcccacctgtataggactcctctattaccaattaaaaaatatcctgcactactggttgactcaacttcttcctcttctcctctaagggactatcataaaaaaaaggctgtaggcccctcttcaataattggtcagttttactgtatc

SEQ ID NO: 166158 - DNA, 234 bp, Homo sapiens
tggaaaaacctagctgtccaaaattacttattcacgaaggcttttgaatagacaattatttttaaactgtttctatttagaaaatgagcatgtggatgattcaaataattggtgactgcctatgacttgggagttccaaaatgttagatcagcacttctcttaatgaacaacctctgctgtatggttttatctgataccttgtgtgacctctaagaaggattagacaactgaat

SEQ ID NO: 166159 - DNA, 398 bp, Homo sapiens
gagaggaggcaccagtggcaccctctggccctgcctgtgggtggctgatgagatggaatgtattaggtctctccacacctcacccagcccaggaactcttcaaggaaccccttggtgattaggaggcctgttacaggggttgggagaggcctgccacccacccccatcccatccccaactggttggcttgagggagggtccaagatgtgtcgggaggggccaagggctcagggatcccatcatttaccttcttcacgttgcttatgtctcaactggcttgcatctcattgttgggagaagcaggcattctctccaagaaccccagctcctttgacttgagggcctagtggagcttctgacttggccagaagagggtcatgaccttgggtttcgggttg

SEQ ID NO: 166160 - DNA, 371 bp, Homo sapiens
tctgtcatttaatattgggacaaaattgtatttctaactcacaacaaacagaaaaactacattagatgtactatcactttagatttgaaaacaattctttaaaacttttacaagaaaatcaaaataagactctactgcctttaatttgaggaagcacatgtcattaaggaaaagactgatgagttcacatttgctgataaaaataatataatctgtccatcctaagttaggtgtccaacaaatagttacatgtctatcctctcacctttcatgtcctccaacacttctctttaaagagtggcatagaataacatcatgaaagaatgaggaaactccagtgcaacaaaaaaattatagagtttataaatatc

SEQ ID NO: 166161 - DNA, 394 bp, Homo sapiens
tctaaaaacaattttatgaaaataagaaattaaaagaacaagtgaatgagcctgaaaatgatattggaagaatgtaaaacatacaccttaagttaataaaataaggcaaatgtataacagtaagagtcacttttaagaccaaagttctttgaaaactaataaaatagacaaacttctggtaaagccgatcaataggaatgagaaagggaataaatagggatttaaaaggaaataaagtgtatataagagattaaaaatttactactgtgagaactttaagcccatcaaatgggaaaactgttgaaatggacatgttcctagaaaaatacaattttaacaaaacatactcaaaagaaattacctgagcactcctattgcctaaattgaatctatt

SEQ ID NO: 166162 - DNA, 289 bp, Homo sapiens
gtgtctagcacatatatgctaagggctggataaagaactaatgaaaaataaatggataatgacagtctccaaatttatctttctgtgtacaaattacctagcatggtaacactggataatttttcctggaattctacttatgtagtgttgaattgatggcctagcattctggaggcctctactgcctggtcatcttttctgcattagtaggcctttttattgtactttccatcctccttcccatttctaggcttctgtcctttccactgaccactcctagaatggtttc

SEQ ID NO: 166163 - DNA, 295 bp, Homo sapiens
ccccaaagcatagaaaatgtaacacaccagggccttgaggaagcagcactataacagtgcaaatacacaaatatttaggaaaacttacatcacccaacagacagcatgtatggtcaccattatccagcactctccaaaataagtagctatgagtggcttatctaaaagttgccttatatatacttgtcaccacaaattgtttctgaacatactattgattccaattttggatattcacaacatggtaattatctggtaagatatatttatgactaacttgtaattagacttctaa

SEQ ID NO: 166164 - DNA, 471 bp, Homo sapiens
tacataatgtgtgcccaggatatcaaggagaatgatctatctagaatgaggggagtggtagcaagtagtgggagataagaatagagaggcagggtggagctagattatctggaggtcttaaaagagaagcagaaggaaatgaacaaaggcaagaaggtgggaataaatgtgtatccaggatatcaaggagaatgatctatctagaatgaggggagtggtagcaagtagtgggagataagaatagagaggcagggtggagctagattatctggaggtcttaaaagaaaagcagaggccgggcgcggtggctcacgcctgtaatcccagcactttgggaggccgaggcgggcggatcacgaggtcaggagatcgagaccatcctggctaacacggtgaaagcccgtctctactaaaaatacaaaaaattagccgggcgtggtagcgggcgcctgtagtcccagctactcggga

SEQ ID NO: 166165 - DNA, 330 bp, Homo sapiens
ccttagccgtgagtacaacagctatcagtgagctccatgagtccttctagagaattacctaagggtggtcttgaggacccccaagcttgcagttgctattagaagtgaaggtggtcttagggacccccaagccccacatacagtctcaaagcatctactgcaagatagttaattacaaagggaaaaacaagaagttgatggtgaagaaacctagcagctaccaccctaaccagtgatccaggttaccacatctgccgtgtggacagcatggcccagggaggatgtgtggggagggcacctcacccccgtctccagcaacccagcccgggt

SEQ ID NO: 166166 - DNA, 566 bp, Homo sapiens
agagagctctcagatgtaggggctgcagctggggaataagcctcaaattcctcattctcttcttctgacaaaactgcatgttcagctatagcttctacattggatgggggaactggctcaccttcttgctcctgtaattcatggttcaaatcctgtggtactgaatactctgatacaaaagcagaatcagtagaaacagatgcaatttcctctctttcttcctcagacaaagcaacatgttcaggagatgatgctgccaataatggtagaataagctcttcttctttgtgctccacttcaggggacatatgtggtgggaagggcttctcggaaaccaatgggctttctgggtaatcaagttctacgatctcttcttctactaaattagaatcttcaggttcaggggtaatagctatgggtagggaagtttctatttcttctttctctggttcttctaacattagaggttcagaaagagaaatggatggctcaagcatgttttcctccttctctcctttgacactggggatcgaagctttaggggatcctcagagtcaccgacagta

SEQ ID NO: 166167 - DNA, 455 bp, Homo sapiens
tagggaagtttctatttcttctttctctggttcttctaacattagaggttcagaaagagaaatggatggctcaagcatgttttcctccttctctcctttgacactgggatgggtaggggtcagttttgcggagactggttctgccctttctattgaagtcaggtccggctgttcttggtctgggtccaaaccatcctgggtagatgctgccagacctggtgacgctgcctccagagaaatggaatggtgagcagaatacacatcttccttctttacctcattagcaaatgatggtgagactgaagagtcattctctgaagctgcagttcctggtgaagcaagctcacattcttcctttgttgttctcaggaacatagttgcaggtgtgtcgggtgtcacagatggaggttccacttcatgtggttttgcttcatcttctggctgttgtggcactg

SEQ ID NO: 166168 - DNA, 406 bp, Homo sapiens
aattaaggcatcaattcctccttcccaaaccaaggcccctgctacctcctagataaagatagtgtatacttctgtaaggagaaacgaagacccttccccaaatcacactggaccctatatgggtgtccctccaaattcatggcctctcagagaagaatggcatgggtgatgaagaaaagaatttctttctctgaacgaatagatgtaattttagggttgaaggagtttgtgtgtgtgtgtgtgtgtgtgtgtgtgtgtgtgttcggttcgtttaccacaattctacactaaaatcataccatatagcagggaagaaattctgtgtcttaaaaatccaccagtcacaccaaaaatttgtaactccaggaacacacaaatacttggggatgtatgcaaagactgttct

SEQ ID NO: 166169 - DNA, 492 bp, Homo sapiens
cgagacggaccactcctctatgagttgctacagtatgagtcttcactctaagagcatcttgaccaagttgagaaggggaccttaagtttggtttgcggcaaacagcacttgcaagaaatataaccctcccttcccccaatacacagaaccaccgccaccaccaccaacaccgccacaccaacaccaccactacaaaaaaaaaagaattaataagtcacaaccccttcaaataagctttctttccagtcgctgtatgtatacaaagatattctctatgttttgtaagtaaaaacaaaaagaaaacctttcttttgttttttacacataagaaacagtattgaaaaatcccacgctatggttcatagggtggagaaggaggagttatctccactccaaaagaaaaaaaaaaagttttttaccttacaccaagttgagaaggggaccttaagtttggtttgcggcaaacagcacttgcaagaaatataaccctcc

SEQ ID NO: 166170 - DNA, 409 bp, Homo sapiens
tccccttttttgttgttttttaagagtcatagtctctgtcacccaggctagagtgcactggtgcaaccatagctcactgtaggctcaaactcttggactcaagcagtcttcctgcctcagcctcccgagtagttggaccacaggcagatcacaacgccagacgaactttaaaatttttttgttgagacagagtcttgctatgttgcccaggctggtcttgaactcttatcatcaagcagtcctcccaccatggcctttaaagcactagaatcctagtgattacaggcgttcttatgggttccttgagcagcttcagcctatcttgtgcttcttccatcttgtcttgcactgccttgaccatctatttgttcagaaatgcagaatgtggagttcctataagctctatatg

SEQ ID NO: 166171 - DNA, 358 bp, Homo sapiens
ggctgaggccggcagggcctatacctccctgcgttggacccgtgcctagctgggtgaagtgccctgtggtttacattgtaggaggcatgagaaagcatccttctctgtttggttttgtttgatcttctctgtgctcaggtcttcaaggggaaatacaggcccaagagtctgagttcagcccagtttgcaaccatagccctggagtcattcaggctgaactaaaacaaggccctagtggtgttcctgaaatcttaccccagctaaagtatggaacctgctctgagcctccgagagggagttttgcccccactgactcccactctcacacccttaacctcaagtggttttcttggcagga

SEQ ID NO: 166172 - DNA, 339 bp, Homo sapiens
cctatcacgtctatgcaaatgtccattttaactttaagtgcacagatgtctaatggcccgagacacgtaggttaacacccgtgcacgcgtacacagaggccttcacctacaaccatccccgtgtagacagcatcagaggcagggcaccaaaagcattaaaaccatgcagatgacctacctgagcacttcgcagacctagaacgtcaactatgtaaaatacctgcccatgaacattggcaaactcctggcctcaagcaatcctcccaccctggcctcccaaagcgctgggatcacaggtgtgagccaccatacccggcctcctccaggaggcaaatgctg

SEQ ID NO: 166173 - DNA, 631 bp, Homo sapiens
caaaatgagaactgtgcaaaatgtggattatggactcactcagcttaatttgcaatgtttatggtggtgaaaagcttgaccaatttattaaaacaacacagatgactgactttgaagaattggctttctgatgatcagcatttacaccagctagtctggtccccttaaagaaaccacgtaggtgaaggcctaggccacagcctgttgctgagggtcttcgaggcttcactgattgtctccaatactcagtcctagaattattgttcttcagtcaagactgggagcaatgaatggtcagtgattaaataatatcagagacttctagtgcattaattccctaacctctctttggcctctcccaaatcctagatttacatatcagcaaagatagggaggactttggaatcagcatctgatcagaggaaccccttcggatgcctcctttaaaatgagtctgccctcttatttcctggagtcatttggatggctaaggagggccttggggacattttctctggcacgtgcgctccttgctgttgcttgtaacgaggaagctcccaagcgaatcctcacgctctgcaggacaggctgtctttcagcatctggacacgtgggctacatggagttgcaa

SEQ ID NO: 166174 - DNA, 499 bp, Homo sapiens
caagccagactggttatttccctggggcgtaattcactcagacccacaggaaagcaaaaatgtgtaggatttgatggttcccatttgatagctcctttccagaaaacagtatgaaaagataagaaacactgtacaatatcctggtcatttctttggcctgggcatgaagctggctcttattattagaaagataaatgtcagcatccatgctgatggggcacaaatatccaattaaacatgaatcccagctcccaatcagcacacacatgtcttggccaagtggaagcactttcatttgctcagccttttcttccaatatgacttgtcctttgggtctttgagggtgaccggcctcctctagggaggatcattcaggaccataaatagaaatctggaatctcactgagcaatactcacttggctcttgaattctatttgtggaaatgaaatcttgaatcccatggaagtgcttaacaaaccagaagcagaaaaactctcc

SEQ ID NO: 166175 - DNA, 1753 bp, Homo sapiens
  misc_feature (106)..(107): n is a, c, g, or t
  misc_feature (234)..(234): n is a, c, g, or t
atgtgtgagcgcagtctctacagagcgggctatgtgggctcgcttctgaatctgcagtcgccagactctttctacttctccaacctgaggccgaatgcggccagtnnggccttccccctatctcctacccgcgcggccctgccctgggccgccacgcccgcctcctgcgcccccgcgacctgcggcgccactgccttcggcggcttctcgcagccctacctggctggctccgcntctcggctgcagcccccaacagccaaagacggacccgaagagcaggctaagttctatgcgcccgaagcggccgctgggccagaggagcgcggtcgtacccggccgtccttcgcccccgagtctagcctggctcctgcagtggctgctctcaaagcggccaagtatgactacgctggtgtgggtcgtgccacgccgggctccacgaccctgctccagggggctccctgcgcccctggcttcaaggacgacaccaagggcccgctcaacttgaacatgacagtgcaggcggcgggcgttgcctcttgcctgcgaccttcactgcccgacggtaaacggtgcccatgctccccgggccggcctgccgtggggggcggccccggggagggcccgcaagaagcggaaaccctacacgaagcagcagattgcggagttggagaacgaattcctcgtcaacgaattcatcaacaggcagaaacgcaaggaattgtccaataggctgaacctcagcgaccagcaagtcaaaatctggttccagaacaggcgtatgaagaagaagcgcgtggtgcttcgggagcaggcgctggcgctctactagccgcgcgcgtggccagggccgggttggatctgcccttttggacagaggccttgtttggggagggggatctggggctaaggctaaggcttttccttcggttccttctctgctggccccagaagccaccaagagatttacagaccaggccagttgggcctccttgctttcctcagtccctgagaagcccgtgagaaacgtgcggaagtaccagtgcaactctggctggccttaaggcttccacgttgggggactgaggccaactctccttgctcctggctggggcatttgcacccaccgctcattcttgctccccggtacctggatttttctgtttccacccaattcgttctccctttccccctctctccagccccttcagcgtatagcagtcgcctagttagggctcagagtggaaggcctcctgagggaatggaaaggactgtgggtacaattaggtctctgcagcagaagccctttgtggcaaggccaggatcttcactctggagaaaggaaagggcaccatccaccctccaccctcctgtctgccctggctgatttgagagaacaaaagccacactagatcttcagactttgggaggaaaagggagggaaggggaggggctgggtagtggggtaaacttggagatatctcgaaatgagaaatgcgaaataggctggcctatttccagctgggtagaatatgtggaaccttcatttcctgagatgggatgagagagactgggactccagacaagtgccatctccagacaagactggcaaacattgccctactcccaccttctcaaacatgcctaggccaggcctatgaaccctgtaactggatccccagaggctagctctggtgaaaggagctgttggtctgctttgaagctctgttgcacagggagagggaaaaatatccag

SEQ ID NO: 166176 - DNA, 1725 bp, Homo sapiens
  misc_feature (106)..(107): n is a, c, g, or t
  misc_feature (234)..(234): n is a, c, g, or t
atgtgtgagcgcagtctctacagagcgggctatgtgggctcgcttctgaatctgcagtcgccagactctttctacttctccaacctgaggccgaatgcggccagtnnggccttccccctatctcctacccgcgcggccctgccctgggccgccacgcccgcctcctgcgcccccgcgacctgcggcgccactgccttcggcggcttctcgcagccctacctggctggctccgcntctcggctgcagcccccaacagccaaagacggacccgaagagcaggctaagttctatgcgcccgaagcggccgctgggccagaggagcgcggtcgtacccggccgtccttcgcccccgagtctagcctggctcctgcagtggctgctctcaaagcggccaagtatgactacgctggtgtgggtcgtgccacgccgggctccacgaccctgctccagggggctccctgcgcccctggcttcaaggacgacaccaagggcccgctcaacttgaacatgacagtgcaggcggcgggcgttgcctcttgcctgcgaccttcactgcccgacggcctgccgtggggggcggccccggggagggcccgcaagaagcggaaaccctacacgaagcagcagattgcggagttggagaacgaattcctcgtcaacgaattcatcaacaggcagaaacgcaaggaattgtccaataggctgaacctcagcgaccagcaagtcaaaatctggttccagaacaggcgtatgaagaagaagcgcgtggtgcttcgggagcaggcgctggcgctctactagccgcgcgcgtggccagggccgggttggatctgcccttttggacagaggccttgtttggggagggggatctggggctaaggctaaggcttttccttcggttccttctctgctggccccagaagccaccaagagatttacagaccaggccagttgggcctccttgctttcctcagtccctgagaagcccgtgagaaacgtgcggaagtaccagtgcaactctggctggccttaaggcttccacgttgggggactgaggccaactctccttgctcctggctggggcatttgcacccaccgctcattcttgctccccggtacctggatttttctgtttccacccaattcgttctccctttccccctctctccagccccttcagcgtatagcagtcgcctagttagggctcagagtggaaggcctcctgagggaatggaaaggactgtgggtacaattaggtctctgcagcagaagccctttgtggcaaggccaggatcttcactctggagaaaggaaagggcaccatccaccctccaccctcctgtctgccctggctgatttgagagaacaaaagccacactagatcttcagactttgggaggaaaagggagggaaggggaggggctgggtagtggggtaaacttggagatatctcgaaatgagaaatgcgaaataggctggcctatttccagctgggtagaatatgtggaaccttcatttcctgagatgggatgagagagactgggactccagacaagtgccatctccagacaagactggcaaacattgccctactcccaccttctcaaacatgcctaggccaggcctatgaaccctgtaactggatccccagaggctagctctggtgaaaggagctgttggtctgctttgaagctctgttgcacagggagagggaaaaatatccag

SEQ ID NO: 166177 - DNA, 370 bp, Homo sapiens
gcttatgatcggtccggtgtgtcatgaaacagatatcattatatactcactgtagctcagacacagtgcaatgtactgatgtggggttcacatccctcaaccctcaagccatatacacttcctactatattcccctacagaatggaaagccattgctcctctgtgacaaggttcaaaaattacagtaattcttttgaaaaatcagtgtgaaacaccaaatagtcaagtgtgcctacaatgttgttggctgtaggaagtagaaggcagtatgagacacacttccaatctcaactcagaaccagaaaatctctactgaaaagatccatagacatgaatgatcaaatgtttcatctgtttcatgaacatttca

SEQ ID NO: 166178 - DNA, 326 bp, Homo sapiens
tgcgtagcttgtttctccacccagaggaaggcttccattagcatttgtcaaagccaggcaggtctcctgttgaattaaaccagacttagggagggaaagtctgtgtttacagaggaagctgtcctcccacccccgtcattaagaagctctagacaagtgacttttgacagttgtgttgttctgtattccttgtcaacagaagaatggatatgcgttgtgcacataagtatacaattttgcattttacttctgagggtgttgggcccagctatgaaagcttttgtttcggcatttgaggatgccagcagagatttaggaaaataaat

SEQ ID NO: 166179 - DNA, 830 bp, Homo sapiens
tagcctcctgagtggttttgctacctctgttttccccagctccacaatcttgttttccaccaacagagtaatgttttcgaaacataagcttgactctgtcatttattggcttcaagccctccagtatcctcccctctcactcagaatcaaatccagtttcttatcatggccctagggaccagcccgctgcctgtctgccctcaattcccactacccttcctcactccctggcccccagcctcactggcctcctcagtgcctttcctggagcaggctggaaacactccttcctcaggaagcttctccttgttgctccttctgcctggaaccctcagatgcagaccttgctcccttccttccttcaagtctctgctcaaatgccaccttagcagagggccttccctgaccagtctctctaacatagcgcccctggcatccttggaccctttctgatcccaactctgattttgcttactactgactgctacctgtcataattaacttacgtgtttgtttttgcccatctcctgaccattagtaataccccaaggggacctttggtgcctggcacatagtgagtgcttagcagctgggcaggaggtatggcatagtctggaagaggttaatgcaagtggcccctggtcactgcactgcctcttgcctgctgtgtgcttttgggcaactttacttaacctttcttagtttcagttccccctcagtaaaacctacctggaaggttttttaggaggattcgaggtaatacatttaaagtacctgagacatgatcagtgctcagacgggggctacacaggccacttagctgccctcta

SEQ ID NO: 166180 - DNA, 302 bp, Homo sapiens
agtccccctactggccttttcaggcctcgacccttcttggcaagcctcttccctccgctaccacacgacttactctgagcgtaggatctcacctctgctggagagaaaaaggccaatttgtggggagtaggaggcactctatcaactcattgcctcaaaatttttctaaacagctttttacataccataatttacataccgtaaaatttactcatttgaagtgtacaattcaatgatttttagtgtattgacagagttgcacaaccatcaccacatttaatctctgaacgtttccaccacct

SEQ ID NO: 166181 - DNA, 210 bp, Homo sapiens
taagtgtcatgcccttgagcctaggatcggcgatggtttatgccagaatcaagacatacaattcaatctaagatgcacagataggtccagacggggctcacattttagggccactttaaggacatcctcaatttcatatttctgtctcaaaatgccaattatagaaactttcaattcaggtcagttacatctgtaacagagatttagtag

SEQ ID NO: 166182 - DNA, 211 bp, Homo sapiens
taaagagagtttaaaaaataaaacttgatttatcaatattgtttaatgttcgtggttacaattgatggttgaattaataaacggttcttagaaaatttaagactactaaaaccaattatatgtgcatttttttcatgttttagtgtgaaatacggagaaggtgccaaatgaaaaagcatcacaatgccaatcttgggatttatttaccagg

SEQ ID NO: 166183 - DNA, 526 bp, Homo sapiens
tgtggcacgatcatggctcactgcagccttgaactcccaggcccaggagctgggactacagtaggcatgcgccaccacgcctggataatctttgttgtggtggagatggggtctcgataggttgcccaggctggtcccgaattcctggtgatcctctcacctaggcctcccaaagtgctgggatcacagatgtgagccaccacgcccagcccgctttatgtattatacttataatagtaaacataagtatcttcttcatatgccttcattttatctcatgaggaactaaagacaaaaataaatagtcactggaattaaaggcagcaaagggtttcaagcaggagagttctgtgtttttaaactatcactctggctctagaatggagaacaagttgatgcaaggccgaaagctgaggggtgccctaccccatcccccacatgaccaccaaacaactagatcctgcgcaaagctgatcgcaacctctgtgactgtcctcatggaaagaaaagaaaacctgcaagaatc

SEQ ID NO: 166184 - DNA, 313 bp, Homo sapiens
catttcaacagctcttatttccccctacctacagaaacgttatcttataatctttgactgcctttagaatataacctattggggaaatgaagtaggccagaaaaaaaattaagaaaaagtattaattcagcacagtgtagaaatcacgacatttggtctttcatcctgaaatgtaggacaaacttgagcaattcttttctttctgggctacacaagcctcagtcgtctctgaatcatgggagtttgcccttcatgatgagatctgggttttagtcctgacatttgctggatgggtaaccttgggaaaatcact

SEQ ID NO: 166185 - DNA, 736 bp, Homo sapiens
aatgccctatcgggaagtgcatagtgaattacctggaatattggtatgagctcaattaatgttggccattacaattaatgttggcagctactttgtcgagcctctgccttgtacgactccaggggcatcactcacagagagtacaatgtgtctggtgctccagggggcctttcactgtgagttctggatgactggcgccccctgcagttgtgcacaacagccctgtggacctgcatcgctctggaaggagggacagctgtctaggaatccgcaatagcccagggaggtgatggtgaggcctgaacgggggtggaggccgtggggagaaaacctggggaaccagttcagtaacaactttgttatcaatgattcaccattttcgaaagatcagtcagacttaggaccatgtcagtggccccagaagaaaaccaagccaatcagcggtgagagccgctgcacaggaatggctctgtacaggaatggctgcatagttgtggggacccagcacaaaaggaaaacatgggaccccttgttcaaaaattatgaatttcaagacagcaacagcagagcattaaagcacacacagggcacttctaagcatggggctctgtgcacctgcctgggttgcatgccagaagccagccctgtctcagtgctaccatcctacccccagccccaaacgcatcagccagggataggcgagtactggctctcgggcctccagcctgcaagctca

SEQ ID NO: 166186 - DNA, 532 bp, Homo sapiens
tgcttgacacaagaatgaaagagtatggcacattttagatacagtaagcaacttataactggactgtagaatgaaaaaaatgagagaggtaagaaatgaggctgtaaagggaggggacaggatttgcaaggacatgaggccatgctgagtagttgggaagtttattctcttaggtaagtggggttaccagatggattttgaggcttcatatattcaaatgatcacttaagctatttcccagttatctcttctttacattttataaggctttatttcttacaagtagacctttcctttcaatcctttaacccttttctgaatcccctgtaaattctcactttctctcacccagaactaaatacaaaagtctcacaagtagctaactgtactgagtacatggacattgtcccatgcactacatgcttctatttaagtactacaacagcaattattaaaatagctcttctcattatttttggtattcatcagaaggacttaagtttacttgtacagaaataaagtacagaggaat

SEQ ID NO: 166187 - DNA, 522 bp, Homo sapiens
tccacgcagccctgcggggtccccgggactgtgtccttcctcccctcccctctggcctccaaagccttttgggcccagtttcaaccagcagcctggtgcttgtgcccccgctgacacccggcctgccccctgccactctcccaggccccagtccaccagtccctccccgccgatggctccagcctgtacttgggcatcaaccagagaggggatgtgtaccctccctggccttgccaaagcccggcgtgtgcgttcatctgtgggagtggctgcctgaggggctgggggctggagtggggaggggtggaccttgtgccacattccaagcccctgccgttgccggagcatgcccttcaggcagccacgcttgggcgtctgctccccttgcagccacgtgtggaggggctgggaaaccccggctcatctgctgctcaaatcctttccagaggttttctggcagggtggcgacaagggtggagttctcccttgatgcgcccagccacctcccacctctctgtgcca

SEQ ID NO: 166188 - DNA, 515 bp, Homo sapiens
gggaaggatgtatcaaagatgataggttttggccgggtatggtggctcatgcctgtaattccagcactttgggaggcagaggcgggtggatcacttgaggccaggagttcgagaccagcctggccaacatggcaaaaccctgtctctactaaaaaatacaaaaattagctgggcgtgttggcatgcacctgtaatctcagctactctggaggccgagacaggagaatagcttgaacctgggaggtggaagctgcagtgagctgagatcatgccattgcataccagcctgggggacagagcgagactctgtctcaaaaataaataaatagaaaaaatgatagatttattcttgggcaaatcagtagatgatagaaccatttactgaaaaaaaaaaagtgcaggagaacaactttggttgggaagggagttggttagacatgatgactcagttctggaaatgttgagttcgagatgtctatggaataaccacatggaaatatccagacaacaatggg

SEQ ID NO: 166189 - DNA, 512 bp, Homo sapiens
gaaaaacttcatctttggtctagacatttgcagctgacaaccattcaacgatttggtttttttttagtccatggattaaacaatagtgggtcaagaatgctttttgaactttccttgaggaaactagggaaaccaccagtgcagttataattcatactgtgctgcctggccccgtcagccttgccgtgtccatgtgtcaggtcccccagcctacagtggattttccgtttacatcccaggatgatttaggaaatctctccagttttcaacagaaccagctgggtgcagatagggatttcgggataagccactgggtgccttcgcttcttccgtagtgacacccagcaaccctctgtagcagtcacctagtggctgtactccaaggcccatggtgagcccgagctgagaggagagcgataggaagtttcctctctgtaagtcctgcagagagcaactgcaggcaggaccatggtgctatccatctcaggggcctgagaaactgagggctcttc

SEQ ID NO: 166190 - DNA, 629 bp, Homo sapiens
tgttttctcgacttctttgaaatattctttcctgtagttattgtatgcagactattcataaaggctagttcttgagtcacttcaaactcagcattgacttctcaagtatacaacggggcagtattggtaacatttgttgactcaccaaaagccaagcaaagctacttgaaatcatttgccttgttttttaattaactgttggtgttgccacagtgtcctcatgtctccaagcaagtattcttgctgaaaagctagtagtcataaagaagtttttgtttgggcccactttctggttgctacaatcaaacacaattaaattaactctaactcaccatcagtatatagctgtctttgcttggctaacaaatgagccactcagaaagttactttggttacacccttattctaattttttaaattagtagattatgctgtgataagatactacattttaagttttctaattgttctgttgatttcctgtgggttgggaatattgtgatgagtgcttagtctggaaatatatttttgagcacagtgaaagtgtcattgcataataaacacaatgctttgccatatagttctactacaattcacactccactgtgccttaaaagtgcaacactcaa

SEQ ID NO: 166191 - DNA, 306 bp, Homo sapiens
cctaacctcaggggtagacccctccccagactctgcagtaactattcctgggccacatgtcatggagaaaatacgagaaagaactaagatttgttgagctttttactctgcaccaggcattgtgttaggtgatttattttgattaaactgtctcttttcttcttcttcttttttttttttttttttttgggggccaattcggtttggccgaaatgggagtgcagggttttcatctcagctcacgtgcaacctcgtgcctcacggggttacaaggggccagtagggggtgggggatcctcataaagt

SEQ ID NO: 166192 - DNA, 356 bp, Homo sapiens
aaaaaactagaaagtaatgatggttgaaaagattaggatgatttaggtcaacatgttaaatttaagaagagaatgtgacacaaacaaggagccacctggaaaccactgtaaatgcaagtagcacatacttagagtctgcttatttctatacacgtggaagctactatgtacagatggtacatgtgtacaggttgggacaagataaactcccccaaaccagggggagtctaagatcatggttagaagactaaaagatttaagctttattattgaggcactcaaaatgagaaaaaagtttgtgccgacatagcattttttaatactaagacagacatttaagactatctagacaaaaa

SEQ ID NO: 166193 - DNA, 238 bp, Homo sapiens
tgcagtgctgggattccaggtgtgagccactgcgccgggctggtgtactcattcttggttgaagttgccacctcctggtgggtgtcccttgctgcccaggcccctccctacattatctctggaccctttttccttcgcccttggctcctgcctcatttctgtcctcgatcagccctgcatctctcccagccatcacagctttccaggtttctctttcccattcaatgggcgcctctgt

SEQ ID NO: 166194 - DNA, 342 bp, Homo sapiens
aaatgcttctcagagttgtaggatgtctcctggcttctccacatcaacactgagaaacaccactgcataggaaagaaccatggagcactatgcaaccagattctaacttaaaaaagcaatcattgaataaagacaaagcaatcactacagaaggaagacttgaaatgccagttactttactgaagcagtgttcaactgaaatgcccaattataagagcactgcatactccatttcagaagtagccacataatactcaggtattcatgtaacagaagctcagtgattttaacgccagttgtttcagttgctaaaactagtacctacagttggtgttctctgtg

SEQ ID NO: 166195 - DNA, 190 bp, Homo sapiens
ggtactgctaatttacagtgttggcaataaggccaagctctccacctccatccatcttcaagcccaaattattttaggcctctcggaattgacatactagcagaggcaggagtcgttcctaaagaagttatgcatcttcttccccttgacattttcgtaaataaaatgatttctctctcaaatttaactg

SEQ ID NO: 166196 - DNA, 185 bp, Homo sapiens
tgctggaattacaggcacgagcccccgtgcccggcctgattcatcagtacttatactgtactgaacacgagattgggggttcccctgtacatttaaaaaattgatgtgtagtagttatttccttaatagtcacttcactaaagagcaggaggatgttttttggggaatgctgtctgaatgagata

SEQ ID NO: 166197 - DNA, 359 bp, Homo sapiens
gtgtgtgtatgtgtctgatttgttgctaacatttgcaaattaggatttctcacacaaaaatccagatttctagtttttcttggaaaatcataagatgtggcaatgctaaaccatcacaacctcacagcaaccatcaactagaactcgagagtggctgtcccctctaaaccaggcacgggctgacccagtgaccactgtcccactcagcctgcttcactcctccaggttatacacctggctcctgcaggcatttgactttgtgacccctgtactctactagtctaggctgaggcagggtcagtatggcagaggccaaattttagtgagttgacaatcagaaaatgaaattagtaaaacaa

SEQ ID NO: 166198 - DNA, 313 bp, Homo sapiens
gccattatagctgtgtagcgaagacagtgcaaaggcaattaaaaaaatcagaaccaagaaaaacattataaatataaaaggttttcttggagggtctcttgttggatttttactgctgtgttgtttgttgattatattttccctccctaggactaaatttacaaagaagaatttagatttgagctgtttattgctgccttgtcatcagatgtatgaagcccagttgggggtgttatgtgttaaatgccagtagttagtatcttactaaggagtgttcaaatacagctgttcggtgggattctggtaggtatag

SEQ ID NO: 166199 - DNA, 863 bp, Homo sapiens
ggatcccaagaggcccctgaagccccaagagctcccctgattgttccaaagcaacattcccctccatgaacaactcagggaccccctcgatccacggcgtgaggcccaccagcagaggaagaggagcttccagtcctgactcccactaggcgcaggggagccgaggtgagctcccaggcccgccgcatcttcccctcctctttgggtggattaaaacagacttggacagagtctggaaaaacaaactcttttaaaacaagacaaagattgagtctggccaactggctattttcaatccttgctgaacggagtcaagacagtcggtagtaacagcttgtggccatccgcaatcgtcctccccgcacgagagggtggagcctcctggaagtgaccagagccggtgacttcgggaatcaaccctcctgaaacagcggatggcctagtgagcctttccagaactgcagaggggcatttgagtgtggaacatgagtgctgggcacctggaggaatggaggattccccaaagctcgctggatgcacatcccttgctcagcagtccacatcatccgtatctctcatcccacagccgcgggctgcccagccagggccttgcggcaggaggtgggacagatgcagacttcagccccgagtctggcttacttcaggatccctcagggctctctcacctcagaggcagcgtgggaccccaggccacaccttgtttgcaggcctcgcctagatcgtggtaacagccagaactcaacaatttctccaagtcagcctccccgcagcccggagtggggactgagaccaacatgcaccctcatctgcgggcacgcagggacacagcaagtccagagtga

SEQ ID NO: 166200 - DNA, 635 bp, Homo sapiens
ctcttgggagctggggggaaacacatttttctctaccatttttaatcttcttttatttatcaaacttagctcctctttgggtggattaaaacagacttggacagagtctggaaaaacaaactcttttaaaacaagacaaagattgagtctggccaactggctattttcaatccttgctgaacggagtcaagacagtcggtagtaacagcttgtggccatccgcaatcgtcctccccgcacgagagggtggagcctcctggaagtgaccagagccggtgacttcgggaatcaaccctcctgaaacagcggatggcctagtgagcctttccagaactgcagaggggcatttgagtgtggaacatgagtgctgggcacctggaggaatggaggtgagccccccatcctgcggaccctcacagatgggaagtaggaggaggactcgccaggccatgccctcacgcactcttgatccttttaggattccccaaagctcgctggatgcacatcccttgctcagcagtccacatcatccgtatctctcatcccacagccgcgggctgcccagccagggacctgcccagctgtctccacaccctagagcccacctggtactgctcctggatgatttctgggtg

SEQ ID NO: 166201 - DNA, 731 bp, Homo sapiens
ggatcccaagaggcccctgaagccccaagagctcccctgattgttccaaagcaacattcccctccatgaacaactcagggaccccctcgatccacggcgtgaggcccaccagcagaggaagaggagcttccagtcctgactcccactaggcgcaggggagccgagctcctctttgggtggattaaaacagacttggacagagtctggaaaaacaaactcttttaaaacaagacaaagattgagtctggccaactggctattttcaatccttgctgaacggagtcaagacagtcggtagtaacagcttgtggccatccgcaatcgtcctccccgcacgagagggtggagcctcctggaagtgaccagagccggtgacttcgggaatcaaccctcctgaaacagcggatggcctagtgagcctttccagaactgcagaggggcatttgagtgtggaacatgagtgctgggcacctggaggaatggaggtgagccccccatcctgcggaccctcacagatgggaagtaggaggaggactcgccaggccatgccctcacgcactcttgatccttttaggattccccaaagctcgctggatgcacatcccttgctcagcagtccacatcatccgtatctctcatcccacagccgcgggctgcccagccagggacctgcccagctgtctccacaccctagagcccacctggtactgctcctggatgatttctgggtg

SEQ ID NO: 166202 - DNA, 262 bp, Homo sapiens
ccaaaataaagccttcttcacaaaaaggtacaaaatactctcttccttaaaatgttcataaggtttttaagagtgttgaaaattatatgcaagaagcctgaatgactactttagaaatgagtctgtggctcttctcaattatacccattactggaaaaaactaagaacatggacccacaaaaaacagtatctatgtaaaacatgatttccaattttgcttatctcggccccttctagttaaaatttgtatctgtccatcctg

SEQ ID NO: 166203 - DNA, 308 bp, Homo sapiens
gaagttcctaactgcttagcgcagggaacagcccccacaccacacagcatccccaagagcaattagtgccaggcctgagcgcctgccctccattccccctcagcacccccatccccaggagcggagggagggccactgtgctggtgtgaggcaaggggctggcgacctgtgtttttacagttgccttttttggtgatggatgaagtcttggggcagtttattctgggaagctactgtaaaaggcagcagctaagttcaggctccaatcattgtcctgaccccttccccaaaacacagttctcctgatg

SEQ ID NO: 166204 - DNA, 533 bp, Homo sapiens
ccaaaagcacaacccataaaaggaaaaattggtaaactgggcctcatcaaaattagcttttttttgttgttctgtgaaaatccatgagaagaggctaaaaagataagctacagaggaagtacttgcaaaccacatatcctacaaaagactagtatataggatatacataaatagttcttcacaactcaagagtaaaatacaaacaatccaattcaaaaataggcaaaagacataaagagacattacaccaaagagggtatatacggtagcaaataagctcttgaaaagatgtcaacatcattagccattctgtaatgcaaagtaaaaccacaatgaaatgtcactatattcctatcagaaaggctaaaatataaaacaatgataacatcaaatgctggcaatgatgcagagaaactggaccactcatatattgctgctgagaatgtacatggtacagccactctgaaaaacagtttgacagtttcttataaaagtaaacatgtgacccagcatttgtactcatatttatacca

SEQ ID NO: 166205 - DNA, 610 bp, Homo sapiens
accacccagcattgctgccccagacctgcactggtggtcactacacaggggtgactgttggcaatgagcaggcacccagccatggaatttcagtcagcaactcaggagttgcttagcctccagcaagctgccccattgagatgaccaggctcttgggaggaaagaagggtgcaccaggatctaggggttgctaggacaagaagtgaaactgacctgcgttaccctactacccccacctgccagcctggcccaccaggaccctcttcctcaggccactagctttttgtccaagtgtgagtctagtggatcccagatggcctgccccagacacttaggactaggtgggtcaggtgttttctctcctcatgtgtaagtatctacataatgtctttgattttgcttcttggccagcaaaacctaaaatatttatttactctctggccctttacataaaaggtgtacagatctcttcgctagaatatcacaagtctagtctttttcagctattcgacaattcacgtgacttttaagtacgctacttagtggcagcgttctgttgtagaattgtagttcttcacagtctttctgttttttaaatgaatatgaagct

SEQ ID NO: 166206 - DNA, 702 bp, Homo sapiens
ggacagaacagggctgtattgaaactggagaggagcctgcaggagtctccaggagggagggccctctcctaatgatgctggcctgaagaggcctgaggccgaaaggtgagggggcggggctgttcaggacacctggtctgtgtactcacggcctctatctaccctgttcaggggaaccccaaacctgcttttctttctttctcagcctctcctccctcctcacaccctggatgctgagagcagggcccagctctgctctttccacaacatttgggccatgttggcacagagcgggggcctcttgggctatggtggccacactccccgggctaactgagttacctgattcccagcggaaaggtcaggaagggagggaagaaacttgctgagctacaaattcgagactgctggggctttctaggacaggccaccttcctgcaattgtccctctgtgtccccaactccccgcagtcccgcaggccaggaggtgggtgcctgatgagcggtgcttccctcagatgatatgtgggcaccctgaagctctcacgtaatggttctgctgtgccgggttgtgacccagctgtccttggtaggctctcctgtttaatgagcaactgctatatgccaggccctgttctagaaacagatgaggcccctgttcccatggaacttagatctgagtatgtggacagagtgagtagg

SEQ ID NO: 166207 - DNA, 132 bp, Homo sapiens
agaagtagatcgtgctggcatgcgcgcttgtgactggtgagcgattgctatatgccaggccctgttctagaaacagatgaggcccctgttcccatggaacttagatctgagtatgtggacagagtgagtagg

SEQ ID NO: 166208 - DNA, 106 bp, Homo sapiens
tacattttgccatctgatatggtttggctctctgtccccacccaaatcttaccttcaattgtaataacttccatatatcatgggagggacctagtgaaagttacct

SEQ ID NO: 166209 - DNA, 146 bp, Homo sapiens
aattagtctgggatatgagaaagaatccaggtaggaaaaagatgttaaaataatgccaacatttctttggggagaaaagtggttttcacatgaccttctccaatttgagctcgaaactgtataggaatgaaggaagatggaacaac

SEQ ID NO: 166210 - DNA, 106 bp, Homo sapiens
aggcggtgtctaatcttctatttattaagtgaattttctatattagacattgaaattttgatttccagaagtttgattgcatgttttcaaggtttctacttaacat

SEQ ID NO: 166211 - DNA, 294 bp, Homo sapiens
atgttgtccaacctaacagagtctgaatttgtttaacatttacagtaccttagagaggagctcagtgagctcaaatgagacgagaaaggtagccactgggttctgagcagggtctgccacccctttctggaccccaccccctgcccagagtgccagatggcccagctgctgtccttgcctcttccaaaagcttggggaggtcttgctgcatcttcccatgtgggaaactcaggcaggcaggcagccctgccaaccagggaccaaatgcactggcctggaggccatagggtgttc

SEQ ID NO: 166212 - DNA, 402 bp, Homo sapiens
atttagcacacatcagattactagttaagagaaactcactgtactggagatcctggcctcggtgtattcgttggcctcctgttcttttattacattttgaaacaggagtgttatttgattagttttgagatgagtggattagagctgagttgagcaaaggttgctttctctgaagcattcatcttaggacagtgacctgctttccaaaaggcagagctcagactgtaccatatttccaaggatctctatttctaggcaaaattctgaaaattttttgcaaacaataggcagcttagaattaacaatgtttataaggaaatgatgagatatcattcttaggggctcaggttgtcccttcccctttggaatgacatggattaatgtctatacccggtggctggc

SEQ ID NO: 166213 - DNA, 302 bp, Homo sapiens
aatggcatggagaaagacaaacactggtgggtggctctgccagcttcccctggggtgcttctggcgatgcccaggcctttgcacgctcagatctttgcaccccactgttttaacttggagaggagaggaggaagttagctgctctgaatggtgttgctgctaatctctacagcactttcctgtaaattaggaacggtaacacacacacccctcccccaccccgttggagaagccctgcaccagagcatacagtttggcaagtagggggagggctggagcccagcctcacttgccaccctggc

SEQ ID NO: 166214 - DNA, 136 bp, Homo sapiens
  misc_feature (112)..(112): n is a, c, g, or t
  misc_feature (123)..(123): n is a, c, g, or t
  misc_feature (125)..(125): n is a, c, g, or t
acttgtaagacagatgttaaacaaatgatttgaagggtcagtgggatatcaatgtggaacatgaacagaaagaggctagagacagggaggtgacttaaaggcctgtggcgantaaaccagacnangaaagtgatgg

SEQ ID NO: 166215 - DNA, 323 bp, Homo sapiens
atgctaaaagttcttaagtgtccttaaatagcccatgagtataaatattcagttaaatagaaaaaccgcagaacaatgtaagaaaatcgatgtaagagaacaatgattttgtagatgggaattaagattctaatatgcatttgacccagtaaatgaactcttaagaagggatgtctcattgctctctcttgtattgctgtgttttaagcaatggtaaatctaagcaaagaatattacaatcttagctttttaaagcaaattcggaggcttaaaataaaactccattattaatgattctctgtttgctttggccattgacattt

SEQ ID NO: 166216 - DNA, 770 bp, Homo sapiens
ggatctcaaattccctgaagttattcaatttttttcttttcttcttcagtttccaattctcaaattatttcagctatacttacacatgtatttattttacttatttacttatttatttatttatttatttatttattttttgagacagagttttgcctgtcgcccaggctggagtgcgatggcgtgatctcggctcactgcaacctccacctcccgggctcaagctattctcctgcctcagcctccctagtagctgggatttcaagcacacaccaccacgctaggctaatttttgtatttttactatagacggggtttcaccatctcagtttggccaggctggtctcaaagtcctgacctcaagtgatccgcccaccttggcctcccaaagtgctgggattacagccgtgagccattgcacccggcccatttacacgtttaaatgttcaaaaactttctaactgaaatattctgtcttttaactgcaactcattgttccagactttgtctgtgagtgactttaaaatttgaaagctaataaacaacagtatcagttttaattttattaatatttttgtctgctggctggataatgtgacagaattagacttcttttttacacttgatcttagccaaaaggccgagaagctattagacttcttttttatgctttcaatactacaaatcttggcttgttcaaaagggaattttttagcttcaagcaaagtagcttctcttttcttattatccatcagtacttaaaattctgt

SEQ ID NO: 166217 - DNA, 362 bp, Homo sapiens
taccctccccgggtacttgctgctaggaagaatggctgaggcctgaatggcaaatggaggagactggaagatgcatagattgcaaagagatattgcaccccaatccacgctctatacttgtctccagaaatccctgaatttaaatccattgcttcagtttctttttaccatttttaagagactatgagaaatatccttttatggtgttaaagactgtttagtatacaactcctgaagaacagaatttagccataatagacttttggaaaacattgcttacaagagattccactttttctcatattggttatcctaagaataaagtttatagttactacccggggaggggggggtaccgagct

SEQ ID NO: 166218 - DNA, 206 bp, Homo sapiens
tgaggaagcagcagacaagtatacctgaatacaatatcttaacctggaacacgaagacataaggcctacgacttacttaggcatgtgatattgtattcaggtatacttgtctgctgaggaagcagcatggcagataccaaattaattttttagctaccagatgcagccactagcttgtgggttgtaagagcaaatagttctttctc

SEQ ID NO: 166219 - DNA, 3578 bp, Homo sapiens
atacggtgcaacgggtccgcgggactcttggatgcgcggaggtcccgagaccaggtgcgtgtgctaagctcaggtctgagcacggtggatcccatgggtgtggctctgaggaaattgacgcagtggactgctgccggacatggaactggaatcctcgaaatcacccctctaaatgaagcgatattgaaagaaattattgtgtttgtggagagttttatctataaacatcctcaagaggcaaaatttgtttttgtggaaccacttgaatggaacacaagtttggcgccctcagcatttgaatcaggttatgttgtcagtgaaacaacagtcaaatcagaagaagttgataaaaatggacagcctttgctatttctctctgtaccacaaattaaaattaggagctttgggcagctgtcacgcttgttacttattgccaaaactgggaagttgaaggaagcccaagcatgtgttgaagctaacagagaccccatagtaaaaatcctgggctctgattataatacaatgaaagaaaactcaattgcattaaatattcttggcaaaattaccagagatgatgatcctgaaagtgaaattaagatgaagattgctatgctgcttaagcaattggatctgcacctcctcaatcattctctaaaacatatttcattagaaataagtttaagtcccatgacggtgaagaaggatatagaactgctcaaacgtttctcaggaaaaggaaaccaaacagtcttggaatctattgaatatacctcagattatgaattttcaaatggatgtcgagccccaccgtggagacaaattcgtggggaaatttgttatgtgctggtgaaacctcacgatggtgagactctgtgcattacttgcagtgcaggaggagtatttttaaatggtggcaaaacagatgatgaaggggacgttaattatgagagaaaaggttcaatttataaaaaccttgtcacatttttaagagaaaaatcaccaaaattttcagaaaatatgtctaaattgggaattagcttcagtgaagaccagcaaaaggaaaaggatcagcttggcaaagcccccaagaaggaagaagcagctgccctccgcaaagacatttctggttcagacaaaaggtcactggagaagaaccaaattaatttttggaggaatcaaatgaccaagagatgggaaccaagcttaaactggaagaccactgttaattacaaaggcaaaggctcagcaaaagaaatccaagaggacaaacacacaggaaaacttgaaaaaccaagaccatctgtttcacacggaagagcacaattacttcggaagagtgctgaaaagattgaggaaactgttagcgatagctcctcagaaagtgaggaagatgaagaaccacctgaccatcgtcaggaagcaagtgcagatttgccatcagaatattggcaaattcagaagctggtgaaatatttaaagggaggaaatcaaacagctacagtgattgcgttgtgttcaatgagggatttcagcttagctcaagaaacctgccagttggccatcagagatgttggaggcctggaagtgctgataaatttgcttgaaaccgatgaagtcaaatgtaagattggttcattaaaaatactgaaggaaatcagtcataatcctcaaatcagacagaatattgttgaccttgggggcttaccaattatggtgaatatacttgattctccacacaagagtctaaaatgtttggcagccgagactatcgcgaatgttgccaagtttaaaagagcacggcgggtggtgaggcagcacgggggtatcaccaaactggttgctctactagactgtgcacatgattccacaaaacctgcccaatcgagtctgtatgaggccagagacgtggaagtggctcgctgtggggcactggccctgtggagctgcagtaagagtcatacgaataaagaagccatccgcaaagctgggggcattcctctgttggctcggctgctgaagacttctcatgaaaacatgctaattccagtggtggggacattgcaagagtgtgcatcagaggaaaactaccgggctgcaatcaaagcagaaaggatcattgaaaaccttgtcaagaacctaaatagtgagaatgagcagctgcaggagcactgcgccatggccatttaccagtgtgctgaagataaggaaacccgggacctcgttaggctgcacggaggacttaagcccttggccagtctactcaataacactgacaataaagagcggttagctgctgtcacaggggctatatggaaatgttccatcagcaaagagaatgttaccaagtttcgggaatacaaagccattgaaaccttggtgggacttctaacagatcagcctgaagaagtacttgtgaatgtggttggggccttgggagaatgctgccaagaacgtgaaaaccgagtcattgtccggaaatgtggtggcattcaaccacttgtgaacctccttgttggaataaaccaagctcttcttgtgaatgttacaaaagcagttggtgcttgtgcagtagaacctgaaagtatgatgataattgatcgcttagatggagttcgtttgttgtggtccctgctgaaaaatcctcacccagacgtgaaggccagcgcagcatgggcactctgtccatgcatcaaaaatgcaaaggatgctggggaaatggttcgttcctttgttggtggtttggaacttattgtcaatttactgaaatcagataacaaagaagttctggcaagtgtatgtgctgccattaccaacatagcaaaagatcaagaaaatttagctgttatcacagatcatggagttgttcctttattgtccaaactggcaaatacaaataacaataaattgagacatcatctagcagaagctatttcacgttgctgtatgtggggcaggaatagagtggccttcggtgagcacaaagcagtggctccactagtgcgttatctgaaatcaaatgacaccaacgtgcatcgggcgacagctcaggccttgtaccaactctcagaagacgccgataactgcatcaccatgcatgagaatggtgcagtaaagcttctactggatatggttgggtcccctgaccaggatctccaggaagctgcagctggttgtatatccaatatccgcaggctggctcttgctacagagaaggcaagatacacttgaaatttaaatggacattacaagctatcaaattctacatgacacaggacatgtcactcccatggccagaaagcctaaattgggaaacagttgttagcaaaccctttcaaccatctaaatgaaaacacacaaattgaaaatgcacagaatgtttttcatctgaaaattgcatggagacttttgtttctatttaatgttttcgagatatgacatgtgataagatggaaagccaataaacctgtgataagtttctaagaatatgagaatatacgtatatgatgtatttttagttcagtgatgcttttgtatttgtggcgattttaataaaggatatggccttcccaaaaaaaaaa

SEQ ID NO: 166220 - DNA, 2742 bp, Homo sapiens
agagtagaggagagcggagagaaggaagctctcacttctctgctgaacagcagagtgccttacatgcatataggagggcaaaacagatgatgaaggggacgttaattatgagagaaaaggttcaatttataaaaaccttgtcacatttttaagagaaaaatcaccaaaattttcagaaaatatgtctaaattgggaattagcttcagtgaagaccagcaaaaggaaaaggatcagcttggcaaagcccccaagaaggaagaagcagctgccctccgcaaagacatttctggttcagacaaaaggtcactggagaagaaccaaattaatttttggaggaatcaaatgaccaagagatgggaaccaagcttaaactggaagaccactgttaattacaaaggcaaaggctcagcaaaagaaatccaagaggacaaacacacaggaaaacttgaaaaaccaagaccatctgtttcacacggaagagcacaattacttcggaagagtgctgaaaagattgaggaaactgttagcgatagctcctcagaaagtgaggaagatgaagaaccacctgaccatcgtcaggaagcaagtgcagatttgccatcagaatattggcaaattcagaagctggtgaaatatttaaagggaggaaatcaaacagctacagtgattgcgttgtgttcaatgagggatttcagcttagctcaagaaacctgccagttggccatcagagatgttggaggcctggaagtgctgataaatttgcttgaaaccgatgaagtcaaatgtaagattggttcattaaaaatactgaaggaaatcagtcataatcctcaaatcagacagaatattgttgaccttgggggcttaccaattatggtgaatatacttgattctccacacaagagtctaaaatgtttggcagccgagactatcgcgaatgttgccaagtttaaaagagcacggcgggtggtgaggcagcacgggggtatcaccaaactggttgctctactagactgtgcacatgattccacaaaacctgcccaatcgagtctgtatgaggccagagacgtggaagtggctcgctgtggggcactggccctgtggagctgcagtaagagtcatacgaataaagaagccatccgcaaagctgggggcattcctctgttggctcggctgctgaagacttctcatgaaaacatgctaattccagtggtggggacattgcaagagtgtgcatcagaggaaaactaccgggctgcaatcaaagcagaaaggatcattgaaaaccttgtcaagaacctaaatagtgagaatgagcagctgcaggagcactgcgccatggccatttaccagtgtgctgaagataaggaaacccgggacctcgttaggctgcacggaggacttaagcccttggccagtctactcaataacactgacaataaagagcggttagctgctgtcacaggggctatatggaaatgttccatcagcaaagagaatgttaccaagtttcgggaatacaaagccattgaaaccttggtgggacttctaacagatcagcctgaagaagtacttgtgaatgtggttggggccttgggagaatgctgccaagaacgtgaaaaccgagtcattgtccggaaatgtggtggcattcaaccacttgtgaacctccttgttggaataaaccaagctcttcttgtgaatgttacaaaagcagttggtgcttgtgcagtagaacctgaaagtatgatgataattgatcgcttagatggagttcgtttgttgtggtccctgctgaaaaatcctcacccagacgtgaaggccagcgcagcatgggcactctgtccatgcatcaaaaatgcaaaggatgctggggaaatggttcgttcctttgttggtggtttggaacttattgtcaatttactgaaatcagataacaaagaagttctggcaagtgtatgtgctgccattaccaacatagcaaaagatcaagaaaatttagctgttatcacagatcatggagttgttcctttattgtccaaactggcaaatacaaataacaataaattgagacatcatctagcagaagctatttcacgttgctgtatgtggggcaggaatagagtggccttcggtgagcacaaagcagtggctccactagtgcgttatctgaaatcaaatgacaccaacgtgcatcgggcgacagctcaggccttgtaccaactctcagaagacgccgataactgcatcaccatgcatgagaatggtgcagtaaagcttctactggatatggttgggtcccctgaccaggatctccaggaagctgcagctggttgtatatccaatatccgcaggctggctcttgctacagagaaggcaagatacacttgaaatttaaatggacattacaagctatcaaattctacatgacacaggacatgtcactcccatggccagaaagcctaaattgggaaacagttgttagcaaaccctttcaaccatctaaatgaaaacacacaaattgaaaatgcacagaatgtttttcatctgaaaattgcatggagacttttgtttctatttaatgttttcgagatatgacatgtgataagatggaaagccaataaacctgtgataagtttctaagaatatgagaatatacgtatatgatgtatttttagttcagtgatgcttttgtatttgtggcgattttaataaaggatatggccttcccaaaaaaaaaa

SEQ ID NO: 166221 - DNA, 4053 bp, Homo sapiens
agcggagtttggcggctgtggggatttgccggaaggttaataatgtccatgggcacatcggcctcctcctttcttattctctcccaagtgtaattccaggacgccccctgagcgcagattcatccaggcatttggcctagaggcccgcggaggagaaataaagtacaggcctggtaggacctttgagaacctgggcttcagctacaaaaccagagccccagtccttcatctgctgtctcctcaagctcttttcagtgtattgtggagttcattaccactctaagctcgcacggaagtgtacaccagcttcgtgatcttaaaagcaaaacaaaatcaaatggactaggaattaacttgaagcagagttgtgacacttaagtggtttcttgccatcagtttccacgcactgctttaagatgcaattttacaagggtccttcaagaagttactatatgaatgcacttggggaaaccagagctaccagaatcatgttcttcagtcatcattgtgatgatgcagatattgtcacttgcgtgtgctaagctcaggtctgagcacggtggatcccatgggtgtggctctgaggaaattgacgcagtggactgctgccggacatggaactggaatcctcgaaatcacccctctaaatgaagcgatattgaaagaaattattgtgtttgtggagagttttatctataaacatcctcaagaggcaaaatttgtttttgtggaaccacttgaatggaacacaagtttggcgccctcagcatttgaatcaggttatgttgtcagtgaaacaacagtcaaatcagaagaagttgataaaaatggacagcctttgctatttctctctgtaccacaaattaaaattaggagctttgggcagctgtcacgcttgttacttattgccaaaactgggaagttgaaggaagcccaagcatgtgttgaagctaacagagaccccatagtaaaaatcctgggctctgattataatacaatgaaagaaaactcaattgcattaaatattcttggcaaaattaccagagatgatgatcctgaaagtgaaattaagatgaagattgctatgctgcttaagcaattggatctgcacctcctcaatcattctctaaaacatatttcattagaaataagtttaagtcccatgacggtgaagaaggatatagaactgctcaaacgtttctcaggaaaaggaaaccaaacagtcttggaatctattgaatatacctcagattatgaattttcaaatggatgtcgagccccaccgtggagacaaattcgtggggaaatttgttatgtgctggtgaaacctcacgatggtgagactctgtgcattacttgcagtgcaggaggagtatttttaaatggtggcaaaacagatgatgaaggggacgttaattatgagagaaaaggttcaatttataaaaaccttgtcacatttttaagagaaaaatcaccaaaattttcagaaaatatgtctaaattgggaattagcttcagtgaagaccagcaaaaggaaaaggatcagcttggcaaagcccccaagaaggaagaagcagctgccctccgcaaagacatttctggttcagacaaaaggtcactggagaagaaccaaattaatttttggaggaatcaaatgaccaagagatgggaaccaagcttaaactggaagaccactgttaattacaaaggcaaaggctcagcaaaagaaatccaagaggacaaacacacaggaaaacttgaaaaaccaagaccatctgtttcacacggaagagcacaattacttcggaagagtgctgaaaagattgaggaaactgttagcgatagctcctcagaaagtgaggaagatgaagaaccacctgaccatcgtcaggaagcaagtgcagatttgccatcagaatattggcaaattcagaagctggtgaaatatttaaagggaggaaatcaaacagctacagtgattgcgttgtgttcaatgagggatttcagcttagctcaagaaacctgccagttggccatcagagatgttggaggcctggaagtgctgataaatttgcttgaaaccgatgaagtcaaatgtaagattggttcattaaaaatactgaaggaaatcagtcataatcctcaaatcagacagaatattgttgaccttgggggcttaccaattatggtgaatatacttgattctccacacaagagtctaaaatgtttggcagccgagactatcgcgaatgttgccaagtttaaaagagcacggcgggtggtgaggcagcacgggggtatcaccaaactggttgctctactagactgtgcacatgattccacaaaacctgcccaatcgagtctgtatgaggccagagacgtggaagtggctcgctgtggggcactggccctgtggagctgcagtaagagtcatacgaataaagaagccatccgcaaagctgggggcattcctctgttggctcggctgctgaagacttctcatgaaaacatgctaattccagtggtggggacattgcaagagtgtgcatcagaggaaaactaccgggctgcaatcaaagcagaaaggatcattgaaaaccttgtcaagaacctaaatagtgagaatgagcagctgcaggagcactgcgccatggccatttaccagtgtgctgaagataaggaaacccgggacctcgttaggctgcacggaggacttaagcccttggccagtctactcaataacactgacaataaagagcggttagctgctgtcacaggggctatatggaaatgttccatcagcaaagagaatgttaccaagtttcgggaatacaaagccattgaaaccttggtgggacttctaacagatcagcctgaagaagtacttgtgaatgtggttggggccttgggagaatgctgccaagaacgtgaaaaccgagtcattgtccggaaatgtggtggcattcaaccacttgtgaacctccttgttggaataaaccaagctcttcttgtgaatgttacaaaagcagttggtgcttgtgcagtagaacctgaaagtatgatgataattgatcgcttagatggagttcgtttgttgtggtccctgctgaaaaatcctcacccagacgtgaaggccagcgcagcatgggcactctgtccatgcatcaaaaatgcaaaggatgctggggaaatggttcgttcctttgttggtggtttggaacttattgtcaatttactgaaatcagataacaaagaagttctggcaagtgtatgtgctgccattaccaacatagcaaaagatcaagaaaatttagctgttatcacagatcatggagttgttcctttattgtccaaactggcaaatacaaataacaataaattgagacatcatctagcagaagctatttcacgttgctgtatgtggggcaggaatagagtggccttcggtgagcacaaagcagtggctccactagtgcgttatctgaaatcaaatgacaccaacgtgcatcgggcgacagctcaggccttgtaccaactctcagaagacgccgataactgcatcaccatgcatgagaatggtgcagtaaagcttctactggatatggttgggtcccctgaccaggatctccaggaagctgcagctggttgtatatccaatatccgcaggctggctcttgctacagagaaggcaagatacacttgaaatttaaatggacattacaagctatcaaattctacatgacacaggacatgtcactcccatggccagaaagcctaaattgggaaacagttgttagcaaaccctttcaaccatctaaatgaaaacacacaaattgaaaatgcacagaatgtttttcatctgaaaattgcatggagacttttgtttctatttaatgttttcgagatatgacatgtgataagatggaaagccaataaacctgtgataagtttctaagaatatgagaatatacgtatatgatgtatttttagttcagtgatgcttttgtatttgtggcgattttaataaaggatatggccttcccaaaaaaaaaa

SEQ ID NO: 166222 - DNA, 2623 bp, Homo sapiens
agcggagtttggcggctgtggggatttgccggaaggttaataatgtccatgggcacatcggcctcctcctttcttattctctcccaagtgtaattccaggacgccccctgagcgcagattcatccaggcatttggcctagaggcccgcggaggagaaataaagtacaggcctggtaggacctttgagaacctgggcttcagctacaaaaccagagccccagtccttcatctgctgtctcctcaagctcttttcagtgtattgtggagttcattaccactctaagctcgcacggaagtgtacaccagcttcgtgatcttaaaagcaaaacaaaatcaaatggactaggaattaacttgaagcagagttgtgacacttaagtggtttcttgccatcagtttccacgcactgctttaagatgcaattttacaagggtccttcaagaagttactatatgaatgcacttggggaaaccagagctaccagaatcatgttcttcagtcatcattgtgatgatgcagatattgtcacttgcgtgtgctaagctcaggtctgagcacggtggatcccatgggtgtggctctgaggaaattgacgcagtggactgctgccggacatggaactggaatcctcgaaatcacccctctaaatgaagcgatattgaaagaaattattgtgtttgtggagagttttatctataaacatcctcaagaggcaaaatttgtttttgtggaaccacttgaatggaacacaagtttggcgccctcagcatttgaatcaggttatgttgtcagtgaaacaacagtcaaatcagaagaagttgataaaaatggacagcctttgctatttctctctgtaccacaaattaaaattaggagctttgggcagctgtcacgcttgttacttattgccaaaactgggaagttgaaggaagcccaagcatgtgttgaagctaacagagaccccatagtaaaaatcctgggctctgattataatacaatgaaagaaaactcaattgcattaaatattcttggcaaaattaccagagatgatgatcctgaaagtgaaattaagatgaagattgctatgctgcttaagcaattggatctgcacctcctcaatcattctctaaaacatatttcattagaaataagtttaagtcccatgacggtgaagaaggatatagaactgctcaaacgtttctcaggaaaaggaaaccaaacagtcttggaatctattgaatatacctcagattatgaattttcaaatggatgtcgagccccaccgtggagacaaattcgtggggaaatttgttatgtgctggtgaaacctcacgatggtgagactctgtgcattacttgcagtgcaggaggagtatttttaaatggtggcaaaacagatgatgaaggggacgttaattatgagagaaaaggttcaatttataaaaaccttgtcacatttttaagagaaaaatcaccaaaattttcagaaaatatgtctaaattgggaattagcttcagtgaagaccagcaaaaggaaaaggatcagcttggcaaagcccccaagaaggaagaagcagctgccctccgcaaagacatttctggttcagacaaaaggtcactggagaagaaccaaattaatttttggaggaatcaaatgaccaagagatgggaaccaagcttaaactggaagaccactgttaattacaaaggcaaaggctcagcaaaagaaatccaagaggacaaacacacaggaaaacttgaaaaaccaagaccatctgtttcacacggaagagcacaattacttcggaagagtgctgaaaagattgaggaaactgttagcgatagctcctcagaaagtgaggaagatgaagaaccacctgaccatcgtcaggaagcaagtgcagatttgccatcagaatattggcaaattcagaagctggtgaaatatttaaagcaaaaggaaacaagtcaaaatggcagaaacaaaagatggatcaggaagcagaataccagagtgattagaagcatgatctttgacgttggaaagaccagttgagttgaaattctgccgcttactcaatggccttgggtgatgatgctgtaccctaattctaaaggaagcaatgaacccccttttcagctaccttactgataagcacttatgttctgccttctgctatcctgatggttcgggttgtctgtcttactatctacttcttgagtagagagaccacattaaatttattgctgtatctcacagggcatcttgctagtgtgcacaggctcgcctccctacctctgccccgatggtgtgaaggggagagggcgaggttccttagtggcagggctttgctgttcttcactctcagccccctgaaagcagttcttcctgcctctgagcctgtctttccttctgctgttaacttctttcctacttttcttgcatccctctcccttccttttcctgccgtctttcttgtagacatactagttgattgctgtatttgctgactttatatggatattattttttcctctggccaaaattgttttaaaatcttgcaaggaaaatgtcttgcttttgatcacttccagcgattaaaggagatggtttgttaatgtc

SEQ ID NO: 166223 - DNA, 343 bp, Homo sapiens
ttttctgagatgtttgggctgaggatgtggtttacaaatatgattgatgtaaatattagagccatgttaagaaaatactatcttggtgggcttacatttcttgtgggaaggaaatgtataagctcccaaatctggaggaaggttttttgtagggttttgtttctttgctttccgtggctgctatggagtacgaaaagtgattttttaaagcattcttgtttttgacggaggtgagcttggtaaggaacactgtagctattgaagaatgccttaaatgttctttttaagatttccatgaacattggatttatctattattataggttgctctactagactgtgc

SEQ ID NO: 166224 - DNA, 2088 bp, Homo sapiens
agcggagtttggcggctgtggggatttgccggaaggttaataatgtccatgggcacatcggcctcctcctttcttattctctcccaagtgtaattccaggacgccccctgagcgcagattcatccaggcatttggcctagaggcccgcggaggagaaataaagtacaggcctggtaggacctttgagaacctgggcttcagctacaaaaccagagccccagtccttcatctgctgtctcctcaagctcttttcagtgtattgtggagttcattaccactctaagctcgcacggaagtgtacaccagcttcgtgatcttaaaagcaaaacaaaatcaaatggactaggaattaacttgaagcagagttgtgacacttaagtggtttcttgccatcagtttccacgcactgctttaagatgcaattttacaagggtccttcaagaagttactatatgaatgcacttggggaaaccagagctaccagaatcatgttcttcagtcatcattgtgatgatgcagatattgtcacttgcgtgtgctaagctcaggtctgagcacggtggatcccatgggtgtggctctgaggaaattgacgcagtggactgctgccggacatggaactggaatcctcgaaatcacccctctaaatgaagcgatattgaaagaaattattgtgtttgtggagagttttatctataaacatcctcaagaggcaaaatttgtttttgtggaaccacttgaatggaacacaagtttggcgccctcagcatttgaatcaggttatgttgtcagtgaaacaacagtcaaatcagaagaagttgataaaaatggacagcctttgctatttctctctgtaccacaaattaaaattaggagctttgggcagctgtcacgcttgttacttattgccaaaactgggaagttgaaggaagcccaagcatgtgttgaagctaacagagaccccatagtaaaaatcctgggctctgattataatacaatgaaagaaaactcaattgcattaaatattcttggcaaaattaccagagatgatgatcctgaaagtgaaattaagatgaagattgctatgctgcttaagcaattggatctgcacctcctcaatcattctctaaaacatatttcattagaaataagtttaagtcccatgacggtgaagaaggatatagaactgctcaaacgtttctcaggaaaaggaaaccaaacagtcttggaatctattgaatatacctcagattatgaattttcaaatggatgtcgagccccaccgtggagacaaattcgtggggaaatttgttatgtgctggtgaaacctcacgatggtgagactctgtgcattacttgcagtgcaggaggagtatttttaaatggtgtaagtaaatttttaaaaacgtaactaaagccagtggactttgattgttagctgtagatgtctcaagggtgtgtcccaatgaccacagagaatgaattaccattctgtgggatagaagcagattcctttgatatatgcttgctgggcaaatccaaaatagcttcagaattagctctcttattctccactgcaggtcattaagccaatctgataagaaatgggcttcaaagtgacccattccactttataaatgtctttaacgtaatcacttcactgattcattacacagcttccaaatgatagaaaggtcaaaaaagaaacattgagataatacagatgtcataactgcagcttgcatcctaagagttggagggacaaagggaaagagaggggcttatctaaatgtagaaggtaggagacagtgccctatgaagctgggacccagacctcttgggagggtccacttccaggctgtgctggtccccacagagttcagaccatctccatgaggcagggctccagatctctgaagagtgggcactgcccagttaatgctcatacctcgggaagaggatccttgtagagatggcagagctgggacctggacctttgaaaatggagcactggatgactgatagtgatatttcccagggggtgaggtgagcctgtttctgggaccgtgaaaaatcaacaaacctgga

SEQ ID NO: 166225 - DNA, 434 bp, Homo sapiens
tctttttttcaaaaattgggttgtctttattattgatctatagaagatataattatgttagatataaatattagaaatattttttccagtctatggcttgcttatcatttttaatctatatttttgatgtacagaatacttaatttttgatgttcaattttatcaattttttcttttgtgtgctttttgtattctgactaattttgtgaggtttcttgtcctgtatttgcagccaagtttttctattttgttgttgttgttgattataaagtgcttgtgctcagaagtttctttattttacttttctatttattactgaactgtgacattttattttaacctcctttatttacacattctacatttctccttcgaggtattttcttaaaaaatcatagagtcatttatctcttattattaaaaaatattttccc

SEQ ID NO: 166226 - DNA, 203 bp, Homo sapiens
ggagttttttaggaagataaatccagcagtggtgtgtcagctgaattagaggaggagaaaagaagccatttaggagtactttaattgtttagatgtgagaggctgaatgtttgggttaagatgttagttgtcagaatcatgagaaaaggttttaagcaagaggcatttctaattctaaaaataacaactactgttatttattg

SEQ ID NO: 166227 - DNA, 431 bp, Homo sapiens
gtgaaatggtgcagctgctttggagaacaaaacttgtagacaagtcaaacagttgttaagtggaatcagaaacacgtatttcgtctttgtctccatttgaagatcctggctggcatacagctcctaaaaccctcagaatttcctaagtgatgaatgtctgtttaatgctactgagtcgattggtggctcctgtagtttcaggagggggatagtcaccagaaagaccaaggtgtgattagaggggtggaactttcagcctcaccccctcaacctccaggtaaagcagagaggacagagagtaagccaatcatcaaaggccaataatgtaatcaatcatgcctaagtatgaaacctccataaaaaccccttaagtgtcagggtttggacagctctgagttgaaaaacacatcttcatgccaggaggctggtgt

SEQ ID NO: 166228 - DNA, 373 bp, Homo sapiens
  misc_feature (367)..(367): n is a, c, g, or t
tgtgtgaccctgaaacaaattttaaaaatacaatgcaaagtcccaaagaaatgacagttacacatccattgttttgggcaatctctgggatggcttctaccctaccctttatgaacctacacagaaaatacagagtggactctgtctagtttccttaacattttagtaatttcagggagagtcttcctatcacaagtgtactcacacttgccttttaaattcaaaatactaccaattccttcttcctattataagaagcttagagtgaaatgaaaatattcttcatggcaccatctaataccaccattatccttttgttgtatttcctttcaatttttatacatttgtttcatgacacccggaccgngctcga

SEQ ID NO: 166229 - DNA, 1125 bp, Homo sapiens
gaaatagtgggagatggagaagagtgaatgagtttctcccactctatactaatctcactatttgtattgagcccaaaataactatgaaaggagacaaaaatttgtgacaaaggattgtgaagagctttccatcttcatgatgttatgaggattgttgacaaacattagaaatatataatggagcaattgtggatttcccctcaaatcagatgcctctaaggactttcctgctagatatttctggaaggagaaaatacaacatgtcatttatcaacgtccttagaaagaattcttctagagaaaaagggatctaggaatgctgaaagattacccaacataccattatagtctcttctttctgagaaaatgtgaaaccagaattgcaagactgggtggactagaaagggagattagatcagttttctcttaatatgtcaaggaaggtagccgggcatggtgccaggcacctgtaggaaaatccagcaggtggaggttgcagtgggcaccatctcagctcactgagggtccggctctttgggttcaagtgattctcctgccttgttcctcctgagtcgctggtattcacaggtgcttgccatcaaaacccaagctaatatagagtcctgatagaaggacacggggtttcctccatgtggggcaaggctgtgtctcaaggctccttgacctcaagtgacctaaccaaccctgtggcctccccaacagtggttggaaggccacgtgaactggttcaggaaatactttttattggagaatgcagtctttgacactcatacacggcaggtggagtgaaagggggaaatctgggtacatggacctccactacggagtcaaggcgatcatcttcctcaggaccccaggtagctggattaagggtgggcccaccagaaacagctaactgggactcacagaaacgggttcgccaggtacagggtggtccaaagccagccatggagatcaccactggtcaaaaggtagatacgggggagccacgccgccaaacttcaaagaggacggcgcaacaccgtgcgcggggcacgtgtacaggagccatcagagaaacgtagcgcaggaggcaaatcaggagggaaaacaacacgtggagaa

SEQ ID NO: 166230 - DNA, 588 bp, Homo sapiens
gaaatagtgggagatggagaagagtgaatgagtttctcccactctatactaatctcactatttgtattgagcccaaaataactatgaaaggagacaaaaatttgtgacaaaggattgtgaagagctttccatcttcatgatgttatgaggattgttgacaaacattagaaatatataatggagcaattgtggatttcccctcaaatcagatgcctctaaggactttcctgctagatatttctggaaggagaaaatacaacatgtcatttatcaacgtccttagaaagaattcttctagagaaaaagggatctaggaatgctgaaagattacccaacataccattatagtctcttctttctgagaaaatgtgaaaccagaattgcaagactgggtggactagaaagggagattagatcagttttctcttaatatgtcaaggaaggtagccgggcatggtgccaggcacctgtaggaaaatccagcaggtggaggttgcagtgagccaagattatgccattgcactccagcctgggtgacaaagcaagactccatctcaaaaaaaaaaaaaaatcagggagggttaaagg

SEQ ID NO: 166231 - DNA, 832 bp, Homo sapiens
tctggaacccccagtagggaacaactccttttccccaacaaagggcatgctgccccacctccactcctttgcccaggctggtctctttggctggaatgctcaccttcccactgcccaccccaccatcttgagcctgtgtctagacacaggaagatggaggactgaggacttttcctgtgactcagaccacaggacaggaatgcatttttccaagatgagccaccagcattcctttggagaagtcagggtttgtcaggtcagtccaacttgctgtgagcacactaaatataggtactaagaacatgtcttttaggaaggggatggaaggaagggaagggaggcaccgtgagagggtgttggaaaggactgagcacttcagccagttgatttacaggcaaggtcatttccaagtccttacttacaaggttgggccctttggctatttcttttccaaagttaaattttcctttctgcaaagggcacaaagagaatttttagtttcattaaaggctgactcctcaaagtttatatagtcaaggaccatttttttttttaatctaggaaatttcctgaagaaaatatttgactttgtagtcgtatttggctttgagtataagaattataaaacagcagcaggccaggcatggtagctcatgctcacacctcccagcactttgggaggccgaagtgggtggatcacctgaggccaggagttcgagaccagcctggccaacatggtgaaaccttgtctctactaaaaatacaaaaattagccaggcatggtggtgcatgcctataatcccagctatttgggaggctgagacaggagaat

SEQ ID NO: 166232 - DNA, 245 bp, Homo sapiens
gccttcaccctcctgctggaagaaaagaccccaaccctcctcccttctgaggccagagcacctggtgctctgaattctgaacccctgcccccccacttccttagacacctcagcccaatgtttatccctcctgctctccaggctctcagaattctttttattttctttttattttttttgtctttggttgttgttgctatttctggggccgctcccgcggcatatggaggttcccaggctagggg

SEQ ID NO: 166233 - DNA, 610 bp, Homo sapiens
gggaagatgtgctgatgacagtcctgcacgcggaaggtggaaggtgcagttgcccttctctcaagactcagctcaacaactatattttctggtctgcctctcccagctgctttaacttacatactaatgtaatcaagttcacagcacccgccttaacatgaaattacatgctctcatatattgctaattcacttctcactagatttacgtggtctccctgaaacactttaagctcctaattacagagtcatgtctcccacatgctatgtctcagagtatgatggagaatgctgacataccaggccttaaagtgaggtggtgttggtagattcgtggccaatctttattttgccaaagcagcagtcagcagaaggtggtgggaaaatagcatttcaggctcagtaagcatctgtttagattaccagggagaagccaactctcagtttgtacctgggcttcctgatgtggatttacagctcaacagcaagttgtggatccaacagctgaatagaaaagtttggggagtttctgtcctccaaccagatgcacaaaaagcaccgtgtctattcagattgtttcagcataaatggagcatttataaaatggaggg

SEQ ID NO: 166234 - DNA, 364 bp, Homo sapiens
caaagttttttgttcccctttggccttgataccatctttcgttttattaaagttgattatggttcctctgtcttgtccctagccagacaaaggcttaggagaagtcaaaggacgtgttaattatgtttcttgtaaactgacttttcatttccccctaacacatttagttggcttggtgtttagtttaacaatcaattgctacaaatatgctgcttaaaaatgctgcttttattaaaacaaataaatgaattcaaagacctttctaatttcaactcgtgtgggctagaaacagaagagaaaatcgaaagcaagagagagggaaaggcggcagggaggggagagaaaggagaccaggaaacacaca

SEQ ID NO: 166235 - DNA, 370 bp, Homo sapiens
tatggactacattctatactactctcagaggtcaaagtgttgtgccccattcctctgcttgacaaaaaccgtacttacctttcaaagctcacttcaagttaagctaagctattcctgataaccccctcttctgtctcccacaaacttcagttatacctctagtatggcatttattattgtttcctatgacactgattcatgtataggtaacctcttctctttattaggctgaaggctctacggggaccaacactgatttagtactacttgtttactttatggtactaagtgcatggcatgtattagataaatgtacgctaaactgaacctatgaaactactggactcaacagcagtcaacttggtattta

SEQ ID NO: 166236 - DNA, 642 bp, Homo sapiens
tgtggcacctttgtgaattttaacaagcttctgctttgcagctcatacatgatcatgtctcataccatcaggacctctcgctggaaccttcttccgcagacttaacttcctccactggattatgcttttgtgttatattcccaatttttcaaagttcatttattctttcaacattgaaaaattatttatcagatatctcctgtgggccagggactgttaagaggtgctgcggatatagcaatgaacaaaatagacagaatccattcttttactgaaacggcagtctagtggagggagacaataacaacacaaaaattgtcacatggtggtaagtgtggtggagaaaaataaaatacactctaatgaatttcattttttttcttctgttttttgtaaaggtgggatcttgctatgttgtccatgctggtctcgaactcctggactcaggccatcttcctgcctttgcctcccaaagtgctgggattataggtgtggccaccatgcctggcaaagacaactgtcttaattgaaaaaagtgacatttggctgggtgtggtggcccacgtctgtaatctcaatgctttgggaggccaaggtgggagcatcgcttgcgcccaggagtttgagaccaacctgggcaat

SEQ ID NO: 166237 - DNA, 500 bp, Homo sapiens
atgtaataaataagaatctctggaaataggactagaaatccatatttttttaaagcttctcaggtgattgcgatatgtagtcaagttgagaatcactatattaactcaggttgaatagctgttctctgcttttttacgcagagaactaatcctaaatcttgttttccatacataattttagattcctaggctgtgacctactttaaaattaagaaatgtcttccctagtaaaaggatgtaaggggtgttctatttcactggtgtagggcagggggcagaagtccttcacatactccccatgccaggagctaactctgctccctttatagattgtaaaatcaaaaaaaggagttttgggggctgcgtgtggtggctcatgcctgtaatcccaactctttgagaggctgaggtgggtggatcacttgaggccaggaatttgagattacagtgagctatgatcacactactgcaccccagcctgggtaacgagattgtgtcaa

SEQ ID NO: 166238 - DNA, 171 bp, Homo sapiens
ccacatatttattgatgcaattaaaagtttgaggaacaaaaataccctggaagagaatacatgaatattttcatgtatagtggttcaatagtggttatctccagaaagtgagttgtggaagtctatatcatttatttgtttaatattttaaaacaacaaccttgtattact

SEQ ID NO: 166239 - DNA, 427 bp, Homo sapiens
tggggtgacagaaccggttttttaaaatcttgattttgttggtggctacacaacagcatgtgtttatcaaaacttgtagaatagcagacttaaaaagataaatttcattttgggaggctgaggcaggtggatcgcttgagctcaggagttcgagaccagcctgggcaacgtggtgaaaccctgtctacacacaaaaatataaaaattagccagggatggtgacacatgcctggagtcccagctacttagttacttggagggctgaggtgagaggattgcttgaacctgggaagtcaaggctgcagtgagccgagattgtgccactacactccagcctgggggacaaagtgagaccctgtctcgaaataaataaataaataagtaaatttatttatttattttactgtatgttaagttgtaccttggt

SEQ ID NO: 166240 - DNA, 639 bp, Homo sapiens
acaaaagatagtatttctgtccatatgtagttatcagactctggagtcagatagacttgggttagaattctggatttaccaccacctggctgggtgactggacagaagtaacatattctcaactgagtctcacattcctcagctgcagaatggggacagaaatactttgtacagttatatgagaattaagaaaatgcacacaaagtgcttagccagtggctaccatgccctaagactttaacagatgataactattaccatagcctattgttaatggctgtaataaagcctgttgtttttaacttttattaacttaaagaataaatgttgcagtttgactcagtgtgggactataattgcaaagcaactcatttatccacacagcctcctttctgagaattagaactaatgtacttagaaggatttgactgaagttctgctctggattttcttaggaattatttgggcaaccatgtccattaacacttatctagaaccgcaaggctgaaagtatgttattgtttgattaggttttcattagccaattattatttattgaccatatgataggtggaatagataagtatcacaaaagacatacgattcctactctacacatttagaactaaaaacagaagg

SEQ ID NO: 166241 - DNA, 469 bp, Homo sapiens
caaagtccaaaagtcggtataacttttgatcaaccaaatggacaataaacaaactttccattttttgggagactaaaaagcttagtaaaatgtttggaaataaggtaatacacataaataaggaaaaaacataaataaaatatatacagtacatataaaatattcatgtataaattaaatgccattcacaggtaccaaaaatactcagtttgaaataagtaattaaaaaggaatcctaatttacaatagcagcagatgtgaataagttaatgaactttgagggaaaatatattaccaatatgaagaaaaccagaagattcttctgaaaagtataaagtacaagaaaagcaatatgatatttttagaagactactattttaataatgtcgttctcccaccaatgaattaatatgcatagagcaaaatcccaataaaaaataatttgggagaacttgacaaaataattctg

SEQ ID NO: 166242 - DNA, 396 bp, Homo sapiens
agttgtgttcctataggacacatgggtttctgcatgaaagcaactatgtccagtcccctaaacctggtgattttattggaaatacctccagttaatttttacgctaataacctcagcccactcacaccaaggccaaaagttaccagagttatgaacagagccattgcccaccttttccccctaaacgttgttgttggtgcacatctgcagaaagaggccgtttacgtggaatttcaaatctggttgtttagtctacaaggaggggggaaggattctgtctctttaatgtttataacggttggacagagcttgtcgggtgaaggttaattgctctccagtttaagcagttctgtgcccagatgggttatcagggctgaacactcgttacaagactaa

SEQ ID NO: 166243 - DNA, 444 bp, Homo sapiens
acagaatgtgagaaaatatctgcaaatcatgtatctgataaggaattgatacccagaatatacagagaactcctaaaataacaacccaattcaaaaatgggcaaaggacttaaatagacattttccaaagaagatatacaaatagctaataaacacataacaagatgcgtgacatcacaaattactagggaaatacaaatcaaaagtataagaagataccacctcacatccattaggatagccactgtcacaaaacagaaaacaagtgtcggtgagaatgaggaataactggaacctttgtgcactgttgatgggaatgaaacatgggtacagccgctatggaaaacaatgtggcaattccttaaaaaattaaaaataggattaccatatgacctagcaattgcatttctgagtatatacccaaaagaacgcagggtcttgaag

SEQ ID NO: 166244 - DNA, 203 bp, Homo sapiens
ggaattaatttcatattttctccatgtggtcaaataagttattcatgtgtttgcattctttttgtgtctcttcctttgtcctaagtgtaggaggtctagaaatatactcccttttaatttctgttatgggtgaaattgcaagagtgtggggtcttagggtacagattgtttgctgattgtcctatacacagtaaagtagatga

SEQ ID NO: 166245 - DNA, 356 bp, Homo sapiens
caatagcctcaataaacaacaacaaaaaccctaagaataaacctaaccaaggaaaagaaattgctaaaaggaatttaagaagacaaatgcatggaaagacattctgtgttcaagactggaagactttgtattgttaagatgtcaatactatccaaagcaatctacagattcaatgcaatctctatgaaaatgccaatagcatttattgtaagaatggaaaaatccatcctaaaattcatatggaatatcaagggatcctgaatagccaaaacaattaagaaaaaaaaaagggaacaggctgggcacggtggctcacacctgtaatcccagcactttggaaggccgaggttggtgga

SEQ ID NO: 166246 - DNA, 558 bp, Homo sapiens
aaatatttcaaactcatttacattcagaaacatctttttaagatcactgtgatacattcgactgtcaattctgaagagacgtataaaggaaatgccagctaaggagcaaggaaacagctttcattcatgggctaaattgcagcttaaaaaagatggaccaggattatttcctttagaaacttactgtacaaaagatactgttcaccccattagagaactgatttgaagttactcttccctgtgagggctctgtcatcttaactgtattcacatactttcaactgttccccttgctgctaacctcaggttctttagttcatctatctgacagagctgatttggggaaaacaagacaaaccttgtcaggttttcttaataaataagcagttgtcatgtttcaagagttttagaaatgagcaataatcaaggaagaggacaacgattgcatacgtttataatatttagaacatcttttgccacaataaacactggaaaccacccacttgtggacaccaaacatttggatttgtatattttgtggcattccctcactctaat

SEQ ID NO: 166247 - DNA, 502 bp, Homo sapiens
atgccaaagactagttattgtggccatactctttttccattagtggcattggagaaccagaaacatgggatccaaagagaagcttagcaatgttaagtcatgttaatactaatttaatttttgtttgccaccctacccccaccaaaaaaaaaaaaaaaaggttataatgtgattgtcacgacagcatggggctgtactgagctttttgtcatgatattaaataggcttctctgttagaaaaagatttctggtctaaggacccaagtagatcatataaacagaagtgtgctgttatggtggaggcatattcatgttggttctgcattcacagtgaacatttgtacccaactcctaagacctactagagatcaaatgtgtttaaattgagtgtactcagatagaaagatattctgaaatttctcagctcttttctctatattgttgaaaattatcttttacaatgcaaagcctctttaacttgtaaaatatattattatacttt

SEQ ID NO: 166248 - DNA, 536 bp, Homo sapiens
ttaagtgaccctccagaacaggtgatggcagagccagtgccttctaactgatgttcagtccagtctccaaatttcccctttgtataagaataccagttgtatttgattagggcccaccctgatgacctcatttgtaaatacttatctccaagtaaagtcacattctgactttaaaaccacatcctgggggttaggatttcagcatatgaatttggaagtgggggacagagttcagctcataatacttcactctctccccaccagaatacatgtccttcacccaatgaaaatattccatcccaacaaccccaaacgtctttcagacatcaactctcaagtccaaaatctcatcttaaatatcataaaattgggtatgcgtgacactcagggtatgagtcatcctgaagcaaaattgttctctagctgtgtgtgaacctgggaaaccagacaaaaagttatctgcttccaaaacagaatggtgggacaggcatagaatatacattcccattctgtaagggagaagttgcagggggaaa

SEQ ID NO: 166249 - DNA, 316 bp, Homo sapiens
aggttaccccctagcctgggtcacggcagggaccagcaccgaggactagctacataatttgtgggccccggtgcaaactgaaaatgtgctcagatgtcaagacaaagtcctgactcgaagtcaaagccaggctccacccaccgagacgcttaggtcccctaaggcagtgggtctcacacttgagctggggtcacaatcactggaagggcttgttaaaaaacaggttgctggggcccagtcctagagttctgattcagtggatgtgatgtcggcctgggaataagcatttctaacttttttttttttttttggggac

SEQ ID NO: 166250 - DNA, 641 bp, Homo sapiens
tcacatctcacttcttatatttcaacagcttccaaaatgccacccttcatactgctatcagattcaactttgtaaaacacaaatgactgtttacctttcttaaaagactcagtagtgctccagaaacccagactaatgattctcaccttttctaccagaacctatctaagtaagtgaaggttcagagtacaactcaaggagcaggctggagaaggtgagatgggggaatgacgctggagtggaccagcatgtctattttcttaacacctccctactttctccatgtctctaggagttacaatgcagactgtccagaattgctattatcggtctgtagaataaaatctaagtatagcatagatgtaagatccttcacaaaaagacctctacctaactttcccagcattacctttatcatttaccatgtattagctcactggttctcaaagtatggtccaggaccacctccccaacccccagccatcagagggagtctgtgtggagttaaaacctaggtctgtcaaacatgaatgtgcaccaccctactttatacatttatctctcattttgtaaatattaaaagtagagataattgagatcaaattctggatcagccacaaattagctatttgctaatttat

SEQ ID NO: 166251 - DNA, 398 bp, Homo sapiens
gatgagtaaaaacactttcagtccctacagttgtgccatgctttttagcgagtggtattgcaggatgtccagaattgctattatcggtctgtagaataaaatctaagtatagcatagatgtaagatccttcacaaaaagacctctacctaactttcccagcattacctttatcatttaccatgtattagctcactggttctcaaagtatggtccaggaccacctccccaacccccagccatcagagggagtctgtgtggagttaaaacctaggtctgtcaaacatgaatgtgcaccaccctactttatacatttatctctcattttgtaaatattaaaagtagagataattgagatcaaattctggatcagccacaaattagctatttgctaatttat

SEQ ID NO: 166252 - DNA, 500 bp, Homo sapiens
gctgagatctgtaaatgggaggaacaggtctcccgctggaagaccatgcttcctctattgtagcagggaagaaaaataaatggtttacttcagaattgataaaatgtaatagttacgtatctcacaggtcaagtagcctaaattcaaagctaaattttcaagttttatcagctagtatatgaacataaaacatggagtcacacagtcaagtggtggttaggtcagactggtcatataaaaatgcaccacagccaagattgtgccactgcactccagcctgggtgacagagtgaggccaagcacagtggctcacgcctgtaatcccagcagtatgggaggccgaggagggcggatcacttgaggtcaggagttcgagaccagcctggccaatataatgaaaccccatctctaaaaatacaaaaaatattagccaggcgcctgtaatcccagctacttgggaggctgagtcaggagaatcgcttgaatccgggagacagagg

SEQ ID NO: 166253 - DNA, 424 bp, Homo sapiens
ggatgctgcccagaatctatctattgtagcttactctaatgcatcagttcccagcctttttggatttatgacattctatttgtgtttgattttgcatctccctcctcacaacttcaatggctgtgacagccgggtctgtgttatcagtggagagcaaagtcctgataggaactccacaaattttctctctcattcagttttatcttaattacattaacctttaattttaactatcactttcagactttttctggaccattaacaagctgctcaattacattgctatatggaatatgtttatttaaagtttttgaccaattaaaatgccttgaaaaattttgtgatacagtataaaaagtagtcaatgatagtgagaattgtattttatgtgcatttttgtgcaagaaatttgatagagtaatat

SEQ ID NO: 166254 - DNA, 435 bp, Homo sapiens
aaaaagcagtgatcctggaaacacaagcatcagcatgtgcctggggtccacactcggttaatccatgaatcgtgaatccacgtgtcacacagagaggcgcaggcattgcaaggggacggggcagcagcacccttaggcccagcgcccgtgctaggcgacccacactctggtggcgccacacagagaagtaaacggcaacggcccacaccggaaggggttgaggagtgacgggggatcggcgcgatggtggcgcgcagctgggcaggctgggagcgggtggctgcctgcatcaggcctgggctggaggccagctctaatctgagaacgtggccattaggatggaattagcagcaactcagtatccgctgagtctctaaaagccaagttatgagaacgccatcatctcgcagaaaaccaatttatggtaaagtgtga

SEQ ID NO: 166255 - DNA, 516 bp, Homo sapiens
atttaaacctgggcaactatgaatatactgtttaaccttctttatcaagtataaagagatagttcctaaatcgggcaaattatgtgccagtaaaactttggccattactgatgggaaatgaagcagcgtggtgaatgatgtttaaaaacaaacagaaaactatttcaacagattaaaaagggaaacgaagaaggtatgaagtccaatgtagctagagtgaagatcaaaataaagcttccttatctaaactggaaattggccaggctacacgagactaatctttctaattaaaaagcaaggtatactctttaatgtccattatgagcatttaaatgaacacctagaatattgtcaaaataaaaactgtgatgctgacatcttccaccaatgttaaatatatatttttatacaattataaaacttctcaatctggaatcttggcaccatcaactcaaatcataaacaaaacattttggcacttgaggcaagatcactgattgatgtatactcccactc

SEQ ID NO: 166256 - DNA, 440 bp, Homo sapiens
ctgggataagtgggctagaaatgacaggggctggcattgcaatgacctttccacaggaatttcattttcaaaacaaacaaaactataagcgtttcctctagcaacacatctaagaaacaacgatcaaaatgtaaacattattaaacctattttccttcttgctaagtagaggactcctggaaatctccatcatcttgccctgttgtgctacaggacatatggtatatcaaaatcacccactgctcggctacccccaattaagagtcataaagggttatcgtgcacgaagcagtttacgaaggcccctcttttaaaggtgacctgccacactgaatttaagtcaaaggactgcttcatagtatggaggttgagaaagccaagcccaaaggggaagctgacccacaccccaccaatatttaacacacccgccaagccccctc

SEQ ID NO: 166257 - DNA, 228 bp, Homo sapiens
ctgggataagtgggctagaaatgacaggggctggcattgcaatgacctttccacaggaatttcattttcaaaacaaacaaaactataagcgtttcctctagcaacacatctaagaaacaacgatcaaaatgtaggctaactgcttatggtgtgatggttctcaaattagtttagtgaaaacatctcgaaccccaaagaaagttttgaaaatgtgaggtggtgtcatgc

SEQ ID NO: 166258 - DNA, 232 bp, Homo sapiens
cagcataaagactatagttaatgtggtattgcttttgggatttttggtgctcttgccacatgcaaaaaaagtggaagtaactgtgtaagatgatgcgtaatttgcattataatagtaaccatttcactaggtatatatatatcaaaacatcctgttgtacaccttaaatatatacaataaaaatacaaaatacaaaagtcataccagcagtagtgtatttccagaacctagt

SEQ ID NO: 166259 - DNA, 286 bp, Homo sapiens
tggccaaaagttcctaatccccaaaatgtcacagtttagtaaggtgatacggcgtccataccacccatttatgttttgggcaggacctagaaccataggggtttatagtatgagtggcaaggatagagcattttgtggttatagtgaataagaaatagtttctctatttaaggaatgtctaatcttgtacagcaactaaccataatgtgagatggaatgtatgctctacacaaggcattaacaacttcattttggagttaagaggttgggaaattcactttgggct

SEQ ID NO: 166260 - DNA, 463 bp, Homo sapiens
cggggtcttcccgtccggcctccgggactccgcgtggagcggggcgtgccgggctcgggcggaggatcccgactgctccaggggcgtgtcgcctcttgcgccgagcactggtgaatagcgctgagctccgtagccctctccactctgcttgtcggatgaatccaggaagaaaagtgggtttaggcaccgtctcctttgctatgccctgaataaaactcgggtcaaacaacccaggcaggttgcgcttggcatctcgtagtcgagcgtgggctctgtacctttgagaatgtctcgaagcctgacttccaaactaccgggcgcaggtctgggcgaagggaaaactcagccctgcttcctgaatttcccgacccaaccctggctcggtactagcacgactgcctgggtagggctggaaccttcctgcctctctttgcaaataaacttgttcgaacctgttttttaa

SEQ ID NO: 166261 - DNA, 122 bp, Homo sapiens
ggattggggcaaaaaatgagtaaggagagtttggaatgtcttgtcaaattagaaagcaaggaaaatgttaaagactcctagagttgcatcaaaataacttgaagaagtagatgggacagttt

SEQ ID NO: 166262 - DNA, 322 bp, Homo sapiens
tgcagtgacaaagcaagtggagttatttcgtactaatgttaagtggttaggaacaaacaaaactgagactcttgggccagggtgctgcagcgaggtgcttgtggccttaggttgttggagagcagaggcaagcccgctccaggacctccatgctccgcctcctttctgccttgacccctcaccactgcgatagcaatgagctttccagtaagtactagaaaaactcatctctcttcctttatgggggatggggggtactaagtatggagaaaggtctcaccggctccagccaaccgggagcctgatttccttagtaagatta

SEQ ID NO: 166263 - DNA, 228 bp, Homo sapiens
cacaaacaccctgataagacatttacttctagatatacatccaaattaaatgcacacacatgttcaccaaaacacacatagaagaatgctgacacccatatgaactgtaataacctaaatgtccatcaccagtaaaataaattggtatattttaaaagataattcaacaataaaaatgaacatacatgcaatataaatttcggcatttaaaaaaaacaaccaggcatg

SEQ ID NO: 166264 - DNA, 534 bp, Homo sapiens
attcttgcattgctatggagaaatacctgagagtgggtaatttataaagagaagaggtttaattggctcatggttccgaagcttgtacaggaagcatgatgttagtcatctgttcagcttctaaggaggcctcaggaaacttacaatcatggcagaaggcaaaggggaagcaggctcatcttacatggccagagcaggagaaagagagagagggggaggtgctgcacaccagatctcatgagaattcactcacatacagtaccaagggaagatggtgctaaaccattcatgagaactctgtcctcacgagccaatcacccccaaccatgccccacctctagctttgaggattatatatatattttttgagacagagtttcactgtgtcacccaggctggagttcagtggctcgatcttggcctactgcaacctccgcctggatgagagatcaagatgccatctcaaataaataaaaataaataaataaagttgctttaacagtttataaaaataaaaatcacctacttttcagt

SEQ ID NO: 166265 - DNA, 445 bp, Homo sapiens
ttgcctttgggatttggagtgggacagaggggactgtatcctgtcctgggggcgccaggtgcagagctgaggctgcacacttctcagtccgtcagcccggcaggggtgggctggggatggcagcaaactctggcgctcagggcccctctgatgaggctgccggaccaaatctgaattctaaaagcactgtgcggggtgtctgtgtccaggttcacagaccgggtcgcaaagcctgggtgtgctgagacttcatctgccctgggggtggtgaggatgccaccccagaaggcaggacttgggacctccggccccctgcctgtgcgtgtgaagtggcccaggctggggtcttggtgccgcacacctacaccctgacagtggcagggccctgctggccctgggagtggcggccgacgctcagcaactgtgatgggaatggacgaacaga

SEQ ID NO: 166266 - DNA, 420 bp, Homo sapiens
tcctatcgcagaagagctgaggccagatattgagcagaaaggaggctcaatgagaatgagaacaacttccacttaattgagtcaggttaataattctgaagttctcagaaatgcctttgtctccatcactgtcacagaacagtcactgtcagtgaccaagggggagaacagtgtgtggaatgtccctgagtcccttggctaagtccagcaggaggcagcttggagcacggagaggacagagagctgggggttaagactcaggagtgctcatctcagccctgggatttctaatgagtgtgagcctgacacagcaagcctcattcctctcttctggaggtgaatgcctggggggtgggatcatggcctggagttcccaccagctgcaatcccctatatcccaatgtcccaaggagggatgag

SEQ ID NO: 166267 - DNA, 521 bp, Homo sapiens
cagaaagtttacatttaaatttgtttctatttataactcgttctctttattttaccaagttctaaatataatttctctaatttatttgggtagataagattaataattcaagacttgattctagaaaacataatcaaatttgttaagtaacctgaatgtggattttggtcactcaaatctcttttccttaatgtgtgtcataaatgcataacatgacattattactaacaactgtaaaatactccacacatcataaagttgaatgtacaattcattgaattagtaaaaaatccatgttaatttcataaatgttcctatagacaacacacatttcactatagatgtgcaagtacattatcttatattgtttgcttgctaactaattaaaattattttttctataatattatagaagaggtttatggcaataatcaaccggtctcctaaatctatggtttccttgttatatgttttgtggataaaattgattgaataaatgatatttctcataatcagttaaa

SEQ ID NO: 166268 - DNA, 492 bp, Homo sapiens
tagagttgaactttattctgtagctagggaaaaaccatggaattgtatcttaaaagaagataaaatggtcagatctgtgcctggaaaggatactctagctgttatgtggactggagggagctggaattgaggcagtgagcccagctaccagagtcttgaaatagtttagtgtaagatgctgaatcatgagttggggcagagatctgaccattttatcttcttttaggaatacccagccagtctcaaggtagtgccctgggaaaggagaacacccagtctcagggtagtcctccagactggggtaagagacatagccctgctgaccagatgcatgtggtctgatgatatccttatcaaaaacaagaggacagccacatattgccttatatgtaagtgctggggggaagggaaggctgtgatgataaaggcagtgtagtgtggctgagaggtggggagcactgaatggaggcttcctaaaggaagtgagtgtgg

SEQ ID NO: 166269 - DNA, 402 bp, Homo sapiens
tgtcatcatgatcatggtcatcatctcaccagggaccaaggtgactttgccctagagcagtggttctcagtctgtgccccatccctggcatcaacatcacccaagggtttgttggaaataaaacatcttaggctctatcctattgagtatcaagtttggtaggtctggggtgaggtccaagagtttgcatttctaacaacttcccaggtgatgctgatacgcctggtttgtggaccacgtgagacaacatctccttgcattgcgttccaagtaatatcatctagaacatgcagttgcatacactgttcctcccactccactattatctcttctaatggttagatgatttcttagccagaattcttctgaaatcaaggattcctgtgattaatgcaggaatac

SEQ ID NO: 166270 - DNA, 519 bp, Homo sapiens
tggggaggtgtttgctaaaatgagaagttcattggttactttcatattttatgtgcccccttcatcccaactgcatgcctctgaaagggtgttacaggcactgtgggtaccagtggcagtacctctggtgaggcataaatctagtactgcttaccactgcagaggtatccctaaccaaatgctactgcagtcttgctgggtgtaggttttgtggtcctgttttcccctgaaacatagcagaaaacatcttttaagcttaggttctgagttatcacggtctgtgtttccaccaagggagagtgagtgacgagccacttaggagagatacctatcaaccagataatctagaagaaattctttcagactagatgaataatatctttacctttgcttttgggctgctgttcaacagaggtttaaaaagggtaactgggataatgtcctattttatcccatgtctgaaaaaaaaatctatttcttatcaaggatgtcttttattaaaaataacagtagctacta

SEQ ID NO: 166271 - DNA, 456 bp, Homo sapiens
ctttatgattaaaactctcagcaaaattggcatacaaggggcatacctcaaggtaatagaagccacctatgacagacccacggccaacataatactgaatggggaaaagttgaaatcattccctgtgagaaatcgaacaaggcaaggatgccgtctctcaccactcctctccagcatagtactggaagtcctagcaagagcaatcagacaagagaaggaaataaaggacatccaaatcagtaaagaggaagtcaaactgtcgctgtctgctgataatatgattgtttacctagaaaactctaaagactactccggaaagctccaagaactgataaaagaattcagcaaagttttcagatacaaaattaatgttcataaatcagtaactcttctatacaccaatagcgaccaattggagaatcaaatcaagaactcaacacattttacaatagctgc

SEQ ID NO: 166272 - DNA, 544 bp, Homo sapiens
aggtaggcatgggagcaggagtcatgagtaagttagaaaaccctacctcacactataaacacaaattagctcaaaaggtatcaatgacctaagagtaaaagccaaaaccaaaaacccttggaagaaaactaggagtaaatcttcatgacctcagattttgcaatgctttcttaggtatgacatcaaaagcatgagcaacaagagaaaaaagagataaattggacttcatcaaatgtaaaacttatgtgcgtcaaaaggtattatcaagaaagtgaaaatacaatccacagatattgcaaatcgtatctctggagagaatttaatatccagaatatataaagaacttttattttacaactggacaacaaaaagacaacttacctgaaataaaactggaattaaatagacatttctccaaagaagacatacaaatggccaaaaagcacatggaaagatgctcaacattattaatcactggaaaaatgcaaggcaaactaccatgagataccatgcactaggatggctatcatatgaaaaattaatt

SEQ ID NO: 166273 - DNA, 326 bp, Homo sapiens
cacagctcattgttttctggtgggctccttggttgaaaccatattctcaaagaaactccgttttgtgacagggcccccatcagtaggctcagccacatgacaggccgaggagcagccagcacaactgccggcaatgcttgccaataagccagatgctgccacatattggcatctgggtcctggaatagcaaccatgttctcagtctggctagggattctgaccctagctacggaaggagacaaatacaaattcttcatgaaagcaacgcaacttgaacagatgaaggaagattattcacacattatggaaacgaaagaaagaacaa

SEQ ID NO: 166274 - DNA, 324 bp, Homo sapiens
aggagggcagaccgtgttccatgaagcacaaagaaagtcccccaagtaatgccactgcagaaaccgagcctatcccacagaaattgcaaatgcctccttgctctgaatgtgaggtgaaaaaagccccagaaaaaccattgaccagctttgaagggatggcagctagagaagaaaaaatactgtaaatactaagaaactgtgttaaaaacatccatttgctattgtcttcatattctttttagaccacaagcttgatggaaatactgtttctaaagcatgcaactttttcacaattttatgtaactttataaagtagcctacatg

SEQ ID NO: 166275 - DNA, 328 bp, Homo sapiens
aaacttgcaccccgctgccgcagcttcaacggagaaatcccttgccccaagcacacgtcagccctgcccgcggagtcatggcacagcaaaagagaggctctccatggagatatgctccagaagggtgggtggctgtgcctaaaggtttgttagaaaaggacagtcagtgaggcttgctggctgtggcgccttacgacgctctccccgacccctcgtcattcagaaggttccgcaggtctcgacagcggtgcgcttgtcagccccatccggcggccagcctcccttgccggatcgcccacgttgtcggcctggtccgagttcttcattt

SEQ ID NO: 166276 - DNA, 604 bp, Homo sapiens
cgatatcaaaatccttcttcgccactatgcaactgtgctttcgtgtattcatatccaggacatcataaactatcaatacagacgatgtattaaataaatatacaacttggccatcaggctactatttatcattctaacaggatgggggcaaaagcagattccttagcctgcttttctgatgagagatcgcgggggagccaaaggcagtttgcaaaagaggaccagtctctgcgcaggagttttggtggtaaacatgtgagggtatccagagagtgatggaaatggtggataatctatttattttgaaataccaaatggtactaatataaaaacttgttcaacctactttggcaacattaaatatgaagggaatgtaccttcttcccctcctccaaaagtatttacttcaaaaatcgatttcctctgtcactggttattgctgcattttgctcagtggttctgagaaaccgcatggaaaatcacaatgttacactcgttaaattgaccctgcagggctctaccaccagtacatgcatcatcccaagaggtaaaaaggcaaggctgccaggctcatgctgagaatatcatcatgaaatcaacgagg

SEQ ID NO: 166277 - DNA, 192 bp, Homo sapiens
catgttgcagataggcttcaagggggacagggactccaggtttccaaccaccgaactgtgcctcaagtagcaagtgtatgagacccagttatggtggtggttgggttttcctcactgtggagtggagtcagtgaccactttttagctctgtgaccttgggcaagttacccagcttctctttttttttctctg

SEQ ID NO: 166278 - DNA, 304 bp, Homo sapiens
attgggtgtgttgtgtgaaaaaaagtgatgttgcaaggtctctgtcagcagcattaagagtcactggcacaattaccccacaaacggagggctgggagtgctgcacagttccctaggcagctgtgattttcaacccagtctgacatattattatagaccacacattgtttttttgacattaattcatttgtgatctttactgccacgctgagtatcttatctcgaggtggtccttaatggtgcatggtatattttattgatgtttcttttattctggtgtttttcttcctcatgattatgtctg

SEQ ID NO: 166279 - DNA, 491 bp, Homo sapiens
gttagaaaaacatggagtcagttaggtttggtgtgtaggttctggtctacttttgtagtctgtagttccaaagacaattgagttttgtaagcccctgtgatggtaatatgtgtctgcttcattcttctagctctgctggagctcccactggatagcttctggtgccacacagcggggtggaaggcacatcctcaggctgcacagtatgattaggccagtgggtaggggactgccagacctgaggggtgaataagagcatttcccgtggcttgttctacagtcacctcactggtaagcttctcactctatctctgctgggccactgttgtgggcagactaggcctgctactgccactgggtaaaatgtctcattggcaagtccctcctgggcttcccttttcctgatcctttggccagagaggacagggttttctgttttttgtttttgttgctgtttatgcctgttggcaatttcaagttgtactccactc

SEQ ID NO: 166280 - DNA, 376 bp, Homo sapiens
gttagaaaaacatggagtcagttaggtttggtgtgtaggttctggtctacttttgtagtctgtagttccaaagacaattgagttttgtaagcccctgtgatggtaatatgtgtctgcttcattcttctagctctgctggagctcccactggatagcttctggtgccacacagcggggtggaaggcacatcctcaggctgcacagtatgattaggccagtgggtaggggactgccagacctgaggggtgaataagagcatttcccgtggcttgttctacagtcacctcactggtaagcttcccattgtaaatgacgggcagtactgtggtaggccgatttgtcatgccatctgggctaactggagcacaatgtactt

SEQ ID NO: 166281 - DNA, 162 bp, Homo sapiens
tggaggagcaaaagacctcaagccgggtggcttaagccgcagaggtgggtttcttccggttgggaggctggacgtccatgatccgtgaaccggcagggctgagctggtttctcccaaggcctctccctggcttgcaggcagtgctctttttctctgtgcggg

SEQ ID NO: 166282 - DNA, 322 bp, Homo sapiens
gtggatggatgaatggatggatggatgaattgataaatggacagatggatgaatagatagatggatttataaaaaattggatgattggatggatagatgatggacaaataggtgaatgatggatgggtcaattaatggatggatggaggatggatggatggatggatggatagatgtataaataagtagacgaggggacagatggatggatgaatggatggatggatggatgaatggatgaactgaatggatgggtggatgaataggtagatagatgtataaataaatggatgattggatggatagatgacggacaaatagg

SEQ ID NO: 166283 - DNA, 532 bp, Homo sapiens
agcgatcctcccacctcagcctcttgagcagctgtgatgacaggtgtgtgccaccgcacctggccacaagatagcatttctcaatggaatgatgttcacagcagagtctgtttcagacacaaaattatctccttgaaaaacaaattgtgtaattgaatttcttgttcatttaaaataagctgtatttttatcctctcccaaatcattttaaggatatatagccgataaaagaaatctggtcttcataaattccatggattctcagtgtccgacagacttccaagtctagcccagcttcaaaaccaccacgtgaacctgagcacggctcatcatgatcctggacccttcttggctgatctaagtaattagactcattgcaatccttaaaacagcttattattcgcaagcaaataaatagtcatttgaccttaataggcatgttttttacatttgacataaaaatgtgaaagttggatcagggtgttatgaaaaaattactgaggcactgaggttgtgaaaatgtagagacact

SEQ ID NO: 166284 - DNA, 332 bp, Homo sapiens
tattatggcatcatttctttctgttttcatttacatttaatatactcaaaatcgtgttttacttgtatactttataccctactttaaaaaaatttaaatacaagctttgtattatcaacatgctttgaaagagcaatttataatagctgcttataatttaccaaaccgttcttctattgttggacatttacgttgttcacaaattttgcatattataaataactaaagctaggaaaacattttacacgtgtggtttttattctggaaattggatcttttctgaagccaagttctgcgtaatattttgactgagtactagaatgccttctaag

SEQ ID NO: 166285 - DNA, 158 bp, Homo sapiens
gcagggaacgccaagctcacggcgggctttggcagggcgcgccccgtgtcctggaggactgtgtcctggtcatctttctaggcccccactgcatgcccttgaggactaggaagggtgcctccttctctgcatcaggctgactcctagcagctgccgta

SEQ ID NO: 166286 - DNA, 240 bp, Homo sapiens
ctcgtgctgtttggaagcaaattccagacatcattaagtaggtcactatctccaaaagataaggactacatttaaaaacaagcacatgaccattatcactccaaggagaaatgaattacattttcttaatatggtcagttagtgttcagatttccaatagcctgaaatgtcatagtttttaaaataggttgaatcatgattcaaataacatccatatgttggaattggtgggtaggtcgt

SEQ ID NO: 166287 - DNA, 277 bp, Homo sapiens
tatttccaaatgaggtcacattcacaggtaccagaagttatgaattgaacacatcttttttgggatgtgttctacccattataattcattctacccactataatcacaagtggctttgacattcagtgacacaaagatgataaggactcggttcctgacctcaggacattctcagtctatcagtgaagacaaacacatgctggtgaacacacacacatacacaagcacacatataccccgagcctcattcaagtcagactgtgattaaaaatggaaa

SEQ ID NO: 166288 - DNA, 287 bp, Homo sapiens
tatttagcattcctcccaacagtgtatgagcattttagttgtaccaaatccttatcagcacttggaattgttaattttcttaactttagtcattctagtgggtgttcagtggtatctcattttaatttgcatttccctgatgagtagtgatgttaagcatcttttcactgttaccaattatttggataagtttttaatgaagtgccaattcaaatcatttgttcatatttaaaaatatggtcttcagcctgatggccttcaaacttcaattgtagcattggatttta

SEQ ID NO: 166289 - DNA, 398 bp, Homo sapiens
actgtttccctgagttctatgagcctctccagcaaattaatcaaactcaaagagggagttgtggaaaccctacttaaagcccattgggtagaagttccgaaggcctggactttggtttggttgggggcggagttgggggaagtcttggggacagagccctcatcctgtaggatctgatgctatctccaggtagatggtgttgcagttgaatcagaggatgccccgctgcttggtatgtgaggaaaaactttcatacatttgaactcaaaagtcttcttctgggccaggcatggtggctcacacctgtaatcctagcactctggaaggctgagatgggaggatcacttgaggtcaggagttcgagaccagcctggccaacatggcgaaacctcttctct

SEQ ID NO: 166290 - DNA, 542 bp, Homo sapiens
ctacaaaaggcaagaaaatgtcattttgcaaaaagatatcttatgtaatagaacaaaagtatatatgtttcctacaaataaatctaacaaaagataaagttcaaatttttactcagccatggaaaagaatgaaatcctttcatttgcagcaatatggatggaactgctggaggacattatgttaagtgaaataagccaagcttagaaagacacgtattatgtgttctcattcatatgtgggagctaaaataaattgatctcacggaggtagagaatagaatggtggttatcagaggcttggaagggtagtgaggagagaaggataaaaaggggttggttagtgggtacaaaagtacagttacatagaatgaataagatctaatgtttgatagcacaatagagtgactataacaatgatttgttgtatatttcaaaatagctagaagagaagacgtagaatgtttccaacagaagaaatgataaatgtttgaagtgatggatgtttcagttactcaaattttatcattatacattatatgcta

SEQ ID NO: 166291 - DNA, 195 bp, Homo sapiens
ggagaggtccctaaaaatgacttactctaagacctgaatggcgaggagctgcctatgcacaaatctgggtaaagacacttccaggcaaaaggatcagcaagtaaaagtccctgaggtgggaacaggcctgaaatatttaggaacaacatgaagggtaatgaagagtgggacaaggagaatgatgtagaaggagac

SEQ ID NO: 166292 - DNA, 878 bp, Homo sapiens
tacctgaacgtactgtgcactatggtagcagtatgccccaaacaccacaggttgaagcagggagtcaccattctaactggggagtcgagaaaggctatatacagaaagtggtccttgagcttgatcttgaggccttatataggtgttgttgaggcaaaaatagaagaggaaaaggcatttcagaaagaaaaaactgtgtaatcaaagccgagatctatcagaagacactattcagaatcaagaaacatcaggtttggggacaacgagattcagagatgtgagggcaggagtcaaaaatgaggcatggtccagactgcgctggcataggtgtaaccttcagaagccaagccttcatcagtgtgcacaggtgatgggaaacagattttcagccaggtgagctttgctacacaaacgtgtggaattgtagcaggctgtttctccctaacaatcacacagatgggcctgcatgacagtcacacagacaggcctgcacagcactccagttacacagacaaatttccacagcactgccttaacactgagcaaataattaaacctagggaaatcggtgcccagacatcaaagctagaaatataaacatatggtcagtaggagacgtgcataggcttctccctatcctggagcaagtcaaaataacggagacagtctcacattcctagtgccaggacctgtcttgggttgtcgaaatctgagacagtcaaggtaacagaggcagttgtttgaatagatttattggaaagtctaagcagctcttcagaccaagctgtacatgagataagataggaataatcactccggatgggcacggtggctcatgcctgtaatcccagcactttgggagactgaggtgggcaggt

SEQ ID NO: 166293 - DNA, 474 bp, Homo sapiens
tcattagccccagattctgcaattgcgaatttacctacttgctaaaattgacctgtagccccaaaatcaatactcacagtgcaccaccagtcattccaccacacaaagcacatgaatgtccatgaatgatcaccatggcagggaaaattttccttgcaaatcacaaaataattaatgtaaccagttgattcctgatggatgattttcctattttataccttttagctacaaaatataactgataaatgttagctctctctcaaagacattaaaccaggccaggcgcagtggctcgtgtctgtaatcccagaactttgggaggctgaggtaggcagatcatgaggtcagaagttcgataccagcctggccaacatggtgaaaccccgtctctactaaaaatacaaaaattagctgggcgtggtggcgcacacctgtaatcccagctacttaggaggctgaggcaggagaatcact

SEQ ID NO: 166294 - DNA, 711 bp, Homo sapiens
caggaggctgaggtgggaggattgcatgacccccggaggtcgaagctgcagtgagccattgatccaaccactacattccagccagggtgacagagtgagaccttgtctgaaaacaaacaaacaaaaagattaatgcagtacatgtccttttggtgaataagtaaatatgttttggtaactttagctttgcattataatctagtcgtcagcagattgactaagggcagataaaacaagatgatttggttttgtggtttggcacttactgtctgatttatgcccccaagaactcttgcaggccaaggtcgagtgtatctgatacctgctctggctcttctcacgaactgatttagtagctttgggccagcattagattttttaaactctttgacctatttgtacatgacaggcatttaatctttccagtagttacttgtcaaatagaaaagcatcacttcttagtttggacatttgcaaatatgactgagcagagctgacagatgaggtgggcatcttcaggccatagggtacttctggcctcctgtaacctagaaaattgggatgcctcagatatcaggtattcttccaagcagctagggttagtccctgacctcagaaaccctgagagccctcagaaaccctgagaaatccacctgggaatggtgtatttgttttggatgagattacctttactttccattctccaggtct

SEQ ID NO: 166295 - DNA, 400 bp, Homo sapiens
gaaaaatttaaggatcactgctactattcctttttcttccttcccactgctactattcttaatgacaaatggttctgatgagaaatcaagtttaaaaagatgaccaagtgtccagataaggagtaaatttcatttcctaccataaggagattttataaagaataacaaaactggctgggtgcggtggctcacgcctataatcccagttgggaggctgaggcgggtggatcacctggggtcaggagttcgagaccagcctggccaacatggtgaaatcctgtctcgactgaaaataccaaaaattagctgggcgtagtaagcccagcgactcaggaggctgagacaggagaatcccttgaacccaggtggtggaggttgcagtgagccaagattgcgtcat

SEQ ID NO: 166296 - DNA, 412 bp, Homo sapiens
agcctcccgagtagctgggattacaggcatgtcccatcatgcccagctaacctggcttatttctatatattatttttttctaagaataaacaaatgaacaaaaacagttaatatcattggaataacatgcaggtcctaaaataagaagtatgtaagatgtgtttattgaaatatatatatggtatactggaaaaaaaaccccacaaaatattacacaaatactggttacagcttacagtagccagcctccaagatgccccccagtgatgctcacctcctaatattcatgcctttgtgtagtccccttttacagttcgtcagggttggtctgtatgagcattagaatatagggatatgatagtgtatgacttccaaaacaaagtcataaaagacattactgcttctgccctgc

SEQ ID NO: 166297 - DNA, 1086 bp, Homo sapiens
cttgggtagttcagggtaatcttagagtcatgagagatatgatataaaggaataactagctaaaccagaaaaaatgcctgggtaatgactagcaaataggtggtcaacagatgtcctcattagattgaaaggtccatgaaagcagggactatttcttttctttactgcttaaaaaggttagaactggacctggcaacatatgatgagctaaataaatacatatttgtgaattgggttaacacatattgcataaagtggttttggctctgttttattcttcataagccctagtgatctttttaatttctgtaaaatgtggtcttgacccccccaacccaagtgacctccttatttgctaggctctgatatttctgttaggtttctactgtattttctgagatagcaattagtagatactatttctcctttgatggagctagccatatattcttgtttgttcattttagctttcaaatttctgtctgattcttgttcttttactctggaatgtagtgaatggaatgacttggaaggtacaaggtaggtcagtttaggttgtctagggccttgcatttaaaagtttaatttgatgacatggtggattacaagaatgtaacagtatcaaaatgatactatcttcttgtggtggtatgtagacttaaaaagagaaactgcagagaaaagggtcccttaggatgtagagcagcagttgatatgtgagaagttgatgccttgcattagggattaggagtagatgtggaaggaagagatcaggtttgaaagagtttaaacaaagaatctctaggatttgataacactggatatcagaggggaaggtacaagagagagggcagaatcaaaggccactcagaggttaaaggaatcataccggtttggcatggtggctcacgcctgtcatcccagcactttgggaggctgaggcgggcagatcacgaggtcaggagttcgagaccagcctagccaatatggcgaaaccccgtctctactaaaaatacaaaaattagctgggcgtggtggcgtgtacctgtaggcccagctactcaggagactgaggcagaagaatca

SEQ ID NO: 166298 - DNA, 302 bp, Homo sapiens
caaaaaatgacagaatagatttagagagaggcaaatagaaattcggaaaaaacaaaacaaaacaaaattaagagctcaatggaagagtttaacaggagagcagtcacaactgaaaagagaactagtaaaatggcagatgaggaagaagaaaaaaattcagaatatataacaaggagaaaaaataatatttaatacacaaacacaaaaatataacaaatagagtgagaaagtctattttatttttagttagaggctcaaaagtagaagagagagaaaatagaggcaataactgaagagataat

SEQ ID NO: 166299 - DNA, 483 bp, Homo sapiens
ctcggtacccagttcgacggagactctcttctggacagggaaaccagaagagagactccaagaagaggacgggaaagaagggtggatgtttctcttttgctgatggaagggctgtacggcttgaaataatactggatttcttttctctttccctggctcactgctcactccttcaggagccacttaagaggcgacccagaagaaaatgtggaattggaatttctggttggaaaaacagttttatttaactcaggcagttgattttgagtttgcaaagcttgcttacctagacttccaatccacttctccaaacctccttacgttagacggcgagacccagaaagcaaaaggagagcagtttgcagtgaacagatgggtgggtgtttcaaagttgcttgaaccgagttctaaaaccactctgtggatctctgagaaggactcaagaattggtcttcagcctttcatgaaatgagccttgaaatg

SEQ ID NO: 166300 - DNA, 149 bp, Homo sapiens
aaatgcttattgatatactcaaacactaactgcataatctgaccttgggacattgaccttaatgtttctgtgcatgtggctttcaaagcaattacatttatatcctgaagaaattgtatgtaatgactaagctccacacattcatgtgt

SEQ ID NO: 166301 - DNA, 390 bp, Homo sapiens
ttgtacgctatccggttcaatgtcatgaagacagagaaaggctgaaaaaattttcaggtaaaaggagactaaatacacaagactcacatgcaatgcttaataccagactagatcctgaaatagattttttaaaaagaaaaaagctgtcataggctgggtgcagtggctcatgcttataatcccagcactttgggaggccaaggcaggcagatcacctgaggtcaggagctcgagaccagcctgatcaacatggtgacatcccgtctctactaaaaatacaaaattagtcaggcatggtggcggatatgcctataatcccagctactcaagaggccgaggcaggagaattgattgaaccggatagcttgccgggatcctgctagagtcacc

SEQ ID NO: 166302 - DNA, 480 bp, Homo sapiens
gtcagggagggaacaaaggaccccgcctccctgctctgaagcaagaacctgattctcttttccgcccttggggccccaggacccttctcttggccaccagggctggcttcctccaagcctcatctacttgggaggggtggggcgggatgggtgagacaggacaaccagccgggaacacgggagcctcgcagaccatcgcctccctctggggcctagtccctccacaggctgggccgggaaggtctggtgtgggacctcttgggaacctgggccccacggtggcgtgcatccctgggggttgctcccatgccagccaggtgacgctgacaggatgggtccctttaccccagacttgggtgctgagggccggagctccatgctggagcccgcctgctcgctacagccaggcccgagccacagcgcgcccgggcgggacgcggggcccctgccgtggggcagaagtgcgggcagttgcgggga

SEQ ID NO: 166303 - DNA, 123 bp, Homo sapiens
attatttacatgctaacctgacttagtacagacacactatattggatggcccagaggttaacctctatttaaatacagttgagttctcccaccaaagttttgggttacataaaccttgttgct

SEQ ID NO: 166304 - DNA, 755 bp, Homo sapiens
atattgtgttattcagggtggaatggcccaggaattgtaaaatacagtatactgatgccggtctgttcagttctggtagaatatactgttttggatcagtgtggttcctttaaggaaatggacatccctactctgcagtgatcaccaactgaaggaaacgtatctcaagctctgagggaggcctttgaaggcaccctgcattggcttgagtttagacagtagcactcctgctcccacctcccaccctgaaactgtggaaacacagcatggcaaaagctctcttccaagaaaatcttctgtctcctcctcaattctctgcattttcatagtcctgcagtgactgaggggctttaaggggtgctaagcacgttcacagccatttcctttgttagattctgcatcggatgatctggaacctcagtggaatttcactcctttcatgtgtggaaacctctcaagacttcacttttatcccttcatgagcgtctgggtcatcctaactcacgtaggcttgcatacccccacttcactctaattcacatctttgattatttccttcggaaaatttaccataacctgcagttatcttgtttatttgatgactttatcatctgttttcccctctagaatattaactttatgaaggcacagttcccgtttgtctcattcgctgttgtatcccagggctagcacagcccctgggatgtggtagatgccccacaatatttgttaacagaatgaatgaattcactaat

SEQ ID NO: 166305 - DNA, 421 bp, Homo sapiens
ttatttggttgcacatgttttgatgtcatatctaatgattcactgctaaatttaaggtcataaagatacaccactatgtcttcttctaagaattttctggttttagcttttatagaaatagatcattgatctattttgagccattttgtatgtggtgtaacatagaggtccagatttatttttttgcatatgaatatccagttatcctagcactattcttttgcatgtggatgtcctagactattctttctccagtaaatagtcttggcattcttactgaaaattaattgaccatagatgtatgggttatttttgaactttcaattctattctattagtctagatgtctatcctcatgagagtgctaccctcttttgattactgtagatttctagtaggttttgaaatcgagaagtattgg

SEQ ID NO: 166306 - DNA, 467 bp, Homo sapiens
ttttttccatcatcacttacaccccacctgtcactgagctaaggcagattctacttccactttagaaggtgattttccccctttttcctttgcaactgtccctgccttcattcagaaccatcacttctcacctactaattacaacagtttcatagattgtctagttgtcaacagcactgttcccacatttaatcccttctgaagttgctgccagattcacctttctaaaaatgcaaatctaatcatataagtttcctactcaaaatctttccttgttccctgatagctttcaggataatatgaagctccttatcctagcacaaaaggccattcctattctagccccttcctatccctctgggctcacttcctgtcactcctccccttcctccactatacagagggtgtagtcttcctacttccaagatctatgctcagcctgggcaacatgataaaaccaaaaaaaa

SEQ ID NO: 166307 - DNA, 343 bp, Homo sapiens
gtcctaatcacgtaacctattcccccgagcaatctcaattacaatgatatacagcatcaaacaaggtcaagcagtaactaggactaatcaacgcccatgatcatacaaagccccgggaacaataggatacagtagggagatctccctactgtatgcctagcatcagaagtagtcagtaaatatttattgaattaatcaatacttttagttataataccaaagcagggattagaaaatttactcatgtctctagttagatttttttcctaccatattcattctaatttttgtatataggtaaaataaatcagtaaataaaatatagcatataaataaatacata

SEQ ID NO: 166308 - DNA, 499 bp, Homo sapiens
gttatgtgttgctaaatgcatggctctttgaaggtatttccagatggttgtgggaaaccttgccagattggaatgcgtaagagaaggtaggaaaggtctcaggaagaacagagagactgcttaggacatgcttggttgaaggaattatttgtgagttttggctgacatggtttttctgtacaggattcaacggccataggagaatcaagcttttgtactccctaaccctcaatccctttaatccttctctatgtcatctgatgctagcagcaaaggtcacctgtctgtctgattaggttacaaaccagagactgggtatttgaagcccaaacttcttggatcttgtaggtttttgggaaaggtgctggttaattgacctcaggccagtggtgcagcctggaggccccaaaccctagagcttggtaaactatttccattattttaaaaagcctattagaagttttgctttacctaggatatgtgtggatacaggctaatg

SEQ ID NO: 166309 - DNA, 420 bp, Homo sapiens
gaaaaccaggtccctaacaccgaagagttaaaagaaataagtaaatttggcaaattggtctttttgtgagttagcttataggcaactgatcgagggtctctttcccgtcttcaccctgcaattgtggctcagggcaagctgccagctccctcctgccaatgcaggagcaatagagcttggcctcctcttgcagggcgagtttgggagtcagatatgaagccactaatccgggacctttttgggacccaaggcactcatctgccccaagcataccaggcaggccaggtgcaatgactcatgtctgtaatcctagcactttgtttttgcgacggagtctcgctctgtccacccaggctggagtgcagtggcagaatcttgactcactgcaacctccacctcccaggttcaagcaattcctgc

SEQ ID NO: 166310 - DNA, 189 bp, Homo sapiens
taaagaatatttaggaatagcaaaatcaaatttatactgatttctttatggcccatagaagtcatgagtcttttactaccattaaataaatgtggcttcagagccagagatgatcctttctttatcacacgcacacacacacacactctctctctcacacacatagtttatgtaaatacttactcctgt

SEQ ID NO: 166311 - DNA, 308 bp, Homo sapiens
ggcaggatctgagcttctctcacaggccagagcagggagaagggcttctggggggttgcagggagtccatattctagtcccacctaaaagcagtgcctgcctccttaattctgcaccgggtcacagatccctgcctgcttctcccgcctttcacacaaatgctcttagattaaatctgtgggaagggggtgggagggaaacaggcccctctctgatacaggccctaagtttcaaattcccctcttactgggcagatggagttcctagaaaagttttgggatagttttccaaaggaaatgtgcagaatg

SEQ ID NO: 166312 - DNA, 665 bp, Homo sapiens
acataaacataaattctactggagctcctaaattatttaggaaaagttctccaatcccataacactcccaaggccctttcggttcagtccattttccttttttcgcctcttcaaaccacctttctgcttcccttattctcaattccacttaaaaacccttgacccagcactattcatcggccccttccagtacaatgcagtttgcctgtagaagcttccagaacatttcctctccaatgtcccgcattttaggcctcccttagccctcatgggcttagccagttgcttggcctcctccacctgtctcccttcagctccctgctcctccttccttgctagagcaatgcagtcatcccccagcccacctttcagcactaattacaccgcccattggcttctgagatgaggcagccttagacaacgcatgggcttttcttccatcttgatccaaactccatgaagatgctcaggggtgttcctgctgcttccatgtgtcacctgcattcgcagtggacgtggctagaatggaggtgtggtttctccacaagcccctcttctcccgtgttttccatcttagtcaacagcgctaataccttcccacccctttgcttaggtaaaactctagcaggtgccttggacacttctctctcccaggtctttgagaa

SEQ ID NO: 166313 - DNA, 291 bp, Homo sapiens
cttacacagagatgtcccttacaaaatgttagttgaatgaatgagatgcataagaaaagtttagtaaatattcctgctaggactgacattttatttataagaatgggggaaaaataggatattatctaacaataatttaaaaatcaacagagattttgaaaataacttttagttcatcttcattgtccgccttcctgagagcatcatattgcttaaaaagtcatctacaatttcccagtttttcttttctttttctctctctgtctctgtctctctctttctttttttttt

SEQ ID NO: 166314 - DNA, 223 bp, Homo sapiens
gcgtaaacttgtgctcaccatgacagggataggtttcatgactctcaattttggaagaatagaataaccctgctggccccaggagcttattaggaaagattgaggaagcaagatggtcaaggtctcaggcagctggacaccagttaatgcccccaccctcctgagtgtagtcactggatcagctccctttcaaaatagcacaaaagggcaaactcatggattc

SEQ ID NO: 166315 - DNA, 234 bp, Homo sapiens
tgtaagtattatgctttctatactaagttgtatattctccccaacacaagctttaacatttcaaaatatattcaaatcaatgtcaaaacaaacctgttatcaacttctgttgttgacagtacaccggattaagataccctaacagaaataactaacaaactgagaaacaacaacaacaacagaaaagttcttaaaataattcaccgggttgtccaaaaagcaagaaggcataac

SEQ ID NO: 166316 - DNA, 479 bp, Homo sapiens
aggccagcactggggtggggctgcggtggaacaggcccaggcagaagaggggacagggcctgtgtcacaagggcagctgggagctgggagcagaggaatggctggtctgactcggggtccagcaggaccacctgactgttgaatggagacaggcccagggccagagtagaggccgtggcaggaatccaggcagatctgctggtgtctcaggtgagagggcagcagcagagggtgagggttcaaggcagccagctggggactcgtggcacaggcagacaacagggagcgcactgtgggatgtgggggcaatggtgacggctcccgggttttcagtctaagtggctgaaggtcgacattcctatcaattgagatggggagaagcaagtggaacaattttgggggacaatcacgagctgaattttagactttaagaggtttttccatctctgagcctttgtttccttttctgtagaaagggg

SEQ ID NO: 166317 - DNA, 506 bp, Homo sapiens
accattagtgttatcttaagttgatcctgtaatagtcaactactattcttgcttttgaattccattagatcatgagctctgtgaaggcagatgttgttatcacctgttgcacagtaggtaatcaacaaatgtttgctgaatgaatgaagaaaataatcttactttagctttatcactgtcaatttagtttgttgtggattgtttggttaatcctataaaaataaaaatatgggccaggcgcattggctcatgcctgtaatcccagcaatttgggaggcagaggtgggtggaccacgaggtcaggagttcgccagcctgaccaacatggtgaaaccccgtctctactaaaaatacaaaaattagctgggcgtggtggtgcgtgcctgtagttccagctacttgggaggctgaggcaggagaatcgcttgaaccaggcagtcggaacttgtagtgagccaagatcacgccactgcactccagctggagtgacagagccaaactccgtc

SEQ ID NO: 166318 - DNA, 272 bp, Homo sapiens
aaagatgagggtctcatcatgttgcccaggctggtctcgaactcctgcattcaagcaatcttcctgtctcagtctcccaaagttttgagattacaggcgttgagccaccgtgctcagcccctttttaaaaattaagacaaaagcaccacgacacagtgcaccacgacacagtgcaccacgacacagtgcaccactgacacagtgcaccacgacacagtgcaccacgacacagtgcaccacgacacagtgcaccacgacacagtgcaccacga

SEQ ID NO: 166319 - DNA, 161 bp, Homo sapiens
ggagttaaggttgcggtgagttatgatcgtgtcattgtactccaacctttaccctatctccaaaaaaaaaaaaaaaaaaaaaggcttaaagaaaaggaagtagggcctttagtttgtggcctttacctggacaaacaattaattctatttccccaagttat

SEQ ID NO: 166320 - DNA, 524 bp, Homo sapiens
gggtaggggctgtttgtgatctttttcatttaccccagcttttgcgttcagtagatttcagaattttaaaaatgtgtgctctttaattgtattaatattttgaagtaagagtacagtatgtggggaggaaatatgagggagatgcagtgggtcagtgttggcagaccactcacactagactcctgatgactatagccgcctctctccctgaacctgaaatttacccctcccagactaccatttgaggaagagagctagtccattatgagagactcaggaccaaggcgaggaattggaacactgtaaaccccgcaagaggggagtgggccttgcagagagttccagaatagtgcctgatcagcagtgtctcaggatcatcaaagatcctggcttcaggagctggaatgttacttgctgtgcttcttggaaaaagagtcacaatgtgtgacatttctgacctcaaggattcagttttggtggtcattttaaatatgtaaaattgtgagcactgtagttaccaacac

SEQ ID NO: 166321 - DNA, 393 bp, Homo sapiens
ggaatgatgtgcagaatggagattcagaaccctaacagactctggtattgatatctagtgctcatatttctgggagtctgctagggttatgggagtttgcatttaaattgtaggttgttgcagaaaacagaatttatatgtggaaaattgtaacgaatccactaaaaaactattagaactaataatcaagtttggcaaggttgtaagacataagtcagtatacaaaaatcaactgtatttctatacactaataatgtcctagctaagagccaaatcaagaatgcaatcccattcacaaaatgggatacaataccaaggaatacagctaaccagggaggcaaaagagctctacaatgagaacgacaaaacaatgctgaacaaattgtcgagata

SEQ ID NO: 166322 - DNA, 204 bp, Homo sapiens
caaaggacagaatgggaaagattaagagagagaaaaggaagtgtggaggagtacaagcagaaataacagcctgggcacagtggctcatgcctgtaatcccagcactttgggaggctgaggtgaaaagatcattgaggccaggagtttgagaccagcctgggtaacaaagcaagaccttgtctctaccaaaaagtcaaaaaaaaa

SEQ ID NO: 166323 - DNA, 148 bp, Homo sapiens
ttaaaactctaaacatcttaaaaatactaaattacacattcttttaatcacctccttgtagctgtctccagattaaaaaaactgacaatatctggtgctcaattcccaacatcatgaacggtatgaccctaaaatgagtttagtttag

SEQ ID NO: 166324 - DNA, 334 bp, Homo sapiens
caactcaaccccagcaggacgctggaggggcctccctcgcccgcctgtcttcgccggcgctggtctcccgcacccgggtctgcagtccctccgccatctcgcaggtgtgcagccgctaggcctgggggatccgaatgactggggctggataggaatgccttcgtgtttcccaagacccccgggcctgctccacaaagtttgaagggtgggtacaccccgacccaggcaagttgctcccccaaacccatgactgactaatctgatatgacaaaagcccatgatggatttggtatatgttaattcacaatgccctttcctccagaatttaactata

SEQ ID NO: 166325 - DNA, 199 bp, Homo sapiens
aaagatatccccatcctgcttcccagaacctgtgactatgttacatgacaaaggggaattaaggtcactaattatggtgacctttaaataggattatctgggtgggcccaatataatcataagcatctgtaaaagataagactgtagatgaatggcacagaagggaggtgatcttctgcacaaggtgatgttctgcaca

SEQ ID NO: 166326 - DNA, 378 bp, Homo sapiens
acaatccaacacggaagtaacacaggctgtcctttgggctcccccgcctgatccgctgaacagaatctcagttctgtttgacttacacggtcggtggcagagggaggagggagaaactcttccatctttattcccaaatggggatctcattttgggtgcatgtatgcaaaatctgttctgtctcctcatgcttagtgtgctagtatatatttactgctgactgcatttctttatgaggactcttctgtagcgttttgatactgacaattttatgaaggctatttcttgatatttgtttattactcctttaaaaatgtatttttgtggcagcttcaaggcagttgcaagatagtgtatttttcaatagagaagttggat

SEQ ID NO: 166327 - DNA, 195 bp, Homo sapiens
acggggcgtagacttgggtggggtgtgagttcagacccagcggggtgactctggagaaggtaccctggcctccatctatcggggcgacagcaggatgtctgcttgttgcagggcaaccggagctctgggagaagggctggcatgggtgtggctggtattcaacacaggactctgggagaagggctggcatgggtg

SEQ ID NO: 166328 - DNA, 723 bp, Homo sapiens
tgaactctctgctctattaagtgcctgtaaagcccgtaatggctgtaagcacatgaacccagctgaggatttgcttagttctgctttgctctgctgcagcaagtccttctggagacctgtgggaacatatggagctacctgagcaggagctgatattttaacagaaatataccatatctggtttggttcttttcttctttcaatctaatttggaataataggggccaagaactgtccaaactatttctgttcttgacttacgtatatgatacttagaagcagaaagactgttaacaccaatgtgacattatcaagggggattctatttgcattctttataaatgttaactatatatggaggcaggaacgggcagtgaatgaagttagcttaaaacatatttgacatttaaatgccaaattcatctccccctttccgaaccagcttgttttagtgaaatatttttacctttaaaaaatgggtgagggaggattaatttattaagtgagaaagtcataagacattcagtatacatctcccaaaatctgtaaatttctgtgctcacatctatgaagcaaattattctgaatatgctttagaatctctcagttgtggcataaaaaagggctctaccttattattagagaaagaaaaagaaaagaaaattccaaatttaagggtgaggtgaaggagaagggcttaattattatatctccctcaagaag

SEQ ID NO: 166329 - DNA, 610 bp, Homo sapiens
acctgggcgataggctgagcactttggaacaacatttaagggcaatgtgagcacaatgcataatgtccttaaaaagcatgttgtgatgtacacattctgtaattaccttttttgttgttttgtagcaaccatttgtaaaacattccaaataattccacagtcctgaagcagcaatcgaatccctttctcacttttggaaggtgacttttcaccttaatgcatattcccctctccatagaggagaggaaaaggtgtaggcctgccttaccgagagccaaacagagcccagggagactccgctgtggcccactctcctctttccgaaccagcttgttttagtgaaatatttttacctttaaaaaatgggtgagggaggattaatttattaagtgagaaagtcataagacattcagtatacatctcccaaaatctgtaaatttctgtgctcacatctatgaagcaaattattctgaatatgctttagaatctctcagttgtggcataaaaaagggctctaccttattattagagaaagaaaaagaaaagaaaattccaaatttaagggtgaggtgaaggagaagggcttaattattatatctccctcaagaag

SEQ ID NO: 166330 - DNA, 405 bp, Homo sapiens
agtacacaggctcaagatggtgtcattcagtcgactgatttttatggacctcgagttcaggactgctgcttgttcttggcacgggctctgaggcgcatgcagagaggaggaggcggaggaggacttgggggagaggtagagagaacgatcattagggctgggttgtgtgtgggctgtctcagctggcagaggggcacccagtcccatcttgagcctgtgtctagacacaggctcaagatggacatatatgtgtgctaggtgttggtcagagtgtttggttgtcaaattcagcctggctggatgtatgtactaggcactcttgtgtcatcactttcatttctcacagtagccctgaaagtgtttaccttaccttccctcctcctgtccccagcccaccattcagga

SEQ ID NO: 166331 - DNA, 311 bp, Homo sapiens
cccaagccaggcctttcccctcgtgagggttcctacccctcccttgtgtggccctgcaagccgcttctgcttgtccacacctgcgcccgagagttcttctcatggctggtgcgtgccatgaatgaagggcactggccagtggaagggagtgcccggccaggccttgcctgcctcaagtcctcagaccagagaggccagtgggggtcttgcccagaccatacagccgggaggtggtctgcctggctccatagcctcctcccgacctcacagctgtcctgggacggggactgagagagagctcaaagacagga

SEQ ID NO: 166332 - DNA, 290 bp, Homo sapiens
tggactcttactctcttactctttactgatttcaaagatgtttttgcatgaattcacttatttgatcataacacttggaacaaggagaagactaatttcagttttactgaaatgatgtttagaagttatgtgccatgctccatgtcacatgtcttcaaatgagtagagctagtgtatttgccagtctcttagtccaagcatttccctttgcaacattcagacattaatccgggaaccctgataggcttgaatgtacacagagagatggcctgcatctattttgcatgaag

SEQ ID NO: 166333 - DNA, 667 bp, Homo sapiens
gagtattgcctcctaactagcatttccacatccgttcttatgccttccatttacacccaactccatcgatccttctgccacagccttctgagtagttgagattacaggtggaagccactgtgcccagctcacgtgcaagtttttgtatggacatatttttatctttcttggtcatatacctaggagtggaatttctgggtcatatggtaattctatgtttaacctgtgaggaactgccaaacagtttttcaaagaggctgcaccattttatattaccaccaacagtgttagaaggctccaatttctctacatttgcatatctttataccagttggacatttgtatatctttagaaaaatatctattcagatgctttgctcttttaaaaactgtgctctttttatgatcgagttacaagtgttcttttttctagatacagatcccttacatatatgatttgcaaatattttcttccgtttcataggctacctttttactttgttgatggtgtccattgaagcataaaagttctgaattttgaagaactctaatctactttttttgttgctgcttatgcttttgataacatatctaagaaaatgttgcctaatcaaggtcacaaagacctacctatatgttttttcctaaaggtgctatagtttagctc

SEQ ID NO: 166334 - DNA, 533 bp, Homo sapiens
caccctgagcttgctgcccctcccttccatttcccagcctcctgcagtctcactctgtctccagtacttactgagactgctgaggtcctcagcgacatgcccattgccaatcccagcagcctgtgtccagttcttcacgttttttgaattcactgcaacattgaatgcttgccagtgatgcctccttgctgaaattcttccttggatgaaaagacacattgtttccgggttatcccttttctctttgactattgcttctatgtcttactgaggcctctttctatttccacccttaaccattagtgttcccaggattctagcctcagctcaacttctttcatctctcccagtagcctcattcatccccgtgaccccagctacacttgcaaggactcccagatccaaacctttgatccagcctttcactgagacattctccagctgaatgttgtgctggtctctcatatgcagcagagtctattcctcctcctctcagctctcttttctgtccaacctagaccacaggcatcagt

SEQ ID NO: 166335 - DNA, 217 bp, Homo sapiens
tcaccttggcctcccaaagtgtcgagatgacaggtgttagccaccaagcacagccagaaatgagtcttaaagtggacatgagattggggtttaagccacactaagctggatttgtaatcattgaaagtaatctgagagctatgggatctgctccttaaaagatgggagaggagaattttaagagatagggtctcactgtgttgcccaggctggtctt

SEQ ID NO: 166336 - DNA, 298 bp, Homo sapiens
gggtagaacattttgcaccccagctctacatgaccaaagaggtgtcaatgaacgaggataagttcattctaacaaatcagtaaaatttaagatcagtttgagggcaggaacagtggctcacacctgtaatcccagcactctgggaggccgaggtgggtggatcatttgaggtccggagttcgaaaccagcctgaccaaatggtgaaaccccatctctaataagaaaaaaaaaattagctgggcatggtggtgcatccctgtaatcccagctactcgggaggctgaggcaggagaatca

SEQ ID NO: 166337 - DNA, 1050 bp, Homo sapiens
taatttgagtgaggggtgagtggggaggaacggggcttgtctggtagggttgagactagagtcttggaatttgtgggagcaaatttcctcttcttgtaaattaaaaaaagaaaaaggccaacaagctgtcaaataaggcttgaagttgttgttattattattattgcaatgagaagatgaaccttgctctgaattgaatctcaaacttccagccctgatagggatcctgggcatctggtaagtcccgacttgcatgggggcattggggacgggagaagagctttctatatccaattcagagaatctttctggcagggtaatcagaggggtggcaataagataacttattttaataacctaaggtgagaggtttcgggattctggatgacaatgtctcggtgccctcaaggccactgattcctcgccacacagtctcagtaactccgcagcctctagacacggctttccggaagcggcctgcaagctggaccccagcgagttcgcaggatctgcgtagtccctgctcgcgattagagcgcacacgagtttactcctgtccaagtattctgataagcttcctctactgccctctcgtggccacagtcctcagtggtataaatctaaaaaacaacaaaaatcactgcgaatacctaaaagcaattgcaccaaattcttagagcagtagcggcagaagaaacgaagggagggaaggatgaagaaagggagccggagaaaagagagagagagaggaagaagaaaaggaaatctagactaaccagtcatctcgaacaatcgcacattcaacacaggactgggggatctaggctttactccaacatctgcagaaatcagcgaattcttcaaaagttcttcattgtaattagctgaaatttgtgttcctgtaactttcactggctactgctagttttgtcctgtgggaccacaaagaatctgtctaagctgtgttgcctgatccatacctgttctttccttcaaacttctttagcattcattgttggtaacacaccaataaattatcatatttaccct

SEQ ID NO: 166338 - DNA, 513 bp, Homo sapiens
tcagcttatttattttcctactcgataggcttcggagtaataatagccaacatttattgagcacaaagtgccaatagttgtgcccaacattttgcatggattatttcatttattcctcagaacaattctgtgtagaggtgcaggattcatttgaccaggtttacccacgtggaaacagactttctgataattaatgaatgaattagcgaatgaatgaaagtatcttacccaaggtcacacaacaattagtagcaaagtcagaatagtagctgaactttcagactcgaaaaggcctttaaccgctacactgttgccttgccattagtatttccaggttaagaagaaagttatcgatagattcaattaattgtagaaaattattaatgaaaatatggggccacttgttttgttgtctcttaaatttttttctctacgtcgttgaagccctgtgctctttgcttttctctctatcctttccattacattgccttctaacactatacccatgaggac

SEQ ID NO: 166339 - DNA, 439 bp, Homo sapiens
agtatttaggatttgtaactcataaatctctaacctttagttttcctttagattttggaagattttttatatttgttttcaaaatgaattcctaactcgaatgactttttaaaacgaaatctaacatttaacctataggaaagctctccagactttgagttcattttcagctttactgggtattgtgagataactatataaagatatttagtaattaattgtatatatcaactctggagctccagagtaagagtcaagtttgggacttctacccatataggtagtaactagggctaggcagtataaatagagtgataggagaagatcccaggagaaaatgctgaaaaacaccagtgtttattggaagagaacaggaagaagaacaagaactagaaagagagagaggagtaatgtccagagagacaggaaaaaaaaaaaa

SEQ ID NO: 166340 - DNA, 531 bp, Homo sapiens
tagaacacaattaccttgaaagtccaggaaatggggctgaaatgaattcttttatgacagaagagaggacatagttcatctgacttcagcttcttttcactgtgtctcgaggagtgggaagggaacatggctatgtcgtatgtaaactaagagagcgggttctgctttctcatcctccattcctgctccctgactcaggctcttataaccactcatcttccttctcttctatcattgtgttcctcacatcccctgcaccatgtctgccttcttctccagtccacttggactcaggttattcagtttgtttaaagagtcagtttcttcccgcctcaggaccttagcacatgctattcctttcacctgagtgcccttctccaaccccctgcttctctccacatgggcctggctgactctactcatccttcaagccacaactgaacagtatctcatcaaggaagccttttgggaacaccctgaccagcatgggcccccctgttagggattctttacacaaggtacttttctttt

SEQ ID NO: 166341 - DNA, 801 bp, Homo sapiens
gcaggttcccagccacggagctgagctttcccaccagcctctgaaccaccacctgctcataggatctggcagcccctttcaagaccatgggagtatactgtaggccctctcagtccctggtcccaggccaagcccagggtggaggtcattctccccacctttgcctatgacatcatcatgtcttcctcccgcccattcagacactcaggaaagggcactgatatggtttggctgtgttcccacccaaatctctccttgggccaaatggagataattgaatcatgggggcagcttccgccatactgttcttgcgatagtgaaaaagtcttacaagatctgatggttatataaatgggagttcccccatacaagctctcttgcctgctgccatgtaagacatgcctttgcttctcctttgccttctgccatgattgtgaggcctccccagccatgtggaactgtgagtccattaaacctctttcctttataaattacccagtctcaggtatgtctttattagcagcatgagagtagactaatacaggcatgtaggtgggcaagctgagtagaatctggagccaagaacccacatggtcacaactgcttttggggacccaaccaggcctggccaatgagggagatggcccttactgcccttggcccagacctggctagcctctcccttcctcgggagggaaagtcctttgattcagtgggcaccctgaatggggtgaacacttatcacccacttcactggaaaagagaaatgatgtgccttccattcataaacaaatctttgtc

SEQ ID NO: 166342 - DNA, 276 bp, Homo sapiens
ctcctgagtagtaagcaagctagggaacaatggctggttattgcttaatgatgcttacagcttaacagaatttaggtccttaccataattctaaccttgtggcctttcattattttcacaaaggcagtttccatcctgaacaaagaggaggttagttttaagcagggactattatcatccttgcttcaaactgtaaactaaattcctcctatggttagcttggcctacacggaggaatgaacgtacagacaacttatgaggttagaagtgagatga

SEQ ID NO: 166343 - DNA, 209 bp, Homo sapiens
agaactgggttaatgtcagtgaaatcggaagcttgttcatcagcatgatggtaggattgggctctcactggtgaaatataagttatttgagatgcagggattagctaaaatatttagagaaactctcacacttctcaagagtgtattagaatcttgcgaggccgcagcctgtatcttagtagggcttgattcgaaacaaccccacatcc

SEQ ID NO: 166344 - DNA, 461 bp, Homo sapiens
ctttggggttgatctgccaaggtgggcagatcacctgaggttgggagttcaagaccatcctggctaatatagtgaaaccccatctctactataaatacaaaaattagctgggtgtggtggtgcgtgcctgtaatcccagctaccctggaagctgaggcaggagaatcgcttgaacccaggaggtggaggttgcagtgagccaagattgtaccactgcactgcagcctgggcagcagagtgagactctgtatcaaaaaattttaaaaaattaaaaaaaaatagataaagggacaagctacagactgggaaaaatattttcaaaccgcatatttgacaaagaactcatacctagaatatgtaaagaaatctcaaagctcaacataaaaaaaaactcaaataaaaaaatagacaaaagacctgaaaaaatatttaaaccatgaggctatacggatggcaaataa

SEQ ID NO: 166345 - DNA, 386 bp, Homo sapiens
  misc_feature (29)..(29): n is a, c, g, or t
agggaaaatggcccaagagggcaagaatnaggaaagaggatagatcacgccattgcactctagcctgagtgactagagcgaaactccatctcaaaaaaacaaacaaacatacctcatagtcaaactcaaggtctcttacactttctcctagacgttttatagttttatattttatatttaggtctataaaccactttgaaataatttttgtataaggtatgaattatgtgttgaggttccttttttgcatatggatgaagaatcattctagcaccatttgttgaaaaaactgttccttctctattgaattgcctttgaacttttgtcaaaaaatctgttgactatatttgtgtaagtttaatttgggccgtttattctgtttaatg

SEQ ID NO: 166346 - DNA, 235 bp, Homo sapiens
tgtttcagtggaggaaaagcacagcttcatataaatcaactcaaaatgtaaacataccacttaaatattaatcaaggtaattacagaaaaatagtccagaaaatcgctgtaacaatccaagataaataaatgtcccttcgctaaaaagaaactcagaactcacttgttcataacctaacttgactttctttgcacaactcataccaaataccatatgcttggctgtatctgtttg

SEQ ID NO: 166347 - DNA, 424 bp, Homo sapiens
caatatttttcaaaagcaacatttatgcaaaaaactcgtgatgcacaaaaaatcaaaatgaaaacccacttggcatatatggttcttttcctgagctgaacaaactcttgacaggttccatccctttttcctatcactcttctgtgataaaaagtcatctggtcactcgagtaagcaaaacgaatcttctttcaataataaaaaatgtccagtccaggtaagagcccactctcagcccacttccagcctgttcctgccaccggtttggctgggatgccactgccttgagaaacaggggcagcccagttctgctctcctgacttctgccctcctcctccaacacatccctttggattctgacccttcacagggaggcccagggagagaggggatccaggacagaatgtacagcctcctgcagcag

SEQ ID NO: 166348 - DNA, 509 bp, Homo sapiens
attccactgcccaattttgacaattgtgttatttttcagctctgttggagattagagaggttttcataaaatgtaaaaatactgtaaaatgtctaagggtctaactgtctcctggtgacatggacttggcagcagatgcttctttccggttcctggtctgcctcctcacactcctttgccagcacatttccaaaaggtatgagccagaccagcggatgcaatgactgagatttttctcgaagttactctaaaggctagcagcatgagcatcattaatacatattactggccaactatcacaaaacagggtcgggatccttcagacactggagtacaaaagcctccaggcaactcaagagcttcaatgtaaaaggtaacttgtaggagaatcactggagcacagagctggaagaggccttacatggtatggtgaaggctttaaattcagcacgactttgcaggtttagatcctggctttgccttatactaactgtgctatccaccattga

SEQ ID NO: 166349 - DNA, 263 bp, Homo sapiens
ggtcagtcctaggcaaagagaagaaataggaggcaacattgatctttggtgacacctaaaggctctgtgcaaccttttcctctgtccagagtaagcctttggtgtaatccctgctgcctctggggaccccagggcaaagtcttggggagggcgcaaagagggcttgtccatcacttgaggacgcagaggacgcatgtgccctgcacatcaggatgagtaaacctgagctccttactaaaataaagctgtcttttgagtgtgtc

SEQ ID NO: 166350 - DNA, 407 bp, Homo sapiens
tggctctgccagattctcccaggagaaaaccctcctattcatccttagaatgccacttggtgtgtactttagcagtaaattaccatacactacccccatggtttgaaggagctgattcacaatgaaagcaccagagtttccttggaattaatttgactatgccacatttctatgcccaagaaaacaaaataactttaatattcaatagaatacatacacaaaaatggacttttaaaaaagacagttgtttttaatacaagatcttaaaacagcatcatttttcatcttaggaaatcatgtgtgtccaagtgattttgtattataattacattgtttacaatgtaccaaaaagcataaagacacataacaccttgcccagatgtggtggttcacacccgtaatcccag

SEQ ID NO: 166351 - DNA, 410 bp, Homo sapiens
gaatggatcagggaatgttaggtgtggaatggaagcctaggaaaatggcatccacaactgatgggtagaataacacttacggttctgaggcatgtttgaatggagggtaaaacctgattgggcagcttaaaaatgttgtgatttaaactaaccatccttagatcattttgttaattgagaacttaagcgagaacaaggtttgatcatatattgtttcctgactagcagaaacggattttaccttattaatgtttgcatttggctgtgtcttgtttacgtctttgtcagaagtcatttcaaatttttttttgtttttttttatttgaggtcagcaattcccttttctattctgtgactttgtattaattatattttctctctgtagactggatgtgatacttattaataaa

SEQ ID NO: 166352 - DNA, 162 bp, Homo sapiens
tggcctatactatgactttatggacaaatccttcactgctgccatgaagcagaaaaaggtaagaaatcttctcagttcattttatgaatctagcatgacctggatatcagggtacacacttaaaaaagaaaatgaaatgcaaaactcattcaaaatgcagct

SEQ ID NO: 166353 - DNA, 427 bp, Homo sapiens
agctgacagtggggcaaagtgaaggagcccagtattggaagatcggctccacatgtatctctgcgaggagactgcaagcgagctcgtgtggaccaggcagaggcgagggctgagtgaggccagcagtggcctgggcacaggaagacggtgagtgagaagccactggagctcctgtgcaggagcgcaacacctttactgcttcattcagtttggcttcacctgcttaaaactgtaactctctagaaggctgaacagcaaaagcctccctcctgcccagccgctcagcatccccaggcaccagcactgctcccagtctccaacgtcctccagggctcttcgcttctgggctagaagcagggaaaccagagtgtgctggggaagaagaggaggaggtggaggagggctgatgatggggccacatgctgct

SEQ ID NO: 166354 - DNA, 404 bp, Homo sapiens
tgcctcctctgacaccacctcaatgggaaggggagcacctcattactgctggataggagtagaagtccaaggtggccatgtggtctccactgaccactgggagaagagggagctcattaccagctttcagggatgagcttcatatttggccacctttaacaccactccagcatgggtggtaggatgcctcattacaccctatgagggtggaattctaggtagccattaggttttctctggcatgagtaggtgtgtggcggaagggatgggggtgatattaggctatagtagagcagttttgtctgaaagatttctgtcttgctagactgccccttttctggtcctttggttacagagagtaggcttttattgggtctcttcgtctgcaactgtcggttttctcc

SEQ ID NO: 166355 - DNA, 496 bp, Homo sapiens
cacacacttgagaggaagtgcacaacacacacctgaggagaatgtgcgcaacacacacctaaggagaacgcgtgcaacacacacctgaggagaatgcacgcagcacacacctgacgggaagtgtgcaacacgcacctgaaagaaggcacgcaacacacacctgagagaaagcacacaacgcacacctgagagaaagcgtgcaacacgggcctggaagcctcagtaggagtcagggaggcctaagtccaaaccctcagaaggaaccagtcttaacttttttcacatctgaagcatgaagaatagtaatattcaacactggtaagttcagaaagaacagactcaaacataggtgggtggagagggaactgctcaacctcttggacggaagtttggcagcttatgccctttgacccagaagtgtctgtttgggaaaccaattcataggaataaaagcacatatgtgtgcatgcttatgtgcacgcaacgcacacctttg

SEQ ID NO: 166356 - DNA, 335 bp, Homo sapiens
gctcggggttcttctattttactgtttcattgtgaatgtcttccaccctcaaggttaactcatggtccaagtacctgctggagctccatattccaactagaagaaagggagaaggattggaaggacataccacctaccctcctttttaaggatccataccagaaattgcacatattatttttgcttataattacaatggctacaacttagtcctatgtatgcatctagtagattacagaaaacttgcatgtggcaggtccaagacatgaaagagactgaaaaatatttatactatgtggccacatgcccagctaaagggcacagaagcatagaag

SEQ ID NO: 166357 - DNA, 326 bp, Homo sapiens
cacggacttgccggctaggcactgtgtggccggcagggtcagctggctgctcgtggtgtacaggtccatctgacccatcttaagatgggtcagatggacaaaccttcactattagaatgtaaaaggtttgtccatggaccttctaaagtcatcgttatcccaccagaagtacatgtatctctctttgggaaccctcaacggggtaaccagtgtctctctgagtcctaggatcttctgattatggctgggtgatgggtttttcagctctcaccaccctggttctcatgtacacccagcaatgggcgtgcgtccatctgacccatctt

SEQ ID NO: 166358 - DNA, 234 bp, Homo sapiens
ggtgcttcctggggctgccacaggtttggtgttgggcttcttcaaacattcagttctggccgggcgccatggctcacgcctgtaatcccagcactttgagaggccaaggcaggaggatggcttgagcccaggagtttgagatcagcctggtcaacagagcgatatcctaaactctacagaaaattagacaggtatggtggcacgcacctgtagtccctgctagtggggggctga

SEQ ID NO: 166359 - DNA, 257 bp, Homo sapiens
tcccttttccaacccccccgccatctatcacatggcagagatagaataaaaacagaaaaatggcgacggtcacgttgtggcgagccttgctgcgtcattagataatcctcatgcaaatagcgggaagaacaaaggaaggggagcccgggacccccgggggcccaagtgggtgtgggggcggcggccgggcgcgggggcggcggggcgcgcggggccgagcgcccgcgggaggcgggctgcgtggggcgtgcggccgc

SEQ ID NO: 166360 - DNA, 354 bp, Homo sapiens
attttaaatattaccagtgtagttaattgtgtgaagaatattttgaaaacctttttatgactagatatagtggtagatcaaatgaaattgccataaaaagacaactcaaagatattcaagattaagtaaataaccacagggtaatgtgtatactatgggctcataaatagttttaagtttgtgtacagataaatagacacagaattgtgtaacaatctaaaataacacatgataaactgttaacaataatgtaattatagatgggcaggggaatggaatagacagttgaaagggaaccatttcctttaaattctatgtatatatctctgttgccctacctgaatcaaacatgaa

SEQ ID NO: 166361 - DNA, 531 bp, Homo sapiens
cagcgcatatgcggccactgtcttacgcatggaccgagagctgcatttaaaactcaactcaaactattgcaagaaaagtaaggctttggtggaaactgaatgtgatggtgcctgacagacagccccagtttgcactagcccccacctgcaaaagaactgggctgggctctgggttgggaaagaggagtaaagcagaagagagccaggaggaggtggcaggaggcacacgcttcccccacgtcgcacttgggagaggagtgctctggcgcctctgggaagaaactcctcggtgctccccagggaagcctcccctgggtcgagagtgccctggggaggaggatgggcctccccagggtgttctctgcctgttccccgctctcccagcacattcccaagatccacacacccacctctcttctctgcaccctgaggatgcactgatagccacagcgagcctgtttctagtgggaacagagagctgaaggtggaaaagaaagagaagcataacccagccttccccgcagtgttccg

SEQ ID NO: 166362 - DNA, 284 bp, Homo sapiens
ctacagacttatccccaagaaatataagaataagctactggtcctttaactatatcgtttgaagaagttggatctacacctgtggcttagtaaagcattatggcaaaaacttccctttctttagcaatgtggagagagggaggaaaaaagaagacacagtttctgcccttgttatcctgctgctgaatttgttacaagatggttaaattttatatagtttaaaacttgtaaagaatctttcaataatgaagaagcaaagtttgtaaactaggcccctagaggtg

SEQ ID NO: 166363 - DNA, 523 bp, Homo sapiens
  misc_feature (24)..(24): n is a, c, g, or t
gagctcggtaccctccactagtgnaggcattcaggtgtctgccttatttagtactgagtcaggccctctaggttgacttagaacctgagagtgtatagcaaaattcttgccccaaaagggcctctagtttagttgggtacacctgatttccgtaatcatatggggacattgcagtccagagaagggaaggaacttgtctaaagttacccgtctcattagtctcctgattttcacagtgccactccagcaccctccctcctacagactcactcccacacacacctgaaacaacagctggccatctagagaatactggcaactcccaacttcatcagtcctgtcacaatggtttgtcgttagcttgcttatttagaaaacaaacttctttccccattaaaagtattgatagaattgcattgaggtatggtgggaaaaaattagatgtttccagtgagacttgagttttagtggttctgatatttaccacctgtgggactctgggctggtcatttcctctcttttg

SEQ ID NO: 166364 - DNA, 274 bp, Homo sapiens
cagttccttatttaaccaacataagaacccaataagggtggttctattattaactccattttagaaaaaacaaaactgaagcttagagaggcaagtggcttgctcaagatcccacagacactaagtggtgagctgatattcaatctggcactcatctatccaaaaaaaaaaaatcttactttccaatagcctgaggtatgtgccagcaacccagagctgaagataattagtcaacaaaatttgtcctcagaaaaagtatttcttatttgattat

SEQ ID NO: 166365 - DNA, 669 bp, Homo sapiens
atactagtcatgacatggtgaagaaggcgtgcatgtcagaggatgagcgagaagccctcagaagttctggagcctgccatatcagtgacattctcaggggtgcagcgtttgagggcaagccagggacaagttattgcatcctgcatccttacaaggaagaaagaggcacagcattgaggcacctctgtgttttggagtcagcatgcaccgcgctagaggatacctctctgacccctttattgggtaacgggaaaactgccagctttgagtggggcccagagaaaaagagggctctgctaaagatttggattgggagatgggcttccctgctgcatagatccaatgggttaccggggggcttatttggggtaggaaggaccctatatggcatctctggcaaactccaacggaagagttgcagtacactgtcctagagttcctggacaagaccatgccttctgcagcagagaactactcgccaagtgagagcagtatcaggcacactaccagacccaggtagagaccgagcacctgctggtgggacatcagcgaccatgcgacagggtctgcccaagcgaggtgttgtcagatcctccaagtcagtaggtcagaggctcagtagcaattgatggtacaatgaaaaaggaagccttgggcttggacccaagc

SEQ ID NO: 166366 - DNA, 83 bp, Homo sapiens
tgaaacagagtttcattggttgctcacagtggagcacagtagcgtgatctcagctcatgcaacctccacctccctggttaaag

SEQ ID NO: 166367 - DNA, 146 bp, Homo sapiens
ttcctaggtggtcttccttttttccaaatcagacaatcagaacttctacatctgtgcatttaaatggtagtagctgtgcagctgttgtcatcttctgggttttttgtttaaagcaaacttcttgacccaatctagttagcaagttt

SEQ ID NO: 166368 - DNA, 483 bp, Homo sapiens
agtcaacctgtgggagggattttgcagtgaagtttgctgtgaagcagcatggggaaatggagtggtggctataaacagataaagggtatgtggacttttaaaagtttatattaatgattaaatatgcatctttgttaaaaattttgtatcagttttctcatctgtaaaagaggcaaatttaacaatgatgcttcaaatggttgcaatgaaaatgaagagttattgcgagtaaaggactaacaccatacttggtgctttatatgttctaagtggtcattattatcaccaggtactgtagaattccttaacactcagcatatttactcaaattatttttctttttcgctctttactgcctcagatataagaagttatctttaagtaaggtgctatggaagtggagttcgaggacaagaatgaacagttaagttgttaatagaattaaatcattattcaaccatgtgtcctaaactctgcgttagg

SEQ ID NO: 166369 - DNA, 422 bp, Homo sapiens
gcaaactccctaattctactcaaacactgagacattatctcattccaagcctaagacacgtgctgtttctatgctatgttcaggggtctttagaagacactaggcaaccacaaaaaccatcccgagaaatgcttctatatcaagagacatctatatcaaaaaaagacatctaaatcaaaaaagagacattctgtataaaaggatgagtcattacttgggtagagtaaggaggagataagtatctccaaggtgttccacctttgcaaagcttggcttataacaatgaccgaattcacgataggaaaggaagagatttttcagattcatataattcaggtcagaggtccaaatgacaggctgatgttataatcaaaggctctccagaacggggaattggacattccaaaatgatggcaggcaga

SEQ ID NO: 166370 - DNA, 327 bp, Homo sapiens
caaaaagtcaaatgctatagctggactaactggtactagaattgcaaagttataatcatattaaaagactaactttagattttttatttgcaatgacaacataatacaaagtcagtagctcttgattttcttgctatattatatccagtgactactgacgctaatgtggaacatttcctgctagttattcattgattaaaaaaaaggagtcattttttttttttccagagactgggcaggagataagatgtcaagaagtaataagtagtgaaatgaaagaggagaatgcaaaggaaccaaaagagaaaacattaaaatgatgttatt

SEQ ID NO: 166371 - DNA, 540 bp, Homo sapiens
  misc_feature (376)..(376): n is a, c, g, or t
  misc_feature (383)..(383): n is a, c, g, or t
atctactgagatagggaaaaaccgccttaaggctggaggtgggacatgcgggcagcaatactgctttgtaaggcattgagatgtttatgtgtatgtgtatctaaagcacagcacttaattctttatcttttctatgatgcagagacctttgttcacgtgtttatctgctgaccttctctccactattatcccatgaccctgccacatccccctctccgagaaacacccaagaatgatcaataaatacaaagggaactcagaggccggcagcatcctccatatgctgaatgcaggtaccctgggcccccttatttctttctctatactttgtgtctttttcttttccaagtctctcgttccacttaacgagaaacancctcacnaggtgtggaggggcaacccaccccttcaccacaccaaggtcttccgaccaggctttgagtaccattattgcaaaggaagctcatcttaggtaacttattactagagcagaaatcacctaatgtaaagtatttcatgtatcgcatttaaaactgactt

SEQ ID NO: 166372 - DNA, 277 bp, Homo sapiens
tgatagggatttaaatgggcagaaaatggagaagaatttttacttctcataagatactagataaaataaacttcctaaaaatgttggatgcaattctttttaaaaacctgttctagggcacagctgagtttgcaagacaataagaaaataaaggaaatcctaaaataatagaaagcaagagcaagaatccaagatgggaagcaggctctcaatccagcagctacctcgaggcagttgccagcttccagtaacctagatggaaatagtctacaggcaa

SEQ ID NO: 166373 - DNA, 143 bp, Homo sapiens
ttggtgactctatgattacctcgcgcccatagcacatagcaggatgtatcatgggttaatcattttaacatctattatttctgggacatccttattgtcaaaattggttgacagcgtattttgagagtggaagccatggttaa

SEQ ID NO: 166374 - DNA, 724 bp, Homo sapiens
ctcttgtccgtcctgtctgactgccctgagcgtctgctatttgctgaattgtctgcctttggctgctgagagtgtgggcgcagcatcccccactctctcaactcgggggttggcagagcgtgggattacctggactgaggctgagcgcgcttcctcctggcatggcttcagcagtgggcagcagcaccgggggctctggaagcttgtgctcctggcttcagcctggaggaggggttggaaagggccagggaggaagagctctgtgtccattttgaggtgggggaagtgtaaggcccactggggcattgggggctcacacgttaggcccctgcacctgccgcctcctggtcctgcacttgacagtgactgccccagaattggtaactcctgactcaggtggtgggcggccaagttgattgtgaaggtggcgttgccttctaaagcttggctccaggggcgctgcgcactcccaggaggctggcggcgtgcgtgtttgtgcatgttcagaagagcacgggaaggattgggtttcatcaatcggtgttttcccaggacatgaaggcgtgcttctgagggccggctcagccatgctggccagctcgcctacccaactgcaccacacagccaggagctggagagacaggaccctccttcctccctgtccccttcgtcgggctgtggggcattgccacacttcctctgacatgctcactgaagtggggcc

SEQ ID NO: 166375 - DNA, 388 bp, Homo sapiens
cctcttggttcatcttcacaccagtcccggggaatggatggagtccaacccactcctcaagctcaggactgcctatccacaccccagccacagcccgattcccacactgcaggcaataaagcagagaggaattggcgcctcctcctaggtgccaggcatgcagatgtgatctgtgtggcagatcctgactggaggaagcagacagagaaggggagaggaaggcccactcctcaactgcagccaccatggttcatggttgcgagtataccatttgcgcttcgggtaatcgaccagcgttttggaagtcagtgcatcccagacgatgcgactaaccatgaacgaggccattcgacggctagcagggccaccgtatatatcactcatcggg

SEQ ID NO: 166376 - DNA, 263 bp, Homo sapiens
aggctggatctccataaaccctttgctgtaatgaggaatgtataagttaaacattaaagcagaagtagaaaacaatggataacgaactggggtaactggtgcctgagtaagaaagctcgaatgcaaaaacaaacctattaaaaccttacctggacttcctcaacctcaaacctgattgagggatcaaagcgtgcaccaagacccacttaagaaactttcctacccacagacccatagttaaaattagattaagaaacactccc

SEQ ID NO: 166377 - DNA, 246 bp, Homo sapiens
caaagtggtaggattgcaggcgtgagccaccacgcctggcccccagctgcttaatttcatataatgtgcaagcctgaaatcctgctgggggtaaggaatatccaagtcccgccggaggacagcaaacacgcttggttaggacacatagccacctgaccagggcagaagtgaggtgctggagtggggggtggataatggctcagagacacaatgagaagagaaagaatggtctagaggccaaagcag

SEQ ID NO: 166378 - DNA, 140 bp, Homo sapiens
tggaacgtggtgagcagtggaggaagaatcataatgacccagggcttccaaatgccagcctctggaaagagaggggaaactgaggcagaaagggaggttctggaaagatgagaaggtttgcaagtaagggatcattaatt

SEQ ID NO: 166379 - DNA, 340 bp, Homo sapiens
cacctttccgggtctttgcctaagagctgtggtgacttcctggttcagtgcaaagctcccagcttcttgcctgctcttccagtctctgctgcttccactgtggcgcttccacaggctctggtgcagaaggaaatctggctctgggtcagttagaattttaattaaaaatggaaatgcaggctcatgtcaccagtactacattctttcagcccagtgatgatttctggcagggataaaaataacagacatagccctttggcactaatgaagaaaggggtatatgtgtgggtgtgttttaatgaattaaaaatttataacagaaaatttagatataataagt

SEQ ID NO: 166380 - DNA, 588 bp, Homo sapiens
ccaagtagctgggattacaggcatgtgcccccatgcccagctaattttgtatttttagtagagacagggtttcaccatgttggtcaggctgctctcgaactcctgacctcaagcgatccacccgcctcagcctcccaaagtgctgggattataagcataagccaccgcgcctggccccttgggtgttcttgctacattgctctgtgcgcgtaccttgatggttgatgaaattgcttcttctgactaccagtaatcacatcctctgaaatcctgcctcaaaaccagcccatcttcaaacacatctacacagccacctgaccctaaatgtttgctgtggtccgtgctagatcaaacccaggcatgatttttatctggattcgccccagagctgtctcccagaccctggcatttgctggctccattcattccctggagtttcctcgctcctccaccctccacaattgcaccagcaaacctgcgcagctggtttgccagggaggagcaagacctgttttcccatcttagggctcttctcgcttctgatttcataggtggtcagaaagtacatgtagggtttgaggtggggac

SEQ ID NO: 166381 - DNA, 218 bp, Homo sapiens
atgggacgcagagggacacaaagaggcggggcaagagctcaagtataatagcaggggtggaaagtggagagagaaaaggacagagatgggatttgagggaaaggggataaggaggaaaggaggtctccaaagttgggagaaaggaggaaaccctaggatgtgtgtcgcccctccaggaccagcctaaagcacagaggcgtcaggagggttttggaaag

SEQ ID NO: 166382 - DNA, 659 bp, Homo sapiens
ggtttttggtccttgcgatagtttgctgagaatgatggtttccagcttcatccatgtccctacaaaggacatgaactcatcattttttatggctgcatagtattccatggtgtatatgtgccacattttcttaatctagtctgtcattgttggacatttggcttggttccaagtctttgctattgtgaatagtgccacaataaacatatgtgtgcatgctcacacagatactttttaacaacatgaccactttctaagttcattaccctttgaaacaaaataaaacaaaactcagctacaccatttctaaacaaaggtgtaaaaaaaaaattgaagatccagttagctaaggaagccactaaaagagttggaacaaaaggctctctccaaatggctatgaatttaagcctttataattcataaagaacatatgaattcaggaagaaaaatgtgcagtttatagttttatatagcattaaccctggaagttgctctcagatcttaaaagtcttcaaactcttctgttacttttacatatgaagatagcaacgtatttggttgatgatggctaagaaaacatctggcacagccatattaacaagggaatagtttgttttacgacagaagaggaagcttctgttctcggctaagagccatgt

SEQ ID NO: 166383 - DNA, 404 bp, Homo sapiens
aaactttctattttcactttaatttaaatatataaaggctctgcttcaactcttgagaaattctagctgtaggaacaacctttccaaatcattttcttctttaaaaaattctagttttggcaaaagcatcttcagtttatccacaaaccatttacttttcataatccataatttaaaccagaaagtgcttttcttttttaatagagaaagctaatttatctgacattgtcatcatggaatagtgtgttgcaaacaagctagaattctagaaagtgcgattttttttattgagacagacttttgctcttgtggcccaggctggaatgtaatggtgcaatcttggctcaccacaacttctgcctcccaggttcaagcgattctcctgcctggctcaagatggatgg

SEQ ID NO: 166384 - DNA, 180 bp, Homo sapiens
cattcattattggattgtggtctgttctagattgggatgatctagaatattcctggggggagaacagggtagctaacagttaagccttaagagaatcagtacaactgttgaaagtacccccaaattactctattattattattactattattacttgctatctgttacatgccagtattt

SEQ ID NO: 166385 - DNA, 511 bp, Homo sapiens
ccaccatagggggcttgctaggtaaactcaggtgcattcagagccgaaggttacatgggaaggaatgaggttggttgcgtgtccatatggaacagtctgtaagatgatgcccagcaaaaaggggtacagggtactgccatgtgtgtcatggagaagggaaaatggaaacatccactcccgggaggttctgagaaatgcacatatatggccacacaaagacttgtacatgaatatttatagtagcactcataataagcaaaaatggaaccaatccaaatatccagcaagtggtaaatagataaacaaaatgtggtggatgtatgcaacagaattctatttagcaatgaaaacgaacaaataattgatacatgctatgacatggatgaacctcaaaaaaattatgctgggtgaaaaaagccaacttgcaaaagactacttactgtacgattctatttatatgaaatatctagaataggtaaatctatagagacagaaagttgattagtggttg

SEQ ID NO: 166386 - DNA, 593 bp, Homo sapiens
ctttcttgaaggggtgaggtcttcttaccccctttaattggggtagaacttcgttactgccatgaccagtagattatatcagaagtgatactttgtgacttttgagtctagatcatagaaatgccatgcaattccaaattattatttatggaacctgccacatgctgtgaggaagcccatgctgtgagacagagatagaacattcatttaaaaaatgattggaggaggagccaagatggccgaataggaacagctccagtctacagctcccagcatgagcgacgcagaagatgggtgatttctgcatttccaactgagctttgaagagagtagtggttcttccagcacgcagcttgagatctgagaacaggtagactgcctcctcaagtgggtccctgatccccgagtagactaactgggaggcatcccccagtaggggccaactgacacctcacacggccaggtactcttctgagacaaaacttccagaggaacgatcagacagcagcatttgcggttcaccaatatctgctgttctccagccaccactgctgatacccaggcaaacagggtctggagtggacctctagcaa

SEQ ID NO: 166387 - DNA, 356 bp, Homo sapiens
gggagggggaagggggaagggggagggaggagggagaaaagcagaggcattaggggaggaagaagggaagaagacaacttctctgggaagattcagataccagtggctgtatgttgccttgtggccagttaggcctttccaccactcaaggcaaaagaataccaaaccatgggccataaacagatagcaccactcctcctgacttaccctaaaagctgaatgcagtggagagcaaaagtccatggggaacgggatcgtgtctaccttgcaggccctctacccccattcctggcacatggtaggtacataataaggattttgtggacagagccctgtctcttctgggagctcagaga

SEQ ID NO: 166388 - DNA, 209 bp, Homo sapiens
aatggagttccatgaccatgctgattgacaccatatgaagtcagtctatctgatttgcgctaagtctttggtgcttcatgaaatccctctgctctcctcggttagctaccttccaatccctgatggcagcacatccaaaatgagctctccctcaccctgtgcaggttgtgcagaaaatcttccctcatctttcacagagagagaaaaaa

SEQ ID NO: 166389 - DNA, 242 bp, Homo sapiens
tgatgcatgaactttttgggtttttctaggcccagcaacattggaaatcatctggcattttcatcttaagaagtatgaaaaatagaaatggcatcttaattctgtatgttgacattttaacaattgtccaccaggccaactgtccttataagtaatttgtgtttcttttttctggcaaataagcgttcactttctctactaattttctagcagttattctcagttgcctcactggtttctac

SEQ ID NO: 166390 - DNA, 620 bp, Homo sapiens
caacatgtttagttggaaaatttcaacaataacaaacagtcatttcaaccagatgataaggtactgatttctaacagtattggcgaatcctttctgttcatcaacatgtatatgaaaatctcaaaacagttttattttctagttattggtatttgctttttgctattttgcccacaacataatttttaattattgtttatcactcataagtgctgactagttaattataagctcatttctatttatgtatgtatgttagtgtacaattaaaagaagcatgtgtaattatagactgtaattcagtaacatttttgatgagtaattatataatccttgttttaaaagataaggaccttgagaaattatatattctgcaggcacgctttttaaaaatcattaaggcaaaataggggacttctgagatgaaaatagcagatagaggtatttcaaccccgcttctccccaaaaaagttcagatccccaaataacaagaacaagaatcagaaaaatcaaactctatgatgaagctatattcaacattctgtaacttgaatcacaatatgaagtgtgaaggtgaaaagcagattgaagaaaaatgataagttattgagtagaggaga

SEQ ID NO: 166391 - DNA, 536 bp, Homo sapiens
tcagtgtactcttctgctttgtaggagtgagatgaccgggaggaagaggaggaggatctggacgtgcctctcgctctccggtgcttcttctgcttctttgatcctttataagttttctgttttctcagctgacctttccctcgagtggctggagtctcgggaattcactgattctctagatttacctcgctgaagatctctctccttatgttttttatgacgttcaatatcaaggcggagatcaacaggatcatctctgtattttccctcagccttgtagccaggttttctgggacttttcatttcatcacgagccaaaccatgttttatgaaagtactgcgggaaatgtctattgtcctgtaacttgtttttggctgcctcttgctcagttcctctatttaggtatttagtaaagtgtttatgtaatgtcattcctgaggacccaaagtgatgctctttaacatggtgaacaatggtcactatatgttgggctaacagttctgagggtctacgctgagactgagctgactgtatg

SEQ ID NO: 166392 - DNA, 463 bp, Homo sapiens
cttggtgaacactctcctccccatctgggattgccacttcccttgtttaaaacaccagacacaggcagagattctcttcttaactctccagtactatcttcccaagaagtgcgatttccctaggtttgctcaccattagagcccaaattctgaaattagctggtattgtctgtcagcaaaatggtaactaatatgaaatccattagaaaattatgatatttgagaggccgagatgggcagatcacctgaggtcagtagttcaggaccagcccagacaacatggtgaaaccccgtctctaataaaaatacaaaaattagccaggcatggtggcacatgcctgtagtcccagctacttgggaggctgaggcagcagaatggtttgaaactgggaggcagaggttgcagtgcgctgagatcgtgccattgcactccagcttgggcaacaaagcaagaccccatctc

SEQ ID NO: 166393 - DNA, 399 bp, Homo sapiens
tcataactgccaccatagtggcatcaagtgcatcacttgatgcactcaagtgatcatttaacaaattaatcaaattactcacaacggatacttttaacgagagccaccatttttgccacaaaggagatcatgactgtaagcttatctagcaagctatgtaaaaaaccaaataccatacacaatcaaaagcccagtaaaaatggcacatacacatgtgaccgaagctgagagaaatacgttccgtcgctgctattaagtattgcagaaattcctcttaaggtcatgcaataaacattactgaatacccaatcaggcacttttctagacaatgggataaaaaaagacacgatctctatccttaaggagctcttgcactacaatgaagaaaacagaagaaag

SEQ ID NO: 166394 - DNA, 354 bp, Homo sapiens
ttccaatcacaggcattatacaagcattcacatggccttgatgcacatattagggaagtacatggttagaagaaataagattttggaccaagaacacattagatcatgttagcctctgatgtggtgaatggtacatgaatggagatagttaggtcttgtgctctaaactctcctcactcatgtacacacacacacctgcagctgtacacacacacacactctcacacacacacatccctgcaggtgttccttgccttccaataaaacttatctttgggaagctttaaccagaggcaagattgacagatgtctcatatttaaggtagtgtttgtcaggataagtctcagactctt

SEQ ID NO: 166395 - DNA, 515 bp, Homo sapiens
gaaggcattgccctagggacaagaggaggcctgcaggcttgcagtgctttctgcaattcagctggtgagaccccaggaaaaaagctggccagagccaacgcagaggcgggaaagagggtgacagtgtcatgtgggaaacacaagagggaaaggggccagaggcggagcaagaggaacaaaggcttggaggataggtccctgctgccctgtgacttgggcatgatcgggacagcagctagaccctctgtcactatgtgaaagttgccctgttggggaaaggccccgggctctcaggatgaactgaatgtcatcagattccggagcagggaggggctggaccggagacgaagcattgctctgcataaagtcagggctgcctgcctgttcggggatactctgagccctttgatggcttcctcaaggctctggattttaggaacttgtgatgtcgctggcttatatttgtgtgaatttgacctgtgggttgacctgtgggttttcctttgcttgactgc

SEQ ID NO: 166396 - DNA, 313 bp, Homo sapiens
aaatttgctccagaaatagctagtcattatttagaaatgaagtagaatctgtagagtagaatgtagagtattgttttacacagttctgtcccatggtgattgttacaagatgaaccaagaagtgaatgagtggctcccagaaggaaaagcattgtgcgctcatggttatctgagccagttgtttgaaaacaaacattttatgaatataaataattcagttaattccagagaaaacccattatcctataaagtctctcaaagatgttctttctgttaagttacactagttactgttactgtttaaacatcaatg

SEQ ID NO: 166397 - DNA, 189 bp, Homo sapiens
ccagcctgggcaagaagaatgaaactctgtctcaaaaaaaagagtaaagtttaaagttccagtggtccatccagatgttaatatatgtcggaggcacttggtatggtatgtaagagaaagatttgtgtcatgctgtatgacacaattgagggttatgtaccaagcagagtttgtgttaactcatttaat

SEQ ID NO: 166398 - DNA, 405 bp, Homo sapiens
ctcgagctggccgcggtgcagcttgtaattggctggtgccatagacgacgctctgtgaatggagagagacccggccactcgcccaactcacaccaaggcagttacctccagtctcggggaattaggatctccccagggaatgcgttttatagctaagggtccacgagaagtcttgaacaatgaaaagagcaaagacaaaggcacagaggggttaaaataactggccattctcttcacgcccgtgaagccgagcagtggcggggcctcctggtgtgccgcagatggcgggttctgcaccacatgcttgctgccctaattcctaagccttttaccccctggattagccaaatatcagaaggcagccccaggctttaacgccttaactttcacacactgacaagacaa

SEQ ID NO: 166399 - DNA, 239 bp, Homo sapiens
cgagggcgtctgtgtgggagtgatggcgactgcccgtggaatttacgttgggtaaaggaagaaagtgaagacctggggcaggcaagggaccgggaaaaggaaggaggagccagcgatggaggtcgcagtgggttgaaggattaccggaactgaggtgctaggggaagagagctaaaaagagagcgggcggaggtcagaaagagggctgactgaagtggaggtggaggaaggctggcagg

SEQ ID NO: 166400 - DNA, 248 bp, Homo sapiens
gatttcagtcctcccccacccaggcatgtgaagattaaatgaggctgtgccaagacttggaaaggtgggggaagtgcaactcgtgtggaaagataggactgccccctgggctctgggccaccattcagacaggtcagtgccttggccttttcagcctaggctgctctttaaaaagaagaccttcagccactatccaagagtaaaaatgtcacattttcaacattcagctcatcttgagcacctcctct

SEQ ID NO: 166401 - DNA, 267 bp, Homo sapiens
actcaagtgtgcacatttagaacttagggatgactgcccaacacagggccaggcacagtgcagtgactcagaaaacgtttcctgaagctgacagagcacgaacaattgtaaggctcttttatttacttattttttaagagatgaggtcccactttgtcacccaggctgctggagagtagtgggcatgatcatgagttgctgtagcctcaaactcctgggctcaagggatcctctcagctcagctccccaagtagctgggactacaga

SEQ ID NO: 166402 - DNA, 121 bp, Homo sapiens
aattttgtttgtagaaatggaccctgctgctatatacaaaacaaacacaaaaattttgaaaacctgtatcctacactatttgggaaaattctggaagggagtggacagggttttgtggggg

SEQ ID NO: 166403 - DNA, 206 bp, Homo sapiens
tatacaccctataccactctgataccacgctataccaccctataccactagctataccaccataccaccagaattttgtaggtaaagcttccagttgtaactaagtgatatgctttgggctgggcgcaatggctcacacctgtaatcccagctacttgagaggctgaggcaggagaatcagttcaacatgggaggtggaggtttca

SEQ ID NO: 166404 - DNA, 537 bp, Homo sapiens
aacgtcgtctcaaaaaataaaacaaaagtccgggcgtgatggctcacacctgtaatcccagcactttgggaggccaagacgggtggatcacgaggtcaggagttcaagaccagcctggcctagatggtgaaaccctgtctctactaaaaatgcaaatattagctgggcatggtggcatgcacctgtaatctcagctactcagaagtctgatgcaggagaattgctaaaacccaggagggagaggttacattgagccgagattgcgccactgcactctagcctgggcgacagagcaagactccgtctcgaaagaaagaaagagaaaggaaattccccagggaagtacctcggcttatttcataaacaggtactgaaggaagcagaggcatgtggaggacttccccacctcgtgcagctatttgggccgtggcatctgaaatttcttatttcagagtcacccctttgatgaccttggcagtgaactgcagtcatctgtttaggcctttccatggcccacgtcaatgccggtatttctgt

SEQ ID NO: 166405 - DNA, 669 bp, Homo sapiens
acaaacactgacaaataaaaccagcatgtcttcgatataaatgagagcacactatctaaggagatgcttcgttctcaggatgtggttgaaatcctgttatgaataaggtttacatccttgccactgaaataatatttttgtactgtggaaatcaatggtaaggaaaaaaatgaacaggtcatctaatatgtaaacaatttaactttgatgtaatctcttgtttgctggatttggtcctggggaaagtcaaaggactttcttagttacttagttgaatctctcaccttttctctgtcttctcatttaacttctcttctcttaccttgcagagcattttgatgatgagtccagctgaaaatagtgttgtgtcaggaattcagacttacggcctaaccctttctcttgtggggaaatctttaggtgtataggacagtgctaatggtgatttaaagtagaaccagcagaggtttggtctgagggaaggtgaaagcacgtattttatcaagttgagaacctgtagagaatttgtgggttctatgtttcaaacagagctcaaatcttttgaggctcaagttccatttgctcttggcaaaacacaatttcctggttcaaaagaaaataagcacataaaaaaagggcccccaggcttcttggacatcaaagcttacg

SEQ ID NO: 166406 - DNA, 500 bp, Homo sapiens
  misc_feature (130)..(130): n is a, c, g, or t
gaaatacatcatatgatttctcagtggaccatacatcacagcaggaacacctttacaacctgccaggtaaacacatattaaagttaattctcagaggcttttgttgctttaaagaaatcatatgcagtangaaaattcctcctgttttcacaaccaggaccaacagccagttaatcagttgaagtggtgaatctttaccaaaacaaacaaactacatgttttaagcatttttagctgaaaatatagaaatgtgcattttgagattagccaaggcctttacttaagtatggatggttgtgctcattaaagttctgacttcttacatataccacaactgtgatgtatcaccaagattttcacctcttgctgctttaaagtgaacctggaacttagacatgaataggttgagtgtagaatcatccaatcctccaatattttgcatttgtcttgcccacaccatgtgaaagcaggattgtttttgttttttttttaagggtggg

SEQ ID NO: 166407 - DNA, 597 bp, Homo sapiens
tctgtagagtcagatagtaaatcttcttggcttttgaggccatgctgcctctgtagcaacttcttaactctgccattgtaaggtgaaagcaggcatagacagcaagtgaatgaatggccatggctgtgtttcaataaaactttatttacaaaaacaggtgcaaagccaaatgtggtctgtgaactgtggtttgtcaagcctgatatattgcatttcctgaattgggtgggaataggacctaaacatcaagccagtcccttccaaatctaagatttcagtgttatatgattctttggtagggtgtaggaaggcatagatatcatttgctaaaatatccctctaggaggagctatccatacccatccattattcactgtgcctgcaagcaactctaataaaaaaaagttctgttagatgaggtttcaactacatgccactaaatactgggaatgttataagcattttttaaaatggaaacctgtgcataaactgtgtgaccctaaaatgaaattagggtccttttgagtgcagcatttttctacctttttttatgtatcatttacaaataaaaattatatatatctactgtgtacaaga

SEQ ID NO: 166408 - DNA, 177 bp, Homo sapiens
atgaccagtaagcagaaaaacaaacgagatcacttaagagagcaaccaggagtgttgggcatctcacagccattagctctggtgtgaaggacaaatctaaaagcaaggggactgtgtgttcattttctggggtcacaaaactaaggagcaaagccagtattcaaactgcatatatta

SEQ ID NO: 166409 - DNA, 584 bp, Homo sapiens
gttgaaagaacgcagaatattctacagctctgcaggtgacttctctttccataaaatctcactaactaggatatgcttttcaaaatttaccagcctagtacctttcttttcaacttgctataaaatgcattctttgagtaataaggcatactccacaaacgtggctgtgttctgtcttgtattaatattatacttagctatttgaggtttgtcactcccacgagagagtgagccccttgatggcaaggacaaacatcttttaattgcttacagtgcccaaaaccaggcttcatacaaaacaaaccagtagtttcaaacttgaatatacatcaggatcaaccacggagctcattaaaaatacagattcctgagtcccaccccagggactctgagccaccaggtctagggtagggtcagggaatcgacatttctaacaaagtggatctgagtgatgcaggttgtctgcatcctactgagaatgactcaagcagaactcagtgtgtctcaaccatactgagaatgactcaagcaggacttcaacaaaaaaaagtctgaaatgaataagagtacaaagttagctagaa

SEQ ID NO: 166410 - DNA, 649 bp, Homo sapiens
caaaaaaaggtcatggtcactgcttggtggtctgctgctggttgatccactacagctttctgaataccactgcagctgagaagtattctcagcaaatcaatgagatgcaaggaaaactgcagtgcctgcagccggcattggtcaactaaaagggcccaattattcatgacaatgcccaactacacgttgcacaaacaatgcttcaaaagttgaacaaattaggctacgaagttttgcctcatcctccatattgacctgacctctctgcaactgactaccacttcttcaagcatctcaactacttttttgcaggaaaaacgcttccacaaccagcaggatgcagaaaatgctttccaagactcatcaaatcctgaagcatggatttttacgctacaggtataaacacactggtcgggcatggtggctcatgccagcaatcccagcactttgggagaaaacaatagtcaatggaaaaagaatagcatttcaaaggaatgttaaaaaattagtctcttttgaattcaatggaaaaagaataatagtctcttcaacacatggtactgagaaaactggatcacctaataaactttggcttatgcctcattcaatatataaaaagtaactcaaggtctggcacagccttgcccag

SEQ ID NO: 166411 - DNA, 201 bp, Homo sapiens
tgtctgccctcaccatgtgtcctgcacgtgacagctggaggattgtcataatatgtaaaccacactgtctgctccctcatccgccttctgtgactccccacggccttccagttagactcctgagtcttcactcaggcctccaagaccctgtgcattccagttccccctccctgccccctggctttgtctccttcactaact

SEQ ID NO: 166412 - DNA, 432 bp, Homo sapiens
tccatctcaaaaaaaaaaaaaaaaaaaaaaaggtaggcagcaggctaggtctgacctgaagcctatagtttgctgacctatcaactaaactgtcaaattctctagcccttgaattaggactatttgtgggttgcatccctttcacttgtttacgtatacctgcacttaggaaacaaaatatttaatgggaaatgatcatttatctgtgtaatgaattatagaccctgttttatttttaaaaaacaattagcttctcattatctggatctgaaatcaaaatcacttagaatgtgtctgtgaactgctagtacttgtcagtcgtgactatataagtgaaaagtaactactgtgagctgctaatgatgtggatgctattataattttttacccaaggtggattcattaaaataactgcattttttggaaacttga

SEQ ID NO: 166413 - DNA, 280 bp, Homo sapiens
acactggtgagactattcgttgtctttatacagggtataaagaatgtttgaataacatacgtttctgtccagaacgtatttagttgaaagacaatttcccagttcttgatcttctatccacaacacatgcatactgtgaagagttctcttttttttgccttatgtctaccctttcactacctatttcctagaatgacatgtccaggtttatctgctagattgttttcccttttttctttctggattatgaagttgagaataaatgggtttgctcatctta

SEQ ID NO: 166414 - DNA, 477 bp, Homo sapiens
ttaggaagcttagtatttgattagccccaaaggtgaacagatggagggtagggaacaagaagaaaacgtctgcagaagatgatgaggaaaaagatttggagatacaaacattcttttgtggtaagatgaccagaaatccaatagtagggtgaatttgaccgagacagagagaggatgtctaacgagcttctaggcaacagattcatgataaagcaataaacagctcaatgcaatgcaattgctggtggaatttatccatttagatccagactctgtgggtggattgaacatcattctttcccagggcctggagcttctgagaagagcctgacttgggcacaaatccagccaaaactatgaaaaaatacttctgttaagccagaacaaattaaattctgtgacacaatacgtgcacttatcctttaccacctgttgataatttgtgccccaagattaatcatgcaaaagacacttgaa

SEQ ID NO: 166415 - DNA, 414 bp, Homo sapiens
ttgacagacggaatgaataagcaaaacatagtagagtagaatattacttagccttaaaaaggaaagaaattctgacaattgctgtaacatggatgaaccctgagaacattatcctaagtaaaataagccattcacaaaaggacaaatactgtatgattccatttatatgaggtacttagactagtccaatttacagggacagaaagtagaatggtggttggggagagaagaatggggacttgtataatgggtatggagtttctgtttgggaagatgaaaaaagttctggaaatggttaggggagatggtaacaatcgtactcagtgacaatgaactgtatattttaaaacggttaacatggtaacttttatgtcatttgtatttttccacaataaaaattttttttaatctata

SEQ ID NO: 166416 - DNA, 570 bp, Homo sapiens
tgggcctttgcataagccgttccactgcccagactcaggcttagtcagtcccagctgatcttcatctccaccgtctgctcatctttcaggtctcagtttacagggcacttcttctaggtcgtctttctgccccccaccacctgctccccaaataccttctccttcccctgttgtgacacctgtggcaatttattttgatttttgtttgtttgtttctcctctattagacctgggctctatgaaaacagggagagcgttttgctcactgtcatatccagcatgtagagacctgcctggcacacagggaacactctttaaatagatgttgaataaatgttgggagggagggaatgagaatggatccaggtaacttatgaacggattgtttgactatggaccctgagtctcatgacaggaggaaagaaaggagatttcacaattctttagcagtaggagttgttgttttaaaatttgcctctgtgggcccttacttgtaagcaaggcatacttgtatctcagaaattatttcatcttacattatgtttcattaaaggtttatcaactgccaga

SEQ ID NO: 166417 - DNA, 372 bp, Homo sapiens
tccaagaataggagagaacatgcaagggcacacagagagctaaaggagaaacttgagaaacaaaaactaagaagagggaaatgaaaatctgaatgcaccttttgtatgagacactgggaagtgttcgagtgtggaatttgtttgatgatgggtcattagttcattctgttgtagcatgcacttgcacacataacataaacacctggtgagggtgagatgcagagagctggggcccaggaggggaaagggatgtttaattcagacctacacgcgttcgtctaaggctttggtagtgtttaactctagagaacctggaatgggctcactaggagcccattaactggtgaaatgtggaacctcttaggaaaaatt

SEQ ID NO: 166418 - DNA, 145 bp, Homo sapiens
attgatctggtgagggctctcttcgtggtttgcagacagccacctgcttattgtgtctcagaaagcagagagagagagagatatagtgaaagaaagcaagagagagagagagagatcaggcacattggcatctcttctttgtagg

SEQ ID NO: 166419 - DNA, 673 bp, Homo sapiens
tgtgatggcttacgcctgtaatccaagcactttgggaggctgaagtggaaggatcacttgagcccaggagttcaagactagcctagtcaacatagcaagacccccatctccattaaaaatttaaaaattaaccagatgtggtggcgcatgcctgtagtccctgctactcgagaggctgaagcagaaggatcacttgagcccaggaggtggagactgcagtgaaccgtgtttgcaccattgcactccagtttcagcaacagagcgaaaacacgtctcaaagaaaaaaaaaaaaaacttttaagtggcttctcactgctctaaaactctttagcatcccttacagggcccggatgccgtggcctctgcttctctctgttttgccttctccactccagccacaatgaccacttccagttcctcatctatactgggcaccctcctaccctagggcctgttgcttctgcctgaaaccctcctctcctccgccccatttaagttaacccctccttcttcagatctgaaggcaatcatcacttcctcagagaagcctttttaagctatctattagtagtggctatttcttttgtaggactaatcacagttataactttactgttctatgtgacattaattgatcaatatcagcctccctcattagactggaagttctgca

SEQ ID NO: 166420 - DNA, 678 bp, Homo sapiens
ctctgggagttctgtctatgggcagagatccctctgatgaggacagaaaagtctttttagagtgagtagttttgggaatgggtagaatttcagttagtgatataacagcagtgggctcaggggaagggaaagttgccagaaatggcgggactgttcccattgaagcagacgcacctgtgcctagaactgcccccaagcaggtggccagcagttcaaagggccacccaagtgagtatccatttccaagggagccaacttggtgagtagggtttggtagcatgaatttctaggtggaaaccatggatgcttggagttaacaagtgatggaaattgggcagtatattcaggccccagcaaagaaggagcccagtcggagggtggtggggagaaggttggtcgtggagggctcattacagcacacagagggatgggcagcaacacaaagcaatggccgcctcacgcactgctgcctggtcaaacaggcctcagggacaggcctcgggaatgagacagaactaagcctcgaagcagaaagtcctcagtccgtacacagaaacaggactgtgggagttagggaccaacaggcagagagtcagtcttaatactaacaaacaccactaaacagctagcgaggtgcttagccactgcacaagtctgttctggctgagacacaggcat

SEQ ID NO: 166421 - DNA, 978 bp, Homo sapiens
cttgcgtctgagtctttatttggtttttaggacatgctaaggattgagggtcgtgggccttaattgtatagaagacgcagttgcgtttggttgcctggaggcttctctgtgaagcctggtgggacacctgctggccagtttggcccttcttagtgaaggtgatagagacaagggcagaaggtcattgtatttataggatatttgaagcttatcttgtttactttgttaataatacttgagtcatttttctaaacattctttgcataacagcaaagattaaaaagataagtaatgtaatatattaggccctagttgtcattcacctgttcttgtagagctgatacttttttcttgatcaaattttaggtttaatcatatttagcttagaagagtggtctgtcttaagagtattctgattatttaggaacatctagatgaaacttctttgccttagtccatcgtttctcctttaaattcctaaaggcaggaatgagtgtttcttaaaaccaacatgtataaagcaacattttaggcaaactgggatgaggaaaaacatcttgaagggggcttcataatggtgttggagcctgttaaaaatgtggaatggaaagccgatcatgaaaacagatagtactgacttttggcaaaatgagtctttatgaaaacataccttaatgattatctgacaaatgcaagtgctttttgaggttaacagaattataaacaggagactgcagacactaaggtcactactgagcagcacgataattcgtgtggtgtgttctttttaaagattaacaatcttaagtcttttgtatgttatgttgctaagttatttgggggaaagtgttaaaataagtgctcttactttctttctccactgcttttgcacaaaaactttactgttcaaagaatattgtccattcagtttactttttatttttaagatgaagtatcccccaaactggtcatgccagg

SEQ ID NO: 166422 - DNA, 100 bp, Homo sapiens
tgttcctcatttcttcaccctatgaggcaccttaacatctttgtttttagctcactgggaaggaaataggtgatgaaactgaagcacaggaaatcgagtg

SEQ ID NO: 166423 - DNA, 445 bp, Homo sapiens
acaaacattgcgcattttctttccagaatatatgtttaatgctgtttttaaaaatattcaaatcgctaactaaatttatccatactttaatctcttctgtccactttttcctttgttttcttgaaaatattaattgtacttactttagaatcctgatcttctaactccaatatctgaattatttctgggtctgcctctattgtagaatgtacattgcttataaaagaatcacagatgctcccgatgagatgaacttctataccaagagtggtcccctttgttctgttaggcagaaagggaaagggtcagtcattaattacttcaatataatcaggaattgaactaaacctggcctgggtttcagttgtaaaacccagttctaccataaaaataatggttgggtaaaactatctgaaaaatatagaatacttttgaagttctaaac

SEQ ID NO: 166424 - DNA, 401 bp, Homo sapiens
agacagaaggcacaaatggaatgaatacagaaactttttaaatattacagaactttataataaatcttatgctactaataaaattgaaagtactgataaaattattacttcctagaaaaaatatttctgagtaaaactcactcaaaaaacaaataaagccatgccaatctcatcttgttttctgcgcacgttaggttttgtcaagaaagggtgtgacgcaacttagtcatagtccgcctagaagcatttgcggtggacgatggaggggccagactcgtcatactcctgcttgctgatccacatctgctggaaggtggacagcgaggccaggatggagccgccgatccacacggagtacttgcgctcaggaggagcaatgatcttgatcttcattgtgctga

SEQ ID NO: 166425 - DNA, 196 bp, Homo sapiens
ggctcattacccatttttaaattgggatatttgttttcttgcattttccacttttgactgaagtaagggaacaacatagtttactttcctcttaactctgcagtaagaaaacaacagagcaattgtgatgacagaatgacaaccaacactgagccttgggtccagccaggagggttgagggttgaggctccctgga

SEQ ID NO: 166426 - DNA, 187 bp, Homo sapiens
agaccaaggatggggaacaccagcattaagcgatgggtagagacagccaaggagtctgaggaagagcatcaggaaaggaggaaatctagggggcagtggtctcatagaagccaggagaggagagttttaacaaggagagaagtctatctgggagtcaagaactgattacgtgcctattgtctttgga

SEQ ID NO: 166427 - DNA, 340 bp, Homo sapiens
aggcagggacagcatgaccggggctcccccaaacagttccacctctacccattccagttggatgagaatgaacgggtgaaaaagaaccgcaaaaacatgtgagtcatcagtaaaaaaataaagacataagagcaaagggggaaaccaagcaagtcactgatgccaaaacatggacagcagaaagcagaggagagccaggctagcagcccgcacagcaggcacaaggagcggcctccaaggcccagctctgatgcctgcgcccgggagactcggcacttagaatcactaattcccaagtcccaagaactaccacaaacctattgagtaacatttgtaggtt

SEQ ID NO: 166428 - DNA, 551 bp, Homo sapiens
gactagcactgctttctattcatcgacttcagtctagtcctctgaccactccccagactactagttcatgccttacctgcattctcttccttagttatcgttaagtctaggataaactatttcaaccactaaagaatttcaatgtcttgatattctgccattgccccttgcttatcccctgcccacaaatgactaattttagtcaagcagtcaatcacagagtctcaggatttggtagaacaagcactaggacataaatttcccgagtccgaagatgtattcttgggtgttcatgaactccttacggaaatgtatgcaatttgttttcattttgttaacctggaaaaaaaaatctccttgatcacctggatgagtattttataaagtgttgccacacagtaacaaagccagacactgtgagaatatgtttaagcctagagaaggcaaaatgatagccagactgtaatagtttcaacagagaaaaggaatgggatctatgagtcatgatggcataaaccagtgctagagcagtgaggaccactgtcaggtgt

SEQ ID NO: 166429 - DNA, 214 bp, Homo sapiens
tcatccaacctcaaaataacatcagtacagtcccttagtagacgcttctcactgttgcacagcttacagtttagtgagggcagtaaacacataaaagggatgagtacagggtacaacaggggcatggagtgggcaccttgtccagccctgaggatcaagaaaggtttctaggcataggaaaaagcatgtgcaagggcttgaaggccatgtctat

SEQ ID NO: 166430 - DNA, 544 bp, Homo sapiens
tagattttattggtttttactcagaagcactctagattagtgtttcttgaactgcaatttgaagccttctttgggaatgttagattgaggagtatttctcttaaatacaaatgccttttcatctagcaaaccaaaaattatatcttaatattgaatgccatcactcggggtcggggtgggagtaaattctgagataactccagagttttcaaggcatacaaggtatgtggaatagcacagattcagaatacatgatacatacgtataaaatgaaacatttcactttgaagtatttcttcaacaaaacatgtcctgtctgcctacttgctaatgtgaaattatgaaaggatttattgaaatatatgttcagtttgaggtgtaattggtaagaatgccaggtgttgttcttctgccctcttaaagaagtgtacttaaaactattgtgataattcatctctgataaaactttgttctggccttcaaggctcttacagcttaatgttttaaatgtctaaggcatcaaataaattgagggcattttaat

SEQ ID NO: 166431 - DNA, 444 bp, Homo sapiens
ggagatagaggggagagtaggatggaaggaggagagaagtcttggctcttctctgaacagtctgagaacatttaatcaaagaatataagatttcacaacccttttagatgatgggaatgattacttgaactagagagagagtaattctccagatattccctgatgttttagatatggcaaggggatagaaatagtttgaatgcacaaatgtgccttttattagtgcctggaataatgacaaaaagagtgatggctggagttcctaggtgatggatgccctagccttgatagatggtgtgatgagcaccttccctaaagctgtaaagaggcagcaaagtataagagaaggataggagctgtggcagtgtgaccctaaggaaagccttcaagggggttgtcaaaagaagtgagactgaggcaaggaatctacagaggaaaggatgt

SEQ ID NO: 166432 - DNA, 523 bp, Homo sapiens
atttactaattctaggatgcaaagccggaacacgagctgtaaccgctgcgcctgtcaaatctgtcactgcacacatctgtactattcaatcaacaaaacccgatgctaaaaacagaaaagggggagacgcgggagatcggtcagagtggtaggagaaggtatagggaaaggaacagaccttctgaaaggcgggaaggctctggatagcttcagggatgaataagctgaaggcagctgttctcttaccctgaggcagagggcaaggggtaggtaaggaagtataggggaatttggcataaacaggcttgtttacttacattgtccggaaaccgactttgatcatcagggcaggagactgctccctgaaagggggaataataatgttaattacccacagattgtgttggctccaggctttcattattttgtctgtactgaataaaagcaagcagctccagctgttcgagactgctcactcttcagccattagtgctgggcattcctgtagctgctcttacactgc

SEQ ID NO: 166433 - DNA, 708 bp, Homo sapiens
taagaatccagtgtttttatatgtcccaaataggaattgacaggtcaacaagggagactttggtccttgcttttacagacaaacacaggcacacaacacaaaactacacacatttcctccactacagagaaaggagactcaacagaaccggggaggccctgggggaggactgtcagcacgagcaactctccagatttaccccggcagtcccccggagggcgagtcagagaagagacaacctcgacacagcgaaacgcaatcccgccaagttacaaaacacgtcgtgaaacagccgagaagacagagaggccttgaaccaggctctggggatggcatgtcaaggaagccagggtccccggaccacttctgcaaccccaggggtgctgaggtgcacctgctgcccagggaaacctgagttgagaagggtgggcgccctgccccatggaagaccaggccagagggtggcctgggcacactgcagagagttgcaagaacaaggtttctggtggcttgcccagggctcctgggtcccggggcttctgggtcccccttctcaggtgcgcctggccaccttctggcctttccctgcaccaacccctggatgtgagtaggtgccacacccagggtggcacacagcaggcggggcccatgctccacccagggcctattgctccctgaccctctgctgccccctggtgggcaaaacct

SEQ ID NO: 166434 - DNA, 481 bp, Homo sapiens
atcagtaagttggttccattcaattttcagtaagtacctatcatatgtcaggcattttggtaggaacttggaggtgaaggatgaataagacgcggtaccttccattggtgtggaatacaagacatctgaagcaatatataaaattttggacaatggttgtaagtataaaaattaggaagtgcagatcaataaaacaaaggttttataccctttcatccatgaataaagcccccagtacattttcagaaacttttggcctccacttaatacaacgttcaggttagctctgactctcagccaaagtaattttctgcttctgcttcaaagtataaggttagaagcagggagggaactgctaaaggcaattaattatattttcagtagtgtgaagtgattgctgacaacttgacaagaaaggcaaagaaacaaaatacagagagcatagctaagctcagcaatataggtcctacatatatcaaaa

SEQ ID NO: 166435 - DNA, 319 bp, Homo sapiens
ccacagtgtcttttatgacctaacctcaggagtcccaccttgcactgctgtcatactcttttcattaaaagtgagtcactgagtctagcccacactcagtgggaggggattaggctcttcctttggaagggaggaacctcaaagaatttctggccgtattttaaacccaccatagtctgacagcaatgtttattagaagacattctcttataatgctggtgttacttacagaatcaatacgtgactcacatatgctcactcaggctttgcttgtatggaagcatcagtttctgcagagtgtaatgtggctgtgcatacc

SEQ ID NO: 166436 - DNA, 252 bp, Homo sapiens
tgagtagctgagactagcatgccaccatgtccgactaattttttatatttttagtagagacgaggtttcaccatgttggccaggctgaaacttctgacctcaaagtgatctgcccacctcagcctccaccgtgcctggtcccatggactcttatttggcaaagtctcttcataaatttttagaagcctttggattctgcttctaattgaccgagtctgtcttcactgactttgtgactgaaaagttaagctg

SEQ ID NO: 166437 - DNA, 485 bp, Homo sapiens
tgttcatcagctgctcctgagcgtaaaacaagctaggcgaaccgaattactgacaagagctgattccggagagaaaaactctcgcaagaaaacccgaatttgtctatagacggggtggggtttcatatatttagagtatcttagagtgtaataccttagaagtcctctgatcagcctgttcatttgacatatgaggacactgtggcccagagaaagcgtagtgatttggccagcatcatatggttcaaacacaaatttctgtgtgattacaggatatggatctgatggagatgaggatgatagaagcaactaggttacaaaggtccattaattcttgttaggaatttttactttgggctgggcgtggtggctcacgcctgtaatcccagcactttgggaggccgaggccggtggatcatgaggtcaggagattgagaccatcctggctaacatggtgaaaccccgcctctactaaaaatacaaaa

SEQ ID NO: 166438 - DNA, 436 bp, Homo sapiens
tcttacaggttttgtaaccaaaatttaaagtaaagaaaactgaagttttgctagcaaactctttaaaaataataagagactgttgggccgggcacggtggctcatgcctgtaatcccagcactttgggaggctgagtcgggcggatcgcctgaggtcgggagtttgagaccaacctgaccaacatggagaaaccccgtctctactaaaaataaaaaatcagctggacgtggtggcgcatgcctgtaattccagctactcaggaggctgcggcaggagaatcgcttgaacccaggagcaggaggttgcagtgagccgagatcacaccattgcacttcagcctgggaaacaagagcaaaactccatctcaaaaaaatagaaaaaaaaaagatactgttttgaattcaaaataaattattattcaagagattatcttat

SEQ ID NO: 166439 - DNA, 323 bp, Homo sapiens
tttaagattgttatgaagctcattttactgtgatttctaatataaaaatgactggaaaagacggaagaacagagtctagtaggactgaccccaggcaatatccctagcttgtttcagaagtgaaaaggagataaagtaagatttgaaagaataaaaatatactttgtaaagagtaaaaggctggccgggcatggtggctcatgcctgtaattccaggactttgtggggctgaggtgagaggatcgcttgagctcaggacttccagaccagcctgagcaacatagtgagacctccatacccacaaaaatttttaaaaattaact

SEQ ID NO: 166440 - DNA, 217 bp, Homo sapiens
atgaggcatcttagaattctgagtacctgccatatagaaggtactgaaaaactatttggtaaataaatgaaaaaatgaagtaaaccagcagaatggtctttttcacgtacaattttgttttttaatcattttagatgctaaaattgtaaattggcaacttttttttttttttttttggaaaccacagtcctcactctgttgccaggctggagtgcag

SEQ ID NO: 166441 - DNA, 326 bp, Homo sapiens
agacatcatattcatagtagatataaatttgtattctgcttctattcttcaattttagcaataatatttcacccactagatacttttctaattaattccttgcatttacaaactcctcattaaaacaaatttagtggagtaatttatgaggtaataattatgcaccacacacatctctacacccaagttctaagaagtagccaagctcactaaaaagattatgctagatattctggaaggggaagagaggttaggagaactttagtggctaaggaaaaggaggagaaaaaagttagagactaaaggggttacagaagtaggggaga

SEQ ID NO: 166442 - DNA, 459 bp, Homo sapiens
catttccttttgactctttgtctttaaaactgcattacttatatagttataaatttcctacaatagaaaatacaaatctaataatagctgataatatctcaggtagttattagtgccagggactgttgtaaatgctttgcagtcatctcacttgacactcgataataactgtgaattaatactactattatatcaaactgaagtagaggagagcaaggttgatagaggtttactaatatgccctaggattcacaatacgtaataaaactagtatttaatgagtcccctatgacagactgcctaccctcacatggtcctaataatattttatatgatgaggcatttaagaaaatgttttgctttaaattaaccaagattataaaaaaaatcaaacaggccaggtgcggtggctcatgcctgtaatcccagcactttgggaggccgaggtgggaggatcac

SEQ ID NO: 166443 - DNA, 498 bp, Homo sapiens
aacagatggctagatggaaactctgagcttcactgaactcacagtatcagattcacactaaatgactggtaacagcacccatgggcaggaaactgagataagaaggcaagcagctagcacaggaagaactgatacttgtctgcagaagcatatgtgttacccagacttgaagggaaggaagtgggtatccaggtacagggggaggaaaagtttcactagaaaaacagctgtcaaaaaacagggtttcaagagactcaagattgaacatttcaggaaacatttcaggagaatgtctgtttgttaacctgagctggagttgggactgacggtaaagtgatgctgcttccctccactaacttgcattaccaatttacaaacaccctttcttaattctgcccaaatgcataccctcatgaacaaatggcccatgctccgcaatcagaaaattcagtgaggcataggggttagtttcatctgcttgctgtccttccccatctc

SEQ ID NO: 166444 - DNA, 141 bp, Homo sapiens
cctcggcatagtggctgtgggagccctgatggccctgagccaggggtgacccctccccagatccccagagctgattccccacacctccttatttggccagcacagccccaaagggagccaggtcagacacaaccctcctct

SEQ ID NO: 166445 - DNA, 454 bp, Homo sapiens
tacaaatggagaaattgagctttagagaggttaggtaattacagtaagtttacatggctattaagtgttggagctgagatttgaactcaggctgacccgagatttaaacccaaaacacctgtacttaactaccaggcactgatactcctagtttaataaaattgctcataattgggatactaagagcctaactaaacgaagccatgctgaaaggatttatttagatagatgagcctgaaagtgcatactggattgcaaagggtcaacgcggaccttctgcagatcctccgagatacggagttaacagacggtactggagtctggggtagttcagacagaaacatcagcacagcagcagccttggagaagcagtatgtatttagctgcaggctgtatttagtcctagaaggactgcacagaacagagttaatgcattacaactcagggcttagcc

SEQ ID NO: 166446 - DNA, 105 bp, Homo sapiens
actagttaagaaaggctgaagagcagccagccccctgtggattgcttttcccattaactgactggaagaattaaatccaattcaattcagaaaactttcacttcc

SEQ ID NO: 166447 - DNA, 355 bp, Homo sapiens
aaagacaagaggaagttaagaaagtgtgttgataatttgaaaatgaattctgggtacattaaaagattttggaagttggtaggcttggttcttaagtatataaaaacatctagtatttttctacttccttgttgcagatatgacactaggatgaattatttttatgataacactcatgactttttttaaggattcacaatggaatgaagataaggcaagaggaaaggcatgttactattaagtacaaactctgctacccactgttaggtatcttagaaatgtcgcttatttaattatcatagaaacatggtgagatgattgattctcacatatacaatattgattaagaaattga

SEQ ID NO: 166448 - DNA, 373 bp, Homo sapiens
aacttcatacatgaagaaattgctattaaactgaatactttgtgttgaccctaggcttagtttcatttccagaatcagggaatcagatatttatgttaaaagattatgttaattctcccaatagaaagctaattttatattcaggaaaaaagtacacaaggtggtgttggagcttcttgtagcgctagaaagtagtaaggaattgctaaaacacataaaaggtatatatcatccacctgatggttttgatgctgggcaagtgagcccccaaacaggggcttagcctggaagggtttttagattcacctaggaaagaattcaagggtgagctggtatgttagacagcaatttttattgaggtggcagtgtgcag

SEQ ID NO: 166449 - DNA, 587 bp, Homo sapiens
cggaacttcctcccactctctttattaacccaagttgtattaaaatatttcttttctttttatttttttaaatttttactgagaaggggtctcggtctgtgcccaggctggagtgcaatggcacgatctcagctcactgcatcctccgcctcccgggttctagtgattctcctgacctcaactgattgagtgagattactggggaacaagacatctcaaagtgccatgccacagattacttattaattataggggaaaaagggactctacaaggtacagaggtccccagaggatccagcattacaggcaaatagcaagaacacacagctctgtggtgtccccgcctgaacgctcagtttgaaactttctgaggaccaccagggagatccacattgaggagctctgtgcgaggctgctggctcgaagacttccaaaatgtcaaggtcagccaggcacagtggctcatgcctataatcccagctctttgggaggtcaaggcgggcagattgcttgagcccaggagttcaagactagcctgggcaacatagtgagatctgtcactactaaaaataaaaaagttagttggg

SEQ ID NO: 166450 - DNA, 410 bp, Homo sapiens
gttataataattaggtacaagatgtatatccaaaaaaggggttggtattcagagactggaattcttggtataaaagtttttctgggaggaaagtatattgaaaattgaatgcaactggggccaggcgtggtggctcatacctgtagtcccagcactttgggaggctgaggcgggcagatcatgaggtcaagagatcgagaccatcctggcccacatggtgaaaccctgtctctactaaaaatacaaaaattagccaggcgtggtggcgggtgcctgtagtcccagctacttggcaggctgaggcaggagaatcgcttgaacccgggaggcagaggttgcagtgagccgagatcgcgccactgcactcaagcctggttacagagtgagactccgtctcaaaaaaaaagaaa

SEQ ID NO: 166451 - DNA, 399 bp, Homo sapiens
acaactgttattacaacatcttgtagatggaaaaattgccagtgaaagagattaagtaatttgcccctgtagcctctattttatttggttttacttgttatgcttttctgcttggtaattcttctgataagcctctttatttgattacttctttcaggtattttcgtgaggttcatcatcctacgagtatataacattaatgttctctagagttctgatctcagcctacttcttatctgagtctgcatttttcctatataatcttgcccacatcaatgattttacttagcatctgtaacccatgactcccaaatacactcacctatctcctagtcatctctgcatagtatttgtttgtcctccagaataataagtaagcatcttatggggcaatgtcat

SEQ ID NO: 166452 - DNA, 220 bp, Homo sapiens
tggggagcagtgagtgtagcggaagggtacacctgggttctggctccagtttgactcccaatcacttgagtgacaataggctagtgacttcccctctctgggcctcagcttcctaaaccacaaaatgaaggagttgaagttgattatttgcaaagtgtcttctagctcaagaagtgtataatgaggccgggtgcggtggctcacgcctgtaatcccagca

SEQ ID NO: 166453 - DNA, 237 bp, Homo sapiens
gtgaaggcagggtctgtgcaggaaggagccagctgagagggtgaaaagctaaggagagctctgagcagcctcttggggccgacaggggaaagggctctcaaatactcaacaggcttttatgccctaggagtgagtgtgaaccagaaatgcagcagacctcctgagcactggaactccttgtcgactcagccttgatgtgaggaagatgacctgccctgagcagaacaaaggaagtcc

SEQ ID NO: 166454 - DNA, 312 bp, Homo sapiens
acctctgcccacagtctactctcttagggaaatactgaggaagaagctttcatgctaatcattactcatatctcctcctgtccctttaagagatataaacaatgcttggggagaagattggtgttggtgcatgacccagactctggctagttccttctctcagacagagctgcttgcccagaagcagagcacatccgttctggagctcagcatgcagttctccagctgttctgcctccaatggtgtagacacatgaaattgcgggggagggcaggaatgttacaggccccagtttggtcttgggtccaagcc

SEQ ID NO: 166455 - DNA, 346 bp, Homo sapiens
tccaaaaacaccttggccaaaccaacacccactaccttggttcaacagaagctcttacctcgtaaacaggtctggggctaaggtcactgtgggcattttgttggatttcgacagtgtgcccaaggctgtgcaagtctgtttgcttgcctgcatgtctcagggtctctcaaggtgactgatgtttcctggggtgtgcaggaggagggagctgatgagttagccacactggactgacagcagcactgggggagaagtctaagggggttcaagcaagatgcagccacactgcaaagtaatcaaagtaccccaaccccatcatgccaccagccagtgtgtggaaggaggg

SEQ ID NO: 166456 - DNA, 448 bp, Homo sapiens
gagggtgagagacaggcagaatgggcttgtcagggtccatgaccagaaggaataagacggtgttttaagaagacagcccactagaaccgaagtttgaaagctgttatgctagataaatatttcatgaaatgaaacattatgcattagaccatttgactcacatcatgtcccctacacaaaagtttggaaagtggcagaaaatagaaagattgaacaatgatttcagggataaaatggactaagtataattgcatgatctgtctgttcttgcataaatcacttctataagaaggattatatacgtttttgctttagtttgttaccaccacagtctggcatataaactatgcctgcctcttaccctttgtgaactagagatcctgctctgtttttattgccttagactttcagagatcagcaattacaaaagcttccaagacttttctct

SEQ ID NO: 166457 - DNA, 392 bp, Homo sapiens
ggaggtggacaataaaatacaggtaggtttggtattaaaataataggtgccagaggtttcacatcgggtccgctgcatctgttattagacgaagatcaacattggctgagtcccagtttatctccagtccaaattatcaggaagaggaatatttacccttggttacctctgacattagttggattgtaggtaaagcagcctttaaaaatatatatgttgcaaacatctggcgattacccttcactaattcactcgccccagaaagaccaaagatagctgttcaatacaggatttacacagttttgacgcctgggcaacaaactttaaagtttattaggcaagaaatttcaaacgcataaatcgcaggctctaaaataaagccctagaaaatt

SEQ ID NO: 166458 - DNA, 360 bp, Homo sapiens
tggaatggaacctatagcttactttgacccaatataggaaagctcaccaggcctaaccatggttggagaaaagaatggaaaaaggactgatctgacccttccctgcagaatgtgagatctgttgagttggaggggtttagacgacactccaagggcaaaggttttactaatcctcctttgtatctctacctacacacttctgatgccttctcactgagacgcctaaaaggagttaaaatgtatagtgcctggagcaaatccatagagaccgacagtagatttatggttgccagaggctgggggcacgggactgcttcagtttcgtcgacgcggccgcgaatttagtagtagtagtcgacc

SEQ ID NO: 166459 - DNA, 499 bp, Homo sapiens
aaggtgtggacattaatagagtggctgatggcagccatatggactgtttggaatgatgccagagagatatcaaaaattgacactttggaggcctgccggaagtgccaggcatgcgcccaggcataccccagacggagacagctgcccactgtaacacagcgagtgacgtggtagattggcggctccaacagcatcgtagactgggcccacacctacgccgaggtgaccaatgtctccaactgttggatctgcaccgcccttccagcagcagctgcagacagctggccctggcatgtgcatccagcttctgtgaagaaccggacatagctagagacttgaggtcccacagacaatgcgtgggatgcaacacagtgggctttggatgggggcatggcaaaccccatggcgagcctgccccctggctgactcgcagtgtccatgatgaatggggctggttaatgggaaacacatagtgcccccattgcaggtaccatgatgt

SEQ ID NO: 166460 - DNA, 329 bp, Homo sapiens
ctactaaaaatacaaaaattagctgggcttggtggtgggcgcctgtaatcccagctactcaggatgctgaggcaggagaatcgcttgaacctgggcggcagtgagccagtatcatgccactgcattccagcctgggagacaaagtgagactcccatctcaaaaaaaaaaaaaaaagatgtacaaaatacaccttctttttggtcccctttcttatagaagaagttgcaagcagtttacttagggaattgcttagagaagaatttacttagagaagaaattagagaagaaattgcaagcaagaaataaagattgttctcatgttctcatc

SEQ ID NO: 166461 - DNA, 228 bp, Homo sapiens
ctagggcactgggtcctggaaggagccccctgttataaggagagggctttgagcaggctcactgaaaggagagaggatccccactggccagtccttggcaacggatccctagagtaaccacttgaaaaggactgaacagtggaaacgttacttctcctgccttccagggcagtgggagaaagaccctgctagtacggtgactggctgctttatttctcttatgaaaag

SEQ ID NO: 166462 - DNA, 339 bp, Homo sapiens
cttgtgagatctggttgtttaaacgtgtatagtccctccccactctcattgtgtgtctttgggttccacactagccccttctggctcaccttctcctgaaagggctgtcaggctggtgtctgtgggctccacaggaaccactggaaaaagagagttcccaatagcagtgactcatgcaacacagtgtcaaaaccaagcacagggtctcaaaggagaacaggctggttgctggcccaagggaggaaaggggctgagaaagggcttactaagaagagctgttcatcctgtcttaggagtcacttgcccctgttactcctcccagagcacggagtgccctgc

SEQ ID NO: 166463 - DNA, 523 bp, Homo sapiens
ctttgcgtctgtttctttctctcaaatttgtgagactcagctctgagttgtgtgtggctgtcgtcctgtcatttcctctgttgtcacttccatggcatttcactgttacttaggcaagcttcatttgttcgttttactgttagtggacagttggatcatttctcgtttggggctgtggtgaataacactgccataaacatctcgtacttgagccatcattgatttaagagtctttagaaagtagtggaattgctgggctgtagggtatgcggactttcaactctaccacctgatgccaattttttctttgaagaggctggacaaaatcacattcccaccagccacctccttttaggaagctgaggagctctttgtatgttatcagcactattcctacctccacaaccctggacctaatggtgcctgctctctgaccttgagggaccagacaaggttcatgggaccatcgtcccttccagtttgtatcttctcttaaaacaattctcaagtcttaaaaaaaaaa

SEQ ID NO: 166464 - DNA, 151 bp, Homo sapiens
tttagtcattcattcactcactttgcatccgttatccatccaacactggaatatgaaagtaagtaacacacagttcctaccttcaatttgctcactctcaaccagagaagaaaatcagataattaactcttcacataatagggaaagtgcg

SEQ ID NO: 166465 - DNA, 617 bp, Homo sapiens
gtagggttgtccaatagaataacactcagtaaagttacattgggatgaaggcagtgaatagtaatttttaaagcaggttaaaacttgtcaactttgccagaaggtctgtggcttctgtaaagcccactcatgctcgtgtatatatgaagagcctttttcatgttctgttaggagtatggatttcaggcaactttttcactgtgtcatcctcggctattaaatctttcgagctacttattagccaagcacattgattgacacttattacggaaagtgaacctgtaatagatgtaggtcttaaaccaactttccgatttggtaacaggttgacctaaattcagtgtattttgtgttttcactaagtagcccattgttacctttccctccagcaaggctctgaaaaaagtggctccaatactcagcttcaatactgtcatcatttcttaaatagtagtatcagttgtccttaacttaatggatgttttattggcctgagggattaaggtgtagaaaggttggagttttgttggagtttgaaacttggtctgtagatgttggcttctctgccagtttcttctaatcagcagatatttttatgaaggaagagttcctgggta

SEQ ID NO: 166466 - DNA, 174 bp, Homo sapiens
ccactccacgaaaccacataaggactttagtctcttcaagtacatttttctaacttcagcaaagcagagtacaatctgtataattctcacattgctcaaaggtccctctccaaggatgttgtaacaattaatcgacatccaatttgattatcccttaaagtgttctcaataata

SEQ ID NO: 166467 - DNA, 197 bp, Homo sapiens
ttatgacgatatttgggatcactgcaagtattctgaattttaaatggcattcagtgatttgataaaataggaattttgttactctgaactgggtagtgtttcagcaactggctactgtgtcattatttctataaattcaaaatgtagaaggaacatttaccttttaacaagggagtatcccaggtctcagttctcaa

SEQ ID NO: 166468 - DNA, 178 bp, Homo sapiens
acactttatttctcaaataaatgatggagtaggttccagcgttgtttcttccttgctgtccatttctaaggatgagtaaagagttaacgtattgaacttgaaaggagagatttttttccctcttgtaataaatcaaacttttctgaatctggaaaagtgatggatgaaactatgtgag

SEQ ID NO: 166469 - DNA, 177 bp, Homo sapiens
gctttgcaccagccagactggcttatgaggaccatcttgatatacttcattctttcctgccccaatatactttataaatttggggggagctttttattttgagattattttaaacttacagaaaagttgtgagactaatgcaaaaaattcccacagatgcttcacccatattcccca

SEQ ID NO: 166470 - DNA, 362 bp, Homo sapiens
gcagaaattttggttgaaaggataggatgagatttacattaaaatactccagcaattagaagacgaagaggtgttggtggtgatggagataatgaaacagaattgataaaacctgttgaggctgggtggctaatttctcccttttatataaatttgaaagtctcagccaggcatggtggctcacgcctgcaatcccaacactttgggaggtcgaggtgggtggatcacctgaggtcaggagttcaagaccagcctggccaaatggcgaaacctcatctctactaaaaaaatacaaaatcagccgggcgtgatggtgggcacctgtaatcccagctactcaggaggctgagtctacgcgtgga

SEQ ID NO: 166471 - DNA, 216 bp, Homo sapiens
tgttaagcaaagtcacttgggttttgctcttatggagtttgtattttaagaataatacataactaaaaggagatgctttgggatctcagatttgtgatatgaagctttcattcaattatgacgaaaaataagaaactgcaacaaaaattactatctaggaaaggggagtaaacaccaggacgtcaccatatcaacatatggtactaggcagggatg

SEQ ID NO: 166472 - DNA, 165 bp, Homo sapiens
gaacccgggaggtggaggttgcagtgacccaagatcatgccactgcactccagcctgggtgacagagtgagactatgtctcaaaaagaaaaaaggaaaacaaaaaagaaaactaagaacccaattacctctgccacatacatgggctgtctttggttaatgtgat

SEQ ID NO: 166473 - DNA, 638 bp, Homo sapiens
tatctagaaggatcccacagacagtctggggtcaatctacattaaaatacaaataacaaagatcccaacgggtttgatataatgattctggtaattaagcagccttactgaacctgcaaccagaatactacttctcatggcttcacattggctaccaacacttgaccccgaggaatacaactttaagcatctgtagaagaaagtaagacaaatagggctggaacgacaagcttataatctaaacccgcataggttgccattcaaagactttccaaacttacccttctagacttttctgtcattactgtccttgatttcggctcaaatccttaacttggaattatgttcctccaatccaaatctctaccactcaaaatccaccttattcaaaataagagacacagtctcacatgttgcccaggctggtcttgaactcctgagctcaggtgatcctcccgccttggcctcccaaagtgctgggattacaagtgtgagccaccatgcctggcccctgttcaacattttctatatgtctcttcctgatcccagaccttctgtacatatgacattatagatgatttagtcttcaataacttgctattttttcctagtaacttttcaaagagatatcattcaca

SEQ ID NO: 166474 - DNA, 249 bp, Homo sapiens
agaggggtgtgcatgaggccaagggcagtgtcatcagttcagtgcatgatgctgggaggtgatgtgcgtcaccaggtcagtgcatgcctgtgtgtctccacaggagggtttgatctgtgtcggagcgtatggtgtacagatccatgagtggctcgtgctgcgacacatggagatgtcctatgttgtgtgttgctctgagagtcaccgtgcacattccacactggcatttgctgtatctcacgtcagggt

SEQ ID NO: 166475 - DNA, 395 bp, Homo sapiens
acagagcaagactccgtctcaaagaaaaaaaaaaaagaaaagtactgtaccctatagggatataatataccctagggctgccaggaggcttgaagtgacccagactgtgcccaagggcttcgttttaggccctttccttctctgcttccagcttacctgccttgtggcaagaatttttacttccttaatctatcagatctttcccagctgaagctagaggcggaacagagtgaagacctggttgtagagatgccttatttttgtttagataacttgggccttaattttctcactcagaattttgagcattgtatacttaaagcagaatactgaaaaaagctcaaaagccgagtttgagctggctgaaagatggctacattgaagtcatttccttt

SEQ ID NO: 166476 - DNA, 197 bp, Homo sapiens
ttcttaacttataaatgttaatataaaattttaaaaaataattccacagggtaaatgatatcaatttggaatcaagttgtgattaaatcccagattttccttagaaattatggttgtgaattttgcaatagtaacatcctatttccctataagttaatgaatagtgtattctgaacatacttaaagcggtggtgttt

SEQ ID NO: 166477 - DNA, 413 bp, Homo sapiens
gacctcagatcagaacctaacttcaaaacttcaggaactaaaaacaggacaaactgaaccaaaagctagcagaaggaaataataaagattagagcagagattaacaaaatagagaatagaaaaaaacaaaacaaaacccacaaaacccaaagctggttcttttaaaagatcaacaaaattgacaaacctttagctggatgaatttttaaaaagagagaaataagacttgaattaccaaaatcagaaatgatttcgctaccaattctgcattaaaaaaaaaaaaactataagagtgtactataaacaagggtacgccaacaaagggataacctagatgaaatagacaaattcctagaaacatgaaatctaccaagactaagtcacaaagaaacagaaaatctggaggtatcgag

SEQ ID NO: 166478 - DNA, 307 bp, Homo sapiens
ctcaagatcacacaaccagtagagccagggctagagcccagacagcctggctccaggggtaaataaaaactcatattgttaatagcaataacgttgactgagcacatgctgtgtgccaggtactgggctgaggtccatatatattaactcattttaatccccaccctacccttagaaattgagggatgtaggtcgggcatggtggctcatgccagtaatcccagcattctgggaggccaaggcaagtggatcacctgaggtcaggagtccaagaccagcctggccaacatggtgaaaccctgtctct

SEQ ID NO: 166479 - DNA, 774 bp, Homo sapiens
agtccatggctactatgtataaagccgggataacggcgggcgcggtggctcacacctgtaatcccagcactttgggaggctgaggtgggtggatcactggaggtcaggagttcaagaccagcctggccaacatagtgaacccccgtctctactaaaaatacaaaaattagccaggcatggtagtgtgatcctgtaatcccagctactcaggaggttgaagcaggagaatctcttgaacccaggaggcgaaggttacagtgagctgagatcacaccactgcactccagcctaggtgacagagtgagagattccgtcttaaaataaaataaaataaaacagcaggtgtctttgagagctcgctatgtgccatgctctgttagaattactttacatgggctgggcacggtggttcatgcctgtaatcccagcatttgggaggctgaggccagaggatcacttgaggccaggattttgagaccagcttgggcaacttaggaagaccccgtctcaaaaaaaattaaagtaggctgggcacggtggctcccacctgtaatcccagcacttgggaggccaaggtgggcagatcatgaggtcaagagtttgagaccagcccagccaacatggttaaaccccatctactaaaaatataaaagctagccatgtgtggtggcaggaacctgtagtcccagctacttgggaggctaaggcaggagaatcagttgaacccaggaggcagagtttgcagtgagccgagatcatgccactgactccagc

SEQ ID NO: 166480 - DNA, 395 bp, Homo sapiens
tttgagggccctgcagctggagatacagataggagctgatgttgtagtttgagggtcttgcagttgaagattcagggaggaactgctcatgtagtttgagggtcatggaactggaaacccagagaggaagctgatcttctagtttgagggtcgtgcagctgaagtctcggggatgagctgaggttctagtttgagggtcgtgcagcagaagactcggggaggagctgaggttctagtttgagggtcgtgcacctggagaactggacaggagctgatgttctagattgagcatcgtacagctgaagacttggggaggagcttatgttgttcactttgagggtctttcagctggagactcaggcaggagctgatgttctagtttgaggatctcgtag

SEQ ID NO: 166481 - DNA, 275 bp, Homo sapiens
cgttgagggtctttcagctggagactcggggaggagctgatgttctagattgagggtcatggagttggaggcctggagaggagctgatgttgtagtttgagcatcttgccagctgcaaacccggagagaagctgatgtagtttgagggtcttgcagctgcagacccagagaggaactgatgttctagattgaggatcatgcagctgaagactctgggaggagctgatgttctaacttgagggtcatgcagctccatctgttattgggagcaattc

SEQ ID NO: 166482 - DNA, 934 bp, Homo sapiens
cgttgagggtctttcagctggagactcggggaggagctgatgttctagattgagggtcatggagttggaggcctggagaggagctgatgttgtagtttgagcatcttgccagctgcaaacccggagagaagctgatgtagtttgagggtcttgcagctgcagacccagagaggaactgatgttctagattgaggatcatgcagctgaagactctgggaggagctgatgttctaacttgagggtcatgcagctgaagactcggggaggagctgatgttctagtttgagggtcttgcagctgcagacctggagaggacctgatgttctagattgagggtcgcacacctgaagacttggggagtagctgatgttgtttgcattgagtctttcagttggagactcagggaggagctgatgttctagatttagggtcatggaactggagacctggagagaagctgatgttctagtttgagggtcttgctgctgcagacccggagaggagctgatgttctagtttgaggatcttgcagctgcagacgtggagaagagctgatcttctagtttgagggtcgtgcagctgaagtctcggggatgagctgaggttctagtttgagggtcgtgcagcagaagactcggggaggagctgaggttctagtttgagggtcgtgcagttgaagattcagggaggaactgctcatgtagtttgagggtcatgggactggaaacccatagaggagctgaggaccatcgttgagctgaggaccatcgttgagctgaggaccatcgttgagctgaggaccatcgttgagctgaggaccatcgttgagctgaggaccatcgttgagctgaggaccatcgttgagctgaggaccatcgttgagctgaggaccatcgttgagctgaggaccatcgttgggctgagaccataattg

SEQ ID NO: 166483 - DNA, 501 bp, Homo sapiens
tgtaacggcagctttgcaaggggtgtcataggagattaaggcaattgagcaccttactgatgaccccctacagagatggtgggcgtcttttgggctctggcctatgttgggctctcataatcataagtagcatagcaggatattcctggtaggttgttgctctctgtgtggttgctgtggcctatgggtccagggtactgccatatgtgcacaggtccccaccaagaggatccccttggcctagaggatggagtgtaaggaacatggctgtgctgtagccaagcaggcatagggcagcaggcataggccaaggtaaacagcctaaatgactcagagggattggggtgcacgcgcacactcccatgtctcatacaatcatagccatgtagacacaacatagagaagctccccacctggctctcagtcactaatgtctgtgtaggtataaatgtaacactgaccctgtgaggggctgctgaataaagccatgtctcatctacc

SEQ ID NO: 166484 - DNA, 988 bp, Homo sapiens
agaatatacattcttttcatcagcacatggaacattctccaagatagaccatatgataggccacaagaagtgactcaagaaatttaagaaaatcaaaattatatcaagtactcttgcagaccacagtggaataaaattagaaatcaacttcaataggaacccttaaaagtatacaaatacatgaaaattaaataatcttctgaatgatcctttggtcaacaacgaaatcaagatggaaattaaaaaatcatttgaactgaacaataatagtgacacagacagtcaaaacctctgggatacagcaaaagcagtgctacaagaaaagttcatagtattaaatgcctacatcaaaaagtctgaaagagcacaaacagacagctaagctcatcacggttcaatgaactagagaaacaagaacaaatcaaacccaaacccagcagaagaaaagcagtaacaaagatcagagcagaattaaataatattgaaagaaaaaaatacaaaagataaatgaaacaaaaagatggttcttttgaaagataaacaaaagtgatagaccattagcaagattaaccagaaaaaaaggaagaagaccctaataagctgaattagaaataaaatgggagatattacatcccatagcacagaaatacaaaggatctttcaaggttgctgtgaacaactttatgtgcgaaaattagaaaactagagaaggatacattccttgaaatatacaacccccctaaactatgaggaaatataacttttgaatataccaataataagtagcaagattgaaccggatagcttgccgcaagctatccggttcaatagtgttcaactgaatctcacagatgaggagagagaagaaacggaagaggaagtttatttgttgaatagcacaactctttaacctgagggagtcatctacttttttttcctcctttacaaaaaaagataggaaatataagagccgggtttttgcaacatg

SEQ ID NO: 166485 - DNA, 935 bp, Homo sapiens
agaatatacattcttttcatcagcacatggaacattctccaagatagaccatatgataggccacaagaagtgactcaagaaatttaagaaaatcaaaattatatcaagtactcttgcagaccacagtggaataaaattagaaatcaacttcaataggaacccttaaaagtatacaaatacatgaaaattaaataatcttctgaatgatcctttggtcaacaacgaaatcaagatggaaattaaaaaatcatttgaactgaacaataatagtgacacagacagtcaaaacctctgggatacagcaaaagcagtgctacaagaaaagttcatagtattaaatgcctacatcaaaaagtctgaaagagcacaaacagacagctaagctcatcacggttcaatgaactagagaaacaagaacaaatcaaacccaaacccagcagaagaaaagcagtaacaaagatcagagcagaattaaataatattgaaagaaaaaaatacaaaataggatttagagtaagatggccaataggaggcagtaccaacttgcagctcccacttggatggacagagcagtatatggagattcacatcatgaacttttgctccaagaactgctacagaaacataccagtgatataggagttaagaagaaatcacttaggcagagagtaaggttatgggagtcctcggtaaggcttttctttttaacgaaatgaaaagcagccccaaatcgtttcctaacagacggcagcctgtaaagtcaaactgcagacacagacaagcaagctgggaacttatatgggtactagggacaagactgttcaagatggcagctccaccttcccttctctgccagccacatgtacagtaaggagtagacaagatggctctggccaatgaaagttcatttgcataatatgtaaatgtcacacctg

SEQ ID NO: 166486 - DNA, 316 bp, Homo sapiens
tgaagacacatggggcagtgggattgcctagcccagtgcagaagtggcaggcagggctgagccaggacctgggcaactaggcttcagagtctgtgctcttctccattatgctctaagtttttccctcagaaatttaagaatatacgttggtgtttagagtccaactgcaaggaactgggccacttagaatggtctacaaatgtatggaggacctgggaaagcaaatcaaaatagccttggaacccagggaagagaggccagcagtcccaggtgtggaagtcgacgcggccgcgaatttagtagtagtaggcggccg

SEQ ID NO: 166487 - DNA, 460 bp, Homo sapiens
aatgagagcagggctcctgactgtccctagagctgactcatcatggccctgctgaagagtgaggtgtgtgtgtgtgtgtgcgtgtgtgcgtaagacagagagggagggagaaggaaggaggcgggggaacatggagagaaggagccaggagttgggataaacctggcccctggtcatatgtttcatcagcagtggctcctaactccacgtgccatctctgctgctgccctccacaagcaggtgagcagagtgccagttgtgttgaaggtgatgatgtcgcctaactaaactcacaaccaacccgcaatctctcttggggggacactccccataagcaatacaattaaagaagaccaggaaaggaaaataaattccttagcttatacatttaaaaagtatcccttgaacctattttaatagaatgaaatgctaaaaataaagaccaatataacataaaaaa

SEQ ID NO: 166488 - DNA, 407 bp, Homo sapiens
tattctcatcagcaaaatattgctcctacacacaaggtacctcttctccttttttcacttgctaataataatagcaagtattaatataaggtatttgttgagcaattattaaatatgtcatctctaacacaacagtccaaaaagacaggcctaagttcttctactttatagatattgagactcatagaggcataaagtcctacagtataaatgagaagctgggatggccctggatgtgactgcctgtaaagccagttcttcactcatactatttgttatttttcaaaacattcaaccattctcttccctttgagagtttatcatttttctccctaagtcctggagaatctttcttggcaatgtcctgatattctattcattattttcctaccctagttctttctttt

SEQ ID NO: 166489 - DNA, 605 bp, Homo sapiens
ctctagagattacaatatgggtcttcaacttatcacaatctacttagagttaatattatactacttccatacaatggaaaagttttgcaacggcataattttatttaacttctcacccatcctttttggtactgttgtcatgtattttacatttacatatattataatccccacaatataatattataattttttcattaaactaccaatttttattgtggtaaaaataaattataaaatttatgatcataaccatttttaagtgtatagtttagtagtgttaagtatatataggcagtttgtttttttttcaagaaattaataaaagatggaaaataccatctgttaaaattatctatatatttatcatttccagtcccctttatttctctttatatgtttgaatttccatctggtattatttctcttcaccagataacttctttggcatgaagtgtgtgttttttcaagataaatcctctctgcatttgttcatatggagatgtctttatttcactttcatttttgaagggtatcttaccaagctatagaattctaagttgatagtttttgctttttattttttaaatgtcttactttcctct

SEQ ID NO: 166490 - DNA, 615 bp, Homo sapiens
tagctgggattacaggcacatgccaccatgactggctaattttttttagtatttttagtagagatggggtttcaccatgttgaccaggctagtctcgaactcttgacctcaggcaatctgcctgcctgggccccccaaagtgctgggattacaggcgtgagccatgtgagccactgcgcccggctttgggctttgtgtagatcttaaacatgcgaattaaaggtaatgggtttgttaaactcagttagttcataggcatggtagagctactctttaatcaggagccctggctgccaatgagaattctggttgagaaaatacttaatatcccattaggggaagctacttttcactgcagagtgaatgtggatgcagcctctctgagctgtggtgctttactctcctttttattgagagaccaacagccagagagagaggggagagtgaaagtgagagcaagaatgagagagagagaccaagaaataactgtttggagacacatctggtgctccttagatcagcaactttgacacagcaatttgtaaatactttacattggttttgaggattggaaagtttcatttttcacataaccacacaaattctgtgggccac

SEQ ID NO: 166491 - DNA, 401 bp, Homo sapiens
tgtactgcaagagactcaccccaccaagaagcatatcttggcatttgattcattttgaggaggtggccctctttgccatcgcattcacagccctaggggtcaagaaagaggatcctggtattgttggcttctcctatgccaaagtcaaagtgctgagtgttttcctgagccagcattaaagagccagagaacttttcagaaggttcagtgatcagtgagtggtgcaggatttcttcccattgtggttgagtttgatctgggtgcaccacagtaaaaaccagcccagcttcctatttcattgtgtgtttgtctgatggtgactcataccgagaggtatgtttatcccaaactggcaggagctgtgtattcaagggcaaattttgttaacagtggggagagcg

SEQ ID NO: 166492 - DNA, 466 bp, Homo sapiens
cataaacaggtgctcaatgttcacagagtgaacaactttagcaaccctcaatcttgcagcaaacagactgggtttgtatcttaaacagttaaacataaggatgagagagtaaaatagataacgtttctcaaactttgtgactgtgacccataggaagagatacaccttaccatgtgacaccgtccttccctctcccaactatgtgtgcaaccctggacaatgcggttcagttttgcctgcatcaggaaccccatggacatggaagcattcttcatcacattgtgcagattcctctgagcgctgctgcttttgttcaatcttttatacttaatttttgaataagtatttcacttacataattcaacactagcttataaaaaagatagttactgtattgtgtgcttaaaaatttaagagggtagatctcaagtgttcttatcataataaaaaatatgtagacagtgaa

SEQ ID NO: 166493 - DNA, 299 bp, Homo sapiens
cttctagaccttcaagctatccggttcaatgtttccgtttaggtcatgagctcggcaacaaattaagtaaagtgtccccagtaaatgctgataagccccaggaggaaacaggggcatccccacgcataccaaatgcactcattagcatccctgctattatgaagaatagcaaaatgaccttgcaatcattagaagcttaaaatgctatgacttaagtttagaaggacacatattacattgtaaaacctaattagtgttacctttgctaattgctgcctggcattgaaccggatagcttc

SEQ ID NO: 166494 - DNA, 207 bp, Homo sapiens
agattatgaaatatggcaaggtagatttgaaaactgcccaaatagaaagtctaaaaatgaaatacataataatttaaattagaaacacaatgatggatgatgtagcaaattaggaatagctaaagagagatttgctgaactggaagatagatccaaagaaattatatgtaatatagacagaaaacagtagaaacaaaggttaagaga

SEQ ID NO: 166495 - DNA, 386 bp, Homo sapiens
ctaggtatgctttcaaaatagtgttaaaatgcagagtaagtgcggactaaatagacaaaatgaaaagaactggcgtgagagagtgatgacttagaaatagagaaatttatacaaggggaaaatgtcagatttaaaatgaggggtgtgttaaaacaagtgtataagtgctagacctaaaaaaaataaaaaattaaagaattagcgggttaaatatttgtggtgtttctctcattgctgtataggcattgtttgctcatatactctaggtattttcatgggaaatcttactttctcattctgtataattttagaacaagatatggctgaatcttgccatggctaccaaacagtatccagttgctacctaggaggcagcaaaatcacag

SEQ ID NO: 166496 - DNA, 227 bp, Homo sapiens
tgaccccgtgctgccttctccaggcaggcctggcctctgccctgggactggggcacccagggcctcgtgccttctctcttggcctagcctggcccactcaggacctgcccagcctctgccagctcctctggcatccgccctcttctccctggggctggggtgggggtggcagggagctgggacctggagagacgactcctgtaaataaaacactttatttgtagagc

SEQ ID NO: 166497 - DNA, 473 bp, Homo sapiens
tgatttcttaccaacctgacaagtatattctgcggttgaatttggatttaggaacctcctcctcattcagatttctatatctttgctctacactttgccttctctcaaagattaggtgatggaagctgcccattcttcatcaccccttgctattcattcccagtttaattcctaggaaggtgggttatttttattttttgaagtgatatcagtctggtcagtcaggggtttcatggaataaaatgtcttaattagaacatttagggttgtatcattgagggcatgtgctatactctgtgtcttagtcaaaagtaatttttgtttgaaaaatataagattacaaagtacataatgagtattttatgataatattagtaaacaatatgaacatttagaattttgtttttgaaaatttatatacgattgtacaaagattcatcaaaatccaatacagaatttataaaaggaagagt

SEQ ID NO: 166498 - DNA, 944 bp, Homo sapiens
  misc_feature (671)..(671): n is a, c, g, or t
ggaaaaaaactcataatgaaagcataatacttaaaaagaatcagtagatttaaaaaataaccagagaaaatttctagaaataaaaaagatcttaagtatagagaacataacaagcacagctcaaaattaatgaacttaaagatatatctgaagagattacctataatgcagcacagagataaaaagtgaaatacagatgagaaactgagacatggaagaaaataaaagggcccaagacacatctaataaatgtcataaaaggagaaaaaggaggagaagcatcagaagaaaaagtggtttacaacttttcaaaattaaactcaattttaagatgaggaatcaaaatgagtgtcaagtaggataatgaaagtggatctaacacctagacacatcacagtgataatgcaaaacagaaatcttgaaaagaaggaagggagggaaggaaagaaaagaaaaacagaaaagacatgctacctaaaaggaaagatgattgggcacaagatgtcagaagacaggagaataataccttcaaactgatagaggaaaagtagcaattaagagtggggcaaaataaagacattttcagacaaagataaggtttttttcatagactcactggaagaatttctaaaggatgtgaatcagcaaaaaaaaaaacccagaaagacttnatcttatttcctatatgttgggggtttcagtcctgatgtataattggaccctagttagaagggttatctgaggaaggggccggtaggatttctggctttttaaaaggtggtggctccctttcttcatggataaaggtatgattatttttataaatggtcccagggcagggggagaaggggattctcggtcacatcccacatctgggatcagttcctccccatttggtgggcaaatccggatctggccatatccggcttatctcctcgggggat

SEQ ID NO: 166499 - DNA, 334 bp, Homo sapiens
tggaagaatttctaaaggatgtgaatcagcaaaaaaaaaaacccagaaagacagaatgagataaaattttaaatgatgagcaaggaaattggtaaatatgttggggattctgtttactaagtaatgatgattactttttacggaatttcaaaacaaattagatcaaaagcaccagacaaaaatagaaagaggccggatgcggtagttcacacctgtaatcccagcactttgggaggccaagatgggcagatcacttgaggtcaggagttggagaccagcctggccaacatgctgaaaccccattttcactaaaaatacaaaaatcagctgggtg

SEQ ID NO: 166500 - DNA, 488 bp, Homo sapiens
ctgcaagttgaagccaccgtgagatgccgtgtacccacccgtgctagaacagccgaaataccagcaacgtgaaaggctggggagggtccagagcagcagagactccccttcactgctagggtgaagggagaatgatacagcctcttcggaagacagtttgggcatttcttacaaaggtaaacatgtatttaccccatgacccagtagtcctgttcctaggtatttctccaagagaaatgaaaacttagattcatactaaatcctatatatgaatgttcacagcagcactgtcataactgccagaagctggaaacaaccttgtgcccttcagccagtgggcagaaggatgtctccgtggacagggacagcccatgcgtggatggaaggacatctccgtggacggggacagctcccgcgtgatggaaggacatctctgtggacggggacagcccatgcgtgatggaaggacatctccgtggacagggaca

SEQ ID NO: 166501 - DNA, 508 bp, Homo sapiens
gacactgcaaaatgagctagtagcaggatttttaccacaggtacccataagcaacatgtggcatggttcaccatggttttacattgttgtgtaaataacttaaaattatgtgaataatgtaaaagcatggtgaacaatgccatgttttgcttatgggtacctgcggtaaaaagcaaaaatcatgaccctgaaggggtgagcaggcctacaggtgctgggcaggcactgtcttgcaaagagcacaaaatgtgcaggtccctctgggagtgttatagtgggtagctagtcagaaagagcagggcaggagagggctccccataccccacacaccaggagtgtcaggtgaccatcaggtgatggtctggcggttgttgactgtctttctaaagtaataattggtcacacccggcaacagggaaaagccggctcctaatagatagaaaacactcgaaactggtgagcagtagtttccctataagatctcaggagttgagccagtgggctcagg

SEQ ID NO: 166502 - DNA, 331 bp, Homo sapiens
aatgggttgtgggtgaggaaagatactagaaggagagaattttggggcccactgaaaggtccttcttgctgtctttgtagtttttattgtcgtacagtggcttcttgttctagctgatccccagctggtctcttgacttcctccacagcctcctttatccttctcccagctgggccctgtgttttgcgtgtgtggttgtgtgtggacacacatattcctgcaggcggacaccgttggggaagtttggagtttgtgtgtggatggcgtgtacgtgtacagctagtccctgacttaggatggtttgatttacaatgatgtgaaagtgctatgc

SEQ ID NO: 166503 - DNA, 203 bp, Homo sapiens
agaaatccttagcattgccctcttcctcacctacacatctcatcacctcgaaatgttcgttttgtctcgaggatatgtcttcagtctttccacgtctctccatctccaccctccactgctccggtagtctattcgccaccacctcttcctgctccaggagcctcctaagcactctcctttatccattcttgttctttccaatg

SEQ ID NO: 166504 - DNA, 100 bp, Homo sapiens
cacttgttgtgaaaaactttagaatattataaacatgttaatcctgtatttccatttctgtgaattcatccaaaagaaataaccatggatatgggtagag

SEQ ID NO: 166505 - DNA, 447 bp, Homo sapiens
cagaaaacatgagtaggtccaccagcgtgtggtagcagaggaaattctcaggcaccagttgaaagtaaaagcttggtattttatagtttccttttgtaagaactcaagtttttgttgagttgcatattttatattttctggaattttggtgtcattttatccatagttaataatattgtttcaccataactcctctttgattatgtaaccagcaaagtttctaacaataaagcatattttaggggtacataccttcctctcagtcaatgtatagaaagtattacattatgtattaaaacctcagtgccatgacaagatagtcaacatctttagtcatcagaaaaatacaaatcataactacaattgtgtgtgtgtacttatcaaattgtgtactttatatatatgtaatttattttatatcaattagacctcattaaagctattttt

SEQ ID NO: 166506 - DNA, 154 bp, Homo sapiens
aagctccttgattctttatggctttgcatctcggcagaatggagctagctgacttgggttagcggcaacaccagaacgggagcgagctggctgggggagtcacaaccacctgagccgggagcagaatcaccaagggcaaagcactggtcagggg

SEQ ID NO: 166507 - DNA, 699 bp, Homo sapiens
cctaggtaaatggaagagccatgggatggagtagaatattaaagcagtttgacaactgaggacaaaggcagtcatacttccagaagaaaaccagaggccccattctatggctcctcagaaacaagagccattaggcctcctaacaagatggaactagatgctgtcagaggtaagaaaggcacacgcataggggcagagaacacctgatgcagcaggtgtaggacaacgtcaaaagggtaatacagtgtgacagaccacacctgacaaaaacatcttataagcccaataaatactgaccacatctgaccacacagctgagtggcctcctgaaataaaactccatgggtctgaccttttaagccactctaagccccatgcctgtaaggcccagggtgttccagggaacacaggatgtagcagcctcatcactattgactctttaggtaagcacaagagtcaaagggtagcaaaaggtggaatggaggcccctctcatctctcagcatattggtccttctcacacactccctccaagagcccttccctgagtcattcgtagaccacctgcagaggaatgagagttggctattacctgaagactgagggcttctggtgtgtattatactctacagtaaaatgtaacatgcctcaaagaattaggatcccgtaagagacataacatagtagttactaaacctaa

SEQ ID NO: 166508 - DNA, 445 bp, Homo sapiens
actaattgattccgccactgctaatggaaaatgtatctgcaagtaatagattaattggccacttgtgatcagctctcaaccagaggatcactggtggtcatgctagacccactgagtcagtccttctggagccaggaaagggaaccagaggttagactcaaagggatcatgggggtgtccagagttttaccaactatcaccctcacaaaaggccagccagctggttccatcccaaaggaggcagattctgcatcctaagtcattaaaatgcaagtgcattaacttgaaaagaatggaaatcttaacagcataatgaaccacaaaatatcagaacactggcacatcagcttcccttacccccaaatgagggaaggggggttgctttcctcagaaggtttaaagtcattcgtcataaaataacagctaccagtttgctcactgacta

SEQ ID NO: 166509 - DNA, 467 bp, Homo sapiens
atggccatagcagcagcagagcagggactgaatcccaaggctgatgactttgacttcggtgctccagcattcgtcttccctggatttctcagctcgcaggctcgataactctcttctctccccagacttgttggcaggcaagaggaataactcatgtgagtcaaaagcaatttgcaaacataaataattttcaatgccaggagaggagacggtgggaagatgcatggaaggttgagaggaacacagccagccccaagtctccctcgccctgctgggcacttcctctttccacctcggcgctggtgggagagtcggagtgcgccataaacaaggcaggaaacggctatcatgatgctcacttccgctcttcctagaagggattctgctcggcaatctctccactccccaccccctgccatgcacaggattttgtactcccagctcctctggaggctcagaggaggaga

SEQ ID NO: 166510 - DNA, 359 bp, Homo sapiens
cggacctttcgattggcgggcaacttaccaaagtcaaacacttcctttgagaaaaataactccataaatcattagaaacgaattaacttcatttgactcctggtgagtgttcctcaattcttccagtacagatcaggacatcacaaagtcaaacatccagctaatgtcctaattatgctcctcgcatctaccaagacttcatgacaggtacacaaggtcctacaccgagtgcttccaccccctgactacatgacgctgagcatatacatcctttctctgggtcttggttgatttgtaaaaagggcctgggttctaatggtttctaggtttctaagtgcccgccatcgaaggtaccgcca

SEQ ID NO: 166511 - DNA, 312 bp, Homo sapiens
cttattggccggctttcagaggctgtggcctagagtgactggctagatggcaaagctgagggtgtcacttgctggctggctttcagtagcatgttccctgaagcaagctgtcagtaatgattagactgagggagctgtcactggtcaagcaggcttaaaaccatttctcctttacataactggccacagtcttcccctaggggtatttggggaccatgttggtgcttggacttatgagcaatgaggagtcactgaaggcttttatgaagagtgataagatttgtaacttgaaaaggctattttgacctgagt

SEQ ID NO: 166512 - DNA, 984 bp, Homo sapiens
acattcaggattgacttctaaagactcttggtacgtgaggaagaaacccggaagaggaagaggaaagcaaaggagtcagggatggctctttctcagggtctattgacattcagggatgtggccatagaattctctcaggaagagtggaagtgcctggaccctgctcagaggactctatacagggacgtgatgctggagaattataggaacctggtctccctgggtgaggataacttccctccagaagtggggatgtgcccttgtgtatctttgtattttctcttttttctcttgggagttgcatccttgcttgactaaaatggaagctgtattgatttgaaatgaaaagcttcatgatgtaggcaacaaagcaaaaaacaacgccaccaacaacacaacaggttgtggcgaccgtacgcaacacgacgacaaagatcttcgcagaacaacacgtgtgggcacgacgtggcacccaagtcgggatacagctaacacggtaggacaaggggacccacaagaggacaaccggggcgaccagacagacgcgtggagaatgctaaaccaaagcaaaaggcccgggaggtacacactacggtcttggacacaaccacgcgagggacgtgaggccaaaaagggacaacaaacgaggaccggggcggcatacaatatgcccggaccggggacggaagcaaacaaggacaagcagagacaggcgagaagagcagcgaagaaggagaacaagacagaaaactaaggacagaaaagcagaaacggggacaagtgcaagaagcgaagacaaaaacacaaaacgagacgcgagaagaaacgaagcacagaaaaaaagaaagcaaaaacgaacgcgaaagcagactagggcgaaaggaagaagagcaagcaaagcgagataacaaagacagcaagggacagccaaaagacagtagaaacaacacaaagaggaggaacagaaaaagcaaagagacacag

SEQ ID NO: 166513 - DNA, 510 bp, Homo sapiens
cggcctgtactcctcagcttgtgctgcccttctcgaatgactcgcgtttcctgctttcatcactacacctcccaccgctctccatcacctgctctgctcttataaggatccagttttcagaaaaatggaatagtcgtatcactgatctacgtaaacaagttgaagaattgtctgaaagaaaatacagtgtgtctaaactggaaaagtcctgtaatagtttgttcatgagcatttacacaatggagttgctgtttcatcatgggggtactgtggacaaacccagggctgctggtgagtcatgccatccttacacgtctttccttgtaaggtactttgtagtgtctgtctaaatattagaaagtttctttgtttctagattacttgaaagctaaggaaaagttgtagttctctaattatcaattagcatttcttttatactttcagtgtggatatttgggatttctttatatatttattgcaaagccctagatcttagggatttgactgaaa

SEQ ID NO: 166514 - DNA, 531 bp, Homo sapiens
tgacattacagaatggaaaaagataccagaaatttaggaaatgttaaagtgtgggaccaatgcatcaatggatgggtctagcagatcagacacagctaaattagtaacctgaaagattaagtcagaagaaattatggacaacaaagcaacgttggtggggaagagggtattagacacagtggatacaataaatatgtctaaaatatgtttaactggagtcacaggaagagaggtgagggagaatgggatagagtcaatatgcatgtgttagaggctgcaaatcacacagaactgattttaaaaaccagttcactgattaaagaagcccaaggaagcccaaacgggaaatccatacctagaacctagaaatatcctagtaaaactagagaaaaaccaagacagtctgaaagaataaaaataatatattttctaaaaaaccacagaagtagcctgagggaatatcctcaaagacagacagctgatttcttacctgcaacattaaaagccaggaaataaggggaagatagatac

SEQ ID NO: 166515 - DNA, 443 bp, Homo sapiens
tacgccttaaatttagccttttgcccaagctcagtgttctggaacattttctattgtcttgtttttcacaattactggtagtaatttaacttgcatgtatacgttcccactaacgttgggattttgttttttatctgagcctagaaatgatcaattcttttaaaatatagatgctcttttttttaataatgccacacttattttcattgcccttattactaaggtgaccatgtaattgtattcatccaaatcaggacattgagatgaaaagggagcattagtaatttcaccaggacaacagatgtaaatcaggactgtcccagacaaactgggatgtatgatcaccctgctcctaaccagatcttacatattttcatgtttggatatcattcttaataaagatgaaaaagatgcactttctaccaggcatctgtcatctttga

SEQ ID NO: 166516 - DNA, 351 bp, Homo sapiens
agcctttccggcggggtgagtgggcctctgagtggtgaggagggaggtaacagcactaccacttgactcgccaaatgccagcatcctggcactaatgctcaaattccagtttaattttcacaatttgattcactcattaccatcagcattaaacaatatttcttgcttaaggatagacggttgcaggggcactgtgggcgagtgttcagatggttaatgccttttattaccgcagtagatttttactattctcttccctccagctgctgaaggaaggttgggggctactgagctggggagaatgctggggtcagggaccagggtggggagtacatgcccgccggaaaggct

SEQ ID NO: 166517 - DNA, 569 bp, Homo sapiens
cacttttatcaaaaaataacaggccttggtgaaataaatactaactgttggatctgagtgacgggtacttggggattcattctattactctacttacacatgtttgaaacttcctatcataaaaaatctaaagtagattaaaagtaccatgaaaattattaagtattggaaggaatgatttacaacacatgctatgacttgaatgaatcttgaaaacattatgctacatggaaaaaggcagacacaaaaaggtcacatataatgtaattctttttatatgacatgtccagggtaggcaaatccagagtagcagaaagcaaattagtggctgccaggggatggagagatgggtagtggggagtgacttcttaatggatacagggtgtgtttctgagatgatgaaaaaattttgaaactagagagagatggtggtcatacaacattgtgaacacaccaaatgccactaaatgatagactttaacccatttatgcctagtgttccattattggaacgctaagcttgcaggagttatttatatcctactgttcaaggtcatcaccaaggtttg

SEQ ID NO: 166518 - DNA, 438 bp, Homo sapiens
tatttggaaatagtattctcgtctccagactaaacactcatccatttgtgcaacaagtattctttgaacattttctgtgaatcaggattgtcctagatgctggggagatacaagagagacaggcagggtacctgctgggatgtcctaggggggatggctagatcataagcatgtaaatgaacagaaagtggcagatagtagttagaagagaataaaacaggctagcagcatggtaggtattggctggaggtgccacactagataagagatcagataaggcttctctgagaaggtgacactgggactgaggcctgcaggacaacagagagccaccctggagggagtgttccaggcacagaatcatcaaggccctaaagcgggttgagctggatgtgttcagcaggcagaagggaggctgccggttcacgccatgaggcc

SEQ ID NO: 166519 - DNA, 404 bp, Homo sapiens
tgggagccaggaaaaagttccacctgcccaaaaaggtgtggccacgcgtttcatgctgctagagtgaggtgctacgaggtctgagaagtgaggacacagccagacagctggacttgcagacacagcagcctgatttcaggggccaaagaatgtgtccgagacccagaaacgaagccagcaaatgtaggtcgggaggagagagagggagagtgagcccgccagagggggtaggaggtggaaaagtttcaggcgcaaaactcttcaataggctgaaaaagattgagtgagggggaggactaggaaatacaggacaggtagaggtcccgagaaagcaagaggggacaggatacaaaccacaagtaagaagtagaaataatgaattgagatagcctcagagcttgggg

SEQ ID NO: 166520 - DNA, 506 bp, Homo sapiens
cagtcagaggattttcaaaggctgatttcagggttgatgcactcgactccccacctgctagacccggtgtggttacaagagtacaactatgaatgttacattctgtcaaggaaacaaaccgtgcaaagaaacgaaaaagaaaagaggtgctgggggttaggaagagggaggggagcgggaggaagtgccttgtggccgctactgtgattcggaggggttcaaactcatttcgctgacctggttaatataatccctgccgagttgacgctcgcccttgcaagaaacggctccgagcccgcagtcgggtttctcttcccctgaggcaggttcaaggctcccgcccctcccagccgcctcccctctgggctacctggagcctcagggaacctgcgcggccccgccccgcgggggcggccgagacctcggggcgcggagccgctgccgcgcctcctcccagcacccctgcccgactccctcctcctgctgccagtttcagctctcgaaaa

SEQ ID NO: 166521 - DNA, 291 bp, Homo sapiens
attgaaagagtacacattatgccaaccagctcttaccttcaatggagaaattcaggccagggcagcagcagaagtagaaagacctccactgtcactgaggtagagactctgaagggcgcgagattctgattgtgcctgtcctcacagtggagggaggcctttggagggccttttttgcctttgtagcaggcgggaacactcaggtctgtgactgtcaagcggaagctggtgaaggtcctccaactgtagatggctcaggatatagtactgaggtcattatctttagatttt

SEQ ID NO: 166522 - DNA, 298 bp, Homo sapiens
ggtctggccttccctctcagacttcagaggccccaaatccagcctgaaagtcccctctaagtatatttcctggtgggggtgcacatgtctttgaccttcacccatgaggagagtgatggttatcagcaagagcaaccttttaagcatttcaaaagcacttacagaaggaaaagcaagtgattctgaaagatgagaggactccaacttgctgttgaattctgggagtagagaccaggcctgagtctgcagatggctctggaggcaatgtggaggcagaatccttacttaggggtacagt

SEQ ID NO: 166523 - DNA, 518 bp, Homo sapiens
  misc_feature (24)..(24): n is a, c, g, or t
tcagaggatccccgatgagtaaancttggcaaatcacagtgggcaggtactctcaagccagaaatgccacaaagcagacacttttatttgacatccatgcaatgggaaaaagaactctgagcatcagataggagatcactggagagctggtgcaccagagcctacccacaatcagaagagagtgacgggaggagacagctgattttcaacatctcatcaagcctcatgaatgccctaaatcaggggtcagcaaacgtcttctgtaataggccagacagtaaacattttaggcctggcaggctttaaactgtgcccttgtactgcgaaaccagccatcgatgatatgtaaactaacgactgtagctgagttccaacagaactttatttacaagcgttaaatgtatattttacataattttcatgtgtcatgaaacattattctttgtagattttgttttctccacccatttaaaaatgtggaaactattcttggctcttgggccaagatttactcatcg

SEQ ID NO: 166524 - DNA, 598 bp, Homo sapiens
tttagagaaaatagtaaaagagcaaaacatggaggaaattgggagaaagttgaatactataggtgtttagtatctctaatgaaagctactctgttaacatttttaaattatgaaaataagagacttttataaaaaagtcaagcagtacaaaagggtgtaaagtgaagttactgtccttcccctccataaaccccctgaccttgggaaactgttgttaacagttactagggtaacttttcagatattttgtatgcatgtacaaatgtgagtatctaatgtaaaaaaatcaaaccaagataaagtgtaaactgctatgatggaatcctgccttgttctgctattagtcttctgtttagtaatcagctttggtattaggacagtggtaggaagaagccagtatgtcctgcaacataatttgtggttctggactggtcaggatttcctgaatgcagcctttatctggaagctctgcccttctccatctgggatacgctttttcatccatcaaaactgtcatctccctctgtgaagccttccctgactattctctgtccctctttcctctcttcccacaaacacaactgtgtacgcgtgtcac

SEQ ID NO: 166525 - DNA, 417 bp, Homo sapiens
gtggccaggggcccagagctcatcaaaacctgctcagtccaaggccttaggctgagcctgacatcgtgtcatattgtggaaacactcgttccctcattcagccaaatgctttttaaagcgactttttggccgggcacggtggctcacgcctgtcatcccagcactttgggaggccgaggtgggaggatcatttgaggtcaggagtgtgagaccagcctgaccaatatggtaaaaccctgtctctactaaaatacaaaaaaaaaaaactagcagggcatggtggtgtgcgcctgtaatcccagccactcaggaggctgaggcaggaaaatcacgtgaacccgggaggcggaggtttcagtgagccaagatcttaccactgcactccagcctgggtgacagagtgagactccgtctcga

SEQ ID NO: 166526 - DNA, 876 bp, Homo sapiens
ctgaccagcaccatggcggttggcaagaacaagcgccttacgaaaggcggcaaaaagggagccaagaagaaagtggttgatccattttctaagaaagattggtatgatgtgaaagcacctgctatgttcaatataagaaatattggaaagacgctcgtcaccaggacccaaggaaccaaaattgcatctgatggtctcaagggtcgtgtgtttgaagtgagtcttgctgatttgcagaatgatgaagttgcatttagaaaattcaagctgattactgaagatgttcagggtaaaaactgcctgactaacttccatggcatggatcttacccgtgacaaaatgtgttccatggtcaaaaaatggcagacaatgattgaagctcacgttgatgtcaagactaccgatggttacttgcttcgtctgttctgtgttggttttactaaaaaacgcaacaatcagatacggaagacctcttatgctcagcaccaacaggtccgccaaatccggaagaagatgatggaaatcatgacccgagaggtgcagacaaatgacttgaaagaagtggtcaataaattgattccagacagcattggaaaagacatagaaaaggcttgccaatctatttatcctctccatgatgtcttcgttagaaaagtaaaaatgctgaagaagcccaagtttgaattgggaaagctcatggagcttcatggtgaaggcagtagttctggaaaagccactggggacgagacaggtgctaaagttgaacgagctgatggatatgaaccaccagtccaagaatctgtttaaagttcagacttcaaatagtggcaaataaaaagtgctatttgtgatggtttgcttctgaaagaaaaaaaa

SEQ ID NO: 166527 - DNA, 625 bp, Homo sapiens
ttgctcaaggtgtaaggactgtggcctggggacactggcttatccctctgcaagacaggaccgctgaatggcaagacttatcaggatgtggcggccctgcttttattcttgagagcacggaagagaagcctctgagtgaactgctctagggacacacaccatgagtcacgctcagacccacggacgtgcacacaggaatgtgtcggggagcggaagtcggcacctctgagggctgccgttagcttcataaccacacggtgacgtccacgcactctcttcactgctggtcaccaacacaagtgctgcacacaaagaaaacggagcgggacctggggtcagctcccaatccccgaccctctggaaaagactgtcagctgtccgattacttcactgccggtggcaagtgctccaacccctgttctcacgttagctcagctgatgatgtgctccctaccaaggactctagagaagtgagaaaagccattccaagaagacattcctgcaatcagagcaccactcccatcttggaaatcactggcacagtacagagtcaaagagcccgtgtggcctgctgggctccagggcagggcacctgggagcaagtctcattatccctctctcccgt

SEQ ID NO: 166528 - DNA, 423 bp, Homo sapiens
ccggtttcacaaacctgaaggtaaatgggtaatttgtctgttgaatgagttttattaatagaatgcctttctgtgtgaatgctttggaatgtggattagtcttgggtccgtcctttccatctacctgatccaaatggaaaaatgcaaacacttaggtgtacacagcctctttttttttctttctccctttaagtgctttgtagtctaatgattccttcatatacttgactggtgtcatggactcctttgaagatttcaaatttacattttcatttatgaagtccctattttgcccttggttattgtttttgtttatatgttgaggccccatttcaatttctgtttaggaatagaaagatccatggtatattcacttaactgtaaatttgcttttagtaaaacataattcagccagaagaagga

SEQ ID NO: 166529 - DNA, 693 bp, Homo sapiens
ggctggccatggacgaggcgggactgagtgtcctggggtgagttagcagggcacaggtgtttgagatgggggacccttaattttaaactgaataggattcttttgggtgtggaattaatcctttctagatgtggaagagacctagaatgggaagaagctttagtattgcctggaaagcttccctcagagtttagttgctgggaccccaccctaagaacttgcttcagcctgtcgtctctcagtacgtatccatcacccggtctgagtaatgttatctccctgtgatctctcaagtcagtctgtttctctccatcttcactgccacagttcagcagcatcttcagctggagtactgcaaaagccccctacatttgtttcccatcttgcttccatcctccatgtcaaaaataatgcaaagagtttatgcataggagtttagacaaggatgtgtttactctaatttttcggttaaattcttagctcctaagtaaataaagtttcaaatttttcagacgtgtacttttctaataattgaatagcttctcaaatgtgaaatgacatataaaaaacatgatattcagttgcaaaccagaaatgcagttttttgtaggtagatgttcttgtaacactttttagaaaatgtaaaatataaaaataaagaaaaaaaagaccaaaaaaaagaacatgtaaaat

SEQ ID NO: 166530 - DNA, 305 bp, Homo sapiens
gcggccgcctactactactaaattcgcggccgcgtcgacataggagtttagacaaggatgtgtttactctaatttttcggttaaattcttagctcctaagtaaataaagtttcaaatttttcagacgtgtacttttctaataattgaatagcttctcaaatgtgaaatgacatataaaaaacatgatattcagttgcaaaccagaaatgcagttttttgtaggtagatgttcttgtaacactttttagaaaatgtaaaatataaaaataaagaaaaaaaagaccaaaaaaaagaacatgtaaaat

SEQ ID NO: 166531 - DNA, 408 bp, Homo sapiens
agatttatgggaagaaattagataatcaaaattctcctattaggaattttcccacccatcaaggtgagaaagagttgctgggaagctggaaaataaggatgttcaagttaaagtcagacagagacatcgaggtacatgctgtgtgctagaacagtctggcatggtggaagcctagggcacttgaaagggtgcaataataaatcaggctagaaggcagaacaaggcttagaatattaggttttttaggccattgcagtgtggacacttgaaagattttacacaacttaataagataattcaacctttatctgataaaggcaactgcagaaatatgtcagtctaaaataagaaagtctttctatttaacgtattaaaaaggaaatagggcgattgtcaaaattttataaa

SEQ ID NO: 166532 - DNA, 249 bp, Homo sapiens
gtattctcgctaacagtgctaaacggaactttgcatagtatatgcactaaagcttacttactcaatgaaataaacaacattagtaaggctggatgcagttgctcttgcctgtaatcccagctactcgggaggcggaggcaggagaatcgcttgaacccggcaggcagaggttgcggtgagctgagatcgtgccactgcactccagcctaggtgacagagtgagactctatctggaaaaaaaaaaaagaa

SEQ ID NO: 166533 - DNA, 502 bp, Homo sapiens
tggactccctgtgggtctaggtaggtaggggctgggtggacatgcagcctccgaggggtcctctagggcaactcctgccctctacagcattcccacagagtcaccttctcactattccaaggaacgcttccctcccactccgggacacagaccccagtcttctcagggacctgacaggagtggccaagggctcaaaatggcactggggtgggggcccactaaagaactctctaggtttctgggaacatgtaattcaaggacagcggccagactaactccttccacctatttttcacaacaaccctgcagagcaggaatttgtatctctgttaatcggatgagaaaactgaggctcagagaggtaaagtgacttgctcaaggttaccccaatagtaaacagtgtcgtgggatttgaagtcaggtctccctgatcgacaagtggtgtctcttgggtgtctggaagtagaaaagaagggcatccggccaagcctagctgcaattc

SEQ ID NO: 166534 - DNA, 483 bp, Homo sapiens
gtttaatatacccatgtaacaaacttgcacatgtaccctctgaacgtaaacttttaaaaaaaaatttaagaaaaaaaataataaataaataaaagaaggtggtggttgtttttcattctgcatgtacctatactaatttttttaaatctctccaggtctactgacctgaagttttaagatagtattagccatgattagctgtatttttaaaatcctattaatatatatctagtgggttacttttctaaataaaggaatagaaacaatattctgaggcttggaacagaaaaaagcaccacagagcctatttgtaattctagtcccccaaataccatattgaatcagttatatcagtaatatttggatgctcatattcaaccaatgctacatgttacaacctcagaagaacttgtatattaagagtgtacttttcagcccattaaggtgaagccacagtatgatttagttttgatctcacctaaa

SEQ ID NO: 166535 - DNA, 292 bp, Homo sapiens
tccctccctcctgtgcctgtccttgttagcctacattggtgagatgactccgcagcatacgatggctaatataatagtacaaactgaagaggagagaatggtaaagatgctttctgattctacaaatgcaaagaaagggcgtatgacacaataatgcagtgtgggcatgttttagcgctttctggtgcaaggggccaaggccacccaagattccatctttgcatttagctgacctcagaaattctattcaaatcaacaaatacccactgagtaaaggctgtgtcaagttcag

SEQ ID NO: 166536 - DNA, 346 bp, Homo sapiens
ccttcctgcagcacttctatgcttgaaggggaaggggctggcacacatcttctctgtgtggcctcctcctcctggccacacagcctttttcctggcccctttccttacactgttgacatgacaagggatctgaaaagggaataagtccaggttaaagcctcaaatggcacagatcaaaacccactctttctacaaaaatttgccgggcatggtggcgggggcctgtaatctcagctacttgggaggctgaggcaggagaatcgcttgaacctgggaagtggaggttacagtgagtcgagatcgcaccactgtactccagcttgggcaacagaacaatactccatct

SEQ ID NO: 166537 - DNA, 216 bp, Homo sapiens
aactaaaatgggcaaaatgatgaaagaatgagtgttttaattatgggtaagctgtgtccaagttggagggcagctttccactcagtgagagagatccaaaaaatgattctggctttgcatccatgaaaaattggcatgcacagtcacctaatctggaatcaactttttaatatgattggttttccatattgaaagagcattatatctgttaggtat

SEQ ID NO: 166538 - DNA, 330 bp, Homo sapiens
ctggaggaggctgtggaggctgtggtggctggtcacagccatttctcataggccatgctcttcgtctgtccctgacccatttgcaagtgtgtcaagcccctaactgtgtctcccagccccacctcctcctgcagtgactttcaaggctttagcttgtcccgttaccaattctaaagggtctaacctggaacccctcaggaagcctgttctcactttcctgcccgcaacccgcagggcctcatctcccagccccaaagtgtcaggcttcatggggaagccctaaccaccccctcccgacttgtacaccttggacttgacactcacccacag

SEQ ID NO: 166539 - DNA, 246 bp, Homo sapiens
ggttgagtttattatatctgaggcttgccctatcgctatgatacttaaacagtgtctgcttacgttgtgtattttgtaaaacaatgcaagtagaatttaaaaggacttagggaaatgaatgaagaaggtctacagtgatatggaaagacttctaccacaatgagtgaaaaacaggaggcaaacaaacaatgctgtgtgtggcttactgctatctatgtgcaaaagggaggaaatataaagtatagt

SEQ ID NO: 166540 - DNA, 710 bp, Homo sapiens
  misc_feature (2)..(3): n is a, c, g, or t
gnnacatgagcaagtattgcttatctagaaagacgtataataaagttcttttggggagataaactatgatccattctatgtttcatgtaaatcaggggcagccaatcttctggcttccttgggccacattggaagaattatcttgggccacacataaaatacactaacactaatgatagctgatgagtttttaaaaagaatcacaaaagcaatgttttagcaaagtttatgaatttgtgttgggctgcattcaaagctgtcctgggccgcaaggtggaaaaaacttgatctaaagtatttgatttttttagaaaagtttttgaatggccaggtgtggtggctcacacctgtaatcccagcactttgggaggccgaggcaggcggatcacgagatcgggagatcgagaccatcctggccaacatgctgaaactccatctctactaaaatacaaaaaaaaatcgaagacaagcagacggttggcgggcgccgtcggcccgaggaaaagttgtttctcacccgcattcgtgtgtgggccggggcgggccaccagatgggtgatcgtcacacctgcgcccaagggggtccctagggaagatcgcgcgcagaacacggggggggttcccccccataaaaaaaccgcgcgggggaacgcgcggttggaccaacacaaggggtccgggcatacgggccacacagggccagagcgaaa

SEQ ID NO: 166541 - DNA, 491 bp, Homo sapiens
gagaatgattttatttaagtaatttctactttttacatagctagttttaaagtagataatacatagtcttaaactttatttcccctttatttctttcttttctgttagagaatttcttaaacttgtagaattatccaaataaaatgccagtcactaaaaaggaataattaaccaatagtgggaaaaaattaaattcttcaaatgaagagtactgtattcatttcatatggtcccagagataaaatgtttaggattcatttttagttttaaatgtttatgaatcagagcttcaacactcttccaggtttctttaagaaaggaatttgtctatctacggattaattaattagcagagcctctctgtgtcaccaagactggagtgcagtggtgcggctgtagctcactacagccttgaactcttgggctcaggcaaccttcccacgttagactcccaaatagctagaccatggtgcatgcaaccatgcccagct

SEQ ID NO: 166542 - DNA, 332 bp, Homo sapiens
agggcggggccaggtggagataattgaatcataggtgaggtttcccccatactgttctcatagtagtgaataagtctcatgagatctgatgattttataaatgggagttctcctgcacaagcctttttgcttgccaccatgtaagacgtgactttgctcttcattcaccttctgccatgattgtgaggcctccccagccatgaagaactgtgagtcaattataaattacccagtctttggtatgtctttattagcagcataagaacagacaaatacaattagcaataaaaataagaaaatgaaatactaaaaatagtaacacaacataacca

SEQ ID NO: 166543 - DNA, 241 bp, Homo sapiens
gaaaataaaaaaagaaaatgacaaagacatcacatgacaaactgataaagagcatgctgctgctctttgctacagggaacatctctgttttagtatgtgttagtagaaccgatagtcactggaaatgcaaaataccgaacaatgagtttatctattaacatgggtttataggggccaggcacggtggctcacgcctgtaatcccagcactgtgggaggccaaggtagacagatcacaaggt

SEQ ID NO: 166544 - DNA, 137 bp, Homo sapiens
tttgctttataaagaattttgccagaaaggggggaaaaatgttttttgtctggagacctggccttcttcacctaattcataatgtcttctaattttagtggaattattccaaaagagatgatatctggctggagcat

SEQ ID NO: 166545 - DNA, 409 bp, Homo sapiens
ggaatcaggcaggtgtatggagccgggtgactcatggaggaggaggggttccacctggaagggacactccctggtctctctccacatagctaatgtgagtcaccacattcctggctccctgcctgacttgcttccgggtcaaccacggaaccccagggccacctggggttgggcctgctccagctgttcccttcggagccttgccctgcttgctttgcacttgttagaagagggagcaggtacttccccgcagggacctgtgtctgccttcagctgtctaaattccatggagaaggcctggagatccatggggaaaactcctttcattctgggatggtctggcctggaagcccggagcagcttcctcaaccccgccgccctccccttttccctgccttgtacccaagga

SEQ ID NO: 166546 - DNA, 326 bp, Homo sapiens
cctggtctgaaactgactttgaaaagggaaatgtatggcttttgaattgagggatggaatctcctagcctggagataattaaataaggcttagatctccctctctcccttcacgcatttcctgaatacctagaacatgccagacactggagctacaaaatgaattaaataaaacatgtctatctttttctatctccataatgttcatgctggaaactgccctttttctgtttcattggatcaagttcaaatcttagcaggtcacttgtaactctgactctgggcacattgtgccacctttctgagccctagttttcttatgcatac

SEQ ID NO: 166547 - DNA, 123 bp, Homo sapiens
taacaccgggactctggccggtgggattcccgctgtatcctgtgtgtgtacgtgtgtgcatgttgcatcccctgcatacagtcaccctgccgacctcatgcgaacacaccctagagcggcaat

SEQ ID NO: 166548 - DNA, 95 bp, Homo sapiens
cctccccagcaggccaccctggggacagcactcccccaaggacctgaccagggaacccttgtttttgcagcgcacatctcagcagctctatttcc

SEQ ID NO: 166549 - DNA, 384 bp, Homo sapiens
ggtacataaacagtgctggctactggcattgtaactctgtgttatctattcctaatacaaaattacagagctactgcttaaaaggaaataaggtattgattatatctaaaacaaggtatttaaaaaccgataaaacattgacctaagcacaacaggataagaagctaccctctgcactgtctgattaggttgagaaaataggtctttccacacctcttgctaaattagtaagagacgacagcgagctcagagggaactttgggccctggatgttagtaacagggaaacagggagaaacaaaatcaccacagtgacatttggttgccaaagatgcaatattatgaaaatgaacaatgttgagggtctcagaagtgctttttcttg

SEQ ID NO: 166550 - DNA, 397 bp, Homo sapiens
ccagaagggcctggagcctggacccccactgtgaagccagcacctcctccttgctgggtgacccagactcagttacctaacctccctggacctccattgcctcacctggaacacctgcttcccaggcgaagggttaagcgggcgctccaaagcaggtcctgggcaaagagggaagggattcctgcggtgcccgggaacgtggggcattaggggaaagggtgtgaagtttgacaccggagatcccccacgggggccgacttcgggcgtggcattccaggcaactcacagatcctgggccttccctcgcctcagggtccgggcctggggcggcgctggccggggcgggcgggcggcgggcaagacgctacctgcgcgcgtgccgggcattccagccgcc

SEQ ID NO: 166551 - DNA, 287 bp, Homo sapiens
gaaatgtccagaataggcaaatccataaagacagaaagaagattaagggctgcttagggctgggggatgagtagaggaggaaatgaggagtaactgctcatggatacaggatttcttctgggcataattaaatgttctgaaattgcagtgatgattgcacaactctgtgaacacaaaaaacaattgaattgtacaatttaagtaggtaaattatatgatatgtgaattgtatctcaataaagctgttataaaaccaaacaaaaggccggatgcggtggctcatgtct

SEQ ID NO: 166552 - DNA, 408 bp, Homo sapiens
gggagttgtgtttgtattgttaattttggaagtagtgttttatatcagcaatttaaaaggagaaggttgggacagaaagtgagagagtgaaagagagaaagtggtggatttgataaggagcaaggtaataatgttgcataaaaatgtgatgtcccttctcttcaaccctctaccctctggcctttatgattctcatttatttaatcacttgttttatttgcaatgttgaaatatccctattcccttcagggttctgcagaaaacttttgaacttatttatgacctgttaacttaaaaaaaaatccgagagctcagagtacttccgtactccagtctgatcaggtcttttaaaagataacagaagcgagctatttataaatatacatatgaggtgctgatttaaaatct

SEQ ID NO: 166553 - DNA, 124 bp, Homo sapiens
tctttcctgcccaccagcctgggctgtgggcccccaaagacaatagaccagctggtgaccgttagcagctgatacagtgccctgcctgcaatccctaaccctcaatttctgggataactagggg

SEQ ID NO: 166554 - DNA, 231 bp, Homo sapiens
agcaaggaaaggcaatgacagccagtgagatgccggcgagaagctgaagggagcccaggcagcagcatatatgtggcaagtccagacttggtagagtgagccggtggaggcaggagcagttcgtgggactggcccagccttaagcttggcacagtgactacacccagaagccatgccgggagcttaccgtcttcctggaggagaggaaggggtaggcagtagagaaaatgg

SEQ ID NO: 166555 - DNA, 323 bp, Homo sapiens
ttactaagaaagttttgtggttatcattttgacaataaacttcagctagcatagtccctactattcatgttaataatatcttgacttgaaccatcatattttccccacatcattcacaatgcatttcaatgctgtaacccactgcaccatccccagcccttttatcttcacaacgttctctaataaggtaaacaggatcatacatcatcaaacatatgtcacagacagaaaagctgacacacagacaagttaaataatttaagtcaaaccaaaaaaaaatcataactgggattagagcttgagattccctattttcttacagt

SEQ ID NO: 166556 - DNA, 1349 bp, Homo sapiens
cctctccccccgggctccgcccaccccacgccgggaacccacgcgggccactacaagcccgccctttcctacgtctggtccagtcggtcttcctccggcccgggccctggcccagctagccggccatggaaggtaatggccccgctgctgtccactaccagccggccagccccccgcgggacgcctgcgtctacagcagctgctactgtgaagaaaatatttggaagctctgtgaatacatcaaaaaccatgaccagtatcctttagaagaatgttatgctgtcttcatatctaatgagaggaagatgatacctatctggaaacaacaggcgagacctggagatggacctgtgatctgggattaccatgttgttttgcttcatgtttcaagtggaggacagaacttcatttatgatctcgatactgtcttgccatttccctgcctctttgacacttatgtagaagatgcctttaagtctgatgatgacattcacccacagtttaggaggaaatttagagtgatccgtgcagattcatatttgaagaactttgcttctgaccgatctcacatgaaagactccagtgggaattggagagagcctccgccgccatatccctgcattgagactggagattccaaaatgaacctgaacgatttcatcagtatggatcccaaggtaggatggggcgccgtctacacactatccgaatttacacatcggtttggcagtaaaaactgctgaacttggtctcaagatgtggaactgtggagaaattctaggacatgaacaagctatcctttcatcgaggacagcaaacattatggtacagttggcttggaattatgtctttctcttttaatttgattgagtggaaatctgagtgaatacaaatataaatgaacaacataaaaacttttgttttgacatgtcaaattgaaacttgataaagtgcgtacttgctaagatattcctgtggctcatgcgttacaacacgaggacttaagccagtaatcgtttttgttcagatagaggtgtggaggtagagccagcccctcatgtctgttttggatgttttgtgtctctccagctacattgtaagttccttgagggcagggccatggcccattgctctgtgaatctcaaatgcccataaaaggtgcccataaaatgttttcttgaacatttgaatgtgctgttgtctggaaaggggtaatattgtgagctgaatcagcaataagtattagtctttttggactatggtattgttaaaaagactgcagccctctcagacttgagcgttaattggcttatttatttatggctttaaataaaatcgatttaacgtta

SEQ ID NO: 166557 - DNA, 599 bp, Homo sapiens
ggaagtgtgtgtgccacttacatgactgacctgtgaaactcgtgcccactccttcacacctttgcctactttcttaccagatgaaatggtgatgactggagtgacctcggaagctacttatcaaaggcagaagagccaccatcagcctggattcctgataactctatggagccgagttgcatgcctgcctaaatagtatattgtggaactctttcataggagacaaacttatgtattttttaagtcacagaattcttgattacgaagcggacactcaaagaggtcccccagctagtaagtggccaaagtgggattcatttgactgtttgactccagagctcatgcattcatgggcatggctacagtttgaaagcaagttgcagatatcatgagacttcacctataaatacttcagaaggatttcctaagaaagatattcttctgctttatgatgatattattatcacgtctaagaaacttaacattgatgcaacaatgatgtctaatatgtggtctgtattcaaacttctccagatatccccaagatgttctttattgctttttttggtttcaatccaaaataaattttgtgttctctt

SEQ ID NO: 166558 - DNA, 1229 bp, Homo sapiens
tggctgtacggcgagttttagatcctacgtctggtccagtcggtcttcctccggcccgggccctggcccagctagccggccatggaagtgaagaaaatatttggaagctctgtgaatacatcaaaaaccatgaccagtatcctttagaagaatgttatgctgtcttcatatctaatgagaggaagatgatacctatctggaaacaacaggcgagacctggagatggacctgtgatctgggattaccatgttgttttgcttcatgtttcaagtggaggacagaacttcatttatgatctcgatactgtcttgccatttccctgcctctttgacacttatgtagaagatgcctttaagtctgatgatgacattcacccacagtttaggaggaaatttagagtgatccgtgcagattcatatttgaagaactttgcttctgaccgatctcacatgaaagactccagtgggaattggagagagcctccgccgccatatccctgcattgagactggagattccaaaatgaacctgaacgatttcatcagtatggatcccaaggtaggatggggcgccgtctacacactatccgaatttacacatcggtttggcagtaaaaactgctgaacttggtctcaagatgtggaactgtggagaaattctaggacatgaacaagctatcctttcatcgaggacagcaaacattatggtacagttggcttggaattatgtctttctcttttaatttgattgagtggaaatctgagtgaatacaaatataaatgaacaacataaaaacttttgttttgacatgtcaaattgaaacttgataaagtgcgtacttgctaagatattcctgtggctcatgcgttacaacacgaggacttaagccagtaatcgtttttgttcagatagaggtgtggaggtagagccagcccctcatgtctgttttggatgttttgtgtctctccagctacattgtaagttccttgagggcagggccatggcccattgctctgtgaatctcaaatgcccataaaaggtgcccataaaatgttttcttgaacatttgaatgtgctgttgtctggaaaggggtaatattgtgagctgaatcagcaataagtattagtctttttggactatggtattgttaaaaagactgcagccctctcagacttgagcgttaattggcttatttatttatggctttaaataaaatcgatttaacgtta

SEQ ID NO: 166559 - DNA, 1410 bp, Homo sapiens
tggctgtacggcgagttttagatcctacgtctggtccagtcggtcttcctccggcccgggccctggcccagctagccggccatggaaggtaatggccccgctgctgtccactaccagccggccagccccccgcgggacgcctgcgtctacagcagctgctactgtgaagaaaatatttggaagctctgtgaatacatcaaaaaccatgaccagtatcctttagaagaatgttatgctgtcttcatatctaatgagaggaagatgatacctatctggaaacaacaggcgagacctggagatggacctgtgatctgggattaccatgttgttttgcttcatgtttcaagtggaggacagaacttcatttatgatctcgatactgtcttgccatttccctgcctctttgacacttatgtagaagatgcctttaagtctgatgatgacattcacccacagtttaggaggaaatttagagtgatccgtgcagattcatatttgaagaactttgcttctgaccgatctcacatgaaagactccagtgggaattggagagagcctccgccgccatatccctgcattgagactggaggcatcaatccagttgataatttcctgacatttaagaagataaagggtccttcaccctattactattgtttggcattcatatgagtttgaagtattatttacgtttattccaaaatgaacctgaacgatttcatcagtatggatcccaaggtaggatggggcgccgtctacacactatccgaatttacacatcggtttggcagtaaaaactgctgaacttggtctcaagatgtggaactgtggagaaattctaggacatgaacaagctatcctttcatcgaggacagcaaacattatggtacagttggcttggaattatgtctttctcttttaatttgattgagtggaaatctgagtgaatacaaatataaatgaacaacataaaaacttttgttttgacatgtcaaattgaaacttgataaagtgcgtacttgctaagatattcctgtggctcatgcgttacaacacgaggacttaagccagtaatcgtttttgttcagatagaggtgtggaggtagagccagcccctcatgtctgttttggatgttttgtgtctctccagctacattgtaagttccttgagggcagggccatggcccattgctctgtgaatctcaaatgcccataaaaggtgcccataaaatgttttcttgaacatttgaatgtgctgttgtctggaaaggggtaatattgtgagctgaatcagcaataagtattagtctttttggactatggtattgttaaaaagactgcagccctctcagacttgagcgttaattggcttatttatttatggctttaaataaaatcgatttaacgtta

SEQ ID NO: 166560 - DNA, 1305 bp, Homo sapiens
tggctgtacggcgagttttagatcctacgtctggtccagtcggtcttcctccggcccgggccctggcccagctagccggccatggaaggtaatggccccgctgctgtccactaccagccggccagccccccgcgggacgcctgcgtctacagcagctgctactgtgaagaaaatatttggaagctctgtgaatacatcaaaaaccatgaccagtatcctttagaagaatgttatgctgtcttcatatctaatgagaggaagatgatacctatctggaaacaacaggcgagacctggagatggacctgtgatctgggattaccatgttgttttgcttcatgtttcaagtggaggacagagcttcatttatgatctcgatactgtcttgccatttccctgcctctttgacacttatgtagaagatgccattaagtctgatgatgacattcacccacagtttaggaggaaatttagagtgatctgtgcagattcatatttgaagaactttgcttctgaccgatctcacatgaaagactccagtgggaattggagagagcctccgccgccatatccctgcattgagactggagattccaaaatgaacctgaacgatttcatcagtatggatcccaaggtaggatggggcgccgtctacacactatccgaatttacacatcggtttggcagtaaaaactgctgaacttggtctcaagatgtggaactgtggagaaattctaggacatgaacaagctatcctttcatcgaggacagcaaacattatggtacagttggcttggaattatgtctttctcttttaatttgattgagtggaaatctgagtgaatacaaatataaatgaacaacataaaaacttttgttttgacatgtcaaattgaaacttgataaagtgcgtacttgctaagatattcctgtggctcatgcgttacaacacgaggacttaagccagtaatcgtttttgttcagatagaggtgtggaggtagagccagcccctcatgtctgttttggatgttttgtgtctctccagctacattgtaagttccttgagggcagggccatggcccattgctctgtgaatctcaaatgcccataaaaggtgcccataaaatgttttcttgaacatttgaatgtgctgttgtctggaaaggggtaatattgtgagctgaatcagcaataagtattagtctttttggactatggtattgttaaaaagactgcagccctctcagacttgagcgttaattggcttatttatttatggctttaaataaaatcgatttaacgtta

SEQ ID NO: 166561 - DNA, 937 bp, Homo sapiens
  misc_feature (815)..(815): n is a, c, g, or t
  misc_feature (822)..(822): n is a, c, g, or t
  misc_feature (825)..(825): n is a, c, g, or t
tggctgtacggcgagttttagatcctacgtctggtccagtcggtcttcctccggcccgggccctggcccagctagccggccatggaagtgaagaaaatatttggaagctctgtgaatacatcaaaaaccatgaccagtatcctttagaagaatgttatgctgtcttcatatctaatgagaggaagatgatacctatctggaaacaacaggcgagacctggagatggacctgtgatctgggctgacccccagaagcctcctttgttactagtttggagcagatccttgcagacgttttcctctgcattcacatgcatgcaaatgtacttctgaatgcgcacgattaccatgttgttttgcttcatgtttcaagtggaggacagaacttcatttatgatctcgatactgtcttgccatttccctgcctctttgacacttatgtagaagatgcctttaagtctgatgatgacattcacccacagtttaggaggaaatttagagtgatccgtgcagattcatatttgaagaactttgcttctgaccgatctcacatgaaagactccagtgggaattggagagagcctccgccgccatatccctgcattgagactggagattccaaaatgaacctgaacgatttcatcagtatggatcccaaggtaggatggggcgccgtctacacactatccgaatttacacatcggtttggcagtaaaaactgctgaacttggtctcaagatgtggaactgtggagaaattctaggacatgaacaagctatcctttcatcgaggacagcaaacattatggaggggtgnaatatgnttntcttttattgtagaggattggtgtatcaattactgaaactaaattgttgactggcatcgatgaaacgggtggaacgcgtaggaagagaaagcatgtgaataggggcaccttg

SEQ ID NO: 166562 - DNA, 1152 bp, Homo sapiens
tggctgtacggcgagttttagatcctacgtctggtccagtcggtcttcctccggcccgggccctggcccagctagccggccatggaaggtaatggccccgctgctgtccactaccagccggccagccccccgcgggacgcctgcgtctacagcagctgctactgtgaagaaaatatttggaagctctgtgaatacatcaaaaaccatgaccagtatcctttagaagaatgttatgctgtcttcatatctaatgagaggaagatgatacctatctggaaacaacaggcgagacctggagatggacctgtgatctgggattaccatgttgttttgcttcatgtttcaagtggaggacagaacttcatttatgatctcgatactgtcttgccatttccctgcctctttgacacttatgtagaagatgcctttaagtctgatgatgacattcacccacagtttaggaggaaatttagagtgatccgtgcagattcatatttgaagaactttgcttctgaccgatctcacatgaaagactccagtgggaattggagagagcctccgccgccatatccctgcattgagactggagattccaaaatgaacctgaacgatttcatcagtatggatcccaagatgaaatggtgatgactggagtgacctcggaagctacttatcaaaggcagaagagccaccatcagcctggattcctgataactctatggagccgagttgcatgcctgcctaaatagtatattgtggaactctttcataggagacaaacttatgtattttttaagtcacagaattcttgattacgaagcggacactcaaagaggtcccccagctagtaagtggccaaagtgggattcatttgactgtttgactccagagctcatgcattcatgggcatggctacagtttgaaagcaagttgcagatatcatgagacttcacctataaatacttcagaaggatttcctaagaaagatattcttctgctttatgatgatattattatcacgtctaagaaacttaacattgatgcaacaatgatgtctaatatgtggtctgtattcaaacttctccagatatccccaagatgttctttattgctttttttggtttcaatccaaaataaattttgtgttctctt

SEQ ID NO: 166563 - DNA, 1269 bp, Homo sapiens
cctctccccccgggctccgcccaccccacgccgggaacccacgcgggccactacaagcccgccctttcctacgtctggtccagtcggtcttcctccggcccgggccctggcccagctagccggccatggaagtgaagaaaatatttggaagctctgtgaatacatcaaaaaccatgaccagtatcctttagaagaatgttatgctgtcttcatatctaatgagaggaagatgatacctatctggaaacaacaggcgagacctggagatggacctgtgatctgggattaccatgttgttttgcttcatgtttcaagtggaggacagagcttcatttatgatctcgatactgtcttgccatttccctgcctctttgacacttatgtagaagatgccattaagtctgatgatgacattcacccacagtttaggaggaaatttagagtgatctgtgcagattcatatttgaagaactttgcttctgaccgatctcacatgaaagactccagtgggaattggagagagcctccgccgccatatccctgcattgagactggagattccaaaatgaacctgaacgatttcatcagtatggatcccaaggtaggatggggcgccgtctacacactatccgaatttacacatcggtttggcagtaaaaactgctgaacttggtctcaagatgtggaactgtggagaaattctaggacatgaacaagctatcctttcatcgaggacagcaaacattatggatgaaatggtgatgactggagtgacctcggaagctacttatcaaaggcagaagagccaccatcagcctggattcctgataactctatggagccgagttgcatgcctgcctaaatagtatattgtggaactctttcataggagacaaacttatgtattttttaagtcacagaattcttgattacgaagcggacactcaaagaggtcccccagctagtaagtggccaaagtgggattcatttgactgtttgactccagagctcatgcattcatgggcatggctacagtttgaaagcaagttgcagatatcatgagacttcacctataaatacttcagaaggatttcctaagaaagatattcttctgctttatgatgatattattatcacgtctaagaaacttaacattgatgcaacaatgatgtctaatatgtggtctgtattcaaacttctccagatatccccaagatgttctttattgctttttttggtttcaatccaaaataaattttgtgttctctt

SEQ ID NO: 166564 - DNA, 303 bp, Homo sapiens
ctcatttaatcctctttgatatgagtcctgttatcattcccacttcacagattacgaagcggacactcaaagaggtcccccagctagtaagtggccaaagtgggattcatttgactgtttgactccagagctcatgcattcatgggcatggctacaggtacccttctcttcactccttccccaagcatgcccccaattcaccagaattgaaactcaagattttgacaccatagagagcaaactggggaacaggaactacactgttggttaggacttgggagaagataaattaaaaagtctgac

SEQ ID NO: 166565 - DNA, 1305 bp, Homo sapiens
tggctgtacggcgagttttagatcctacgtctggtccagtcggtcttcctccggcccgggccctggcccagctagccggccatggaaggtaatggccccgctgctgtccactaccagccggccagccccccgcgggacgcctgcgtctacagcagctgctactgtgaagaaaatatttggaagctctgtgaatacatcaaaaaccatgaccagtatcctttagaagaatgttatgctgtcttcatatctaatgagaggaagatgatacctatctggaaacaacaggcgagacctggagatggacctgtgatctgggattaccatgttgttttgcttcatgtttcaagtggaggacagaacttcatttatgatctcgatactgtcttgccatttccctgcctctttgacacttatgtagaagatgcctttaagtctgatgatgacattcacccacagtttaggaggaaatttagagtgatccgtgcagattcatatttgaagaactttgcttctgaccgatctcacatgaaagactccagtgggaattggagagagcctccgccgccatatccctgcattgagactggagattccaaaatgaacctgaacgatttcatcagtatggatcccaaggtaggatggggcgccgtctacacactatccgaatttacacatcggtttggcagtaaaaactgctgaacttggtctcaagatgtggaactgtggagaaattctaggacatgaacaagctatcctttcatcgaggacagcaaacattatggtacagttggcttggaattatgtctttctcttttaatttgattgagtggaaatctgagtgaatacaaatataaatgaacaacataaaaacttttgttttgacatgtcaaattgaaacttgataaagtgcgtacttgctaagatattcctgtggctcatgcgttacaacacgaggacttaagccagtaatcgtttttgttcagatagaggtgtggaggtagagccagcccctcatgtctgttttggatgttttgtgtctctccagctacattgtaagttccttgagggcagggccatggcccattgctctgtgaatctcaaatgcccataaaaggtgcccataaaatgttttcttgaacatttgaatgtgctgttgtctggaaaggggtaatattgtgagctgaatcagcaataagtattagtctttttggactatggtattgttaaaaagactgcagccctctcagacttgagcgttaattggcttatttatttatggctttaaataaaatcgatttaacgtta

SEQ ID NO: 166566 - DNA, 1330 bp, Homo sapiens
tggctgtacggcgagttttagatcctacgtctggtccagtcggtcttcctccggcccgggccctggcccagctagccggccatggaagtgaagaaaatatttggaagctctgtgaatacatcaaaaaccatgaccagtatcctttagaagaatgttatgctgtcttcatatctaatgagaggaagatgatacctatctggaaacaacaggcgagacctggagatggacctgtgatctgggctgacccccagaagcctcctttgttactagtttggagcagatccttgcagacgttttcctctgcattcacatgcatgcaaatgtacttctgaatgcgcacgattaccatgttgttttgcttcatgtttcaagtggaggacagaacttcatttatgatctcgatactgtcttgccatttccctgcctctttgacacttatgtagaagatgcctttaagtctgatgatgacattcacccacagtttaggaggaaatttagagtgatccgtgcagattcatatttgaagaactttgcttctgaccgatctcacatgaaagactccagtgggaattggagagagcctccgccgccatatccctgcattgagactggagattccaaaatgaacctgaacgatttcatcagtatggatcccaaggtaggatggggcgccgtctacacactatccgaatttacacatcggtttggcagtaaaaactgctgaacttggtctcaagatgtggaactgtggagaaattctaggacatgaacaagctatcctttcatcgaggacagcaaacattatggtacagttggcttggaattatgtctttctcttttaatttgattgagtggaaatctgagtgaatacaaatataaatgaacaacataaaaacttttgttttgacatgtcaaattgaaacttgataaagtgcgtacttgctaagatattcctgtggctcatgcgttacaacacgaggacttaagccagtaatcgtttttgttcagatagaggtgtggaggtagagccagcccctcatgtctgttttggatgttttgtgtctctccagctacattgtaagttccttgagggcagggccatggcccattgctctgtgaatctcaaatgcccataaaaggtgcccataaaatgttttcttgaacatttgaatgtgctgttgtctggaaaggggtaatattgtgagctgaatcagcaataagtattagtctttttggactatggtattgttaaaaagactgcagccctctcagacttgagcgttaattggcttatttatttatggctttaaataaaatcgatttaacgtta

SEQ ID NO: 166567 - DNA, 1406 bp, Homo sapiens
tggctgtacggcgagttttagatcctacgtctggtccagtcggtcttcctccggcccgggccctggcccagctagccggccatggaaggtaatggccccgctgctgtccactaccagccggccagccccccgcgggacgcctgcgtctacagcagctgctactgtgaagaaaatatttggaagctctgtgaatacatcaaaaaccatgaccagtatcctttagaagaatgttatgctgtcttcatatctaatgagaggaagatgatacctatctggaaacaacaggcgagacctggagatggacctgtgatctgggctgacccccagaagcctcctttgttactagtttggagcagatccttgcagacgttttcctctgcattcacatgcatgcaaatgtacttctgaatgcgcacgattaccatgttgttttgcttcatgtttcaagtggaggacagagcttcatttatgatctcgatactgtcttgccatttccctgcctctttgacacttatgtagaagatgccattaagtctgatgatgacattcacccacagtttaggaggaaatttagagtgatctgtgcagattcatatttgaagaactttgcttctgaccgatctcacatgaaagactccagtgggaattggagagagcctccgccgccatatccctgcattgagactggagattccaaaatgaacctgaacgatttcatcagtatggatcccaaggtaggatggggcgccgtctacacactatccgaatttacacatcggtttggcagtaaaaactgctgaacttggtctcaagatgtggaactgtggagaaattctaggacatgaacaagctatcctttcatcgaggacagcaaacattatggtacagttggcttggaattatgtctttctcttttaatttgattgagtggaaatctgagtgaatacaaatataaatgaacaacataaaaacttttgttttgacatgtcaaattgaaacttgataaagtgcgtacttgctaagatattcctgtggctcatgcgttacaacacgaggacttaagccagtaatcgtttttgttcagatagaggtgtggaggtagagccagcccctcatgtctgttttggatgttttgtgtctctccagctacattgtaagttccttgagggcagggccatggcccattgctctgtgaatctcaaatgcccataaaaggtgcccataaaatgttttcttgaacatttgaatgtgctgttgtctggaaaggggtaatattgtgagctgaatcagcaataagtattagtctttttggactatggtattgttaaaaagactgcagccctctcagacttgagcgttaattggcttatttatttatggctttaaataaaatcgatttaacgtta

SEQ ID NO: 166568 - DNA, 1295 bp, Homo sapiens
cctctccccccgggctccgcccaccccacgccgggaacccacgcgggccactacaagcccgccctttcctacgtctggtccagtcggtcttcctccggcccgggccctggcccagctagccggccatggaaggtaatggccccgctgctgtccactaccagccggccagccccccgcgggacgcctgcgtctacagcagctgctactgtgaagaaaatatttggaagctctgtgaatacatcaaaaaccatgaccagtatcctttagaagaatgttatgctgtcttcatatctaatgagaggaagatgatacctatctggaaacaacaggcgagacctggagatggacctgtgatctgggattaccatgttgttttgcttcatgtttcaagtggaggacagaacttcatttatgatctcgatactgtcttgccatttccctgcctctttgacacttatgtagaagatgcctttaagtctgatgatgacattcacccacagtttaggaggaaatttagagtgatccgtgcagattcatatttgaagaactttgcttctgaccgatctcacatgaaagactccagtgggaattggagagagcctccgccgccatatccctgcattgagactggagattccaaaatgaacctgaacgatttcatcagtatggatcccaaggtaggatggggcgccgtctacacactatccgaatttacacatcggtttggcagtaaaaactgctgaacttggtctcaagatgtggaactgtggagaaattctaggacatgaacaagctatcctttcatcgaggacagcaaacattatggtacagttggcttggaattatgtctttctcttttaatttgattgagtggaaatctgagtgaatacaaatataaatgaacaacataagatattcctgtggctcatgcgttacaacacgaggacttaagccagtaatcgtttttgttcagatagaggtgtggaggtagagccagcccctcatgtctgttttggatgttttgtgtctctccagctacattgtaagttccttgagggcagggccatggcccattgctctgtgaatctcaaatgcccataaaaggtgcccataaaatgttttcttgaacatttgaatgtgctgttgtctggaaaggggtaatattgtgagctgaatcagcaataagtattagtctttttggactatggtattgttaaaaagactgcagccctctcagacttgagcgttaattggcttatttatttatggctttaaataaaatcgatttaacgtta

SEQ ID NO: 166569 - DNA, 1175 bp, Homo sapiens
tggctgtacggcgagttttagatcctacgtctggtccagtcggtcttcctccggcccgggccctggcccagctagccggccatggaagtgaagaaaatatttggaagctctgtgaatacatcaaaaaccatgaccagtatcctttagaagaatgttatgctgtcttcatatctaatgagaggaagatgatacctatctggaaacaacaggcgagacctggagatggacctgtgatctgggattaccatgttgttttgcttcatgtttcaagtggaggacagaacttcatttatgatctcgatactgtcttgccatttccctgcctctttgacacttatgtagaagatgcctttaagtctgatgatgacattcacccacagtttaggaggaaatttagagtgatccgtgcagattcatatttgaagaactttgcttctgaccgatctcacatgaaagactccagtgggaattggagagagcctccgccgccatatccctgcattgagactggagattccaaaatgaacctgaacgatttcatcagtatggatcccaaggtaggatggggcgccgtctacacactatccgaatttacacatcggtttggcagtaaaaactgctgaacttggtctcaagatgtggaactgtggagaaattctaggacatgaacaagctatcctttcatcgaggacagcaaacattatggtacagttggcttggaattatgtctttctcttttaatttgattgagtggaaatctgagtgaatacaaatataaatgaacaacataagatattcctgtggctcatgcgttacaacacgaggacttaagccagtaatcgtttttgttcagatagaggtgtggaggtagagccagcccctcatgtctgttttggatgttttgtgtctctccagctacattgtaagttccttgagggcagggccatggcccattgctctgtgaatctcaaatgcccataaaaggtgcccataaaatgttttcttgaacatttgaatgtgctgttgtctggaaaggggtaatattgtgagctgaatcagcaataagtattagtctttttggactatggtattgttaaaaagactgcagccctctcagacttgagcgttaattggcttatttatttatggctttaaataaaatcgatttaacgtta

SEQ ID NO: 166570 - DNA, 892 bp, Homo sapiens
tggctgtacggcgagttttagatcctacgtctggtccagtcggtcttcctccggcccgggccctggcccagctagccggccatggaagtgaagaaaatatttggaagctctgtgaatacatcaaaaaccatgaccagtatcctttagaagaatgttatgctgtcttcatatctaatgagaggaagatgatacctatctggaaacaacaggcgagacctggagatggacctgtgatctgggattaccatgttgttttgcttcatgtttcaagtggaggacagaacttcatttatgatctcgatactgtcttgccatttccctgcctctttgacacttatgtagaagatgcctttaagtctgatgatgacattcacccacagtttaggaggaaatttagagtgatccgtgcagattcatatttgaagaactttgcttctgaccgatctcacatgaaagactccagtgggaattggagagagcctccgccgccatatccctgcattgagactggagattccaaaatgaacctgaacgatttcatcagtatggatcccaagatgaaatggtgatgactggagtgacctcggaagctacttatcaaaggcagaagagccaccatcagcctggattcctgataactctatggagccgagttgcatgcctgcctaaatagtatattgtggaactctttcataggagacaaacttatgtattttttaagtcacagaattcttgtctgttgtccaggctggagtgcagttgcgtgatcccggctcactgcaagctccgcctcctgggttcaagtgatcctcagcctccctcagctggaactacaggcatgcaccaccatgcccggctaatttttgtatttttagtgagatggggttccgcc

SEQ ID NO: 166571 - DNA, 738 bp, Homo sapiens
tggctgtacggcgagttttagatcctacgtctggtccagtcggtcttcctccggcccgggccctggcccagctagccggccatggaaggtaatggccccgctgctgtccactaccagccggccagccccccgcgggacgcctgcgtctacagcagctgctactgtgaagaaaatatttggaagctctgtgaatacatcaaaaaccatgaccagtatcctttagaagaatgttatgctgtcttcatatctaatgagaggaagatgatttgattgagtggaaatctgagtgagtacaaatataaatgaacaacataaaaacttttgttttgacatgtcaaattgaaacttgataaagtgcgtacttgctaagatattcctgtggctcatgcgttacaacacgaggacttaagccagtaatcgtttttgttcagatagaggtgtggaggtagagccagcccctcatgtctgttctggatgttttgtgtctctccagctacactgtaagttccttgagggcagggccatggcccattgctctgtgaatctcaaatgcccataaaaggtgcccataaaatgttttcttgaacatttgaatgtgctgttgtctggaaaggggtaatattgtgagctgaatcaccaataagtattagtctttttggactatggtattgttaaaaagactgcagccctctcagacttgagcgttaattggcttatttatttatggctttaaataaa

SEQ ID NO: 166572 - DNA, 474 bp, Homo sapiens
gcccagagtagccgtggataatctattttaaggtcagatgattagcaatcttaatgccatctgtagccttcattctcctttctccctttgctaattcacatattcacaggtttcacagataagcacacgtacatattgtgttgtgggggtattattctgcccccaggtcttatagccaaagcctccaatagagtgttgattaggaacttctggtatttattagtcgtcttctggacattcacgaaaataattttacaaatttatcattcttaaggtatttgtcatagataccttttggtagttatatattattatataagttttctacttctttttttttttttttttagtagagacaggttttccccatgttgcccaggctggtctggaactcttggcctcaagtgatccgcccacctcagcctcccaaagtgtgggattacaggcatgagtcaccacaccgtggccagaaag

SEQ ID NO: 166573 - DNA, 1219 bp, Homo sapiens
attgacttacatcctcaccagcagtgtgtgggagctccagcagctccacgtcttggttagcacttggtgttgtcagtttttttaatattggccattctggtggtacccaggaatttgaatccatagttcctgacttgaaatcagggcccttcttacttttagcatgctcaagacaggtttgaattttgtagcctcgaatggcctcagaaatcaatacccaggacccacaatacagcaggcaagcatatgagggagcccctgctcatggctccagtgcctagggagggtctcagagaggcatcagctctggagaggcagtctagcgtagtggcgaaaactcaggttctgggaagcaagcagctaaggttcagatcccagctctgccatcgcaaagctgcctcggggtggaacattagtacctacctcacagggtgatcatgagaattaaaagaataggtggatatgaaataatagtgccttacacatgataaatgctatataaatgatagctgctgctctttctattgttgacctgaagtaagccctgagtccccctggagcgggggtaaggccacaagcagatggcatctggcatagccccatgtaataagattcagtaatccggtctgactgaggcggggggaaaagtagcatagtggctagaagtgattctttactggggcccagcgaaaagtcaccctccactactggggagcccctgcttatcccaggcccaaggctctttggccagtgacactactgaggtgtcacacctgaggggaagaaatggaatcatgcatgaaatggaaccaagaggaagtggaagcatactcttagcccagagctagatgcaaagcagctgtttgaatataacaacccaccagtgcagacacagatctagacatgtacctgtatagcagccaatgaggggtggcatgagggacaagggcctgggattcaggagccctaagtgttggtctgagcactgccaccagctatatgtgacctgaggccttgtgaagtggaagttagaagaaatcacagttcccagctcaaatcctgaagaagtagcaatgaacaggtagagtttcctcccagagccctaagccaggtgtggtgcacgtgcctgcaatcccatctgctcgggaggctgaggcaggaggatcgcttgagcccaggagttcaaatccagcctgggcaacataatgggagcctctta

SEQ ID NO: 166574 - DNA, 530 bp, Homo sapiens
tgcatggctcatgcacctagaaggtcacaaaataaggaaacagaatgtagacgaggggtcagcctctaaaagcgaagaaagtttcgttattgggaaatcgaaacttaagtggggaaggggaccagggtataaccttataaggcggataatgagacttaggtgacatcagagaagattgtaaccccagagtactcgaccaatggggaactgggggagggacttgtgtgctaggagataaattatctgttgtagctggcctgggtgtgcctgcccaccagacaccccatcttgcaagatcgctattaaaataagtctcacttttgctgttctttgtgcctctaagtccattctttgggtttggatgggtgagtgtgtttctcacagacccatctgatactcaaaaatattttaaaggtattagtaaccatgagcatttataaaaaatctgattacttacctagtggcaagacaatttaaacacattttgtaaaaactgagactttatgatgcacattctcacatcaagattc

SEQ ID NO: 166575 - DNA, 236 bp, Homo sapiens
ttgctcttgaagttggagaatgcaagaaaatgtattttactagagcctgcagaagaatgcaaccttgccaacaccctggttgtagcccagtgagacccttttcagacttctgacctctagaactgtaagataaatttgtgttgttttaagaacccaaaatatgtgtaacttgttatagtagcagtaggaaactaatagacttactgaggtgccaaggttgctgtggcagatgtggc

SEQ ID NO: 166576 - DNA, 416 bp, Homo sapiens
tcagtctctcccacgctcaagccatccttaccttaccaagccatgcccattccagcagatgcagtccagttccagtacctccccctcactgtaatgcataaaggctctgacttttctaacaactgcccaaaggggctgtgtacataatccagaagtgtatgcggttaagcctcatagaatatgggctcctaaccataccctgcctttcactttcattggaaagagaacaggcaatatggagcctaataaactctcagtggagattcccagccagtacacttaccatatcaattaacaatgaataattactgttcactttcactggaaaggcaggatatggtcaggagatcataaataaattccttgcccttcctcttccaaacaaacttttctgagacacagtgatcccaaacagt

SEQ ID NO: 166577 - DNA, 364 bp, Homo sapiens
cctttgcaagaaaacccctttgccttacacaaagtaaatgcttaataaatagtagctgttattaaatttgaatgaatgaaaggaagcttagagtcgtaacacaaatgcaccgtggatctcaggttgagtgtaagttacattttctatcctggcaagtgacatgacttattctttcttcttcccaaatcatggtagcatttttaatctctctttctctacttgctttttctcatgtatctaaaacctaaataaacctttcttctgggccatgccacaccagatgcccacctgctaggttatctctcctccactgcttattctctcgaaataatacacttactgcctctacttctgactaactcat

SEQ ID NO: 166578 - DNA, 208 bp, Homo sapiens
ggatcacttgaacccaggaattcgaggctgcagtgaactatgatcatgccactgtactccagcctgagtgccagaatgagacctcatctcttaaattaagaaatacttggattagcaaaaacgaataattactgcataatgcccatgagatagagtcacaacaccttttgcctctctttttagtttttctgattattttgctagttta

SEQ ID NO: 166579 - DNA, 219 bp, Homo sapiens
gagcactgccccagaatgctaggaacagagccttgaaatggttctgcccccaacaccctgggccttctgggcctgtgatgggggtgacagcccccacatgccttctgtgccccctttctttttcttttattttgagagatggtgtctcactctgttgcccaggtcggagtgcagtggtgccctgagagctcacggcagccttgtcctctcaggctcaag

SEQ ID NO: 166580 - DNA, 178 bp, Homo sapiens
ccttcaccgtctcagtcctttccccagaggcaaccctttttgtaaatttgttgcatattcactgtgaggcagtatttctgctgtgttgtttagttttaaggctcacgtctccttcatggtgatctgtttttcattttaacttcttcctttatcattgggttgtctatcacctctgtcc

SEQ ID NO: 166581 - DNA, 605 bp, Homo sapiens
attttattttctgttgatttttttttcgaaggtaggattatgaactactttaaggccctctgaaactaggaaggatgtgagtaaagtacaatgtcatatcattatttttatttgcattttttaaattactaatgaggttgaacacatttccacattagtttcaaggtacttagctagaacttgttttacaattttaattggttactgtccatctggtatcttctctactatgccatgagcttccagagaacagagcctgagcagcacttgtcttggtatcctttgtgtggtgcagtaaacaaagcatctcacacagactggatgctgtagaacagagctcctgccatgtgccagccactggtgctggggatagagggatgggagctctcagaggtacactctttaagtccagggatacctacaatttctgggccactcactgagtggagaagaactgattttgtttgaaactgaagttcaaagcccagccgtgccacttactggttgtgtgaccttgggcaaagttgcttcatctctttgagcctcagtttctttagctgtaaaataaggacaagctccaagatccctccaaattcttaccatga

SEQ ID NO: 166582 - DNA, 321 bp, Homo sapiens
gtggcttcatctctttgagcctcagtttctttagctgtaaaataaggacaagctccaagatcccgtctatccactggtgctggggatagagggatgggagctctcagaggtacactctttaagtccagggatacctacaatttctgggccactcactgagtggagaagaactgattttgtttgaaactgaagttcaaagcccagccgtgccacttactggttgtgtgaccttgggcaaagttgcttcatctctttgagcctcagtttctttagctgtaaaataaggacaagctccaagatccctccaaattcttaccatga

SEQ ID NO: 166583 - DNA, 1143 bp, Homo sapiens
tgcctacgattcccgcactgcccatggggaacgaatcctatatcgctgagcgcttggtagggaatgtggactgtgaccctgagagtcgtccttccctctgcctgagtccttgagcgaaaatattgaatagacagcaattcctgaagtctaaacgcctcccaggactacggaggattattggaaagagaacaagcgaggagatacaatcttcaaggactaaatggggaatgactttttaggggtcagtagatgattgatgattgattactataaactgataatatgaggccaaaactaaaagttggaagagtgagcaagtacaatggtttgggagaggcaatgaagaacaaagaaggtgccagcccctactccagacgctgtggtaccactggtttggcaggaaaaacaatcatcatttgagagggccagtggggaagccctgtcctcatggaaaagctatcttctttcgtttacacttttcatggtattatgtctactgaagaggtaaaaacaccaaatttcagagaagctcttaaattgcccaatacttcaaagcaagtataactggtgaagcgcttggcattgatgtcagacacccaatgcctatgatttatttaatgcagtagcattaaggaggatcctatacgtgaaggaacatattttattttcttcctttatattttttggttaaaatatcgtcattatagttagcaatttggaatctggcttacattggttgatacaaataaataatagaataaagcaaaatcagaaaacaacccatctaaaatctttcttcaagataaccaggggtgggattacgggcatgagccaccctgccttgccttgaatcacttcttattttcttttgtgcatgtttcattgatattttctttatagtcaccaaaagtatatgtaacatcctaaagttataacagtcttttaaattgataccaacttaacttcaatcagatataaaaaccctactccttcacagctctttccttcccgcactgttactgatctcatagtacatctttacatatcgtgtacttatttacatagattggtagtcatttttatgcatttgtcttttacgttgtatggaaaataaaaactgggattacaaactaaaattactat

SEQ ID NO: 166584 - DNA, 267 bp, Homo sapiens
ctgtaccctattagctttgatgacatgacacttttcccttctgctgactctgagtctagtactcttttatttcagtggaatttaataatcaccttaatatggcaaatatttaaacaaaaatctgaatccagtccagcctccggttttgttttataattcaaaatttgaaatctcaattattttatctcaatttcttttttctgctctattaccattactcttctggttgagttatttcctttattactgccattgcctcttgactcg

SEQ ID NO: 166585 - DNA, 120 bp, Homo sapiens
cagtgcagcatcacgtggcatattccagagacccctggagaccaggcaggtgggaggctggcctgagaggcagggtggggcctgagggtgggcaggagtcccaaggaaggcgctgggggg

SEQ ID NO: 166586 - DNA, 248 bp, Homo sapiens
tcgccagcgtctttacaagagggaggtaggagggtcagagtcagagaggagatgtggcagcagaagcagaggccggaggggtgcggggccagaagccaaggcactcaggcacctctagaaactgaaaaaggcaaggaatggattcttccctggagcctccaggtggaacacagtcaggtcaacccctttttgactcctgacacctccaggatgtggtgagataatacatttgggtggtggtttttttt

SEQ ID NO: 166587 - DNA, 279 bp, Homo sapiens
agggagaacagttgaaactgtggagttcacgtagcgtaaactggcgaggctgtctctgctgctgtcattaaaagttacgctgctggcttggcacggtggttcacacctgtaatcccagcattttgggaggccgaggtgggcagatcacgaagtcaggagatcgagaccatcctggctaacatggtgaaaccccgtctctactaaaaatacaaaaaattagctgggcatggtggcgggcgcctgtagtcccagctactcgggaggctgaggcaagagaat

SEQ ID NO: 166588 - DNA, 732 bp, Homo sapiens
gcctcggcctcccaaagtgctgagattacaggacaataaggagcccactgcaacctgggccctggcactatttggcaccgttaatatctgcacaagagaacacagtccagcagcagcagccacggtctaagggatgggggacagccaggcatgggaatgggtatatggcccaagagaggctccacccaggggttcgggcccctgaaccatctggaacttggctgtaaacctccattagcctttggttacctgccagcccctcaggaatctcctggggcagaatccaggtgctcctaaagtcaccatttacacaaagtacttattgagcacctattgtctacagacatacacaaaaagagcaataaaaagacacaggccctgttcccatgaaactgatgggctgtcagtccccaagtccaccttatttctcaagtaaatcctaaatataacacattttcaaaaaggaaaaaaaaactgtcagaaattactcaaacagatgtccctgtaccttcacgttcaaatgattcatgctttttgttattgagccaattcatgagcttcatggagtctgaacaacccgagtgtgccttgtaaggggccctcaatgaaaaaacaactggtcccagactcccactctgcagcacttgggacacagccagccagcccacaaacagcagtgcatttgcttttctcttcaccgaggaactcatttacatagacttgatggtgtga

SEQ ID NO: 166589 - DNA, 419 bp, Homo sapiens
ggtcgactactactactaaattcgcggccgcgtcgacgtcggtcctctgccctggacctgtcttggttcctgaccctgtcggcggctgcctggtgcctgccttgccacctgtacctctcctctatggaaggatggccacagtattccatggtgcctgagtcctccctaacccatcactcgtgtccttggctctctcctgacccctaaggtgagggtcaggtgcagagccatgaccttctgtgcccaatcccagctgggcctcatgtacccccaagtagaagtttctgggacctaccacaagaagagagtgtgctccttctgtacggtataaagtagtcattctgcacaaacatcagcatcaaatggagactgttccttgcctgccatctcattgactcccccagattcttttctctgag

SEQ ID NO: 166590 - DNA, 759 bp, Homo sapiens
ttaaaagaagtattagcggccaggcgcggtggctcacgcctgtaatcccagcattttgggaggccaaggcgggcagatcacctgaggtcaggagttcgagaccagcctgaacaacatggtgaaaccccatctctactgcagtacaaaattagccaggcatggtggctcatgcctgtagtcccagctacttgggaggctgagacagaactgcttgaacccgggacgcgaaggttgcagtgtgccaagatcacgccattgcactccagcctgggcgacaggaaaacaaaaaacaaaaaaaagaagcattagccattctgatcttgtgtgcacctgcataatgatagagccccaaatgactacaaaacaaaaaagtgtcaagaaaaggaaaaatgaataaatgagcacattctccacgcaggaaattataccacttctcactggaactgctggtttaagcagactcaatgagtaagaatatagaaaaattgggccaggcatagtgtctcatgcttgtaatcccaacactttgggaggcgaaggcaggcggattacttgaggtcgggagtttgagaccagcttggccaacgtgctgaaactaaaataaaaaatacaaaaatgagccagatgtggtggctcatgcctgtaatcccagctactcgggtggctaaggcaggagaatcacttgaacttgaggtttcagtgagctgagattgtgcccctgcactccagcctgggcaacagagtgagactctgtcaaaa

SEQ ID NO: 166591 - DNA, 320 bp, Homo sapiens
aggagaactaagattgatcactggatattacaacatgaaaatagttggtgactttgtcaggaatatttccctactatatagtgctggaggcagaagctagattctcataggctgtgcagtatatgggaatggaagaagtggttattgctggggaagtgatgccttgtgaaagcttggctataaaaggggtggatattgacagggtgttaatagctgggtgtgttgtcaagggagtgtgtattttaatctatgagagacctgagttaattgatatgctgatgagaagaagtttatagagataggaagtcaggaaacaggaa

SEQ ID NO: 166592 - DNA, 517 bp, Homo sapiens
atcttctagattgaaagcggccctgacaatgactgagaaagaccccacagcaaagcttatcattgtcaagtgtcagaaccctgaggataaagaaagaggggcttctgaatctctaggttattgtaaatacttgggaatacaaagagcaaacaaacatgaacagctaggagacaatggaacaactgatgactccagaaatcagttaaaaaggcttttcggcctagaattcttttgtttttgaaaccgggtctcactgtcatctgggctggagagcagtggtacagttgtcttcatctcgtgggctcaagtgatccttctgcttcagcctccccagtagctgggactacaggcatgtgccactgtgcctagatatttttttttttctttttctttccccacccccgagtcagagtctcgctgtcgcccaggctggagtgcagcggcgtgatctcagctcactgcagtttccacctcctgggttcaagcaattttctgcctcagcctcccgagtagctgg

SEQ ID NO: 166593 - DNA, 309 bp, Homo sapiens
tgattatttcctttgctgtgcagaagatttttagtttacttaggtcccatttgcctattattatttttgtttcatttgcttctgatgacttagtcataaattctttgtcaaggctgatattcagtaaagttttcctaggttttcttctaggaattgtataggtttttacatttgagtatttaatcaatcttgagttaatttttatatatggtgagatataggaatccagttttactcttgtgtatacggatatccattttttctagtacaatttattgaaaaaggtatcctttccacattgtttatttg

SEQ ID NO: 166594 - DNA, 286 bp, Homo sapiens
gactcaaatgctaatctcctttggcaacaccctcacagacacatccaggatcaatactttgcatccttccatccaatcaagttgatactcagtattaaccgtcacaactgttctttgataactcaaattgtgtctttttcccatttagaatatacatctttttttttttttttgagacagtgtgtcaagcccaggttggagtgcagtggcacgatctcaactcactgcaaactctgcctcccgggttcacgccattcttctgcctcagcctcccgagtagctggga

SEQ ID NO: 166595 - DNA, 545 bp, Homo sapiens
tgtaccagtgacatcattttgtggctcttggggatttggggagggacctccccgaggccactgtgcagcagcctcatgcccagggctcacaggtcccatatgtgtttcctccaccaaagcaccctgagctgtcctaccttcctcacatccccacaccccgcgggtgtccctctgcttagcagctatttattctgcctgtatttgggccaactgcacaggctgtctgagacctgacagtatgctagaatgtacagggcatacaatattttgtgtaatatcatggaaaagtgtgccgttctttcggttgacggtggttgcagataagactgcagagacagcttgtggtgggttggagtgtgactcagtctcccgtgggtctgctccccttccagactgcatgtggaattctgtatagagtaaggcatattcgtgtatgtgggagggaggcttagaataaaatttattttttttcttatggaagcagtacatgttcattgtaagaattaggaaacatagatacaaaataaactttatgaaaaagcaaa

SEQ ID NO: 166596 - DNA, 605 bp, Homo sapiens
gcacgttcctgcagtcccagttacttgggaggctgaggcaggggaatagcttgaacctgggaggcggaggttgcagtgagccgagatctcgccattacactccagcctggtgacagagcaagactccgtctcaaaaaaaaaagaggggagatggactattacattttttgtcactttagtctttttgcatcactttaatggacacagtttttttattcagcctggattacagagcaagtcaagttgattgaattgttggcaattagctggcttttgtgatggttccttggataagtctatgaaatcgcccaggatcttaaagtgtctaagagtttgaattagataatctctaagatttgtttagcccttcctttgttccccaaatttcatacacttaatttctagttgcttaaagaaaaatactttgttgtgaggttatagttgtgaggttataggtgagaaattaaaaagaaatatttgttgccgggtgtggtggctcatgcctgtaagcccagcactttgggaggccgaggtgggcagataatttgaggtcaggagttcgagaccagcctgaccaatatggcaaaaccctgtttcttctaaaa

SEQ ID NO: 166597 - DNA, 295 bp, Homo sapiens
tagcttcagggggtacacgtgcatatttgtgacatgggtatattactggtggggattgcgcttctggggttcccgttacctaaagggtgaaccgcgtaccccgtaggtcatctttcacccctcgccctctcccgcctccctgcttaggagtcccagtttctcattgtttcgatcttcctgttcccgggtacccactgttcagccactgcttgtaagcaagagcaggcgctgtgcggtattgtttctgagttggttcacttgggataagcgcctccagctccatcgcgttgctgcc

SEQ ID NO: 166598 - DNA, 719 bp, Homo sapiens
gggttttaatctcaagaaaataactgctatcagttagattttgatgtatattgtattagccttttgacttacacaaaagttataatggtaaaattgatcctctgtgtaatttatgtaggaaattgaagtgcttgcataagccgtacttgcatgtgagagctaattgtaagggattaaagacattagcaactgtgtcctcagctttgttatacttgagtcatacttaacagccaagatcttcagtcatacattaacagctaagatcttggtcagaaatgcagcctccatttatgacattctcttgggaaaataagtctcttgtttaacaaggtgatttagtttttactttgatttcaggaatattgtctaacgtgagtagggcgagaaggcagggcggcttgtactgagcctaatttagcctgcacctataaggatcaaggtgttgtttctgagcctcctgggatcccagggctcacttgggtgggagagtgggttgtccctgagccaaaaaactgctggacacaccctgtgtgctcaggattgctgtgtgagcatcctgacagcttttgaccagtagcggttcatggttactgagatgaggtggctttgagattcttggttgccaggttgccactcacccccgttccctgaagtaacttcccctaggtcttcatgcgatagctatcctaagtgtcaggttttattttttttattttgag

SEQ ID NO: 166599 - DNA, 431 bp, Homo sapiens
ggggaaaccccatctctactaaaaattagcagggcccgtaatcccggctactccagaggctgaggcaggagcatcacttgaactggggaggtggaggttgcagtgagtcgagatcgtgccacttcactccagcctgggcacagagtgagactctgtctccaaaacaataaaaaaagatatatggtttgtaaacattttctcccagtctgtagggtgccttttgattgtgttgattgtttcctttgctgtgcagaagctttttagtttgatgtagtccaagttgtttatttttgcttttgttgcctgggcttttggtatgccatccaaaaaaatatcaaggaactagtattaacctatacaattcagtagtttttagtatatttacagagctgtgcaactattgcacaatcaattataaatcattttcatca

SEQ ID NO: 166600 - DNA, 221 bp, Homo sapiens
attgcagtgtcattactaagattgactttggagtcagatctgggttccacacagattccaataagaactagtagcgtgacttggaaacacaattcaacctcaatctctattttcttactaaaggcttactcaagtttacaaaatagaattgaagtgatgattaaatgagatcattcatgaaagattatccatatatatacccttgcacagggcctggctca

SEQ ID NO: 166601 - DNA, 742 bp, Homo sapiens
ggttctcatagcacaccgggctggcgcggaagggagccaatggtccggcttagacacctgcctctgctcctgcccaacgccctgagacaccagccctgctttaaggcagtgtttggagacaaggcatgaacagttcctagagcagtgtctggcacatgttctgtaatccaagatgtctgtaaagagctgggatatcactaggaaatcatcttcatccagacttattcctgagtggaagaacttgaagttcctcataaataagatcctgaaggacataaagaatgatgaagaaccaaagaatgatgtggttctactgagtgactggcctgagactctataccgggagtctcaccatccacagaacaagccttttgtctgcttctactactccatcaaggtcaactgttttgtctccttaaactggatggaaccctgtggaaaaatgcaggcaagaaattatcggagaaatcactctgggccaactgctgaatattcaagctgaagatatacagtccctgcttattcatgtggagcagcagctaaatgaaaacttgaccttgttacaaagagaaaagtcatttactttttcttttgatataccatggtctgaagaacttaaggtcttttctgaagacatgtgcatacctttgtcagaacctgtaaagatcaccaaaccaaagaaaagaaagagacattttcaagcaaggagcagaaagcttagtatgtatagggtgatatatgg

SEQ ID NO: 166602 - DNA, 359 bp, Homo sapiens
ttcttttttgaattttgttctatcactagcttagtactgtacttcttttcccttgacttatataggcaagaaattatcggagaaatcactctgggccaactgctgaatattcaagctgaagatatacagtccctgcttattcatgtggagcagcagctaaatgaaaacttgaccttgttacaaagagaaaagtcatttactttttcttttgatataccatggtctgaagaacttaaggtcttttctgaagacatgtgcatacctttgtcagaacctgtaaagatcaccaaaccaaagaaaagaaagagacattttcaagcaaggagcagaaagcttagtatgtatagggtgatatatgg

SEQ ID NO: 166603 - DNA, 253 bp, Homo sapiens
atagtttaaacttcagtgctttttcggcatcagttaatatgaccatgtggtttgttttcttctttactctgtcaatgtggtgtactacactaatagattttttaatcttgaactggcattgtgtccctggcataacccccacttgatcatggtgtataattatttctatataatgctgtatgtgttctactcactaattttttttctttcttttttttttgggtagagaaggggtcttactgtgtatcccagg

SEQ ID NO: 166604 - DNA, 453 bp, Homo sapiens
gggcctgtgatggctcccaggtggtgatggctcccaggttcccatcccctggcaccccagggctgagctccccaacctgtctgtattctgctccttgctccacaaatgccccaatcccaatccactcagctgccagagtcagaaacccactgggggcggctgatccctggctccctgcctcttcaccctgcgcctgttctctcacacctgtgacggccccgcttcactttcgctggtctcccgaccccctaggctgcaccccaccaagtctccccaccctgcggcccaagagccctgctctaagccactccgcagcagatccgctggggcggggcctgaggaccgtgctaggtgctagcgtggccacctgcccctccaggctgctcagcagctctgctcagggtgaccctgcgatggcttgctccttcctgaagagggcgcagtcagggactc

SEQ ID NO: 166605 - DNA, 588 bp, Homo sapiens
ccccccccgccacccaacacacagaaaccctgcatttctcccctgcactcagcttgctgcttcccttcctataccctctcccggggatccacctcggtacttccagtctgctccatgccagccgttcccctagctctcgggtcaaacctgaccccatccttgagtcctcccacttcccatcccctggcaccccagggctgagctccccaacctgtctgtattctgctccttgctccacaaatgccccaatcccaatccactcagctgccagagtcagaaacccactgggggcggctgatccctggctccctgcctcttcaccctgcgcctgttctctcacacctgtgacggccccgcttcactttcgctggtctcccgaccccctaggctgcaccccaccaagtctccccaccctgcggcccaagagccctgctctaagccactccgcagcagatccgctggggcggggcctgaggaccgtgctaggtgctagcgtggccacctgcccctccaggctgctcagcagctctgctcagggtgaccctgcgatggcttgctccttcctgaagagggcgcagtcagggactc

SEQ ID NO: 166606 - DNA, 344 bp, Homo sapiens
ttgagttaattatgtcttaaaatgtaccaatatgtaatgttttatgtgtatatgtcttaaatttacaaaagtagtactgtggtagaaaatattttgtattttctttcttcttttaatgttatgtgtgtaagatctccccgtgttgtctctctctgccgcacactattctgcagtgtgtttccagtatatttcacaattcctctcccctgatggaccctggggtggtcgccaactccccattcccacataggagaccatggaaaacattcccatttgtgtctgctgatggatgttgtgagaatatctctgggatattcaggagagagtgtattgtgtcttaaggc

SEQ ID NO: 166607 - DNA, 711 bp, Homo sapiens
agatggggtttcgccatgttgcccaggctgatctcgaactcctgagctcaaagtgatccgcctgcctcggcctcccaaagtgctaggattacaggcatgaaacaccacgcccaacctcatgaatagtatagatcttgacctactattataggataaataaatgcatgtctacaaactcttgagccaacatattgttcataagggaaagctctcaaattctttactgttttacctttttctctcctaaatctagtcccatttcaataaattcctacttgaccctctatcaggtcctctgaaattccatctcaccagttctacctcaaatttattttctatcatttttttcctgtccctgttcttggattcttcaatctcaattggcttgacttggcttttctcttcctctctgtcctacagttctttcttttcattacagaaagtaaaaagtgaaagtcactcattagctcaccaaatcccactccaccacacagatatcactgttaatcaaccacattttcccctttaaaaagcccttttaaatctttaaatctgcacttggtgtaataatttcatttgtctccatttggagggctacttcctcttgtggaataaatcattctccctcatcctttcaggattccaaattaacattggcgctgggaagtcctgccctgtggaccctgtcaccactgccctcatcaaataata

SEQ ID NO: 166608 - DNA, 260 bp, Homo sapiens
aggacccctcccaagcatgaggaattgccccatctgtactatgaccgtatcctctcatacaggtttctggcctggaatcttccacttgcatcccatttcccaaattactattagggtgactttgctaaaatgaatatacgatatagtatcctgcttaaactcttcaattattctattttaaactctaataaaactcttaattattctccaaagcccataaaagaaagtccaaattcctttatcatctgacctccagttct

SEQ ID NO: 166609 - DNA, 158 bp, Homo sapiens
tggagggaggaactggagataattctgtggaagtactggctttaagctggtctatagaaataggagtttaatatctggagatgggaaggaaaaacgtgccaggataatgagggaaatattgtgaagccagagagttttggatttaatttgctgatagg

SEQ ID NO: 166610 - DNA, 416 bp, Homo sapiens
ccaatatgactgatgtccttataagaggaaaagattaagacacagtcaaacacagaagagataacatgtgaacctaagggagaatatggccatttacaagctaaggaaagagacctcaaataagaccgatgctgctcacacacgatcttggacttccagcctccagaactatgaggaaatttatattgtttaagccactcaatctgtgggactttgttatggcaaccctagctaatacacaccttgtgaactccataaggggagagattatatctttaatttcatttaaagcttttgtttaaggagtgagaatgaaaccgatatttactaggcagataccatatgtcaggcactgtattaggtactttccacatattacctgacttaatttttccaatgatactaggaaatataga

SEQ ID NO: 166611 - DNA, 340 bp, Homo sapiens
atagcacattgctgcggggctgctgcttaacagacctggtgcagacagcaggcacccctggggctggtgaggggctcctggggtctcaccagatagatggtgttgtgcagttcaaatcagttaggaggcctgagacttgagacaggctcacgtggagggaggtggcatcctacccagccctcggcccttgctgccccactcaggggccagatggtggacagtgaagccactatgaggagttggaaacagctatttgctcacttcccctttagatggctgccagtccttctagatcagtgaactctcccaaacaaatgctattgaaacttctaaaactagg

SEQ ID NO: 166612 - DNA, 550 bp, Homo sapiens
tcctatctgcaccatgaggacaaaactctgtcctctgagattatttccagctctcacacactgtgattctgagatcctaaacccaattgctgtgagctctggtgagagccgcccctgcctgatgggagccccgccctttccaccccctcctcaccttaccctccagtggctgtgggaaagcacgcacatattctggaaaacagacccacacgcacaagcctgcccctgtatgacagcccattcttctgggcctggcaccagctcttgtggccagcgccagggagatgaaggccctgtctcagcaaaggcaccttcaggaggctggcatccctcctcccccagccagcagtggagaaagcccctgggtctccctcaggggtcgagattgggctggagccagagagcaggtcccagagtgaaagtcatcacggctgagaggggcccaaagggcagcccctgcctggtgacagtaaatagcgactgtgatgatgatgactgtgataaagggacacgtgggaggtgccaatcctccaggctgtgtcgcggcact

SEQ ID NO: 166613 - DNA, 738 bp, Homo sapiens
ttctttatcacacatagtacttccactcagctatgtcaggagcctctctttagtctcagccttcacactcagtagaattttggtttcatttttttcttctgtgtgggatatgacaagatttctcttcaaatagcctattaatcctttattctttaatccacagtacccctccccttcccttttcttctctttttctttctttctgcctttactacatgcctaggcatgccacagcaccaatggcttatcagtaccagctcacattcctttccttatttgggaagaaaactagctctctagcttatcacagatgacttctaccccctctcccctctctcccttatgtgcacaccttatctaagaaaaagttcaaatgttcagagaatcgggtctagcttagattgtgcagtccaaccccagccaatggggaaagggcacaggggcaggatttgcgtcagggataaaaattttaactctccttttggtgactggccaaagagaagcacccctctgtgcagaagtaaatttgctttgctgagaaatcctttgtctgagtgtttgttttccttaagactccaagctttatttctgacattctggaattatagtttggagtcttattcctcacttatattgtgctttaccttctaggtgtgtgcacactgtctctctttctccccgcactcccaccccgtatcatcgtgactcgtggaaatgtccacaggaagttgccacata

SEQ ID NO: 166614 - DNA, 233 bp, Homo sapiens
ctcaagggattatcaaacatgaaaaaattgtatacatgatgaagaaggttgtgactcctccaggaagaaattaaggaattaatgggaccagagttgatgagaaacaggttattaacataatctcaaaatacatccctacaaattataatttacagaaattacactttacagtacaacagagaaaccacacaacacagtccatattaacatacttttggtatttcatacagttc

SEQ ID NO: 166615 - DNA, 225 bp, Homo sapiens
acactctagagaactcccggctcatatcagttcattccagactcaataaaaaatgacaggcttcttctgtgtactaccttttcctcctctactttcctcttaccagacaataaagtattgtcccttgtgaggtagaaacaaaacagcaacatgaaaacaaattctaatagctcatgggaaggacagacatcatgatcccaaagtgctatgttaaatgccttaaga

SEQ ID NO: 166616 - DNA, 334 bp, Homo sapiens
ctgacatctctttggatgctaaatacatgtggttttagaaataatacatcttttctggttgaaattgcatctaaaagactatcttcctctgctcccaagtcttgctcatcaagctcctgctattggctgaatttcttctctagccattccacactagaatgtctccctccaatgagcctgtggggtttgggctgctttatcgccatggatcctggaatggtctccatcacaaagtgtgtctgaagaaatgagcgagtgaatgggagacaaacagcacttggacttcccttttgtattttcaggttaacatatttttgagccctggcctgaagta

SEQ ID NO: 166617 - DNA, 495 bp, Homo sapiens
taccaagtcaggctcatacaagtctagatttgaaattgagcttcatgcttggcccaacctagtagagtcctctaggccaggtttcagaagggactgttaggagcacatttttggctaggcctgacctggaaagtctacattgaagacatgggcctgcattctctggatccctacattataggtccattttataacgactctgtggagtgttcacattgacatagacaatacagttttactaatatagcctagtatgtgccaagaagggtaagttgggagacttgtgtttataatctcttgattgttgttttgccttgttttccaggaaatatgtgaaggtctcaacattctttttcccttgttcttgatttttcacctgtacattatctctgattcattagctggtccctgttggggctgtcatggtacatcattaggttttaagtctggatgtaaggcctgcctcaaagagacactaatgggagggaacaaagc

SEQ ID NO: 166618 - DNA, 266 bp, Homo sapiens
gaccgcatattaaggtgtgagacaccatttctttttccctaccatcaggccctacagcctccctagctaagaaatccaggagctggacacggtggcttatgcctataatcccagcactttgggaggctgacgtgggaggatcacttgagccaaggagtttgagaccagcctgggcaacatggtgaaatcctgtgtctacaaaaaaatacaaaacttagctgggcgtggtgatacacgcctgtagtcccagctacttgggaggctga

SEQ ID NO: 166619 - DNA, 150 bp, Homo sapiens
gcagcctctgcttgaacgctgggtttgccacatttaaattgactgtctctaggcaaatcaccttgtctctttgaacctcagaccccccatctgcaaactagggatcatcataatgccctaacagggctgagtagagttgacccagctgct

SEQ ID NO: 166620 - DNA, 547 bp, Homo sapiens
gatgtggaatcctctccggagagctgagggtgctgggacccagcctgggaacatgcattcattggtcatttgtatagtcccaagtacaaatgtaagaaattcagctcacagggcaagccctgcctactctcctcagaagaacagtatggaagtccattttcaaagtccagggtttccctgctccttgtacagggatccttgtacagccacttgtgtcccacagaggacgttggcctcctagggtgaggcaagcagacagcccgcaggtcagaggaccctctgcttgtgacagtgtgtgacaggtgaggagggactggaggccactgttatacctcctcaggggacctttgcagctttggggtctcctctccgccccccagttagtgttcctcctgcatccccgactcctcctgcctgtacccttcatcctacagaggcatctcggtggccctgctccgggtgtggggactgtaatgtggagcacgctgacaaattctttgtccttgggaagtttctattttgccgagggagatagactgtaaacaag

SEQ ID NO: 166621 - DNA, 247 bp, Homo sapiens
agtagttccaggctttggtgagccatgatcacaccactgcacttcagcctgggcaacagagcaagaccccaactctaaaaaataaataagtaaataaataaaaagatctattgaagggttgagaaaaaagaaaggatgatacagcaacatgaaggagagggaaagactaaggattatgttagcagagaatttccacacaccgccaccaaatgcaacaaggtccaacttttggctgtgaaaggggaac

SEQ ID NO: 166622 - DNA, 366 bp, Homo sapiens
ctttcctctgtacaaagagctttgccttttgtgattaaaagcatatcctggaaattactcgatgtcatttcaaagagagcttcctaatacttcactgtgtaccataggttacccaactgttcttctatggatgtgcgtttaggctgtttccagtgttttgtaatgacaagcaatgctgcaatgagtaaacctgaacatacgaacgaattttcatatggttggaggtgtgtcttcagggtagattcctagaagtgagattcttgggtcaaaagataagtgcatatgaagttccccttagacattcccagattctcctctaacaggtgagatgtggttgtgcaaaactggaatgtccatcagtttggt

SEQ ID NO: 166623 - DNA, 368 bp, Homo sapiens
tagcacaagaatacagatgttctagacccaacctaacaaagctcaataggataaagtaggataaaactaacccataaggttcttacctgtgtgactaaacaaaatccaaaactctttaaaaaatgtaaaaaaaaatagcacaaataacataaaattcacaatgtctaccacccagtaaaaaattaccaggcatgcaaactaacaacatttggctcataaccgggagaaaaataaacccacagaaacatatgcagaaataacaaagatgatcaaattagtaaaaaaggatttcaaaagattattataaatcttatggttatgctcagtgaagtaaatgaagataaacataatatggagaaaataaaaga

SEQ ID NO: 166624 - DNA, 328 bp, Homo sapiens
ctcgaatagctgtgactacaggcatatggcaccacacccaactaattttttaaaaaaattttttgtagagacgggggtcttgtcatgttgcccaggttggtcttcaactcctggcctcaagggatccttctgcctcaacctcccaaagttctaggattacaagtgtgagtcactgcacctggccacagaactttaaaataaacaatataaaaatataggaatatttaaacatagtcatgcaccatataacattttagtcaacaacggaccgtgtgcagctgtggtcccatattatactggagctgaaaaattcctactgctttgtgat

SEQ ID NO: 166625 - DNA, 556 bp, Homo sapiens
  misc_feature (369)..(369): n is a, c, g, or t
ggagacttatgtcatgcagaggtgaaatgtttgttagacctgtagcctacaatagcttgaagggaagactgggagaagtaagcctgtagctccagaagaaggtggctgagtgagctgcaataaaaatgtatgttgggctgggtgcggtggctcatgcctgtaatcccaacactttgggaggccgaggcaggcagatgacgaggtcaagagatcgagaccatcctggccatcatggtgaaaccctgtctctaataaaaatacaaaaattagctgggcatggtggcatatgcctgtagtcccagctacttgggaggctgaggcaagagaatcacttgaaaccaggaggcggaggttgcagtgagccgagantctgccactgcactccagcctgaagacagtgcgagactccatctcaaaaaaaaaaaaaagtatgttagtcattcctttggtgtacagtaaggtattgtgagacagagacgcactcaagcaagatataaacggtgtggaaatagaagaaagggaaatatgaagagtttgaggccttgtagtgttggaa

SEQ ID NO: 166626 - DNA, 211 bp, Homo sapiens
taggagaatcgcttgaacccgggaggcggaggttgtggtgagctgagatcgcaccattgcactccagcctgggcaacaagagcgaaactccatctcaaaagacaaaagagagagaaaggtggtcaccacaggcagggaggaagggtccagggagtgcctaaagtgtctagaaggcccaggttcctgtttgggtttcgattgtggtgatggc

SEQ ID NO: 166627 - DNA, 569 bp, Homo sapiens
tcgcgacgggccagtccttgctgcagaatggcgtctgaagggcccctgatgtgcgccacaaccgggacctctgtcctcctacagtgagggtacacgtggctgtgggccccataggactccttccagaagcatctgcagagtcccaggaccaccagactctgttttgccaactaagcacagtgggcacttggcacctgatgtggactgtctccgagccccctgtggaggggctgcaggcttcctgtgctgcctgtgtgggtcccgcaggctggagggaggcccctgcctttgcagattgcagggtggcagggacacgctgagggtggcggggacatggtgagggtggcggctgtgatggcaccgcatcagagcagctcctccacaccagcgtcttctggggctcagagaaggggttggacttcccagagaaggggtgcagggcagggaagagtccccatgcctatgagggagaggatcagggtggggtgatggaggatccgtggctgggcccccagaccacagggaggctgtgcagccatgtcagaggcgctgggggattgggcggccgc

SEQ ID NO: 166628 - DNA, 732 bp, Homo sapiens
acaggttagttttaccctactgatgatgtgttgttgccatggtaatcctgcagcatattgaaccaatccacagagtggatatgtccagttttaccagtaagagttcacttctaatatccattgtggtaattgagaaaatttttggtgttggtcagagataaatacccatagcacatgcaaccatttgtttaaatactagctggaaggtatattcctaatgaggtcaattgaccatttttgatatatagactaaaattagcattcacatttgtatcaaaacatctactctgaagtattctacagtaaattccatagcatataacaatgctgtattatatactgttaaggtttcttttgtgaaatggaaagaatagtggtggtgatctcatagaattgtgaagatttaaaaacataatattgtttagcactatgccacgcctatatcaagtgctcaataagtgctaatcattattatgtagaaattcaggataacattattacttattgttccatatagagtttttgtggagtgaattcttccttcgttttattttggacttgccaagttctgacactctccaaaagaaaagggaaaagactgggccatgcatgtgtttcccttcccagcagaagagcattcagagtcatcttcactctttgcggtcaaggcccctgctgtaggtcgtgtgtccagcttgtcctgcctaaaagcatcatgccatgcttgagaaa

SEQ ID NO: 166629 - DNA, 728 bp, Homo sapiens
cccaaagtacttatttgggtgtttgcagagaaaggcaaggctcctgcagcatattgaaccaatccacagagtggatatgtccagttttaccagtaagagttcacttctaatatccattgtggtaattgagaaaatttttggtgttggtcagagataaatacccatagcacatgcaaccatttgtttaaatactagctggaaggtatattcctaatgaggtcaattgaccatttttgatatatagactaaaattagcattcacatttgtatcaaaacatctactctgaagtattctacagtaaattccatagcatataacaatgctgtattatatactgttaaggtttcttttgtgaaatggaaagaatagtggtggtgatctcatagaattgtgaagatttaaaaacataatattgtttagcactatgccacgcctatatcaagtgctcaataagtgctaatcattattatgtagaaattcaggataacattattacttattgttccatatagagtttttgtggagtgaattcttccttcgttttattttggacttgccaagttctgacactctccaaaagaaaagggaaaagactgggccatgcatgtgtttcccttcccagcagaagagcattcagagtcatcttcactctttgcggtcaaggcccctgctgtaggtcgtgtgtccagcttgtcctgcctaaaagcatcatgccatgcttgagaaa

SEQ ID NO: 166630 - DNA, 256 bp, Homo sapiens
cacaggagtaccatctgtggtgaaagagagtaactataggctatataatacatggagaaacaattcatggtttgtttgctttgccattctgcttcctagtgcttttttaggaatgtattgtgaaagtgagaataggctgtatagccagagatttgtattcatggcacaaagcagaaagctgctaccatcttggtggtagggcagcatgctctctggtattagcaagggacagggaaaaccaagacaagaaagccag

SEQ ID NO: 166631 - DNA, 194 bp, Homo sapiens
attgtaaactgccaagaataatgtctggcccatggtgtgttcttagttggtggtagctattcttattgggcctgggtggttgatcagaaagatcctacattgaagaattttataaactaagaacttattgcataggcaggtcaaggctagaaacagacttcagcatctacagtgtgacatagaaggaagcaatg

SEQ ID NO: 166632 - DNA, 260 bp, Homo sapiens
aacccattatttgtttttccttactctgctttttgcctgtcactagtgtttaatccagcaaaaggaaaaacatttcttgaaaacagataaagtcagcactatcaagtaaatgaaaaatcagaggccttttgacttgctatagacggtactggcctctactatttctctagctttattttaacacataaaatgttctctagttccaggaaaaaagaacagctctgggcgatcaagaaaataaagctgaactactgtctaga

SEQ ID NO: 166633 - DNA, 248 bp, Homo sapiens
ctcaagcttttgccactgatcctagaaggaaattactctttccctcagtaagaggacgcctgcacttctgagctgagaaatatttccgttgcttcccaggagcacgagctggggcagggaccactgcacggcctgacccttggagctgactgcccgcctgcctgctggcaggactgaggtgagctgactgaatgccccaccccaccatgtgcttcaatccctaggctctgcagcagccgcccccacct

SEQ ID NO: 166634 - DNA, 631 bp, Homo sapiens
gatgtgctcactgtctctcaggtgggccttgacttggcagaatcttgaattcaggttctcttgatttctctccctgccatttcctttacataaaacctgccgcggagctcacctatctacatggccttctgacttgttcctaatgatccaatttggagaaagggagttgaagggagatggggaaagggagtatggcttgggttgggactcaaaccccagttaggattaaaaggtatgcattttcctgaaatatgaaatattgaattttaggatgatttgaatatttatttatgaggcactcatccagtcttaccgtataccagacattgattcaagaactttacaagcataaactcacctaacttaagccttataataaggcttagtataggtattacttttctcatccccgttgtataggtaataacactgaggcacagaggaattaggtaacttccccaaagtcacaccgttggtaaagtgtagctctgggatttgaatccagtccacttagtctgggtccctgtcaccaccctgcatttcccatgctggagccagcacctgtgagaaaggtgaagtggccacatacacaagagagaggagcagctctcagctgatatcataaaggaaa

SEQ ID NO: 166635 - DNA, 397 bp, Homo sapiens
gtatcattatttcatctcgccttgtacagacaaaatgaaatagaagagcagagaagttaaataactaccaccacttgtatgaccagaaagtgactgtgttgagaagtctcatttccaaatttctgctcttcagtgccttactgaaaggtcatgaatcaatatctgatataaaggatagtggtcttgttataagctcctgacctacttttcatttgacctcacttgcattttatgttaacatggaagaaacaaatagttttatataaatcagagacaaattagtatcagtagaaattaagtaattcttcctttgtctgtcacgtaatctcagtattgatatcttttcaagggaaacagaaacctgcaaacttaaggttctctattctctgaaatgacc

SEQ ID NO: 166636 - DNA, 1002 bp, Homo sapiens
ggggccacctgaggagcagagaggtgcagcacctcctcagcatcgcaccgtgtgtaggactgaaccagggccggagctcagatctgggcatctgcatgctcaggacaggttacctgagctctgtgtggtgtgaaacggcgagcgtcaggagcttagatctaggagccggcagccctggactccgctctttcttctggggatgaggtagcaggtcctgtgtgagggtgaaaagttggtggctctgaagctcttcacctgggcctgacttgggacagtcacgaaacagagctgctcatgctcttaatgcggcctgccatccagagctcattacaaggccccacaagacaaccagtacaactccaaccaaagaacagctctctctggttttcaatttggttgtttcttttcttttcttttttttttttgaaacggagcctctctgttgcccaggctggagtgcaatggcgcgatctcagctcactgcaacctctgcctcccgggttcaagtgattctcctgcctcagactcctgagtagctgggactacaagtgcgtgccatcacgcccggctagtttttgtatttttagtagagacagagtttcaccatgtcggccaagctggtctcaaactcctgacctcaggtgatccgcccaccttggcctcccaaagtgctgggattacagatgtaagccagtgcacccagccccaactttctttaagacaactcttaaaccttttgtgctagtatcaacattcaaagctgcacatgcacctatagtcccagctacttaagaggctgagatgggaggatcgcatgagcccaggagttgaaagtgggcctgggcaacatagtgagacactgcctctacaaaaatattttaaaaattagctgggggtggtagcacacatctgtagtcccagatagttgggcggcttaggtgggaggagagcccgagcccaggacttctgagctgtagcgccctatgtcgatcaggtgtctgt

SEQ ID NO: 166637 - DNA, 463 bp, Homo sapiens
  misc_feature (459)..(459): n is a, c, g, or t
ggggccacctgaggagcagagaggtgcagcacctcctcagcatcgcaccgtgtgtaggactgaaccagggccggagctcagatctgggcatctgcatgctcaggacaggttacctgagctctgtgtggtgtgaaacggcgagcgtcaggagcttagatctaggagccggcagccctggactccgctctttcttctggggatgaggtagcaggtcctgtgtgagggtgaaaagttggtggctctgaagctcttcacctgggcctgacttgggacagtcacgaaacagagctgctcatgctcttaatgcggcctgccatccagagctcattacaaggccccacaagacaaccagtacaactccaaccaaagaacagctctctctggttttcaatttggttgtttcttttcttttcttttttttttttgaaacggagcctgggcaacaagaatgaaacgccntctc

SEQ ID NO: 166638 - DNA, 542 bp, Homo sapiens
cacatctagtgtctggtgaggcagtggcctggaatacttttcctactgccaatcaagaccggaaggagttagctgcccttagctgctcatgtccaagtactctttgttttatggtgagcatactgcgtgttgtccttgaaagggaggtgttgcttacaccacgattggaaagggacaggaaaagaaatggattgtcattggtcatctttcagctttaatcacatgttaacatgaacgttcccttcactgtatagtcgtctcacacaccggtagacaaggtatgggagaagctgcaagtgcaaactggaggttacaaaacccatcctggtgtattttaatataaccagtaataacacttggtttatgaagtgaaacatctgaacaagtgcttaacctgactgtctgctgcgacaacaggcataaaccagcacttttgcagacaaagggaaggacactgtcaacctgggtagaaaatcacatttctccatctgctttccaccctcctttgtctggactctgcccttctctagtcttgatctttc

SEQ ID NO: 166639 - DNA, 382 bp, Homo sapiens
ttttgcctgactcttgccatcatgagcacattttcctttcatgatcaaagaaaaccacaattggaaataatcctcctcttcaaaaataaaaataaaactaagtgagaccacagttgaaatcatgcatttgccatcatagctctgaaatgtgtggccgaaaaaatcccacacactcctttccccctctgaacacagcccaagtgaggcggcaccaccacggagggtgtgctccagcactagtttttttaaattgtattagttctgaacatagactgatgtcactgggtaatttgaagacaattaacaacaaaccaaaactatctttaaattgatcacttaaagaacaggtggttcaccagatttaacaacaaaatcatgttgg

SEQ ID NO: 166640 - DNA, 651 bp, Homo sapiens
taactctggctatccgcttcaatggctcacaagaacctgggcctccaaagctgaggctcaccctaccaaatcatctttccacccaagacagcaagagctaagagcaagagctctcgggccagcagaaacagactaaactaccagagctgctacttttgcagtgtgtgaccttgggaaaattatttaacatctttgtccagtgttggctcatctataaaatgaggataaagtcaattccctcacaggggtgttgtgacaactaaatgagctaaagcacctggcagagccttgcacttagcaagcaggaaacacaggatagcgttaaaaatcacgtagagtgaaggcaacaccaaggcactaaagggaagagatcttctccaacccacccatactgctgtctcaaagcctgtgttctccactcactattgaccaggaatggtctgtgctgatcctggctgttgctgaccctgtgattatgctccacttgccagcccattcacagtctcaagacagtatggcatctttcctccatgaagtcatcaatttttaaatttttacatctagggaagtattctggtctgcatacatagatggtggtattgtctctttttttttgagacaagagtctctctctgtcacctaggttggagt

SEQ ID NO: 166641 - DNA, 528 bp, Homo sapiens
gatttaagaaggctcagctgcagatatgtaaagagagatttgcaaaagcataatcaagtcaagtcatggcaaggtcataagaagcagtcacaaaagcagcagtaatttgagtgcgaatggcagttttcatcatgactatgcccgttcacagggactctttgaaacagaagtttggttggaagcatttcccattctgcttgtggcagggcatgaaaggggcacagaggctatggatgcattgttccccaggcccaggctccttcctggctgtgtgatgatgggcaagttgctggcctctccagttgtgtctttggaaaatagatgtaattgcacctacctcattgggttatgcagaagatgaatgagatcatgcatgagagtccctagcacagtgcctggcacacagtccctcccatcaacagtagttgaagctcattccctcacagccgttagaatcaattgtgggcctagagggctttcattttgtctctgcttacagttctttgccccgctggaaaaggagttaga

SEQ ID NO: 166642 - DNA, 289 bp, Homo sapiens
ggaaacctgtctcaatcaggtacaaaagaaagcttgtagaacacaaaatttcatctttatagggaagaagtgaaaagaactttttgttttccttaggagataggccactatatttttgtctgcaataaaaacttagaatgtaaataatatgcctcaatgggaccttacccctaatttccaaacttgatcaagtgtatggtttggaaagacctttaaatctaacattatcagaatccccctgctgtattcaagtcaaaggaccaaaaatggacatgaaaattgccaatga

SEQ ID NO: 166643 - DNA, 133 bp, Homo sapiens
tttcaaagtgaaattcttctgccacaacccagctgcatggttctagacacaccactgaacctcttaaggaattcatttccttatctatacagtgaaagaaccggcctgaatgatctttaagttcccatccaaa

SEQ ID NO: 166644 - DNA, 301 bp, Homo sapiens
ctttcagctgcaaggaactgaaaactggctcacatagaaggaaaatgattggctcatgtcagcaagcctagatgcagagcaagttatgggtttcagggatccagcatctaaatgatgtcatcaagaacccaagtttttttgggtctctgctctgttggtttctttcatcctaaagctggttctcctgtggtttaccatagtagagttcctgtgagaactccactctgaccaatcaggccttcccagagccagggatggatggagtcgcttcttttgaggcccatgggtcctatctggaggg

SEQ ID NO: 166645 - DNA, 2186 bp, Homo sapiens
aattcttccctccgagacccagcccgctgcttgccacttccctctccaaacgctggcgggggtgggtggcagcaccgaggcgattttcttcgtctttttttcctccgggttttgtcatggaaacgctgacacaacctccagacggcggccgagcccggccggggactgagggcttttgggaccctgcgggagcgcggcgcgcacaccgcactccccgggcaacagctggacgcgaccatatcccgggtaggggcggggggagcgcgacgctccgccccggcgctagggtccctccctcctcccggctctccgcaggcgccctcccctcgccgggggccgcgagttgcatttggtaaaacccagccccggaatatatagatcgttggagcgcaatgaagtagcctttggagagaagggagagggcccgtcggacagccacagcggccagcgcagcggcagcggcggcggcaccaccatcaccgctcgcaccccagccgcccggcccgcgaccaggcagcggcggccgccggcgggatcggaggaggcggcggagcggcgaggaggaggagcaggagcgcgcagccagcgggtccacgcatctcagcacttccagaccaactccggcaccttccacacccctgcccgggctgggggctccgagagcggccgcgaagcgactccgatcctccctctgagccttgctcagctctgccccgcgcctcccgggctccggtccgcgcggcggggtccctgctcctgcgccccgggcgcgcttcccggacaccccggtccccgcagccaggacaaagccatgaagccagcgctgctggaagtgatgaggatgaacagaatctgccggatggtgctggccacttgcttgggatcctttatcctggtcatcttctatttccaaagtatgttgcacccagtcatgcggaggaatccctttggtgtggacatctgctgccggaaggggtcccgaagccccctgcaggaactctacaacccaatccagctggagctctcaaacactgctgtcctgcaccagatgcggcgggaccaggtgacagacacgtgccgagccaacagcgccacaagccgtaagcggagggtgctgacccccaacgacctgaagcacttggtggtggatgaggaccacgagctcatctactgctacgtgcccaaggtggcctgcaccaactggaagcggctcatgatggtcctgaccgggcgggggaagtacagcgaccccatggagatcccggccaacgaggcacacgtctccgccaacctgaagaccctgaaccagtacagcatcccagaaatcaaccaccgcttgaaaagctacatgaagttcctgtttgtccgggagcccttcgagaggctagtgtccgcctaccgcaacaagttcacccagaagtacaacatctccttccacaagcggtacggcaccaagatcatcaaacgccagcggaagaacgccacccaggaggccctgcgcaaaggggacgatgtcaaattcgaggagtttgtggcctatctcatcgacccacacacccagcgggaggagcctttcaacgaacactggcaaaccgtctactcactctgccatccctgccacatccactatgacctcgtgggcaagtacgagacactggaagaggattctaattacgtcctgcagctggcaggagtgggcagctacctgaagttccccacctatgcaaagtctacgagaactactgatgaaatgaccacagaattcttccagaacatcagctcagagcaccaaacgcagctgtacgaagtctacaaactcgattttttaatgttcaattactcagtgccaagctacctgaaattggaataaagggggtggggagagggagagaatcatgctttttaatttaagatttttatttgtcaaaagaattatatggatattgggttattttgtaaattaatatttctttggggatgatgctgcgagcagcatagtgagaattatttaaaatccttcgtagggaaggacagctgtctttgcaggggaaataggatgggtcgtccttgtctgtagaagtgaatactgcaacactgtctcaaaggtttcttgtgttctggtgaattccatgaattgtgcattccataaattctaattaatattatttatagttatttaaacatgg

SEQ ID NO: 166646 - DNA, 1301 bp, Homo sapiens
ttaaaggcatgagccactgcacccagcttagatatgtgtttgaacgggtggatttatgatctacttgtagccaagtggaaatgtttcaggcaagtactgagttcttattcgtcttgtgtctcctctgcagctggagctctcaaacactgctgtcctgcaccagatgcggcgggaccaggtgacagacacgtgccgagccaacagcgccacaagccgtaagcggagggtgctgacccccaacgacctgaagcacttggtggtggatgaggaccacgagctcatctactgctacgtgcccaaggtggcctgcaccaactggaagcggctcatgatggtcctgaccgggcgggggaagtacagcgaccccatggagatcccggccaacgaggcacacgtctccgccaacctgaagaccctgaaccagtacagcatcccagaaatcaaccaccgcttgaaaagctacatgaagttcctgtttgtccgggagcccttcgagaggctagtgtccgcctaccgcaacaagttcacccagaagtacaacatctccttccacaagcggtacggcaccaagatcatcaaacgccagcggaagaacgccacccaggaggccctgcgcaaaggggacgatgtcaaattcgaggagtttgtggcctatctcatcgacccacacacccagcgggaggagcctttcaacgaacactggcaaaccgtctactcactctgccatccctgccacatccactatgacctcgtgggcaagtacgagacactggaagaggattctaattacgtcctgcagctggcaggagtgggcagctacctgaagttccccacctatgcaaagtctacgagaactactgatgaaatgaccacagaattcttccagaacatcagctcagagcaccaaacgcagctgtacgaagtctacaaactcgattttttaatgttcaattactcagtgccaagctacctgaaattggaataaagggggtggggagagggagagaatcatgctttttaatttaagatttttatttgtcaaaagaattatatggatattgggttattttgtaaattaatatttctttggggatgatgctgcgagcagcatagtgagaattatttaaaatccttcgtagggaaggacagctgtctttgcaggggaaataggatgggtcgtccttgtctgtagaagtgaatactgcaacactgtctcaaaggtttcttgtgttctggtgaattccatgaattgtgcattccataaattctaattaatattatttatagttatttaaacatgg

SEQ ID NO: 166647 - DNA, 1182 bp, Homo sapiens
aattcttccctccgagacccagcccgctgcttgccacttccctctccaaacgctggcgggggtgggtggcagcaccgaggcgattttcttcgtctttttttcctccgggttttgtcatggaaacgctgacacaacctccagacggcggccgagcccggccggggactgagggcttttgggaccctgcgggagcgcggcgcgcacaccgcactccccgggcaacagctggacgcgaccatatcccgggtaggggcggggggagcgcgacgctccgccccggcgctagggtccctccctcctcccggctctccgcaggcgccctcccctcgccgggggccgcgagttgcatttggtaaaacccagccccggaatatatagatcgttggagcgcaatgaagtagcctttggagagaagggagagggcccgtcggacagccacagcggccagcgcagcggcagcggcggcggcaccaccatcaccgctcgcaccccagccgcccggcccgcgaccaggcagcggcggccgccggcgggatcggaggaggccgcgaagcgactccgatcctccctctgagccttgctcagctctgccccgcgcctcccgggctccggtccgcgcggcggggtccctgctcctgcgccccgggcgcgcttcccggacaccccggtccccgcagccaggacaaagccatgaagccagcgctgctggaagtgatgaggatgaacagaatctgccggatggtgctggccacttgcttgggatcctttatcctggtcatcttctatttccaaagtatgttgcacccagtcatgcggaggaatccctttggtgtggacatctgctgccggaaggggtcccgaagccccctgcaggaactctacaacccaatccaggtaagcttcaagcactctgtcagcatgtgaattttttttttttgtaggtatggatactaaaaactctaaaattgtggtctttgggggatttaaaacttcctttcacagcctggcattttaccttcagtggttgctttctccgtcaccctttttctatgtagcatctctgaaaaatctagcaggggatgtttagaattagagaaatgcctaggtttagtgctaagcattcagacctgcccagggtttgaactcctgagattaacagtctcaagttcgagcaatgggact

SEQ ID NO: 166648 - DNA, 2065 bp, Homo sapiens
aattcttccctccgagacccagcccgctgcttgccacttccctctccaaacgctggcgggggtgggtggcagcaccgaggcgattttcttcgtctttttttcctccgggttttgtcatggaaacgctgacacaacctccagacggcggccgagcccggccggggactgagggcttttgggaccctgcgggagcgcggcgcgcacaccgcactccccgggcaacagctggacgcgaccatatcccgggtaggggcggggggagcgcgacgctccgccccggcgctagggtccctccctcctcccggctctccgcaggcgccctcccctcgccgggggccgcgagttgcatttggtaaaacccagccccggaatatatagatcgttggagcgcaatgaagtagcctttggagagaagggagagggcccgtcggacagccacagcggccagcgcagcggcagcggcggcggcaccaccatcaccgctcgcaccccagccgcccggcccgcgaccaggcagcggcggccgccggcgggatcggaggaggccgcgaagcgactccgatcctccctctgagccttgctcagctctgccccgcgcctcccgggctccggtccgcgcggcggggtccctgctcctgcgccccgggcgcgcttcccggacaccccggtccccgcagccaggacaaagccatgaagccagcgctgctggaagtgatgaggatgaacagaatctgccggatggtgctggccacttgcttgggatcctttatcctggtcatcttctatttccaaagtatgttgcacccagtcatgcggaggaatccctttggtgtggacatctgctgccggaaggggtcccgaagccccctgcaggaactctacaacccaatccagctggagctctcaaacactgctgtcctgcaccagatgcggcgggaccaggtgacagacacgtgccgagccaacagcgccacaagccgtaagcggagggtgctgacccccaacgacctgaagcacttggtggtggatgaggaccacgagctcatctactgctacgtgcccaaggtggcctgcaccaactggaagcggctcatgatggtcctgaccgggcgggggaagtacagcgaccccatggagatcccggccaacgaggcacacgtctccgccaacctgaagaccctgaaccagtacagcatcccagaaatcaaccaccgcttgaaaagctacatgaagttcctgtttgtccgggagcccttcgagaggctagtgtccgcctaccgcaacaagttcacccagaagtacaacatctccttccacaagcggtacggcaccaagatcatcaaacgccagcggaagaacgccacccaggaggccctgcgcaaaggggacgatgtcaaattcgaggagtttgtggcctatctcatcgacccacacacccagcgggaggagcctttcaacgaacactggcaaaccgtctactcactctgccatccctgccacatccactatgacctcgtgggcaagtacgagacactggaagaggattctaattacgtcctgcagctggcaggagtgggcagctacctgaagttccccacctatgcaaagtctacgagaactactgatgaaatgaccacagaattcttccagaacatcagctcagagcaccaaacgcagctgtacgaagtctacaaactcgattttttaatgttcaattactcagtgccaagctacctgaaattggaataaagggggtggggagagggagagaatcatgctttttaatttaagatttttatttgtcaaaagaattatatggatattgggttattttgtaaattaatatttctttggggatgatgctgcgagcagcatagtgagaattatttaaaatccttcgtagggaaggacagctgtctttgcaggggaaataggatgggtcgtccttgtctgtagaagtgaatactgcaacactgtctcaaaggtttcttgtgttctggtgaattccatgaattgtgcattccataaattctaattaatattatttatagttatttaaacatgg

SEQ ID NO: 166649 - DNA, 1505 bp, Homo sapiens
ttttttgctactggctgcttggagtttattttccgcttggtgccaggtgcacagttccaggtgtcaggaaagctagcgagtgctggggccgggcggtagagagcggggctctcactggtttttggtgtctgctgtgttgatgcgaaggtctgcttgctgcagccgcctagtttacagggtggggggtgggaggtgggagggcatcttctatttccaaagtatgttgcaccccagtatgttgcacccagtcatgcggaggaatccctttggtgtggacatctgctgccggaaggggtcccgaagccccctgcaggaactctacaacccaatccagctggagctctcaaacactgctgtcctgcaccagatgcggcgggaccaggtgacagacacgtgccgagccaacagcgccacaagccgtaagcggagggtgctgacccccaacgacctgaagcacttggtggtggatgaggaccacgagctcatctactgctacgtgcccaaggtggcctgcaccaactggaagcggctcatgatggtcctgaccgggcgggggaagtacagcgaccccatggagatcccggccaacgaggcacacgtctccgccaacctgaagaccctgaaccagtacagcatcccagaaatcaaccaccgcttgaaaagctacatgaagttcctgtttgtccgggagcccttcgagaggctagtgtccgcctaccgcaacaagttcacccagaagtacaacatctccttccacaagcggtacggcaccaagatcatcaaacgccagcggaagaacgccacccaggaggccctgcgcaaaggggacgatgtcaaattcgaggagtttgtggcctatctcatcgacccacacacccagcgggaggagcctttcaacgaacactggcaaaccgtctactcactctgccatccctgccacatccactatgacctcgtgggcaagtacgagacactggaagaggattctaattacgtcctgcagctggcaggagtgggcagctacctgaagttccccacctatgcaaagtctacgagaactactgatgaaatgaccacagaattcttccagaacatcagctcagagcaccaaacgcagctgtacgaagtctacaaactcgattttttaatgttcaattactcagtgccaagctacctgaaattggaataaagggggtggggagagggagagaatcatgctttttaatttaagatttttatttgtcaaaagaattatatggatattgggttattttgtaaattaatatttctttggggatgatgctgcgagcagcatagtgagaattatttaaaatccttcgtagggaaggacagctgtctttgcaggggaaataggatgggtcgtccttgtctgtagaagtgaatactgcaacactgtctcaaaggtttcttgtgttctggtgaattccatgaattgtgcattccataaattctaattaatattatttatagttatttaaacatgg

SEQ ID NO: 166650 - DNA, 433 bp, Homo sapiens
ggccgcgaagcgactccgatcctccctctgagccttgctcagctctgccccgcgcctcccgggctccggtccgcgcggcggggtccctgctcctgcgccccgggcgcgcttcccggacaccccggtccccgcagccaggacaaagccatgaagccagcgctgctggaagtgatgaggatgaacagaatctgccggatggtgctggccacttgcttgggatcctttatcctggtcatcttctatttccaaagtatgttgcacccaggtagggggcgcgttagcgtggttttgttggatattttcttctctctcgcgctctagctcgctccgcctgatttctgcctcttccaaccctacctctccgccttcggcctcttcggggctcctggctgcccagagctcctggctgcccagatctacccgggtcaccgcg

SEQ ID NO: 166651 - DNA, 367 bp, Homo sapiens
gcataatatatatttatatattatggatttccagtgcaatttatactacagataaaaacctgtagctgaaaatgtggccatttaatagagtggcctttatgtatatttagcagatttgatggtatgaatatgcatcatttgtcagaagcaaagtgcaacttgaaatagtagaattaaatcagttctgtggattacttaccaactttattttagatagtaatttcaaccagattcttcaacagatcttgtaacacagctaacaaacatcacagttaacaaatatgtgtccttttatgtcagttttcctggtcaccttcaaatggagtttccaattagcaggaaaacagtttaaaagcaaattataaca

SEQ ID NO: 166652 - DNA, 106 bp, Homo sapiens
aaactgatctaataaaactttcaggatgacgtatgcaagtacctcattcttgctgaatgtatttagaccactgctgacctagcatatcatggtatatgtgtaatta

SEQ ID NO: 166653 - DNA, 124 bp, Homo sapiens
acaaagtgggaattcactagcagacgcaccttacaagaagttctaaaggaagctcttcaggctgaaagcaggtgacttagatgaaatctgaatccacacaaacaagcaagcacgaggaatgcag

SEQ ID NO: 166654 - DNA, 162 bp, Homo sapiens
cagacttgatggggtgatgctacacacctatgaataccctggaaagtggcagaccctcctctgctaaattctggcttgcaagacttgtttgtaccattgaaaatactcattcaggccaggtgcagtggctcatgcctgtaatcccagcactttgggaggctg

SEQ ID NO: 166655 - DNA, 372 bp, Homo sapiens
  misc_feature (336)..(336): n is a, c, g, or t
  misc_feature (343)..(343): n is a, c, g, or t
ccctcagtctaccacgtccaaaacaagcgcactcagtttgtggctggcaggaggttctgagcaagccagctcgtccatccctctgcccctgtgcaagcccccacaaacaggaactgactgtttgcagcagagtcggagggcaggtgaggcagagacaccaggccaaggctactcccaacaccacactctgagccccatgacaggttcatctccacagtgctacggaaaagctgggctcagctctggaaacaggcgatggggaggggatgtgacaggccgctggcaatgggatccccaacatctatcagccagatctgtgccagactgcatgctgtngacacgnccgcgaatttagtagtagtagtagcgacc

SEQ ID NO: 166656 - DNA, 307 bp, Homo sapiens
tgatgggggcccaatagccctgactccatggggagctatggagctaggttgctcctacagtgggctaggtgtctatgcattcgcccagtcatgggatgtgggttgtccttggaagggtcaaccttgggtgaaactgaaatgattctctaaagggactgaaagctggatgaacgttgtacactgacagcactctcagcagttgaggcaacaagcctttccttgaaagaagatctgggctatgcctctccatgtctgccataaggttcatagtattattattattaagtcaataaattttcattcaaga

SEQ ID NO: 166657 - DNA, 418 bp, Homo sapiens
actcacatcccaccccaacagagaaaacattttaggagtttggtccaatttggtctccaaccagagcaggataagagcagagcttgatctccagttttctccccaggaggccaatgaaaagaaagttctgcttgcagttttggcaagaatgaacaccacagcctgtcatgtgtcccacagcaagatgacaccactgacctaaatacctgctcagggatactgtgccttcccgctcataatgactggcttggattcttccaaaccactaggttgagccattatggcttgggatcctcagcttctctcacacagattcaatcctcttagcaggtgtacatatcacaggtgaatgttcagtctttgggtgtggacacacacagacacaaggtgcccctcaattcattctctgcaagagcag

SEQ ID NO: 166658 - DNA, 210 bp, Homo sapiens
cccctccccgctctgtcctgtcgttttcttaacactcttcacacgcgcacttcctcctcctcctcttctctttttcccacccctacctttgggccctccttccttaacctccgctggccccccattccatgatccgtccacctgacacgctgggtttcatgcctctctttcccaggctgtgggttgtgcccttcactccttgccctcctc

SEQ ID NO: 166659 - DNA, 395 bp, Homo sapiens
ttactcctctcctcactagttttgtgacctagggaaattttgcaatctttctgagtttgttttctcatcaggaacaggataatacctaagtaacaggatagttgacagatttaaatatgatcgcatggcggtggacatgagccgtaattagttgttaagaatatattgacactgaactctcctttatccatgttaaaattgtagataaacaacaattgacaaagaatagacaaaatgttctaacataaatattcttcccttgtttctagaaagaagtcacacatacggtaaaaataattagagaggacctagttcatattgaacaatcttccccaaagcctgaaacaggtcttctttctaacaccagagatatcttgagtgagtccaacccctgc

SEQ ID NO: 166660 - DNA, 178 bp, Homo sapiens
ttcatgcagaaacacttggagaaatttaaagggatttagttgaaaagttgtttccaaatagaatttgaaaataacagatactttaagtgcatttgacagaattgcatattgaagcttcattaatgcatacgtggtgtatgggtatctgctttgctaaactggttttccttagtttatg

SEQ ID NO: 166661 - DNA, 441 bp, Homo sapiens
agaggaaatagtggcccttgatccaactatttaatatggccttagtagaattagctgtatttagggcaagtcagactttattgtgaaatgtaataggtgtctgcattctcttcattttaatcaaagaaacttaaatggcttcttttcttccacatgtcctatccttgacaagatgggcaatatcactaaggggcctggttttctattatctgatgctaggaagtataaacttgtacttactgttcttgtttctcttttatctgtgtatctttgccattctgttttctcaatgaatagtatgttctctcccattcaggtaccttaatggtgtctattttattttattgctgcataacaccacgacacagtgcaccacgacacagtgcaccacgacacagtgcaccacgaaaaaggagaacaaagaaaacagagcaccaaaga

SEQ ID NO: 166662 - DNA, 477 bp, Homo sapiens
tattcaatcatatgctgtctacaggagactcacctcactaggacacacatagactgtacatgaagggactgaaaaagatattccatgcatatggaaaccaaaagagagcagggttagctatacttatataaggaaaaatagactgtaattcaaaacctatcaaaagagatcaaaaaggccattatataatgataaaggagtcaattcatcaagaggacataacaattgtaaatatattcatccaacatcaaagcacctaaatacataaagcaattattaagtgatttcaaagaggaggtagactgcaatgcaataatagtacgggtattcattttttataacagaccatctagttagaaaatcaacgaggaaacactggacttgaattacactttagaacaaatgtacctaacagacatatgcagaacattgcatccaacagaaacagaatacactttcttctcaatggaacattct

SEQ ID NO: 166663 - DNA, 115 bp, Homo sapiens
cacaaatccactttttgtctctgtagatttccctagtctggactttcctacgaatggaattatacagcatgtggtcttttgtaattggctttttcactttataatgttttcaata

SEQ ID NO: 166664 - DNA, 167 bp, Homo sapiens
caatatttgtctaaaaaagcaatctctaaaattatgcatcataaggttggatgcggtggctcatgccataatgaagtgggagggagagacatataggagcagagcgtttgtatattattgaaactaaattgatattattcaaactaggttgaactagctaccgcgcc

SEQ ID NO: 166665 - DNA, 350 bp, Homo sapiens
cgactgtactgtataaagcttggagagacaagtgccaccatttatcccaaagggacccactgatgtctcttgggctagaagggcttcaaggaaccacagatttcacatgagagtctggaggctaagcaaagaatagaaagtcatcacaggaatctcctcttctgtccccctcacatatataaagctaaacataaatcttaaaagggcaacaccatgaaggagtgaaacagaaaaatcatacctcgagagatttacctatctcagccatgaatagatgcagaatggaaaaaggtctcttttgagaacttctaactacaagtctgcattttggagagttttggactgcactc

SEQ ID NO: 166666 - DNA, 877 bp, Homo sapiens
gtccgtgtggattgtgctagaggtagctgaccccttatgggctctagggggagtcatatgacttaagcctgtccatttatggttatcccatccttcaggacactgtgattctaatttagaagtggccttgagtgaccgaagccatgccctggattctgggactttcacaggaaccatgagtaaaaaggatttctgtatactaggactggtgagctataggcttggcgctgctggtggctgtcttatcattcaggaaaatctgcccaagaactagagccagtatgagaaaatgatgagagatgaaaaaagacaattattgataacatgacttgagctcctggatatagtcatgcctgaaaccattaacaccttgactttttgcttatatgcacaagcaaatttattcagtgctttagtttgagttaagtttctgccgtttttcaactgaaggagtctcaactaaaactacagttttcaagtttcccaagtccagtctctttctatcactctcagcctatttcttggtgttgacagtgagagaatatagcttaattgtataatactttaaataaaactatattgaaaatgcaatagggtttttttttcctactgatacaatcattattggcttaggtctatttaaaggaaaaaaagctaaagcacttgctgtatctgaactttgcctaaaaccaaattgcttcgccattataatcttgagttcatttcaactattaaactattaactcagcgagtagtgatcactaaaagggattatagagcttcatttttatgacttaattacaacaaagtggggacgcttttgtatagtataccttataaaaatttaggaggaagaactgatgataaaaggaatgta

SEQ ID NO: 166667 - DNA, 324 bp, Homo sapiens
tgtacatggtcttttgttccctaaaagactgcatcacacctctgattgggaggccaactgtcatttaactgagtgtttgagtgtctaaaaccaagttcagcatttgtctatctagcaagcttccctttccaacttgcttactcctctcaatttcatctgcagatctcctggttcaataaggctcaaaaactggctgttcccttgcattcctctctcttctcccaggcactcttcatccttttttctctcaggctcacccttacaatccaacaccttccaatggcctctcctagtccagtccatcctgacaccaagtaactggcc

SEQ ID NO: 166668 - DNA, 544 bp, Homo sapiens
ggccctccatcgggagtccaggcctgatgccacaagtcacttgtgccctgtccttggcactccctgcaccaaggcatgatggatacaggtgtctgtgtgaggctgtcctcactgcccactccgtcccactccatcccactccgtccgtcccactccggggtcgtttgtttgcactccctcctattcctggattcttccgacttcgggcccagaggaaagcagctgatacaaagaagcagctttggggggtctggtgagcctctcgtatctcactggagatgttgcaccagtctgtctaccagttatccatttagcttcatgcatggagaaaagacaattccaaagacttctggagaaaaaaagtctcttcatttccatctgcagatcttagtgtctctctggcataatttccctccagcctttcttcggtccttttagtaccatctgctgtagtttcatctttcatttaactgaaaatgtctctattttgcccttgtgtttgaaggatacactattgtataaacgtcatcccattgtcttccaa

SEQ ID NO: 166669 - DNA, 190 bp, Homo sapiens
aggcaaaatcacaatagtgagtaagggtgaccgcacagcaaaactgttcttctagactcatcttgcaccatagtggcagctgaaggaattgtgcaccacgatgcacccctgtagtcaggaaaggcttctaggatgcctgggagctgaacgaggtggtaaatgatggtgttggagctggagagaagtacag

SEQ ID NO: 166670 - DNA, 261 bp, Homo sapiens
ctccttccatgtccccgtccccttccgagttcctgtcctgcatcgcttctgtctccagagtgcactctttgtcctcttcctcctctgggtcctcatccaccgcttcctccctgaacttttctgccattatgggatcttcctcagcaacagcttcctgggtccttagcacgacatccactcctccttgcccttcagctctcccctccagtcctgcgcaggagtcggtcgacgcggccgcgaatttagtagtagtagtcgacc

SEQ ID NO: 166671 - DNA, 105 bp, Homo sapiens
aaattaagacatctatgcaatgctggagatagaatcttaccaaacctaatcaagaacacattaatggagaagtataggcctggctacagaaagaacagcaaagag

SEQ ID NO: 166672 - DNA, 302 bp, Homo sapiens
aaaagaaaagaaaaaattgttaaaacttgcagaagcagaagatgcttattcactatcaggtagtgaataaaatcgaactagagtgaatcaatcttaactctttctaaaaatgactaagtatcactggtttaagtaagcttaatttccaaatctcaagtacttgaaaacatattcctacaagctaaataagactgggctctgcatgttcccaatatggacaacttaataatttctactaataaatagtcattcccaccctctcccgcggttagaatccccaagacaaccaaaaaataaacttg

SEQ ID NO: 166673 - DNA, 210 bp, Homo sapiens
ggatgtcccgccccttccaccagcaggattcatggtttgttcacgtatttgttcaaaacaccggcaggcactattctagagcctgggaatcctagcagtgaataaaagagacaaagctcctgccctcatgaagcttatgttcagctctctgctccaagcccataaaaccttgcatatcccatcacatatttatcatgctgcaacaaattg

SEQ ID NO: 166674 - DNA, 122 bp, Homo sapiens
taagaaatccaagagagtatcaccaagatggaagccacagtgctgttttatgactgtctctctctctttctctctctctctctctctcacacacacacacacacacacacagagcatcactt

SEQ ID NO: 166675 - DNA, 611 bp, Homo sapiens
caaaatcctaggttataccaagactttatgttcattttgaattttctttattcatttttttcctctctgtgtatagaataatcaggagatattggtgggcagaactgttggttgataacaggaagcagagtatctgagaaaggccctcatcctgtttccttttggagctactgaggcctcacatgccagccattttaggatttgatgaaggctagagaagagttaaactgagccttcacttactcagcatcagtaggaagtagtgttggctacactaaaaacaccgttgtgccagtgaggatttggggggaaaatgacaagctgcctgtgataaacaagcaaactgtgacaaactttttgatgtgtaggttctgaagcttttcagtttacgtcctcaaaagattatttatatatatatatatgcacacatgcacaatatagcatatatacttttgatatacatgaaagagaaaagatgagtggcagtaaaatagagattccaggatttgtaaacacagggcaatagaaatgacatttccggtacagtctggaggagcagcacccattttcagaaaggaaggtgttagggataaacttgacaaggatgtgga

SEQ ID NO: 166676 - DNA, 542 bp, Homo sapiens
tccatttctattacacatggtcaggcatatgatgagaaatgttctggctaacacaatttcatcttataactgtcctagaaaatgaaataaattgttacagcattggtttcctagcagagccaaaattatgcaaggaggaaagcccttctacttttcctcatatccctgtactctctctgataaatctttctctctttccccctctccatttacttttggtgctatacagattcaatttattagacaattactaaattacctcatattattgcttaaagtgtatcttctcttctttaatttgttaagtttaataatctccagtgaatatccattaaagagcatatgctttttcccccattttgaattgttaaaagtcattagaactaggattttgagccaatctgaaatcagctagatattccttgtattgctttttttagaaaacttacttattgactgttcaggggaaggacatatttgtcctaaagcaggctgttaattatcatgaaaacttacctattggctgttcaggggaagcacat

SEQ ID NO: 166677 - DNA, 442 bp, Homo sapiens
aacaacaaacaaacaagcagacatttgcacgtgctgaacccattgtacgggaaaggcctcagttaaaagtatttctcttccaaggcagtggcttaggggctttgcttaaattgtatttaaatagccatagatcctgcatagtgacaagataaagaagagaacagtttcagtcttttaaaagtcaggaaaatgtggagagatagtaaaacctgttcccagatttctctggtgcctgctggttccttctctgggccaataaacaagtgctgtctccagtaaagaaggactgatgtcctgccaccaggcaagtagaggctgaggaagtgtacccctgccttttcagtgacttgactttagcaatcctcaatatttcggggagaaatattttggcttccctcagtttgaagtgttaggtttttgtttcaccccagctatggaattc

SEQ ID NO: 166678 - DNA, 380 bp, Homo sapiens
ggggtaaaatatttcagtttctttcaaggcctgctatctgtcacatgatgctatactagagtcaggttggaatttggtgtcttatgctacgcagaatctgttttgttagtcttaagatctctgtttgaatgttaatgctggtcagctgtgcctgaattccaaagggaggagggtataatgaagcatgtctaaccccacctcttcccatcatggcctgaactagattttcaggtttacttcggaatgcccttggctgagacgggaatccatcagttggttgggggcttagagttttatttttgggtttcagaatggatgctctaccagaaacctgctgctactgcattctgctctcacccttgccatcggctcctgctgcc

SEQ ID NO: 166679 - DNA, 489 bp, Homo sapiens
tgaggtggtgtgacaggaacttggggtaacgccttaggcctctggcaaggattcttacatcagagctaataggtgaatgtgtctcattcaaggtgggtgctgctctgtgctaagtcttgggcatggagccattgtatctgtacagaaaacacttgactaggcaccatggggacaccaagagagaaagacccggatcctgccctcggtttaagtcatggattatgttcatatcactatatgaattacataaaccagtgaaatctatttgtatagatgagatcattcattcgcttattcattcagcacatatttatggagcacccatgatttatgtagccactttgggggtccagaaaagtcaacataacccaagtttcccaggctccaggacagtgctggggtcacactaatgataatggccatactttctggttcttctctctactattcagtgagcgcttctagcaccatgccccccacccactgctc

SEQ ID NO: 166680 - DNA, 272 bp, Homo sapiens
tcttcctctcatcagtctcttttattcctttcgaagtatccctctttacaacttttccttatttctgtctcaccacccttacttcaaagggtggtttctttgcggttttctatggctttttactccactctgtgcctcttaatgtatacacattcttattgcagaatatttatgcacttttggaagagctaagagagacatactactgtataaattactaataaaaatatattagccatgttttataattaatcagtatcttaccatcacag

SEQ ID NO: 166681 - DNA, 407 bp, Homo sapiens
tgtgatggtaggaacatgaaaggagagccagatgcagtcaacagagcaaacagattgatgacttgggggaatgcagtaagaccaccacctcccaagggccatacacgtttctacacatgtccctgttctgtggttgctttaacaaatcataacacatggctagcttattctgtatcaaaacctgcattattttccatgaattcagaatataaactattgccctggccaatgctgatgtcggggacatacatggagaatgtgcaatgtcatgaacattaatatgactttgtgagctctgatccttaactttggtgtgtcataatcattggattttctcactaaccagtaatttagtaagatagtcctctggactgaatatctgtgtctttccaaaatttgtatgttaa

SEQ ID NO: 166682 - DNA, 367 bp, Homo sapiens
tgagctgtgattgtgctactgcactccagcctgggcaacaaagtgagaccctgtctcaaaaaataaaataaaataaaaagagcctcccaaaaaacaactgaaagttaacctggcctaaatctctcctgtggctcccttcacacttaaaactcatcttaatgcgcaaaccgtgaacaacagcccccgtctccccagcctcatttaccacaccccttacccacttcactccaagtacacagactgccttgatgatctctgcctcccccgaacctcttcactcccctttatgacacccagaaccctccctgcttcctgtcattcagttccctgcttaaacatcgcctccttgaccccctgtctacagcag

SEQ ID NO: 166683 - DNA, 715 bp, Homo sapiens
aacaaggcttggttgtaaaactatgcaagagtgtagttcagctctcctgaactaattgggtagtaagtatgcaccaattgctgttctgccctgaatatgacatgaatagaaaaaaccctttagtagcaaatggatattttagcacatagcagaaaattaattttgtttctcagttagctcatatatatctgagtatgtacacaaacacacacacacacacacacaattttctgactatggctaattcctgaaagcatgctgtacttacaaaggatgcttttgctctgtaggaattcaccaaggtaaaattttcaaagcatatgaagaggattgttgaaattaattaggaggtgaggggaatcttgggatatctacttcttctagcctctgagctatggcttggaaccttggtcagccttattaaggacttccttagtttataagtgtatctcccatgggatcacaaatgctttcttgtttgatttagttcatttgaagaaacattaagtttctcctactcatttattcattcagtcacgcattcacccagattatttattgagcacctatactatgtaccaggtaatggcagaagataagtatatatcataccttttagaactataggagtgacactctccccacgctttggctggcattctcttctttttcctaaatatttctgcactagctagccttcagaattgggattttg

SEQ ID NO: 166684 - DNA, 429 bp, Homo sapiens
gcaacacagtgagaccttgtctctacaaaaaattttaaaaattagctggctgtggtggtgcatgcctgtggtcccagctacttgggaggcagaggcaggaggatcactcaagcccaggaggttgagggtgcagtgagccatgatctggccactgcactccagcctgggtgacagagcaagaccctgtatcaaaaaatagataataaaataaaaattgataaaaatagatcaatgaattgttagtctacgaatgatagtcatttttcacaattggcagtaaaaataggatttgtgtaaggtatgagtttaccatatttgttcattagatcttagtttcaagggaaagtatcatgtattttccagcatgataatgatgaatcatttaaagtacggctcataaaaatgaaaaaaaaaattggaagaaaaaaa

SEQ ID NO: 166685 - DNA, 367 bp, Homo sapiens
tggtgatctagccatccgcttacagtgctggggaagtgcaccgggcaggtaacctgcaaggctcttatcacaggaagagtatgcagactcctgctctaacctacacgtgacggaagggagctatcaccttgaccttgatgagcgtgaactggtgcaaaagtagccagagaccgcgtgtaggtgaatgaacttggccatgttgctatgtaaccgtgtggactgaagtttgaattttgcgtaacttcacatcacaaaatattgttcctttgatttttttttcaaccacttaaaaagtataagaaccatacacaggccatagaaaaacaaggctgagttcagctcagagagcctgacagtagggcacacc

SEQ ID NO: 166686 - DNA, 471 bp, Homo sapiens
tcctgaaatattattattgccaattcatgtgctttgctcatttcttttttggtgtgttatttgaaaaataggtttgcaagcttttataaatgctaggcttattaatttttaaaaggtatgtataatcttcaaaggtcattatttgccttttaattttgtttatggtgagctttattgatatataagcattaataaatttcatgcaatcgaaactacttggcattttcatttagggtgtgtctgtgatgatttgtattctctttttttttacagataggttttcttttgtcttgatggtatactggattttaactcttttcttcttttagatcaaatgcatatttccttcttcgtggtggagcagtggtgtttttagtccttaactaaccacttagcttattctgtattaagaacattttttcccacttagtatatttttgaccctaaatctgctggctaacttgatagtct

SEQ ID NO: 166687 - DNA, 328 bp, Homo sapiens
agcctgggttatatataaaggaaagaggtttcatggactcatggttgtgcaggctgtagctgtacaggcatggtgccagcatctgctcggctcctggggaggcctcagggagctttttactcataatggaaggtgaagcaggatcaggcacatcacatggctagagcaggagcaagagggaagagatgccacgcccttaaacgaccagatctcaggagtcctcactcactattgcaagggcagcactgagccatgagggatctgcctccatgatcctgtcgcctcccctccaagtcctgcctccagcattggggattacagttcaaca

SEQ ID NO: 166688 - DNA, 579 bp, Homo sapiens
acaaacaggcagcaggccatagtttgccatcccttgctctagaccacagatgaatggctaatgaggacccatcataaagcatggacaccagtagttctctcatggacagatgacaaagcaggcatcccccggcactcgcgatgaccaaaggaaagtctcaggaaagcacgaagatccaacagtcatactagtgctgcagactttcagaatgttttaaacctatctgtggtttaaacagacagacaaaaaataaaatcttaaggctaactggccttgtctactaggtttttgaaggatagccttggcccccaagtgcctgtcatttcggttttgtaactctgctttaatgggcttctagccttcaccatccagcagtgccactcttgtcagtgaccgctgttttgaaggtctagtggacctgtcagttcttaaatttgtggcattttgttctccccggggcttcattcatactatgtccttccttttttatctgcccagattctcttttctcccctccatttctgagtgaaatccctcccatccgacaggtctgagactaagccccaccttcgttgtcgg

SEQ ID NO: 166689 - DNA, 313 bp, Homo sapiens
caatccaaactcatattgttctatcgtcaactgaagtgagaagcaaggcctaagtggagtccacagggaggttgggcagctggagggttggttcgttggtcttgagagcgtggaacccagaactgtactgccataagcacttttcatggtgacttctgcggggtcttttgggagtgcaggaatcatgcaacttaccgaagtattatctggaaaatcacagagatcatttaggggggctacctttgtttttttttttttttttggagtattttgggctgcacgttaagatggttatagatgcattttggatgca

SEQ ID NO: 166690 - DNA, 181 bp, Homo sapiens
cacactccctccggaggctccaggggagggtccttccttgcgtctccaggctcttgctggccccaggcgtctgtgggctgtggctgtgttactccaacggctgcctccatcttcatggggctgtctcctccacatgtctctgtctcttctcccctgcatctctgtgactttttcttctctt

SEQ ID NO: 166691 - DNA, 341 bp, Homo sapiens
aaacttaaccaggcatggtggcatgtgcctatagtcccagctagtcaggaggctgaggcaggatgattgcttgagcctaggagtttcaagactgcagtgagctaagatcatgccactacactgcactccagcctgagtgacagagtgagaccctgtctctaaaaaaataaaaatatatgaaggcatctggctcagtgcctggtccatagtaactgctcaataaatgttagcttttgttcattttacttgagataaaatgagagaggacgcttgaaaaaagaggaagactagcatcctctttggaaagctggggttcttctagagaacctgctagagggttt

SEQ ID NO: 166692 - DNA, 525 bp, Homo sapiens
aacggtgaacaagttagaccagctaagaagctccccaatttagctgcatgaatagctattgaataccagctttgggccaggcacagtgctaggttccagaataaagaacatgaatcttatttatgaaaagcacagcctgggctttctgaccatgttcaagggcaaggttgtcatggcctgaaatagtccacttagaaatcttgcgtgcctgctctaagacagccttgctcaccaatggggcaactaatttacttcaattttatatttttgcaaataatatttaaaaatataaaccatgattcatggtatgttagtgtttagattatactatttatgtctgtggtttccagaagagaatcaagctggaccacctcatccctgatggccatcgtgagtgcttgagatctgcttctaactaggcaggatctcaggtcctcagcacctataaacatggttattggctaaagatctaaggttccatgttatgtccaatcttttctaagctggaaactgagcaattttcag

SEQ ID NO: 166693 - DNA, 354 bp, Homo sapiens
tgacagaggctaaatgaagaccaagcgtgatgaaccatctaggagaacacacttcagtcagatagttttctgagttacatttatcccgtgcacttgacaaaattgataaaacttgcttcagataaagaagcactgaaaaataaaaatacaataacttgatttttgcccccagtgctatccctcttctgtgagatgttcttgagctagtattcactttaaccttgcatgaagtttagtaaagagtctttctttgatcttttgaagacactggatactttggtttccttactgtttcataagcatggatctaatttcattttcccaattaaacctgagcaattatatatttaggca

SEQ ID NO: 166694 - DNA, 287 bp, Homo sapiens
cctaatcatccaccagagaacactagccatgttgaatccacaggttggttagatttctgtaaaagtctgaagatttcattccaatcatccctctaattctcagacatgcagttttatcattaagccaggaccattaaaacctgctttaaaagcttgttttgtctaaaggacttaagggagcaggaacagatggggatagatggcaaaagtgggcccctgtttgtcagaaggtaaagatattgtcccctaatctgttttctgctcctaacggcttttccacttctcag

SEQ ID NO: 166695 - DNA, 432 bp, Homo sapiens
cctgaacaacagagcgagactctgtctcaatttaaaaaaaaaaaaaaaaaaagggtaaaatcaaagatgttgatcgccaccacagatgagggcatttggtcaaggaaatgattccttggagggattttgaaaaaccaaatgtactcagaaaaagagctcactcaccttgttcatggagagagggatatctgctaaactaagggtagaacaagcaaagaccaagcaaagacagacactgtacaactggaagaaagtgccaatgaaggaatcacagcagtgaaagacgctctagtctaaatcaccaggactagttcggggttgctctccttgacatcctggcctgacctacgtgatggtaaagaacatgcatctgtgggggcagacagactggttttgcatgtcagttctgccacttattagctacgcaacctt

SEQ ID NO: 166696 - DNA, 382 bp, Homo sapiens
tagggaatataaatttgctggcgacataaatatgggaataaataaatgccaatgtggctacgaaaaagagagtacaaattaaaatccatctttaaagtacggctggtgctgaagccgctccatgtgttcatggggcactcacaggcccaccgctaacataaactgcaggagccagcaacttgctttatatccattcctaagggcttggaaatggtggtctcagcctttcttttcatgttggtaattctgaatggcagaagggtcttgaaggcctttctccttatccaaacagcccaagaatccaacatttggtcaaagtttatggatttgccaataacctccaccctgcacccccggccccagcttcctcccacaatggccc

SEQ ID NO: 166697 - DNA, 277 bp, Homo sapiens
tgagcgagctcggtaccgggttcgagtgaagccctcctctgcaccgtgagggcaggtcccgtgagttctctctttaaaggctcaagggaagacctcactgagagacagagactggaggtggagactgaattaattcagcaataaataagaaacagcaaaggtctgcaaaagaaaagaaacaggcgaaggacaagaagggtattttacaaaagtagtacaaacaaccactaaatagaaacagtgatgaacttcactcgaacccggaccggcctgatcg

SEQ ID NO: 166698 - DNA, 514 bp, Homo sapiens
attctcgcacctcagcctcctgagtaactgggattacaggcacccaccaccacacccagctaatttttgtgtttttagtagagatggggtgtcaccatgttggccaggctggtctcgaactcctgacctcaagggatccacccacctcggcctcccaaagtgctgagattataggtgtgagctgttgcgcccggcccccattcttgtttattttacttacctttgggtggtgaggcgccacggctcaccgtggcaacagctggcagtgcagccccaccacgcagagagctgcaccagcacctgtggatggcatcccgaggtgccaggcgaaccctggggcttctgtgtctctcctacaaccttcgctcccaagggtttttaatgatgctcttatttttgcattaattgggttgtatcccatcacctggatgtgattaccgagaggagtatagcaggatacccgagtaatatgtgtgcgatgccagcagaaagacgtgaagagagtaaatgaata

SEQ ID NO: 166699 - DNA, 551 bp, Homo sapiens
gtccagcagatcggcatcctgaagccgcacccggcctacgtgcagctgctggagaaggctacggagcccacgctgaccttcgaggcggtggatgtacccatgttttgccccccgctgccctggacatcgccgcactctggtgccttcctgctcagccccaccaagctgatgcgcacggtggaaggcgccacgcagcaccaggagctgctggaaacctgcccgcccaccgcgctgcatggcgcgctggacgccctcgcccaactgggcaactgcgcctggcgcgtcaacgggcgcgtgctggacctggtgctgcagctcttccaggccaagggctgcccctacctaggcgtgccggccccgccctccgaggcgccccagccgcccgaagcccacctgccgcacagcgccgcgcccgcccgcaaggccgagctgcaccgggagctggcgcactgccagaaggtggcccgggagatgcacagcctgcgggcggaagcgctgtaccgcctctcgctggcgcagcacctgcgggaccgcgtcttctggcggccgca

SEQ ID NO: 166700 - DNA, 296 bp, Homo sapiens
ggggctgggcgggactcacccctctcaataggcgacgctcacacagaggccaagggacgtggggagggaagccattcaccgtccccacggcagcgtcccggtctgcctacccacggcagctctgctgcttgaacagaaaaacagattctttgaaaccacagagggcctgagtttccgagattgccaagctggggtcagtgccccagctcctggcatatgagggcctcggaagggtcttcctgtccagccttctcccctgggacttgagtcttggcccattccaggccagtagttgt

SEQ ID NO: 166701 - DNA, 391 bp, Homo sapiens
tcaccactcatggacctaacaggccactcctctttagagattaggaagtgagagtgggaagccagcacccaaagcaaacacaaggcaaacgggcacacgtgaccccttgtgccagcagcagcagacctcaggagggaggaaggagccaggtctctgcactgctccggctgcccgagctcccttacatcccaccacaaactctggaagactgctctgtgcaggaaagcagaactgggggccagcttgcttgcctgtaagccccaccatgtcttccaaaaaatcaccagcacctcatcttcctgcaactccagcgatcggccagaggaaggctatgtgcccctggaggctgtgggcagtgccaacagtattaacacacacggagggagaagga

SEQ ID NO: 166702 - DNA, 200 bp, Homo sapiens
tggagcaagataggaaaggggtgaaatcacatccgaataattagaaactgacactgcctttaagataggtatgaaaaacaaaattacttttaacattgacttcaattttgtgagcaacctcacacacaagcacaggacacactgactcttagcttgaacaatcgctgtttatggggtgatgtacatgatggatcaattca

SEQ ID NO: 166703 - DNA, 232 bp, Homo sapiens
agcaagagcgagactccgtctcaaaaaaacaaaaaccgaaaaaaccacctcactattctaggcccgagcccgagcttaaatatttaccccatatccaaccataagttaatcccgcacacaccttcatcagtttcttaaagaaactggtgccccagcacggggcatgccaacgtattagacaggcaacaacttagacatggggatgaaatgaattccatcttaaatctcaaag

SEQ ID NO: 166704 - DNA, 584 bp, Homo sapiens
agcctgattaagagagcagggagactctgtaacagtgacatgtgattttaagatgttttgactacattgtctttgtatatgtttggaaaataagcatcagttggtaggaactggctgactcctggtctgtactgataatggtgctgggtgcccttggggtataaaggaagaagagggcatgacctcagtaagaagtaaaggtgcccccgcggaagacaagagttacagggctcggcccgccaagccgagcatgccgtggaaccacggccactcaaagttgagcgatccgctttttcaacaagtcttttgatactggacattgcatctccacctgtgatgctgaacattatgttgatgaaggtgatcgccaggatacaagaagataatgtttgtgaaacataaagagtatctgcaaactattactatgatgactactattattcttgttgttttttttcccatttttaacctagaattaaaaatggagcctgattgactactccctggcaaatagtagatgatgagtaaatgtaagttgaataatttattgaatgactaaaaataaatacatgtatttatgcaaa

SEQ ID NO: 166705 - DNA, 183 bp, Homo sapiens
tgggctccctggcttactccccggtggtttgtagtcattttcatcatgactttgcggttgcattgatatcagaatgagtttcgactgctgtacgtgatgcttccatgctccattgctttctctcttatgttgctaacgactctcctgttggcttcagcccttagccaagcccaccccactcca

SEQ ID NO: 166706 - DNA, 689 bp, Homo sapiens
ctggcgggttgggaaggtgggtgagggaggatggtggttagcagttgactgctgtctgctcatggtgtaaattctggggatggagcagccttgaatgggctgtggccttgtggccagagaaaccaggcttttgtcatgaggccaaggaaagaactttctggagccgaggtcagttctcatttctctcaacccccaagggccctgagggactgggcttgtttgcaggtttccaggaggcaagtgcggagggccccgggaagggaaaggccatgaggcagtcactggggccctgtgcggtgactggatatcactcctgcctggcattggcacggggcttgtcctgcttgtgtgaactatctgccaggcttcaccagaccaggcttcgagtctcaaacgcaggatggtgttcctgatccctctccaccgtgaacggatgcttcaacaacaccttaccctgagtctctaaagcgcttcagaagaggagggaaaaccaacccgggagacaaatgtttatggtttggctgaagcaggcggtgttttaacactaacatcctgctgcctcttccttaaattaattggcttcagactccaggcccacacaggttagaatttgcaaggaataacagacaaggaggctccccggaacctgcagcacccatgccatgctgcattgaaccacccagcagctg

SEQ ID NO: 166707 - DNA, 303 bp, Homo sapiens
gttgaatagtggtagattgctagatctctgccaaaaaccagcagtaatgcagggcaggaaagctcctttgacattttgatttctgtcccttgttatatttgttcaaatcttgtgcaacccattcgcccttattctttgaaattttcaatcctagttctgtgttctctattaatacttctatagtgaccttgtgaaattttaatgtccataacatgctctctctaaaatcctagccttaacctcctttctgccagtgctgtttcttcccatggggcttcagccattctgtcccatgatctcagc

SEQ ID NO: 166708 - DNA, 403 bp, Homo sapiens
aagtttacattttttaactttaataatttttaatgttttaatgaagagtatgaagagtagtagtactgctcttcaaagtactactactttaccttaccttttactgttttgttaagaaaattaggccgggcgcagtggctcacgcctgtaatcccagcactttgggaggccgagacgggcggatcacgaggtcaggagatcgagaccatcctggctaacacggtgaaaccccgtctctactaaaaatacaaaaattagccgggcatggtggtgcgcgcctgtagtcccagctacacgggaggctgaggcaggagaatggcgtgaacccgggaggcagagcttgcagtgagccgagatcgcaccactgcactccagcctgggcgacagagcgaaactccgtctc

SEQ ID NO: 166709 - DNA, 322 bp, Homo sapiens
cctcacgcttaatatctgatcaccttaggctgtcttcagcaagaattcctccttacttctacccatcatgcctctcctcttagcaattttgtatccgttgaccccctcactctgctccttggctgtgaattcacactgattttggttgtatttggagttgaggtcagtctgtcttgctgttgtgatagattgacccctattgcaatagtcttgaataaagccttaccatttttgacaagtgtcagaacaatttctctttaacagtgtcactaccagtattttcagtggccttagattggtacttgagagagttttttagttc

SEQ ID NO: 166710 - DNA, 437 bp, Homo sapiens
ttaattacctggtaatgtcgcagctgcactgctacctgtgtattttctgttttaatactggtagctctcaccacataagcttaattactgggggcagagtgacatgctcgtgcacagtcaagattccactaaaatggtttgatttcgttgtaaatagtctcgtattgcctaatgcattaaaactcttgaaatgattgtattgctaggccctttcttcaaaacgggctttcttcgcattatttagtttacaggtggacttttttttttttaaaggaagccaaattattgaatgtgtaagagtactataaaaagctgattgctcatcttgagtgtcaagacccagttccgggtactttattctttagatttggtagtgtagcattatcgaccctctgccctatgttgctgtactgtttcctttaaaaggaaatggctga

SEQ ID NO: 166711 - DNA, 514 bp, Homo sapiens
cccaaacccccatccccagtctctccctcacatttcactctactaccagggccttatgacttcattcttcaatttggaagtattcatttagcagatatttctgtgtcagtgactatctcaggccttggggctgtagtagtgaccagaagagacaaaatgtctgccctcatggaactcacattctaccaggggagacaggaaaacaaaataaggatattaggtggtggtaagtgctgaagaggcagaagaaataaagcaaggacaggatatgaaatgttctgaaggggaggggacttgggattttagttagggaaaacgggaggcctcaccggcaaaatggtttaagtaaggacttgaaggaggtaagaaaaaccgtgcagataccagggaggaacattccaggagaaggaatggcacaggaaattctatatacaaacatggaataatgtagatcctggatggccaatgcagggcatctaagctgccattcttgtctccatggcacatgtgtttg

SEQ ID NO: 166712 - DNA, 542 bp, Homo sapiens
attctggtgcttccagagcttctgtggacacgctgccgtcagtcactgactctcggggaagggaccagtcggggggtttctgggtcagctgtgcattcctctgtcaggcaagcctcccgctcagcgctctgtgaccccacactgccatgagggattcttggtagcagaaggaccctggtcaccctgccccgaagtctgggagagaagtcctgagaggcagcagggaggctcccagatgaccctggagggcagtggctgttccagtggctgagaaagtgtcctcaggctggcaggaatcctcctgctttggatttaggcccgctcatactgggctaaggtagggctgatagtgggcaggttctagggcagctgccctgtgacccttattgctggggttgaattgtgttccctccccacccccaacaaaagatgtatccaagtccagcccctgatacttacatttgtaaccttgtttggaaatggggtctttattgatataatcaaggtaaaatgaggtcatactggattcgtttgggccctac

SEQ ID NO: 166713 - DNA, 1377 bp, Homo sapiens
  misc_feature (13)..(13): n is a, c, g, or t
  misc_feature (48)..(48): n is a, c, g, or t
  misc_feature (186)..(186): n is a, c, g, or t
ccgaggcaggagnttggaggtttctgcccctttccggagggtttgggngggctgttcgggtcccgtttaaaaggcccacacaaaaacagcccccccaggttgcaagggcctgttagttgtgttcctggaaggtgggcaagcagcctgatgggttaccattgggatttgccgtcgttatagcggtcnaaggggcctgtagcggctgcagggtcggtgagggttcccagccggccggaccttggtcgtctggcattctgcctttgaaatatctgggtggccggcgcctaggcatatggggttgtgctttctgtgttgtggtttgtagcttgcatcctccactgttcttagcgcatttggctctgtccatatggctgttggtactcatggccctatttggggttggactgggctctttttcttgggtctggtgggatttaagcaagaactggaattttgtaagatgtacagcagtgtcctgggtgttgtctgtctggtgtggggtgtgagcagttgcaggagttatgaacgtgtccatgatcgtgtggttggctttcccttgcatgtggtgaactttcccctcgtttgctaatgctgaaaggcagtgtcaggcagttcctacttgtgaaatgccttcttattaacttggatgtgttcctaaatcttgggagctttgcaattgcttgtagaaagatatgtgtgcaaaactgaatttaaaacgagcaccagggttgcaggtacctttagttctagggagccagctcccccaggcttccctggtgctgtgaagttgtttgagtttatttatggaaattaggtttgctttgagctgtgttaccttactcttggctcagagtttctctgcatgttgggaccctgatctttgatattgggtactgtttcaacatttgaggctaaatgaagcaccgtgtactgatgtgtaatgtcgtgtatcacaatctcaggataacactagatagccaagaatggcagtacctgttttgtctgtctacacgaattggacctcattgtttctgccacaatgtactgctccataaattccgccttatttccatggtattgtctgtaagttttgaaatctaactggtcatgaaaagccatttttcaggcagtatttaaaagctttttcccacaagtagaactggtatctaaaacattttttcattcaagtttggtaaggtgggagatttgaaataaggtacaacagtggttttggaaatcagctatcaagttttagttttaggggccaccacgtgacagaaatgatttatagagagagtaaaaattgtattccatttctcttggtattttagtgcatataaaaactaaataaaccactttcatatatcattaaaaaac

SEQ ID NO: 166714 - DNA, 549 bp, Homo sapiens
gttgaaggactcaacacttcctgatttcaaaacttactacaaaattatggtaatcaaaatagtgtggtactgacataaagataagccatacagaccaaggaaatagaattgagatttcagaaataaattcatacatttatggtgactgattttcaataagagtacgaagatcagtcaatagggaaaaaatagtctgttcaaccaatggtgttgggacaaccagatatccacatgtttaagtttaatccctacttacacatttgcataccctttatacaaaaatcaattcaaaatgctcaatgacctaaatataggagctaagtctgtaaaacttctaatggaaaacatagagtgaaatctccatgactttgtttttggcaatggattcttagacatgaaagcaaaagcataagtaacaaaagaaaatgcgtaaattggacctcatcaaaattaaaaacgtgcatcaaaggacagtattaagaaagtgaaaagacagcctacagaatgagagaaaatatttacaaatcaaatatctgttaagggcctggt

SEQ ID NO: 166715 - DNA, 365 bp, Homo sapiens
gagtgggttcttcagggagaggggtgtgtgcaggagtggatgaatctgtgcacctttgcaagaaaggatggatgagggagtggaacagtgactggggtctggggagtgagaagggttgccagccatctgtggtcagcaggagcttccaggcccaagtttggtgtgttgggaggctgggtgagaaggtgggtccacccacctctctagatacccaagaggctagtggggacccaggccaatttctccaggaggacatggatgcttttggggtctatctcttgtactccttccttcctcaccatgctgtggcatgcacggcctgtgctgggaactaggggtacaaagctgaggccagcacagccctt

SEQ ID NO: 166716 - DNA, 599 bp, Homo sapiens
tgtgctagtgatctagaggatcccacatttccacgagtcacccaggctggagtgcaatgcgccatctcggctcaccacagcctctgcctcccgggttcaagcgactctcgtgcctcagcctcctgagtagctggtattacaggcgcaccccaccacgcccagctaatattttgtattgttagtagagacagggttttaccatgttggccaggctggtctcgaacccctgacctcaagtgatccaactgccttggcctcccaaagtgctgggattacaggcgtgagccaccgtgcccagccaagactatatactcttatttcccgtgaatacattattgacagttattgaaaatattgactatagccccaaaaggcttaactggttagagatacagggcagacaaaggatagataaaaatggtgggggcaaagagtaaatgctatgggattctaaagggtatctgcatgagagagattcctttttgttgttgttttgttttgtttttgtgacagagtctcggctctatcacccagcctggagtgcagtggctccatctcagctcactgcaacctccgcctcccaggttcaaccaatacct

SEQ ID NO: 166717 - DNA, 261 bp, Homo sapiens
gcttttcacagatagggcctaaagaaagggactggacatatgcttttctcaaacatctagtgggcatcaagattgagacaggaagcttgttttatccaggctcctaatgcatccctggctttgggtctctgttttttagacagtacatcttgccagtctccaaatccttttgagaagaaggtaataactaaataaatacgatgtgaaatacaacgtaaaagtacggtcagttaattgtgtccttataagaatattaccctt

SEQ ID NO: 166718 - DNA, 560 bp, Homo sapiens
catcatagcttcacctaaactaccttaaatgtgctcaggacacttacattaacgtacagttgggcaaaatcatctgacaacacagtctcttgcagagtatcggttgtttaccctcatgactgtgtggctaactgggagccgaggctcagttttgctgcccagcatctcaagagtatcatactgctttctactgaatgcatatctctttcacatcattgtaccactgtaaagtcgaaaaattgttaaggcaagccgtcataagttgggaaccatctatacacatattttattatttccttaaaatgaattctcaaaaaatcaagaacaaattttggtatttattgccaaattaccctccataaaggctatacaaatttcctttctcaagttatacagttattttcatttgtatttcctttattattagtgattgtgaggttttttcatgtgtttaatgaatgtttgaatttgaacagggtatgtatgtgaatggtctaatcatgtgttttcccatatagataggaggtgtttgtcctttttttaatggtttttgttacaaa

SEQ ID NO: 166719 - DNA, 311 bp, Homo sapiens
aaccaggaagcagaggttgcagtgagcctagactgtgccattgtactccagcctgggtgacagagcaagattctgtctttaaaaaagaaaaaaaatctaaagctccacctgggttcattggattttccattttacctctgtgtatgtttcagaactttcatagtgaaaagtctagatacatgaagctccaccaagaagcaaaggaattcaaagtttgtgaaatatacctgctgcttttaaccaatggcaggcattagtatctagccagtttttcacatgatgggcctatctgcatagcagtccagaatgtt

SEQ ID NO: 166720 - DNA, 724 bp, Homo sapiens
gagagctgggctcggcccgcgggctgctaggtggcggcggcgcggggcggggaggcgcggcccggcggaggagggaagaaagagcgagccgggccgggagaggcgccgcgcccggtcccgcgcccggtcccgcacccgctctcagcggcccaagcagtttctttctgggtgacaagaatgtgcctcggttggtttttcttttttttctccatctccttaagacgatttccatagtaacctgatcaagtggctcaaaatcgcaaacctgaggatttccgcggcccgccggcaagacctcggccaggtttacaggaaatctgtcattttttattaaaatggaaaactgtgaagaaagaaaaagatagcagttgaagtcaaaattctcggatgactattttgcttttgaggagtcagcatttaaaaacgatatgctgatttggaaggtcctgggagtaaactgcaaactttattttttccattcaatcaatggattttttaatcattccttggagtcgatgaagttcggaaacggtgtgtgatggggaacgtggcgggccagtgtgttcctagaaattgcatcttggattagtttgctgcttttttgaagagattccattttgaagggcaagaacctaatgtgatggatttatcttcagaaatgaacagacatgggaagaatccagtgagtcacaagctagaagatcagaagaaggtaaaagaaatt

SEQ ID NO: 166721 - DNA, 333 bp, Homo sapiens
ttgtgtttcatatgagcctttctctgtgcatgaccagctctgagtgaggggattaggagcctccagccgtggttgacagacacctctgcaaatctggatcaccctctctgttagcctgggacgtgttctatgaccctgttgctttccttaatgtgttggctttgtgcttggagataacttgcaaatgttcgtcaagcagttgtgccacagcttttcaaatgtttcgcttctaattaagaaagggaattggatgtgctcttgcctggctatgttttttttttccctggcaggagaatgagggtgggaagaaagagcaaaagaaacagcaaagag

SEQ ID NO: 166722 - DNA, 682 bp, Homo sapiens
cccctcaccccgtgtccaccgcccatggccgggctcacagtgtctcagagccgtggtgagccatcctaggaccagtgtacctcacaacctttcagaccagtgaaggccagtgggctgggtggtccaggcatgtccccaacgcaggtccagccatctctgcacagaactggaatctcggttcatttcggtttcagcaggtcccatgtagttagcaggacagcacttgagttaggtctgagaaagaacgcctgtttgtcatggcatttcctgtaaggagcccagagccgtggccccaggttgggacggcggcgccagagctgggcctgagtctgacccaacctgtgctgagtggtcctgctggaatgggaaccccaagaggaccacccctctctaaaagaagggaaaacagtaagcgagagggaggctgcaggggcccagaccttggctgaccttcctagccatggtctccaccctccgagacccaggggccccgcagtgacagcagggtgttgggccacacagagcccgagtaggtaaaggaaggttctggaaaccacttttcagaacccaaaaggtgtctgggaaatggcgttacctgccactgttgttaagtgtttactttgtatcaatactgaattgttaaaaattttaatcataaaaaccaatggaacatgtttttcta

SEQ ID NO: 166723 - DNA, 296 bp, Homo sapiens
atggttcatctcaaacgcaaacgaaaattaaaatgatcttaggcaatttagaaatggcaactgagatgagagctggagagaggcctttcatgggaaggtgagcaggggttacttagagttgttaaagggcaggggggtggcgggaggttcaatgcaattttcttactttcttgattccctaatactccagtcctttggacttcttggtcttaaggctatctgaatgaccctattagacaagtttcccatcttccactgatcttccttcaccgtctctctactatttctcaaccttg

SEQ ID NO: 166724 - DNA, 223 bp, Homo sapiens
tgtgtagctcggactacaggtgtgtgccaccacactggctaattttttgtagagatggggtctcgccatgttgcccaggctagtcttgaactgacctcaagtgatcctctcgcctcggcctctcaaagtgctgggattaaggcgtgagccaccacacttggcctctttgtcttttttattaatttgttttctggaagagttcctcagcttcctcacttaacct

SEQ ID NO: 166725 - DNA, 306 bp, Homo sapiens
accttaaaaaaaattccttattttattcacttgccagaataatgttgcatttgaaccatgccaacggtagcttattaaaacagcatttatttttctcattcatgggtcagctgaacttgtctctagccttcagattgggctcaggtgggctttgtgtttgtcattctggagcctagttccagagagcagtggctgcttgagtgtggacttgcttatggtgggccaaagaggggcaagggaaagcgcatttacactttctcgtattccattgcccagagatggcatatagccgatcccaagtcagtg

SEQ ID NO: 166726 - DNA, 106 bp, Homo sapiens
ctgcaaagaagatgtgatctaggatttgtgccaagtgttatattctatacaggaaaatagggaaatctgtaaaattctggcttgggctgaaatcagtagtttatgc

SEQ ID NO: 166727 - DNA, 152 bp, Homo sapiens
actttaaatgataatatccaagaaagtatagattaaacccttaatatctttaaaaaatggaaataatggcatagctgaacccagtttggaaaaaggatggttggatgaagggagacttcagggatacttatcaatgactaaacaaagccaca

SEQ ID NO: 166728 - DNA, 506 bp, Homo sapiens
caaaacttgagttggtaaaatgatttgtcagagacattaaaaagtcagtgtaatcaagagtggtaaatgaagctaccctgtctgtgctctggggcccttgaaaggggaccaccaagggcagtgcagtgtttctctgcctcctgtttgctaactctgctcctgctcttctctcctgtgcttccgggctgcaggtctcactccatcgggtaagcgccacagggctgcgtgtggggctttccccactcccttgctgcccctttgctttccagggctccctgtttctttcacactgtgcctgaaccaacaaaactacactctgttttccagacagttcccgtgaccaggaagatagtttatagggcacttaatacatttgaacttattgaagtacatctctatctcatttctgaatcatttacaccatttcacttgctgagctctctctcaggagtctctttctctgcaccatttcttccggtgttgacagagcttcttagaattgaaaa

SEQ ID NO: 166729 - DNA, 403 bp, Homo sapiens
gagctgggaagagggaagggaccagggtaagttaaaaatgccacaaagctcaatattctaaccacaatccagctagtttttctggattcagtgtttcattagttgctacaagcttttggttggtttctagagttctgaaaagttgattctgccagtttctatcaggtttttattgcttttatggagggatagacttttggaggtcttaactctgccattttttctgatgtcactcagatatgtcaaatatggcttaaagaaaaaaactgattaagataatcagagctgggttgggtagtatgtgcctctagtcccagctactcaggatacttaagtgggaagattgcttgagcctacgagtttgaatccagcctgggcaacagagtgaggaccctatctctta

SEQ ID NO: 166730 - DNA, 213 bp, Homo sapiens
attttgacattcaccatcaaagaaaaaattttcaaacaaaacaattgtttctaagatcaaaactaccttactatgttacagttaatgaatatgtatacctccagagcattttaacggcatgtaaaacatgcatctataataaactacgatcatatagtaaaaaatttactttaacacacccaatgcagaatcaaaaagtgtgaagatttgaat

SEQ ID NO: 166731 - DNA, 249 bp, Homo sapiens
taaccatagcatagcaatctgtcactataattttctgcagaaataaatgttttcgtttgtcctgtaatgtctgaaattactgctaaagctggaaatgtgtttagctttctcagcaaaattcttaaaaggatattgtcagagccaacaatccagaattatctttactctttaaatggttcttcacccactttggtttgccttttttttttttttttttttttttgggggaaaacagggggggggggaccc

SEQ ID NO: 166732 - DNA, 485 bp, Homo sapiens
gggcacaagcactctagtcacataacatacgcccagcaatatgtcacaatacacctgtgggcagcaccaaggcagaagaggagactcaaatcacctaggtgcaatgcccagcgatgtcacaatgacccctgtgggctgtatcaaggcagaatagaatcacattaccaagggtctggatccagtgatatggcactgtgagctggacccaggaaacaacaaataactcagatgctaggccaaggtatatgtcacaattacacttgtcaaaaggccttgcgatgacattaacaattacacacatgtcctgagtcaagggatgagagtcaacacctcctgcatgttgggtgtaagtacagggtggactggatttgtgcgagagcctcaatttcctttgcaaattgtgtgccttagactgggcacggtggctcacacctgtaatctcagcattttgggaggccgaggtgggcggatcacttgaggtcagg

SEQ ID NO: 166733 - DNA, 230 bp, Homo sapiens
tcttgcccatatttaatggatttgtcttattattgagtttcaaaattattcagaattattgtgagttctgtatatgttctggatacaagtcctttatcagaaatgtaatttctgatctcttatcccactctggagcttgtctttcattttcttaatggtatctttttggagcacagacattttttaacttattataaagtccaatttatcattttttttcttttatggag

SEQ ID NO: 166734 - DNA, 212 bp, Homo sapiens
tctagggttctgggctcaggcaggagggcggggtcccaggaggtcatctctctctccttaccctggagcctttggaatttggtttccaaatgtcctgaattcctgttcattaatatgtggctcagtacagtgcttgtcccggcagcaggagcttggttggtgttagtctgctggggaatgggataaagcagagaaatgtcaagctttccctt

SEQ ID NO: 166735 - DNA, 299 bp, Homo sapiens
gttggccaggctggtctcaaactcttgacctcatgtaatatgcctgcctcggtctcccaaagtgctgggattataggtctgagccactgtgcctggccaatttttaatttttttttaacttttatttattttgcttaaaagttttgttttgatagaagcatgaatattattagggtgtgaaatataaggacaggctgggcgtggtggtgtacacctgtaatcccagctgtttgggaggctgagacaggatcacttgaacctggaaggcagaggttgcagtgagctgagatagcaccact

SEQ ID NO: 166736 - DNA, 298 bp, Homo sapiens
actagtggaaacagaaattctctccataacacacattgttggttctctgcagtacgttgtggctttccaacgtttcctttttgtgccttttctactggaaactaggctctaagctacttctgtgaacaggaaagttctgcctttagcagttaggagtaaaatgtcttccatagccaaattttagtctccatattgtcccatcagcatgaaaatagcccctcagttcctatgttcttttaagacatccaatctgtttcctactaaaatggtacttagtaaggggattctaagtttggaa

SEQ ID NO: 166737 - DNA, 613 bp, Homo sapiens
ggttgatctagaggtcccgacggttcaacggaatttttaaaagaggcaaaggcagaggagaacaaaggaaggaggaagtaacttgtggaatgttgaaaaaggtaaaaacaccttcaaataaggaagaggaacaggctatgacctaatgcttgtttggaccagtataagcacgccagggcaaatatttaggttaaattgtgggagctaagaacataaagtacattgatttctttattacagctagcagatatttaagaatgttagtacaggtctttgaataaattatgtttttaagagaagtcactatttattcccaatcagatggggaggaaagtctttgaggaggaacctccactttactttttacaccccccaaaaaataaatcccaagcagtataaacagagaaatccatacctaaacacaccaaaataaagatcaaagaaaaaataaaatcaaagaagagaatatccttaaatagccagaaaggaaagacagattattttcaaaggaaaaacaattaggctaacaactgacttatcaagacatgaacaacaggagacagaagactggaatggtgtcttcaatgtgccaagagaaagtaattattaacat

SEQ ID NO: 166738 - DNA, 555 bp, Homo sapiens
gtgttatgcatgtggtagttgtttgctagagtctgggttgtgtccccccagaattcatcttttgaagtcctaatccctgtacctcagaatgggattgcatttggagacagggtccttaaaaaggtaattacgttaaaataaagtcattagggtgagcgctaacccagtatgaatcctgtcttcttaagaagagtgaatttggatgtagatgcgtggacagagggaagaccatgtgaggaggcgtcggcaagccgaggagggaggccttagaaggaaccaccctgctgacactttgatcttggacttctggccaccagaactgtgagaaaagaaatttctgttatttagcaactaggtctatggtagtttgccgtgacagccctagtactaacattttgtttaataaccgttttcttatatattggctctcagggcccttcatagacatcttgccctggtccgtttactcagccttctgtcctgacagtccctcacaccttctatgcccgctgacctctcagtgttcactgaatacatcctgcctttgaatgcctc

SEQ ID NO: 166739 - DNA, 278 bp, Homo sapiens
caccatgcggcccacgcttcagtgtgaagacaccacctgtgtgttaatgggcccaacaccaacctgggtgcagggcaggtattcagcaaacagtgaatggacaccagggagctggctactatagcgacctcctgaggtcgcagggctaccaaacagtgcacggcatttgcaccccagctcaggcgtcccggcagggattctgcattgtctgcctttgaaaaaagggtgggagagttaggacaggaattttctctgtttccctctctctctccttctcc

SEQ ID NO: 166740 - DNA, 271 bp, Homo sapiens
cacctttctccaccttcccccacctccctcatcccagggcctggagctggaaagattacacccgattgcttttagggtggcccggatctgcagtgatcagatctgggctttgaggatccagcctttcggcctttcgtcaactgcattcaggggaggagggggagagatttttacacattctctgctttaccagttttgcaagaacatctggtcagattgtaattgttccaggttgcagctttactaaagcaatcgctcttttctgattaga

SEQ ID NO: 166741 - DNA, 279 bp, Homo sapiens
aggcgatctctagcaggatcccttcgatggcgggcacttaccactctgtacctactctgaggatggcttttttatttagttattagtttgggacattgttaatgttctgtaaagacaaatataaaacaaaatttgaaaacaaaaacagaaagagccacaatattgggcatgaataatccaaatctgagcactgtcaccacgtgctcctctcaaattcagggttttaattttttattctttattacagacaggatctccctaagttgcccgccaatcgaa

SEQ ID NO: 166742 - DNA, 420 bp, Homo sapiens
gacagagatgccttgccaggctgcacgctcttcacatctttgttgaacgtgtaatttccatccttgtcgaatgcataattcaaccaattatgcctttgatcaaatcgtttttttcacatgtaacaaaccttctctttaaaatcttttaccttcctaccaggaaaaatgatcttattttcgttccctttccaagccaaaaaaaaaaaaaaaattacctttgtcacatgagatgtgacaaaaattggcagccctttcctgagatatttttacagcgctttacaatgtgttacattgaaaagcgtacgaaaagtgtaatttcagtgtatgaaattacaaggttattttcatgtccattaataaaggttcatttgatcctcaccacccaggacaagagagacagcaaaggccatgagtttcatt

SEQ ID NO: 166743 - DNA, 124 bp, Homo sapiens
tctcaaagcctgaaagaactgatgctggggaagatgcccaagacttatttagtctaggctttttgtgtagattctctctctctttttaaaaaaatctacttatttatttttgattctctgattt

SEQ ID NO: 166744 - DNA, 258 bp, Homo sapiens
aggacacagacacagagggaagatgactatctgcaagtcaaggagagaggcctcagaagaaaccaatgctgctgacaccacgatcttggacttctagcctctagcactgtgaggaaataaatttctgttgtttaagccacctagtctgtgatactttgctacggcaggccctagcaaatgaatacacttgtcttgtctttcccccgccctgtgatatttatcagtgccggatattacatatttgtgtatctatatgct

SEQ ID NO: 166745 - DNA, 439 bp, Homo sapiens
cagcacagaaatcggcaaagggcatgaaaaggccattcagacgacacaaatgtccaattatcagaagagtataatctgtgaagaaatgcaaacgaaaatctcacctgcagaaaaatgcagataaatacaatgaaatacttttcttctatataacaggcaacaaggtaacaggcaaacaaggtaagtttgatgttgagtttagtgaaataggcaccgtcacccattgttggtagggtacaacctgggacagctttttgtttttgtttttgtttttgagacagcctcactctgtcgccaaggctggagtgcagtggcactatcttggctcaatgcaacctcagtctcccaggttcaagctatcttcttgccttagccacctgagtagcttggattacaggcgcccaccaccacacctggcaaatttctgtgcccatttcaa

SEQ ID NO: 166746 - DNA, 136 bp, Homo sapiens
gagctcggtaccccggcaactgcttcggatgaggattgcctctacgccctctatgacgcaacctatgagaccaagagagcaagaaggaggacctggtgtttatcttctgggccactgagtctgtgccccttaagag

SEQ ID NO: 166747 - DNA, 200 bp, Homo sapiens
tagtgagcaatctggaaagtaagcaggccaaatcaagtagggccttgggtcatcgtaagtacttgagactttatttgcggtgcgtaggaaatccttggggaatctgaagcaggagagtgacatgttctgatttaaggtttaaaaagaacacttggctttttgagttgagaaagtattgaagtgggaagcccagttaggag

SEQ ID NO: 166748 - DNA, 395 bp, Homo sapiens
acatttaaaaaaagaatatggagtgattttgatgcacatatacttgtggcaattcttaagaaacattaaggaccgagccagatcaaggtagaaggtaatggctggagaataatatatgtgtatttagaagacattagaaatctttttctccaaagggatacctataatagctttttcatctggattcctaaaattccaaatttcttaaattaccctgaaatatttccaaaaggaaataatttaaaaataaacagtaacattctattacaaaatacacttgtaaatctggattaacaaatatgttcagcaatatgaagaaagcattgaaaactctcctgaattaagtgattcaatgccaaacaacacattatccaggcactctagaatatggaatc

SEQ ID NO: 166749 - DNA, 352 bp, Homo sapiens
ttagagaagagacgagatgtacaagcagaagagacgagatgctgtgacaaaggcgttgacccacagggccttgggggcccagccagggaactcgggcttcaccctgaagaacaggagaatgccctcaagactgcaggcactggtgcagcgtggccagatgtgtttcagagagagaactctggcagcaggctgtattcatctcagtgccctcagtttctggatgaagaaactgtggacttgagtggggctgtcatttgcccgaggtcaagtggctgggtggtatccatccctagcttctgtcccagggctccttttaccacaccctgctaccatcccgaaagctctcactgca

SEQ ID NO: 166750 - DNA, 227 bp, Homo sapiens
tgggtctcaggagagacataagagttagagaaacaaatttttgagtcattagctagagcagacatttaaatctctaggactggataggagaccttggggagtaaaagaaaagggaaatgtatttgcagtatattatagaaacataatagaaaaaaatagaatcttctcatacagtaagggcaagtaggcaagtactagtccataaacattttatttcagagatcgat

SEQ ID NO: 166751 - DNA, 148 bp, Homo sapiens
aatagggagctgaatgtggagagcttctcacattacacatggatagcttcagacacagatgtttttacacatgtaccataacccccatgtaggcgaatttgggtttgcaatattcagattcattttgtatgatttgctttacagaatg

SEQ ID NO: 166752 - DNA, 190 bp, Homo sapiens
ctgcaagttatctatcattgaattctgatatttatgggtatttataccaattatatcttccacagataatatgaaaactctggtattatcatcacaaatactttaccttttaaaaactcattatttttcttttgtttatctcttgccatcttatctgcccacaaccaacattctggaacagtgatgctct

SEQ ID NO: 166753 - DNA, 350 bp, Homo sapiens
cctcattttacaaatgagaaaattgaagcctagagattaaagaactactgtgaggtcacagcctaatgtctcatggctaggaaacatgtaggtgcaaagaggggaggtggactgagatttacattttttctagctgtttggagtattatcagttataagataatgcactagagggcgctaaatacacaagctttagctgtttccataatgcagttcccacagtagtgaaagatatataattggtaatggatgcaagccaaaaaggccctccccaaaaaagatgcaatttatgataactgagaagctgtatttctgtcccctcaattaagaaaaaccctcattttatattg

SEQ ID NO: 166754 - DNA, 462 bp, Homo sapiens
gtgctatatcgagacatggtgaagcgggaaggcaagcaggcatgtgcaatgcaaaagcaaacacaaagagaaatctcactttatagcaactcactgtcacaatcactaacccagtcctgagagaaggagaatgcactgtggttagatggcattaatctattcattagggatccatccccatgacccaaacacttcccattaggtcctactccccaacaccatcataatagcaatcaaatttcaacatgagttttggaggggacaaactatattcaaaccgtatcatcctctattcccagtttgctgataatttatcatgaatgagtgctggattttgttaaatgatttttcttcatagattgacactatcatgtgattttttttttcttctttagcttgttaacatgatgaatgatattgactgatttcaaatattaaaccagccttgcatccctggaataa

SEQ ID NO: 166755 - DNA, 339 bp, Homo sapiens
gtcagtatcagtaactgattgtaattgttggattattcatagagggaatgtctttccccaggattccccgttgaatgatcttgggtccttttcctttaactcgaagcgatttggggtaggaggggttggagtgggggagaggttagttttgttttgtttgtaaatttcaaaagacatttcatgagaatgataatcaccacttattgttttaaaactgggaattctggtatattctattactatttgcatagaataatacaaatagcaagaaagaaaaccttattattgtatactaaaaagccatggatgagagtaccttcctcttgctaaaaacaaacc

SEQ ID NO: 166756 - DNA, 513 bp, Homo sapiens
ccattcaggtatacatgtgggcaaaactgtgccagcccagagtggagaggccactgcattctcctgaccttcctgcttcagcccagggcgtcaccagcctgaaaaccatccaagcttctctgctgtttagtgaagccttaggcttccacgcagcatgtgccacacctccttcctcccttccaggcccacatgccctctgtgctgtttggccctggacagccctaggttcatttgcccatagcacacataccctcatccaaggcctgccccagtcctgatttgcacatttgtgcaaagggcacaggctttggccagactaagtccaagaggccaaccctgagtgcctgtttgttcacacgtaaatgggcacatggtacctgcctcccaggtggggtgttgaacgagccatttatacttactttctctctgtagtctcaggacacgaagatggaccttcctgttctttattttttaaagatagagtctcacggccaggcatggtggctcacgcct

SEQ ID NO: 166757 - DNA, 287 bp, Homo sapiens
tccacttaacttcattaaatccaactgaacatacatttagtgtcttctaaatactacttgttatttagtcctgtgatgagctcagctacctgaggttgcaaaatgcttaactgtggagttgttggacaactaataattctgagagactcaagccaggctaagtggggttggcagggggtagtgggagggtcctcatagattggtcttgctgcactcctcactgtgacctcactctgtccaggaaggacactgtgagctatccctcactcataggcattgtagggtcc

SEQ ID NO: 166758 - DNA, 299 bp, Homo sapiens
agcaatcctcctgcttcagcctcctgagtagctaggattacaggtgtgcaccaccatgccaagctaatttttgtatgtttagtagggacagggctttgccatgttggccaggctcctgcacttttttttttcccattcacttgctgtctctcacacacacacaaaacacgggcatcctgctcttgaaaacaggaacaagagcaaataataacctctgtccccatggccacaatgagggtccttattagatgatgaacgtgaagcattggcacagtggaacctggtgcacacgttggcta

SEQ ID NO: 166759 - DNA, 284 bp, Homo sapiens
ttggactgaacttctgtgtttgttactcatctccccctctctcctttccctctcatcctcccaaccccccaatcaaatgaaagggaataacaaagagaactgacagataaccaaagagaagagaaagggtcaagaacaaacaagaatagaagataaagacaaaaaagcaaggacaaatgtgcaatcagagaccaaggcagggaatgctacagaccagaatatgcccagagggaactgaagtgggcatggcttggagctggcgcagggaatagcaggaaaaaatc

SEQ ID NO: 166760 - DNA, 327 bp, Homo sapiens
ctctagagatccctcgtctttgataggggggcatagcagggaaccttgtccctgcctcttcagagctcaagtctggtggcaagattgttggttttaaaaaacaaaggtgtaacacatgtgactatgatcactgtaacagtaaaacagacttgaaagaaaaagtagaaaaagaaataggattttatgagcagaaaaaaaacctgacattacttttttcagtattttctatgagaaaattcaaacatgtggcgaagctgaaagaattttacagccaaataagtattacatacaccatctagatgttaccattaatattttactgtgcct

SEQ ID NO: 166761 - DNA, 498 bp, Homo sapiens
aacatactcagaaaaagtaacatgcaaggtaattggaaatcagactttaaagcatgtttgaaaagatggcaagcatttccattggttttcatagttttttttaatgactgactccaaataagaaggatgtcttattatttagcttgacaacatctatgttaaagagactaggatctaaaccccgaagagaaattcagaaactagaaaaaaagaaaatgaacccggggtgttaagctgggaaccaaaaagagcacatttcaattcttttccaccgtaatgccacaaaaccgtaccttaaaacttctaagattacaatcttaggtaagaaaaggaaatattttcagttacaaatagacatgtctttgcgccttcattctagactttttttttggagacggagtctccccgtcccccaggctggagtgcagtagctctatctcggctcactgcaacctccgcctcccgggttcaagcaattctcctgcctcagcctcccaa

SEQ ID NO: 166762 - DNA, 535 bp, Homo sapiens
tgataggtgtcctcaggcctcccggtggccgtccccactgccgccctcctccagggtgctcccactgtcctctctccttgccctggccttccagggagagaatccggaatctgctcaccacaggcattcaacttctgactctctgttctacttctatctaaatcaacccagctatatctattgaaatccttcctgggtccaaccctactctgcctctgccttccactgtgccacggacaggtccctgtccctcctgagcctcagtttcccctctacaacaggagctgagacaatggagactctcagtcccagtggctccaacttccatgcggtgtttcaaggcaggcaatttaaggggcaaatgtatgcagatggatatgcaaatgggcatctccaggatttatgggtggccttaatttcaaggggaggaggcggcctcagcctggctggacccactaaatcctggccggtgtcagcaccgtaaagcactgtgatgaagggccggcaggcgctgggggcggccctgatttacagc

SEQ ID NO: 166763 - DNA, 379 bp, Homo sapiens
attagaggagacaagacatcatttgtcagacttgagaatgacatatcttacagatgcccactgctgatgtgaactatttatgttagaccacaaataactgataagtatgtgagttaatacatatgttaattagcttgattcagccatttcacaatgtgtacatatttcaaaacatgttgtgcaccataaatatataaaacttttatttgtcaatttaaaaaacaacaattcttccatactgacaaatagactcttacacaactataaagccaaaggcaagtttacaaataaataaaaaccaaaaacaagccaacaaagttaaaactgaagtgtgttggatgatgttattttgctgaaattaattgagcttctcgaaatg

SEQ ID NO: 166764 - DNA, 522 bp, Homo sapiens
gagggttctgatttctctgtctccttaccagtacttagtattgtatgtctttttgactatagccatccaagaggtatgaagtgttatctcattgttgtcaaccattgatttttgatattataaacaggtttcttttgtgtcatttgcagttagagagattttactctaactttttttcctaaagtagacttacttgttgaaatgaagtttttagtgagaaagtgtgatcatttatatctacttcatttgacagctcatgtatcttagaataacttagaatttcagcagcttctgcagcatcatatatgcggctaatagtattgatgcgatgaaaaatactgttctttacatttttgcttcttgattttttaactttttgttttgaaatacatttaaatttacagaaaagttgtaagaattcaccagttactaacttttagtcgcatttggtttctcatttttccgttatgcatgtaatttttttctgaaccattttagaataaggcgccagacatcctgaat

SEQ ID NO: 166765 - DNA, 485 bp, Homo sapiens
aaatagaatatggccaaattcttgtgacttgtgacaaaggttaaacttccagaaagtgccctagaagccataattttccatgataagagactagaatggaatgtctttcagactttatcaattgatgacaaatggagaaaaataaaagttcatttatggcacttctgaccaagctcatttccctagattgaatctgagtaattgcaatgtcagctatctagggttggctcttcaaacaaataacctggagtcataagcacactgtttatgaattcctcaaatgaaattctgggagtgagacaccactcaccctgcacatagtcaaatcttttgttgcctgtaatggagcttccaccttaagaaactagaaaaataagggcaaattaaactcaaattaagtagtaggagaaagagaataataaagaacagaatggagattagaaaattactagcgagaacaaacaaaactgaaaggtggttatttg

SEQ ID NO: 166766 - DNA, 360 bp, Homo sapiens
acatttattgattatgaattaattgggtgcccttttaccatggttttaatgtgcatcaatctgaatcagattgtaaatatgtggttttatgtttattgcaccatttctaactcagtgttcattgtctttcatgttcgtcaactgaccgtgtttcttcttagttaatatttcttcattaaagaaagtctggaaaataaatgtagagaattaaaagatgaaaataaaaatcagccaggtgcagtggctcacacctgtaattccatcactttgtgaggctgaaacaagaggattgcttgaggccaggagttcaagactagcctgggcaatatagtaaggccctgtccctacaaaaaaaaataa

SEQ ID NO: 166767 - DNA, 274 bp, Homo sapiens
aaaaaaacggttatggctatattactgctatataaaatagatactgtttgaaagatttttaatttatacattggtatttttctgaaaaaactttgtagcaaatacaagtcacacacaatacatttataagaaaataaaagttatacaaaatatatattatgccacagagagcattcagtgaaaagatttttattcattgattgataccttcctgggaatttttgaaattaaagtgatttgaaactggccatgccctctctctatgacagaatat

SEQ ID NO: 166768 - DNA, 1512 bp, Homo sapiens
atgctgccggactggaagagctccttgatcctcatggcttacatcatcatcttcctcactggcctccctgccaacctcctggccctgcgggcctttgtggggcggatccgccagccccagcctgcacctgtgcacatcctcctgctgagcctgacgctggccgacctcctcctgctgctgctgctgcccttcaagatcatcgaggctgcgtcgaacttccgctggtacctgcccaaggtcgtctgcgccctcacgagttttggcttctacagcagcatctactgcagcacgtggctcctggcgggcatcagcatcgagcgctacctgggagtggctttccccgtgcagtacaagctctcccgccggcctctgtatggagtgattgcagctctggtggcctgggttatgtcctttggtcactgcaccatcgtgatcatcgttcaatacttgaacacgactgagcaggtcagaagtggcaatgaaattacctgctacgagaacttcaccgataaccagttggacgtggtgctgcccgtgcggctggagctgtgcctggtgctcttcttcatccccatggcagtcaccatcttctgctactggcgttttgtgtggatcatgctctcccagccccttgtgggggcccagaggcggcgccgagccgtggggctggctgtggtgacgctgctcaatttcctggtgtgcttcggaccttacaacgtgtcccacctggtggggtatcaccagagaaaaagcccctggtggcggtcaatagccgtggtgttcagttcactcaacgccagtctggaccccctgctcttctatttctcttcttcagtggtgcgcagggcatttgggagagggctgcaggtgctgcggaatcagggctcctccctgttgggacgcagaggcaaagacacagcagaggggacaaatgaggacaggggtgtgggtcaaggagaagggatgccaagttcggacttcactacagagtagcagtttccctggaccttcagaggtcgcctgggttacacaggagctgggaagcctgggagaggcggagcaggaaggctcccatccagattcagaaatccttagacccagcccaggactgcgactttgaaaaaaatgcctttcaccagcttggtatcccttcctgactgaattgtcctactcaaaggagcataagtcagagatgcacgaagaagtagttaggtatagaagcacctgccgggtgtggtggctcatgcctataatcccagaactttgggaggctgaggcaggtggatcacttgaggtcgggagattgagaacatcctggtcaacatgggaaaaccccgtctctactaaaaatacaaaaaaattagctgggcatggtggcacatgcctataatcccagctactctggaggctgaggcaggagaatccttgaacccgggagttggaggttgcagtgagctgagatcacgccactgcactccagcctagcgacagagcaagactccatttaaaaaa

SEQ ID NO: 166769 - DNA, 393 bp, Homo sapiens
tggaatactatttagcaatgaaaatgaacgaacagctacatacaaatctaaatcttacaaacaaaatgttgagtcaaagccagacatgaatacatacaatatgattccatgcatataaagatgcaaaacaatcaaaactaagccaaaactaaaaaggtctacacacacaaaaaaagaaggtgattctcctacaatcaggacagagattacctttatgagagaaggactgggttgtgattgggaagcttcaaggaaagcttgtggaatgtcagtaaggtcctagtgcttgacctacatcatggttatacaagtgtctgattcataaattgtaaagctttacttttgttttacatacttttctacatatgtgttacattgcaacacggtctctca

SEQ ID NO: 166770 - DNA, 531 bp, Homo sapiens
tgaaattgtctgagttttgacaattataatattttatttctgattaatcagaaaatagtttgccataaaaatttatcacttctgatattagcacataaatttgtttttattgtaatttcaaaactaatgtcaagactgagcaaatcataagatggaagcacctgtgagtgcctgggaccctcaagatcatcaaatccagctttccctgcagagatggtctttcaacttttgcctgaacatcatccttgtgagggaaatcgtttcatcacaaagcaatccagtttactactggaacactgcaattatttgaagatttttggcatcacatgtcacaacattgcttcatatgaattggtacttaaaagaaaactcgacgccatagaactacaaaattaaatccaggaagaacctcagagacgatcttcttccaacatcctctttctcagataaggaaattaaggttttaaaagatcttgtgccaaaagtcacacagttgacttgtggcagttaagattaaattttaaaattcct

SEQ ID NO: 166771 - DNA, 401 bp, Homo sapiens
cttgagaggagaatttattacttcatcacctaagagaagggggcacacccctccatgcagggcacaggggaaccaccagtgtgggtcaggaggcagaaaggagccagagaaaagtgtgggtgggaaccttagtggggcttcctcgggaaaggcagtgcgtggctggtttgaataatgatggtgggctttggggtggtctctatttgcctggtatctggccctgggatgttttaaggcagggaaaatactggcttggtgtgtgttagagaaaatgggcagctggcttacttccaagttctttactaaattgaggaattagctggtcttgggagaggcagtgtctttctgggtctgtaagtccctggaaaatgttaaagtatcataagataaaaaaaaaaaaa

SEQ ID NO: 166772 - DNA, 393 bp, Homo sapiens
gacattgtttaagaactgatcacattcctttcatttgacaaatatccatgaagcacttcctaagccaaggccctcttctaggaactggagtcacaagacctgagaaggtccgccttacagagatcttatatcctactcgggagataaacaataaacaaattcggctgggcatggggactcaacgcctgtaatcctagcactttgggaggccgaggagggtggatcacctgaggtcaggagttgaaaccagcctggtcaacttggtgaaaccccgtctttactaaaaatacaaatatattagctgggtgtggtggcaggcacctttaatctcagctaacatgggaggctgaggcggaggttgtaatgaggtgaaatcgcaccactgccctccag

SEQ ID NO: 166773 - DNA, 372 bp, Homo sapiens
gacattgtttaagaactgatcacattcctttcatttgacaaatatccatgaagcacttcctaagccaaggccctcttctaggaactggagtcacaagacctgagaaggtccgccttacagagatcttatatcctactcgggagataaacaataaacaaattcggctgggcatggggactcaacgcctgtaatcctagcactttgggaggccgaggagggtggatcacctgaggtcaggagttgaaaccagcctggtcaacttggtgaaaccccgtctttactaaaaatacaaatatattagctgggtgcagaagtgcgcctgggtgcagaagtgcgcctgggtgcagaagtgcgcctgggtgcagaagtgcg

SEQ ID NO: 166774 - DNA, 373 bp, Homo sapiens
agcatctttcttctaacttaagaagttttatcttgttaacacaaccttctaaggctacacttttgctatatattatgttgtttttgaaatatctttcgtaaatctgctttattgcagtataatttacatacaataaaatttaccatttttaagtgtttggtgagtttttaaaatatatgtgcagttgagctgggcatagttagggatgcatgcctgtaatcccagctggttgggaggctgatgtaggatcacttgagcctgggagtttgaggctgcagtaagctttgatcttgtcactgggttccagcctaagtaacagaacaagaccccatctcaaataaaataaaataaaatataaaataaaataaaataa

SEQ ID NO: 166775 - DNA, 128 bp, Homo sapiens
aaattccaacccgagaactaccacaaatataagacaaactggctgctacatggaagaggggaggtaacactgacaaagccacatctatgaggccagatacaccaggtccgcataaggctgagatgagg

SEQ ID NO: 166776 - DNA, 531 bp, Homo sapiens
ccactgcgctatggaaatcgtggggttgcggggaggctgcagcttgtcatccagcccccaggcactgactgcagagatcccacccctgacccccccagactgggatgccaggaggggcagaggatctgcacttctgagctgtgtgccttgagccaagcacttgaccgcctgtgctccaggtcccctagctttgagcaggggctaacggaagaacctgccttgccaggttgttgtagtaaatgagtcaacacacgtttcacacttagcacagtgcccagctcccagtaaatgctcaatagatggaagctatgattagtcatggaacacggcctttctgctgtcctccctgccatggaaaatgggtaactcagctggagggcagttcctctgtgtagactggccaaggccccggggatgaggcagggtacctgggtgccaaaccagccccctctgctaccaatgctcggcaacacaccgacagtcaagacacacaggaggacgtcccatctcccttgtatccaattcggcacc

SEQ ID NO: 166777 - DNA, 529 bp, Homo sapiens
ttagcccttttataaatttacagccaaaattacagccaaaattacagccaaaattgataaagaaatatcaataatataaccttcaactggctgaaaaaaagaggtcaggttgccaattttaccaaaaactatatggatgaatggtcaataaagtcaccaagtacaaatgacaaggtggagaaaaacaccaataatctacagtcgcaaactgtagcaatgacatggcttgagctacagaatatttcctgtgagtgattttaaatggcaatattccttataggagtattataacttacacagatgatatgggatctggaagcatactacatcaaaagaggctgaaagataacctttataataaggcagactctacttgtcctactcagaatgtaatatgtagtttaaatataaaataaatatcatttccttgtttcattacttcgtggagatggacaaataaaattattttttgaaacttatttttaaactcacatcttgaaaaacatcttcctcagtctcagctattcac

SEQ ID NO: 166778 - DNA, 205 bp, Homo sapiens
aacgcgctgatagcctctaacgcgctgatagcctccaacgcgctgatagcctccaacgcgctgatagcctcccaaagtgctgggattacaggcatgagccactgcgcccagccttcagtcagttttaatacaactgtaatttcaacttgtactgaataaaaagataaatttaatttcaatttcctggagaagtgttgtaagggat

SEQ ID NO: 166779 - DNA, 123 bp, Homo sapiens
taccaaaacacgtgtgttgatactacttgccacctaattttaacatctatccattcataaagctgtgaaattcaatgactctactccaatcagcaaactaccagctccccagtgtggagagag

SEQ ID NO: 166780 - DNA, 444 bp, Homo sapiens
ggagattagatagatgccaattttaccagctccggcaagagaggttgaggcttatgcttggttagcactggaagtgaagaagtaggagcagactggattcttttctatcagatttggagtaccattagccgtataaatcattgtggggcggggaatgcctggtgccgtggctcgtgcctgtaatcccagcactttgggaggccaaggttgggagcattgcatgaggccaggagttccaaactagtctgggcaacacagcaagaccctgtttctacaaaaaaataaaattaaaaattaggtagacgtggtcacatgcaccagtagtcccagctactgggaaggctaaggctggaggatcttttgagcccaggattttgaagctgcactgagccgtgatctcaccacggcactccagcctgtgcaacacagtgagaccctgtctca

SEQ ID NO: 166781 - DNA, 323 bp, Homo sapiens
gaagggatgagggaaaagacggagcctggggaggaggcagcaaagtggtgagaagtataaagactaaggagggaaccagtccgtgagaaatacttggaaattatttactgccctgtgctataattatcagcaaggatcaatccattttgtctggtcatatctgaaatactggtacttgaaatgacaatctctacacatgtgcatacacacatgggggtatttttaggtttctactttcttccactgacttgcctattcttgcatcaagttaccatttaaaatactgtagggccggacacagtggctcacacctgtaatctcag

SEQ ID NO: 166782 - DNA, 251 bp, Homo sapiens
ccaggccccagctggatcccagtgcccagtccagctgtacccacgtaaagggatctgccaagaggtggcttttcgctgttgcagaaggcatctcttggggctgatgacggtgagtctctcattcttaacagcaagagtcaccctgctccatgaatcttcaaatttggggtcatttcccacctaaaggcagagatttggcctatgttcccaaccacagctgagagtccaacctgcccctcgggtgacacaca

SEQ ID NO: 166783 - DNA, 386 bp, Homo sapiens
tgaggccacccacatttgtttataatagattgacacaggcagtctcctaaggacagtttttcccatggctctcatcaaactattattagcaaggaaattcttattatcatttgacctgtgatatgaccctgatcctaacactgtttttagtttatggtgctattaaccaagtctgtttgtccacaataaaaacaaattgaactaaatgatggctaggacctcttgtagttccaaattattcctaattatgatgttgattataaaaacaacagtatttttgtttccatggtgcctttaagttaacctttttcataactgttttttttctttggcttattactagtcttaagggagttggttattatttattttcattatgtataaac

SEQ ID NO: 166784 - DNA, 287 bp, Homo sapiens
gaaaaaaatggcacatttaaaagctgcaccgtctgacagctaaggttaaaaaaaaaaaaaaagctacagaagcaaaaagccaaagtattgagtaagttattaccaaacatctacagtgtaggaataagttaaattcatgagaaagcatgtaaaagagaaagaggtgtaagaaacaaaattaatgctacaatagaacactcttaaaatcgtcactttgttaacccactgatccaagtcagactcctaaaatggtctcttatgccatttgtagacttcactggaaacac

SEQ ID NO: 166785 - DNA, 321 bp, Homo sapiens
aacccacagatgaccccaaatcttgaagcattccttctgtaaccatttcacaagtgcttattacatgctgggcactctctccaggacctaggatatagcaccgaagagacggctgtctcatgaagctcatattccaggtgggtgagacagacaagaaatgagcaaagaaggaagtttcaggtaataatcagtttacctagaaaataaaacagcatgacgggagaagtttttttgccgcctatcctggcttcagactctaaccggtaagatgagtctcagcaacgtgcaggttaaaacctaatgacctgacgtgtaattaat

SEQ ID NO: 166786 - DNA, 283 bp, Homo sapiens
agagatgtagcctttttgggtaaaatgaggatttcagatatcttttctgctcttgtgaggctgtgctcattagagcctacactggagctctagagaacaccagaatggatgacttgaaactctgaccccactagttgattgcttgccttattattgattttcaaaaggattcaggccaagaggctgtacctctgttatatttcattatttcttcatctgtaaaaatgaagcattgtttatagcactcccctacctcctgggaatacagcagggtaacacaaga

SEQ ID NO: 166787 - DNA, 267 bp, Homo sapiens
tatcacagggcatcacaatttgggacattttcatagctgtacaaagcataaatcttaccacttaagatgatttcagtcctgccatcaagtcatggctatgacatctgcagaatttgggtttaggtcaggaaaactcttctgactaggctttcattttctaccaagcaactgatgagatgaaagcagagtttttacagtgtttcagtgcctcccaacagctgagctcgcaagcggatagaagtcctccatcttcccgtggcctattac

SEQ ID NO: 166788 - DNA, 396 bp, Homo sapiens
tttaaagtctactgaaatctcaccctttctttggaagttttccttgtgctatagcatccacttcgctttctctcttttctttaatttctttggggctaagtgctagatgctggtactagttgataaatgtttcacatgggtagatcttttcaacaagattatgatggccaagtgggcaaggactgcattctcttgatgtatatcctccatagtgtctgacacagtgctaagcttataaaaaacacttactgatctatgctcaagaggttgattagcctgctgtaccttcgaaattgcttatttgatgagtatatattgcctaccatgagggagattctgaggatgtggaaattttatgatgaataaaatatagggttgaatttcatttgaagctgc

SEQ ID NO: 166789 - DNA, 439 bp, Homo sapiens
ataactgttaggaaaagagaaaacctagatccctacctcatttttattaaactaagtaccttatattaggctaaagtaaagataggtgaaagactaaaatatacaaattaaatataatcacaataaaattgagaagaaagcataagtaaatatttaaaaaacttgagtaacaaagctcatttcaataacgccataaaattggaaacagctcaggaaaagatttatcaatataattacataaactcatagaactttttaaagacaaaaagcagcctatggtaaatttgaaagaaaatgaaaattaatagaattacttttaatagtgtcattgttaaagcattcatattttaatatataaaagctcttcaaaatcagtaaggattaaaaaattggtgatcataataaaaaaaggcaagggatttgaaataggcaatagaca

SEQ ID NO: 166790 - DNA, 336 bp, Homo sapiens
ccattgaataaatgagtgcaaaatttaaataaccttctatatactagcaatgaacaatcccaaaatgaaatgaaggtaacaattccatttataataccatcactaagaagtagcttagaaaaaaatttatggcacgtacagtggcataaataacttcgggagtccaaggcaggaggattacttggagttcaagaccagcctggccaacacagtaagatcctgcctccacaaaaaaatttttaaaaattagctgagtgtggtggcacatgcctgtagtcccagctacttaggaggctgaggtggcaggatcacttgagtgcaggaggtcatggctac

SEQ ID NO: 166791 - DNA, 208 bp, Homo sapiens
gacgtgaggatccgggcggccctccagcttatcttgaaattccccctttcatcttggcctcccactaacttaaaacaatgcaataagaacacattcaagacacctccagtaaatccatatccgtattattcacgaggcactaactagaaagctgtttatcctgaagcctacgtggtcaactttagaaatgtgccttcgtgtaagctgg

SEQ ID NO: 166792 - DNA, 216 bp, Homo sapiens
ttcaggcacatcttcatccttcctggaatatcaatattgccaagggtacacagcaccttcaatggagagtgtatttttttcttacctgttgaaattcctaagcatttctcgacaggtggtgttttcagctagaaagtcgcacattttattttgaagcatatctttctcaccatgaatatattaagtacgaggaaggcatttggagggattactgga

SEQ ID NO: 166793 - DNA, 189 bp, Homo sapiens
tcgacgatcacgccattatagcagcctccgtggtctcctgcacttgtcttttaacatattttagtttacttatgtctttttaaaatttaaaaaaattttttcagtggttccctggttggttagtgtcttttgtttattaactctttccccacataagaatgtaaagctttgtgatatttggtagtcttg

SEQ ID NO: 166794 - DNA, 180 bp, Homo sapiens
ttttttcttgctgatatgagttagttgtagattttggatattagtcctttgtcagatgtatgattgtgaagattttctcccactctgtggcttgtctgtttactctactgactgttccttttgccgtgcaaaagctcttttgtttaattaagtcccaactatttatccttgtttttattg

SEQ ID NO: 166795 - DNA, 359 bp, Homo sapiens
atttcagaagtgattctttctctctatttcttcctactaagagaagttccttccttcctttgaagcaggctgactcaaaatttgctttcaggagtaacaagagaaaacctccctcataataaactgtggaaacctgattttaaaaatctacccaattcaacgtgcctcctccttcttcatcgatgctttatttaccattccttggtatatttaataacactttacaatccaatgccttgagaggacaaaacgtttcttctcttggagaacatagctgagagagcggggaaaacaatccctggattgatgagtccaaacagaataagtcttcagcgtccacaggggtggggaaaggtctg

SEQ ID NO: 166796 - DNA, 199 bp, Homo sapiens
ggagctccctgcgggcttcctccatgtgccgccgcagcctccggtcccagggcctggaggccggcctcagctgcggtaaggctggtgtcagggggagggtatgaatggagctcagttttcccacctgcaaaatgggcttggtgaggtggggaatcccagggaatggggctaagcagggctcaggattggccctcctggg

SEQ ID NO: 166797 - DNA, 411 bp, Homo sapiens
tggctagtgatttataatgtgctatttaaagttcaaaactcccctagaaacaccctccatcggcttgtctgcatttttattgaaaatgtatagcctgatggctggaacctagtgtactgagtacacaatctggtttggctatatgaccgtagaaaaatgagactggcttcggatttttatggtagtgatggggttggtcagggtgagggttcctgtgcaaggtgaggaaagggtcttacacggtttgaactttccgccaatgacaaaggagacagcacttgggctaccaacttgtccagatgtggggcacaaagggaagagcaaggggtgaggcctaaaagctttcagcagcagcacacgcaattgagcaaccacatccgaggaaggcagcacacggggtaccgagccccg

SEQ ID NO: 166798 - DNA, 1050 bp, Homo sapiens
gctagtgttccttgggcgtgagctgttgcccctgggacaaggttagccacttcctgtgtgtgacccccagtcaagcccccttcccagagggcactgggcagaacatcagatcctcatcttggcttcagggatggagccccaggctgtgagcgtgggggctgtgtgaggacatgttggtgccagtagggtcggcattaccacacctcaccccacatcagctgccacacttgtgccatggcgtggattttggtggctctgtgactgtcactgcccagccctgtgtttctccaggggcccagggctaaggtctgttctgacctctgatgcctgcatgggctggtggggcaggaggggagcttgctgtggattgcagacacgaagtacagagctacatggccaggggaggggacccagaggtagacctatttgaggacagggagcagagaacaccatgtgaccaagttgtctagctgcacacgctggaagggctgacctgttcctctggccccttcgtgggctccctgaattctgctgtcccgtctccagccctgccagaccccacctcaccccgactccaggtttcccactgagaactgccactccttagtgagacctggaactgtggtgggcttgttgtgcgtggggagggaagacagtaaggcaggtcctgtcccagactggtggagttcaccaccttgtggaaggccaagcagtggacgagttacgcaggtgacacattcctctcagtgcacggaggccacataacccagctgcaggtgagatggggaaggggaaggcttccccaaggaggacagggcaggctgtggcaggggtgtggagtgtggagccaggcccctagttatgtcccttacaaggtgtgtagcctggagcaagtgactgtcggttctgtgaggctgaggttgttcacctcatgcagtcgctgtgaggataatctgggagaatacattttgaggggatcacgtgctctgtgcactggaactgctcattcaaaaagcaaccatgggccaggcgcggtggctcacaccagta

SEQ ID NO: 166799 - DNA, 278 bp, Homo sapiens
tccattacctacctgcacaacccctgtgggagaaagtgtggcaatagggtcaccatactgggttggagagttccttggccgtcccctaggtggtgctggtgacccagggtagctgaagcaggtgactacaagggttgtctttgggaaaggtggaggcgggttataagtgactagttaatgttcccattcagagagcttatacattggtttgtgggccagaaaccaggctgagagttgagaatgagcagtgatgctgcaggtggacctgatgtgagaat

SEQ ID NO: 166800 - DNA, 456 bp, Homo sapiens
taatgcattataattagcgtataatgagcagtgaggacgatcagaggtcaccttcctgtcttggttttggcaggttttgaccagtttctttgctgcattctgttttatcagcggggtcttgtgaccttttatcttgtgctgacctcctgtctcatcctgtgacgaaggcctaacctcctgggaattcagcccagcaggtctctgcctcattttacccagcccctgttcaagatggagtcgctctggttggaaacttctgacaaaatgacagctcctgttatgttgctgctgctgccgccaatggacagcctttaacgtgcccgccagccctgctccaccgccggcctgggctcacatggccccatccctcctcgaacctcctagcctgttagttactcaaatctgcaagctctctgccttctcagggccttcaataaatgcatttcttctgtctgg

SEQ ID NO: 166801 - DNA, 409 bp, Homo sapiens
agctgggattacaggcgcccgccaccatgcccagctaatttttgtatttttagtagagacggggtttcaccatgttatccaggctggactcgaactcctgacctcgctaacaccaaatcttatagattctaccttcttagtgtttcttcagtttctcctctcatttcaatacttactacctcaaaggccaccaccaacccagtttagtttaacttctactttttttttcaacttgagtgtcacctactccaaaaaactttccttaactattctttgccaggtctgaaatatatgctctttggtgttcctataaaattctatgcttactcctgtcactgcacttaactataacacactgtactctactgatatagttctgatgtttgtcccctccaaatctcatgttaaa

SEQ ID NO: 166802 - DNA, 436 bp, Homo sapiens
gtagggagtcgtttgaagcgcaatgcatttatctgcattgttttctgtagatatccaggcaaagcagaagctctccagctaggctggggagcagtcttggtaatgggatggggccagtatcccagctcctcccaaattgatagattccttgccttccctctcctccttccctcatgagcaagagaccaaggctgaactttagcatctactgtggtaccgtaggggccatgtagagttgggctggaaaggctccagcctgggtgacagagtgagactctgtctcacaaaaaaaaagaaaaaaaaagtcaaaaaaattagcttggcatggtggtacacactcatggtcccagctacttggaaggccgaggtaggaggatcacttaagcccaagagtttgaaccagcctaagcatcaaagcaacgccctgaataaacca

SEQ ID NO: 166803 - DNA, 435 bp, Homo sapiens
gagagccggacacactccattttagtttcttcacctgcggccccctttcaccttcctccctgaaggcatagctagtgtaaactgactcaaagcacgtccaggaatgcacctactgataagacattgaggcaagctgcaccagcagctcctggggacacgcgtggtggatggcacccaaaacccctgcatttatctctttgtgatagtttaagcctctgcacctggaactgtttattttttgtaactgcatttgtaaccaattaatttttttaactttttgccagttctgcttccgtaaaaattgcttcagctaaaatcccccctcccctatttagaccacggtataaaaacaaaactagccccttcctcggggccgagagaattttgagcgttagctgcctctcagtcgcggctaataacggactctttaatttg

SEQ ID NO: 166804 - DNA, 366 bp, Homo sapiens
gcttcaaaagggatatattatactctctctagtaatccaaaggtattcctaattttgccactcctcattttcgcttctctttaagggccttatagtatgttctaatttctcatttggtagtatgcaacattcaatatttctagctctaaagttccatcattaattatttctttttttctttttttttttctttttttgagactccatctcaaaaaaaaaaaaaaagcaaaattgttggcatctctaagacagagcaagactccctctctaagagatagtagtgtctcccacttaattgaattcgttttgttttgtttgctttgctttgattcttgccacgtaaaatctgtgggtcttgacccagag

SEQ ID NO: 166805 - DNA, 419 bp, Homo sapiens
actacatacttccggactacataccccgccccacacagagattacgtgctaatcagaaaacagcatcagaaagtgattaaatccacctttttatttattttttctcatttccccctgtgtctgtcttgtattcagaaaactcagaacttaaagaaagcccaatgtataaaacattttttaactcccaattcatagacaagttaacttaacccataaggagggtgaccaacgctgccagttctctgaggactgtcttggtgctgacactgaaaatgcctcatctcagaaacccttcagtcttgggcaaaagggacagttggtcactttgactttagggtctgtggttgagtcaaaagagcttctttctctcagtttaatagccacagagtacgtatgaaatcttggacaactctttaagc

SEQ ID NO: 166806 - DNA, 750 bp, Homo sapiens
aaccccgtccctactaaaaatacaaaattggccggagtggtggcacatgcctgtagtctcagcctcccaagtagctgggactacaggcacgtgccaccacgcccagctaattttttatatttttattagagatggggtttcaccatgatgttagccaggatggtcttgatctcctgacctcgtgatccgcctgccttggcctcccaaagtgctgggatttcaggcctgagccaccgcgtccggcccactgctgactacttagtacagaatcacccaggagctttaaattagaatgcgcatcctaggccccctgccagaaattcagattcagctgatttgggatgagcctggccttgctcccgcatttttgtcctttgtgttgttttaaatgctccccaaccagggtgactttaattttcagctactattttttaaaataactgaagtataagtaaaagatcataatttattttacccaaagtgaaagacctccaattaaagccaaccaactatagcgtgtaaaacagaagattgtttacatgatatcaaatgtcaattgatataaagtttgaaaaattgcaagtactcttctttagctttagattagttgtgcaatacaagaacactaaccaaattaatggctttcttctcaaaggactacctaatttatggagaaatgtcattcatgaccccgaaaatcaaactcatggcataaatacattttaatcctttatgtctctcaaagaaaaa

SEQ ID NO: 166807 - DNA, 448 bp, Homo sapiens
ctgcctgcactacccccaccttcctttttcccatttgtttcaccaagattttccttcctgacttgtttttggacactttctgcacccctcttgttctgttcctaaactgtcccatgcacctttccactaccttctccctgaatattttttgctgtgtcctgttccttgtcctggtcccaaatcacttggcctgcccttcccttgtccctggatctttttgctgagtggcactatttttggacaaagagccttttccagtcctgccttgaaccacactacatagaagcctccgtgtagatgatgtgagagtcaaagctctaggaattagctaactcttacctggggctgggggccaggctgtggaaggacagagactggaaagagagcaggaccccttcagcagccctgcttaccttctgcagagcacaacagcctggcctaaacaaaa

SEQ ID NO: 166808 - DNA, 150 bp, Homo sapiens
actgtaggcatgcatgactggtttggtaaaagcatgtgattacttcaaccggttagaagttaggagtaatgtagaactgctgagatacctaagtggaatcatgtgagatttcagcaactatataaatcacatgaggaatgtgaggcaggg

SEQ ID NO: 166809 - DNA, 583 bp, Homo sapiens
ttgttataaccaattaatttgaaaagggacattataaacgagtaaacttacattcacaatttcaaatgtattccaatattaaaatataaatgctttacattagttattttcattgaccaactaaaataagagaattttagaatcacgagattagaagtgatctgaggttcaatgaacatttacggtgtccctatcacatgtcagaaacagagcaaggtgctttcaagtaactcaagtgattcaacccactcccttgtgtagatgtcaaagctccccacctatgccaaatcaagccatctaggttccagaaccagaaattctgggcaaagccctcacagtggtatagttttctatcaaaactggctggtgtcgtcatcccctataaaccaaataaaatttcaatgttgacctatttaacaaaaacaatagtctcagccgcaggagtccagcattctgggaggctgaggcgggcggatcatgaggtcaggagttcaagaccagcctgaccaacatggtgaaactctctctctactaaaaaaaaatacaaaaattagccgggtgtggtggcacgtgcctgtaatcc

SEQ ID NO: 166810 - DNA, 987 bp, Homo sapiens
tgcttgttgaatcttagcctttatttactggttttcagaataatgaaaaattaagtatcattgtgacctcatggatttaaaccatagtggatgtcagtctcttgcagttattacccttattgatgcttaaatttcattccatttctggtcagtaggaacctcttcaagctggttatcaagtcctttaaacaacaccctagtggtacttcatggcaaagaagatatctggtgtgacaagatgtctcaggcttatcctgcacttctgtgccccaaattcagagttggctttcaagaccagaattggagagctagtcatgccctttcctactagattggtcactgttcctagtctttttagtagacaaagctaggaagtatgtttcatctgtttctttaagataaaatacatgagtttataccgataattgcaattgaaatttaggaatacaagtttttatgtagctgtttcatgtttatctccttttattctagttgtcaacaatacagagaataatgtaattagaatatctcacaattggttaactgtttaatcctacacaagaatataatagtcttggagtaacaacaccagcaacactagcaccaacaatatgattgtgtaaaacagtttagaactttccccccatagggcatagtgtacaagggttttatggtcaatattgtgttttaagtctcttgaaataattgtgtgtttataacaccaactggatacacacttatgttgtttaggtcattaattttattgatttttaaaaaattaaatgttctgagttgtagattcacatgcagttgtgaaataatgtagagtgagcctagatatcttttacctattttgccccagtgttaacatcttgcataactattaatacaatatcacaactaggatattggcattaacacagtcactctatagaacattcctgtcactgccaggagtcatgctaccctttatagtcatacccacct

SEQ ID NO: 166811 - DNA, 361 bp, Homo sapiens
ccctccccgggtatcagaaaacaacaaagttcagaatattgattactctgaatcaataccgttcagaatattatttggccatgccaaagttgaccctgattacccagtaactattgtcacctcaagtctttcttcagcgttaacagttaatattaaaacaatccatggccgggtgcggtggctcacgcctgtaatcccagcactttgggaggccaaggcaggtggactgcctgagctcaggagttcgggaccagcctgggcaacatgggaaaccctgtctctactaaaatacaaaaaattagccaggcatggtggcgtgcgcctgtagtcccagctacctcgggaggggggggtaccgaga

SEQ ID NO: 166812 - DNA, 335 bp, Homo sapiens
ctgagtccctctcttcaggtcaaaccccttgcctgggggcagcaagctcccgaggggatttgtcagtgtgggagttcaaaggcctaaccccgtttgcttctagtaggacactcagccaggctccagggtccctgagggatcgcctaaggcctctgttaccactgcatccgggaacttcctctataccccagaggtattgatcctgagagcagccccagtaaaactcccacccccaaatctcagcatctcacagactgtttcccaggaatctgccccgttaatatattgtttcctaaacaggcaaagcacttctcttaccaagactaagcactatt

SEQ ID NO: 166813 - DNA, 714 bp, Homo sapiens
gtaagcccaagagatgaataaagataaatttctaaaagctgggtgcagtggctcatgcctgtaatcccagcattttgggaggccgaggtgggagaatcacttgaggccaggagttcgacaccagcctggtcaacatagaaagaccacactccacaaaaaaaagtttaaaaattagcaggtgtagtagtgtgcacctgtagtcccagctacttgagaagctgatgcaggagcactgcagcctgagcaataaagcaagaccctctctctgtgggaaaaaaagtcccaaataaatttcagtgggctaaagccagggtgttggcagggtgcgttccttctggaggttcagtgggaagactctactcctttgccttttctagctccagaggctactgcattccttggctcatggccccctccccatcttcaaagccaacgatggctgagtctttctcacatcatatcactctaacatttaccttctcgtctccctctttcatgtataaggactcttatgagtacactggactcacttggataatccagagtactctcccgtctcaaaatccttaatctcatcacatctgcaaagttccttttgccatgtgttcacagcttctgggaattggcatgtggacatcatattctgcctaccacaagtattaatagaacagaacttgtcactgccaacccagagtcactctgccctccttgtaa

SEQ ID NO: 166814 - DNA, 529 bp, Homo sapiens
gcgaattcactatgtgattgagctgaggaggagctgatgcaggagcactgcagcctgagcaataaagcaagaccctctctctgtgggaaaaaaagtcccaaataaatttcagtgggctaaagccagggtgttggcagggtgcgttccttctggaggttcagtgggaagactctactcctttgccttttctagctccagaggctactgcattccttggctcatggccccctccccatcttcaaagccaacgatggctgagtctttctcacatcatatcactctaacatttaccttctcgtctccctctttcatgtataaggactcttatgagtacactggactcacttggataatccagagtactctcccgtctcaaaatccttaatctcatcacatctgcaaagttccttttgccatgtgttcacagcttctgggaattggcatgtggacatcatattctgcctaccacaagtattaatagaacagaacttgtcactgccaacccagagtcactctgccctccttgtaa

SEQ ID NO: 166815 - DNA, 771 bp, Homo sapiens
aaatgatattggtagctaagtgtgaatggaattatgtctcaatttctttttcagatagttcactgttggcatataaaaatactactgattttcagctgggcgcagtggctcatgcctgtaatcccagcattttgggaggccgaggtgggagaatcacttgaggccaggagttcgacaccagcctggtcaacatagaaagaccacactccacaaaaaaaagtttaaaaattagcaggtgtagtagtgtgcacctgtagtcccagctacttgagaagctgatgcaggagcactgcagcctgagcaataaagcaagaccctctctctgtgggaaaaaaagtcccaaataaatttcagtgggctaaagccagggtgttggcagggtgcgttccttctggaggttcagtgggaagactctactcctttgccttttctagctccagaggctactgcattccttggctcatggccccctccccatcttcaaagccaacgatggctgagtctttctcacatcatatcactctaacatttaccttctcgtctccctctttcatgtataaggactcttatgagtacactggactcacttggataatccagagtactctcccgtctcaaaatccttaatctcatcacatctgcaaagttccttttgccatgtgttcacagcttctgggaattggcatgtggacatcatattctgcctaccacaagtattaatagaacagaacttgtcactgccaacccagagtcactctgccctccttgtaa

SEQ ID NO: 166816 - DNA, 246 bp, Homo sapiens
cttgtgtgctaagtcaccaaaatctgacatgctgaactgtcaacttaatggtggagttcgggttgagagctgatttctaaaaccactgccacctctggacagcagccattcggatatcaggtcaaggtttgggagactattaagaagccagcaccaagacatgctggtggagaagtcggagttttatcacgtcctacctactttgcggtgaaatgaaggtcttcatagtgaggtggtgatgaacgt

SEQ ID NO: 166817 - DNA, 405 bp, Homo sapiens
ctctcctttacactgcccattgagtgtgcaggtgtcatctagccctcttaacattgctctataggaatagggctcagagaatccatgaagaaaagaaaaaaatgccgataccctggttactatcatttgtctctgactcaggagtctcatgtcttctaacagcatccatgaaactatagtgtggtaacttgttagctagtaagtagggtaaaatctcatacccttcacagttattgacacccattctttagcagataactgatatttcacaattatagacatctataggccaggcacggtggctcacgcctgtaatcccagcactttgggaggccaaggcgggcgaatcacgaggtcaggagatggagaccatcctagacaacatggtgaaaccccgtctctact

SEQ ID NO: 166818 - DNA, 263 bp, Homo sapiens
gcgtccatatttgatcaggagacacccatagtttttggaagtcatctcatgacagcaatatgctttatgtttctaaaaaggaattgttataaattaacaatgccctcttggtaacattaaaactgcactgaatttttggaaccttcttaacatttgtttctacatggaatttatataatttacaaatttacattattcaaagctgatggttgatggcacaatatataatcctgtgacaagattatgaaaaggaagttcccaga

SEQ ID NO: 166819 - DNA, 344 bp, Homo sapiens
cccccccacctcctttctcggttgtagctgcaagatcagtcctttcctgggatctttaggaattatgaaaaatgaatcatgagaaataaaaaaaaagccctacagagtaaaaaagaataaaattatctaacacctcagctgcacatcattatagaaaactgtgggcttttcatacacattacagtaaggcagacatcccctctaacagactcagtacgacggatcagtaattgttttcatacactttaattagaaaaactcagatggctatgaataataatggaaaagagagacttttgcacttgaaaggttgaagtcaatcaagtgtgaatgacggcaaaaaa

SEQ ID NO: 166820 - DNA, 532 bp, Homo sapiens
tgggtttctgtttcaggcgaaagtgtggcacctgctgaccaggatgcaaatgaggactagaacgacatgttctgactgtgacgtcaacccatccagccctgattctaactgatgcctggcctggctctagctgttagagccctctaacggaactcccaggcaacagtgccctactctggggtgggcttgggcaacatggccctgcggaggctccccagaagcctccagaaaggcaacttgtttgcctcacagcaggccagtcagttcctgttctgtactccattttgaggccctctgggacaaggccagaaagcatctcattccagaggcttcccacctccaacagaggaccccaaagagacacctgaagcaatgtggccttctactccacctttctctctcctctgcagccttttactagccaggcaaatttatccacattcctccggatgaaaacctaaccatgactccccactctcctcaggacaaagccccaactcttttaatcatcctctgtgccccgactcagaca

SEQ ID NO: 166821 - DNA, 530 bp, Homo sapiens
gttggatcaatgtgagaaagactaagataaagcatatataagcgtgttttataaatggctaagtactatataagtgctattattaataatcatataattctattacattattagtgaagtagacttttggggccagttcatcctgtcactcgacaaatatgtgggtgcctctatatgtctagcaccttccgaggctccaaggatatggtggtaaacaaaatggacacaaaatgccttctaaagcccagacaactaacgtacaaatacatctttagagcacaacccagtcgtaagttagggacttccagtactaactttggtcaactgtcaatgtctccaagagcgttgagggtctacatttttgcttagtgcttttggacagacattgagttagaggacaacatcagtcttggcatttaatagtagataacgtgaacacaagaattgtgtcttctcattaaagcagtagcccagtcatctacctagacaggcaataatagagtgggagttagatttagataaaagtgaac

SEQ ID NO: 166822 - DNA, 408 bp, Homo sapiens
tcaacatgggactaaatatgtcagaagttaattgggggaaatgcctctgaagaataaagggggaggaagcaggtggagtccaggagactgtacactactatgctgatctgacacctgtgaaagtggagcaggaaggcatgattgggcatgaagagcatcagatcacagcacagtcctgagaaagtctcagctaggccattggagagggacctagtccgagctgcccactgaatggacaagcactaacacacccactatgctcattcaccagttgagacaagactggtgaaagtgtgtcctcagcactcacagggcggcagctggaggctatcagccagccagactccctactgtgggctgtctttaagggtgatctgagtgggtcatctccatggctaacattttgct

SEQ ID NO: 166823 - DNA, 320 bp, Homo sapiens
atggcagagatagcatcaggtgcgtggcttcctggcttaccccgcacacagtgcatcctgatcaataaaaaggagggacctcctcccctcaccgtgcctgccagggtcgggaaggaatccacaaatctagccaatttcaacgatggtaaaagattcctttccaagtcctatctcaagacaactcccaagcctgaatttttacaactgctacccgggaacacagaaatcagagaaatgcgccaggccggcgtagaaggggcagaggaagatgttggcacccaggaaaggaaaagaaagtggatgggcagttctgtgagcag

SEQ ID NO: 166824 - DNA, 173 bp, Homo sapiens
agattgaagtgaatctcaggtctcctttgtgtgtttcccaggacaatcaataagggatgcttctgcatgataaaaatgtgatgatgaatgcatcagtaaaagtttaaatctgtgaaggtccctcaagctcgggccccctgcctatcttcctagtctttctctcaccttgtcat

SEQ ID NO: 166825 - DNA, 366 bp, Homo sapiens
ctattgatagacatttgaattgtttccagtttttgactactacaaatcaagctgttaggaacattttgtgtggaagtctttgtatggacagatgctttttcttttcttttgggtaaacacctaggtggaatggctgggtcagatgacaggttttccagagtagttgtattttacattcacatcagcgctgtatgagagttctagttttctatctcctcactaacacttggtgtggccagtgtttttcattttagccactctaaaattgctgttagttcattgtgattctaatttgcatttccctaatggctttttaaaattttgagatagggtcttactctgtcacccaggctgcagtggtgtgat

SEQ ID NO: 166826 - DNA, 351 bp, Homo sapiens
tacaggcatgagccactgcacctggcccatcctgtttatttttaaatccttagtcttcagtctccagctggatataaaacccatctttccccagctccagccacaactaactgtctacgattcaggggtcccggaacttggaaagggaaggaaattccctctttattttcactaatctctcacttaaatccagcgtctcctttaagtatgaatgtggacaacaaacctcagtagtttccatagtatctgtgagtttgtccctgacagcaatcacagatattctcctgtcacattacagttgttgcagagatcgagaaataccatttacacttgtcacacctttcaaattac

SEQ ID NO: 166827 - DNA, 227 bp, Homo sapiens
aggttacggacactatttacaaaaagatcttaatttgagaagtaaatatgtgtatgtgtgtctagaggaaatatactaaaacactggcagggatatcatctcttcaacgggtgttgccccggcccttcctccaaaccagttctaggcccagttttccatgctgaacatcagtcattctgtgtctggcccagcattcagtgccctttctgctgaaggcatcccattct

SEQ ID NO: 166828 - DNA, 487 bp, Homo sapiens
cgtacaaaagccatgattatttgaaaagaacttgttttctaaagatacaaggtaaattacaaatatatgttgatacttaatacttccaaatcaattaaacccttggaaagccatattgaagatataagcaaattccaaatagttgagttaaaatggggatacattttaggtgatcaagaatatgaatttttactactaattataaacatcggttaaatattactgtcttcaagttagttatactttaagtacatgtaaatttttaacatttcaatttatctagagaaaaatgaactatttgataggtatttctacacttagtggaaagtttgcttttcaaaaacccagtgatatttgatatcaatatcatatttttctagaaaacaatcgcaccataagatatctagtgaaatttagtggtactaagtcatctgatctagcctcctgagccttaatcaactgagatgaataattctaaaagaacaaa

SEQ ID NO: 166829 - DNA, 377 bp, Homo sapiens
caagctatccggttcaatcttattctacttttctacttaccattatatcacaagctttgcccccatgacttaaaggataaatggcattccataatatggacatgcaataatttacttagtcattacctgaatgggttttttgcaaattttgttatcataaataatattaccataagcatattataaatagatctttgaatgctttgaaaattatttccttcaaatcatttcctaaaagtagagttataggggataggtatagtagcattttaagtctcttgataagtatgaataaattgcttactaaaagactgtagcaattaatataacccccccacccccgagtagtatgttaaaccattgaaccggatagcttg

SEQ ID NO: 166830 - DNA, 467 bp, Homo sapiens
ccatgatattagtaaaatgacatcttttgatttgtttaaaagtttgaaaataagaacatactcaaagactatttttcttcacaaatccagtagtgttggcagattgaaaatgtgtaattataattattttccatttagacatgtattattttgatagcaatttctcagtaatatcaaatataattacccaactctagaaagtaatttcatttctccctacctagacatgtggctataatataaaaagaatgataaacattttgttttaatcaaaagtacaaattaggtattctagcttccaaaataattttcaagcatgtcaaaaaaattcatgtcaagtattagcttaattatttttaactttagtgtttagtgccttataggtaaagtggcttaattcacagaggctttgagatatttctgcataacttttactatttcaagatgtgaaaacaaagaatcccaag

SEQ ID NO: 166831 - DNA, 337 bp, Homo sapiens
ggcaggcttgtgtttgtgaaatatacgatctgatcatattctgaagcaccaggataagaggccatcccaggaacagctcagctatcacacagcccagtgaccacatatcaatagcttcacaaaatggtaacccaagaataatttcaggagctctgtagtaacgtgactgtaagtaggttgagcacacagctttggaaacgtgactagcagaaccaaagtcaatgaccttcactcggtagggctggcgaactggatcaaccagcatgatgttttcaggcttaaggtcagcgtggatcagaccaagactcttgagcttcatcaaggctgtggccacctg

SEQ ID NO: 166832 - DNA, 248 bp, Homo sapiens
caaatattgacaggggtgctgccatcctagctataggatgggggtctggcttccctttaataagagtagattcacctttatttcatttatatatcagcctgttgcaacattttggttggagaaaaggttctattttttaaaaaaggttaaaatcttttgattttaaatgtttaaaaatgttttattatggaaattataacaagtagagaaaacagtatagtgagatcataggtacctatcaacagctt

SEQ ID NO: 166833 - DNA, 217 bp, Homo sapiens
ggactttgatcttgccataatggtatgcctccatttaagaactaggtcagctgtctttcacaccagctgtgttcttcatgcttagggcaataacatgtataaagtaatgggtatttttctagtagggttaacacacttactcaggtttattcttttaacttgcctgcatccaaacatttttttttttttttcaagataaaaccagcctgtcaaactg

SEQ ID NO: 166834 - DNA, 354 bp, Homo sapiens
atcgtgatatatctgttcatacattaacagctttacttttcaggatctggattggaaggccccttatgggggcaaagccagacagatttgaatgtgtaaatctaggcatctttctgctgactgatggtccagtggagttgagactagagatagtgaaccatggtaaaaagcacatttggatgtccaggaggacagggaagctgttctgttttgttcattcctagttcctaaaaacaaggctgagtgtggtggcttgtgcctgtaatcccaagactttgggaggccaaggtggttggattacttaaggtcagcagtttgagaccaccctggccaacatagcgaaaccctatctct

SEQ ID NO: 166835 - DNA, 498 bp, Homo sapiens
aggtaagatttatgtataataaactgctctgtttcaaagtaaaaaatttgagggttttcagatatataaatctgtgaaactacttataaatctgtgaaactactataatgtcaagatacaaaacatttccaacacccccaaaagttgcctcatggcctcttataatcattttctgcttccagcctcagatagccattgaagtatcgtgttttcaatgttttttttatttttttaaaatcattttggagtagtttgcatttcgcggaatgttacaggaatggaatcatattgtgtgacttctttgggcataaggattttgagagccagttgtgtttcatgtatcgatagttcatcccctttttattgataagtattcccttgtatggatatgcatattcacaattttttcatattctttaaccttgttaaacaacattctggttgtttataagcttttggccattataaataaaagttttttcaacattgttgtatgag

SEQ ID NO: 166836 - DNA, 427 bp, Homo sapiens
tatttttgtatttttagtagagatggggtttcactatgttggccaggctggtcttgaactcctgacctcgtgatccccctgctgcagcctcccaaagtgctgggattacaggcgtgagccaccacacctggcccccttcaaatcttaacagagaagccaccaaagtctccttgggtccatcccatggatgggcctcctgggcccctcagaccctgggcttcccttgaggtcctggagctatgtgggctccagctctgggaaggtggacccccatgcatgtgtcctgccgtcactgtctctatgaagtctggctcacactaagtgagccataaggccttcttcaaggtcatctgtcccactgatttcagactcagggcggagtgtgaaatcatctgtcccccacagtgcactcagaaccctgtctgga

SEQ ID NO: 166837 - DNA, 271 bp, Homo sapiens
ggtagtagcagcaacagtaacagtattatataatgattggaaacccattttgatttcacaaaattatttttgaggacacaaggctttactagatactaaaaatctaacaggaattttggaacttctgactggaatgcctaatttaatctacctccatcttacaaaatgtaggaagagattttaagagaagagtgattttttaaaatgtggatctaacatattgagaaaattttaacctttttattaaaacaaaaaatacccaaatctattc

SEQ ID NO: 166838 - DNA, 256 bp, Homo sapiens
aaccaaaccagacccagaaaacctaaacctttgagaaacttaccagatactttctcacctaaagttacttttctgtgtaatttttcaggtacaacaatctgctgaaaattcatttcttaccccttgtacatttaactgataaacgtgatgaatttagaaagaaatgtgatgaatttagaaagaaagcatatcagttcttcattcagaaatgcagctatcttaggagaaaaatgtgtttcaaatgtccgcaagatat

SEQ ID NO: 166839 - DNA, 177 bp, Homo sapiens
aagcaggttaggggagagtaaagaggagcattgaccagagaaacaacatggaagatttgcctatagaatgggactcaccagcccattgtcgtgtgatttaacctgtacttattcaaggacagcttggacagttttgttttgtttgagacagggtctcctgtgttacccaggatggag

SEQ ID NO: 166840 - DNA, 499 bp, Homo sapiens
ggggtacatcactcccacctctgtgaaagcctctctcccagcgctcaaaagccacgaaacaggtccctcacataggctgatgagtggtgggcctgggacggtggtaggactccctccttgaccagacgttagaggtctggtcctctgagctctttctcactaggactcatccctgggcccttccttggcctgctgaagccagttgtagccaagagtcccgctacgttgattccccaccccttcacatctgattacccttgacagctgattaagttcctcacctgcacccctgatatctgatgaccttggcctgcctttagcaaggatcttcctgccttgatgtctcctcttagtaattttccatccactgaccccgcccctcccttggctcctcagctaaacatccccacttctgttgtatctggaactgaactcagttctatactgaagcctctccccttttgcaatagtattgaataaaatgtctttaccaccttta

SEQ ID NO: 166841 - DNA, 868 bp, Homo sapiens
tgtgccaccacgcctggctaatttctgtattcttagcagagacggggtttcaccatgctggtcaggctgttctcgaactcctgagctcaagcgatctgcctgcctcagcctcccaaagtgctgggattacatgcatgagctactgagcctggctgcttctatctcactttctctttgaaatgttctcagacaaccccctctcaccacaccctgtatgactagatgctcctttctctgtgttccttagccctgtgtaaattcctctatcttagcatgtgtccatcacatttgattgtgtcttagcctgtacatttctggacaataagggctttgcctcgttcattgctgtgtcctggcacttctcagtctctcacggaatgtgccttggataaatgagtgaagcaaagtcatcccttgatgattttatatccatgccatcatacactattctgaacatgcagttaaattaagaatggtttgaaattgagattagttccgtaagtcccatgattttatgtgcacacatttatacacacatatttaagattaaggcatgaaaataaattaccaaagggatttccccaggagtcagtgttttcagacctattgcctgaagccatctacagatcttacagctaagtttaactcctttacattatcactgttccacttcagcaaatccattttatataaacctttttctgataattatcaatgtagtacacatttatggtaaagatttagaagatgctaaaaagtatacataagaaggcaaaccccctccaaaatcccttgttccttagtcctttgtatttcttttagggaaatcactaagtttacatcctttgttagttttctgtttatagtg

SEQ ID NO: 166842 - DNA, 704 bp, Homo sapiens
tgggcccagcctccacagaccggggagaaggtatttcagggagatgggaacatcttataggggctggacaagagcactggggagttcataaggagagagctcccctggctggggaacaggggtcaaagattcactcactccacacagaggggcattccgcaaatattcctgagtgcctgggatgtgccaggccccatgccagctgtggcatggctcacgcctcccccggggctgcagcctcatgggaggggcccacagggacaagtaacaaagaaacaggtgacctggtcttgtgatccatgctctgaagaaaacactgggggaggtggaggggggtcctcaggtcaggcctgtgagaaggggggtgccccacagcgtcagtagagccaggaagctgtgacctggatctgaggttttctgaaagcataaaagtgccctagttttcccctctcctcaggctccgctgaagctatgccaagaattggcttttaaaggctgcctgaaatgtggtttggagccaaaaatctatagagccagcgcatttgtgaccttgttgaaaatgcttactgaggaaaaacaagggggtgggatttgggattttctttttcccttgtaaaatttaaaaatacatgtatctgtctggtctgtccccaccccttctctatcccgcctgcaggccctcaccttggcccgacagccccgac

SEQ ID NO: 166843 - DNA, 632 bp, Homo sapiens
gaggtgattagaggatcccccctcttcccagcccagctggggaacaggggtcaaagattcactcactccacacagaggggcattccgcaaatattcctgagtgcctgggatgtgccaggccccatgccagctgtggcatggctcacgcctcccccggggctgcagcctcatgggaggggcccacagggacaagtaacaaagaaacaggtgacctggtcttgtgatccatgctctgaagaaaacactgggggaggtggaggggggtcctcaggtcaggcctgtgagaaggggggtgccccacagcgtcagtagagccaggaagctgtgacctggatctgaggttttctgaaagcataaaagtgccctagttttcccctctcctcaggctccgctgaagctatgccaagaattggcttttaaaggctgcctgaaatgtggtttggagccaaaaatctatagagccagcgcatttgtgaccttgttgaaaatgcttactgaggaaaaacaagggggtgggatttgggattttctttttcccttgtaaaatttaaaaatacatgtatctgtctggtctgtccccaccccttctctatcccgcctgcaggccctcaccttggcccgacagccccgac

SEQ ID NO: 166844 - DNA, 599 bp, Homo sapiens
ggcaagcctgagaatatggcacctagacaccagttttccatttaggccaggcgcatggtggctcacacttgtaatcccatcactttggcaggtcgaagcgggaggattgcctgagctcaggagtttgagatcagcctggacagcatagtgagaccccatctctaccaaaaaataactggagataacactatcaacatcttgggtggttgtgagaattaaatggggaattttatgttagggacttagtgaggtgttgattacatagtgaacctattattcacagaaattcaatggatgttttgaggtgccctctacttgatgcaagcctcggcgaggtggcagtggtggcctctgtccccatggcacagatggtctgttctgctttggaagcactggaagagcacatctgacaattgaaccggatagcttgccgggcaagctatccggttcaatagtaaagaatagagagccccaaatagactcagtatatatagaaatctagtattgtgatgtctctcaaataaatggggacaagacagattattcatacatggtgctgtgaaagggaggggcacttgagaactactactggttcatgc

SEQ ID NO: 166845 - DNA, 447 bp, Homo sapiens
caacatcactaaaatgttgaaaacagagactagaagcccgaagtggtaagcttataacagaagtgacacctgtcctgctttttcattgacttgtttccgtgacctggagaactgagtttggaagatgcctccagtaacagaaaataagatatcagggcaacacaaaggttaggttggaacaggaagcaaaatcccaagccccctttgggcaagtaccctgctctagagaagcctcaggcacccaaatgttctgaatgttcccttccattaccattctcagaccctttggtctcaggaatcctcagcactcttaaagattactgaggaccagcagggcacagtggcttaggcctgtaatcccagcactttggaagaccaaggtggccagatcaccagaggtcgggagttcaagaccagcctgaccaacagggagaaaccttgtctcta

SEQ ID NO: 166846 - DNA, 247 bp, Homo sapiens
tcctgtgctccataagagataaggccttgcctccctggaaaaccaaagggcaggaaagacgcaaagcaccatacatttgggttcacctggcatatggtcaaatctttctttaaaccttaccatgtttttaatcactgcattttccccatcacactcactctttgcttcttcagacagcacaactcttctcaaaaaatatccctgatgactcagacttatttgagacttgagagactcctggagtcca

SEQ ID NO: 166847 - DNA, 376 bp, Homo sapiens
ggattcagagacaagaaatgctgttctagtttcagttctaccatcaagccatgtagccttgtgcaaatcacttcagcattttgattctctagtttgttatgctataaaatgtggacgatgacttgcccaatctgcctcagaggaatactttaattaaggtagggtccttaggccatcatcatcagcatcatctaggaacttgttagaaatgcaaattctccagccacatcctagacttacagaatcagaaactctggggactgtgggtagcaatttgtgttttaccaagccctccaggtgattctgatgcaagcttaagtttggagataagttcatgtgaaaccccttgtacaactacaaagtggaactgaaagag

SEQ ID NO: 166848 - DNA, 243 bp, Homo sapiens
ggattcagagacaagaaatgctgttctagtttcagttctaccatcaagccatgtagccttgtgcaaatcacttcagcattttgattctctagtttgttatgctataaaatgtggacgatgacttgcccaatctgcctcagaggaatactttaattaaggtagggtccttaggccatcatcatcagcatcatctaggaacttgttagaaatgctgtaagtgatttcgacaagctaatggcttga

SEQ ID NO: 166849 - DNA, 400 bp, Homo sapiens
  misc_feature (30)..(30): n is a, c, g, or t
agccgagatgatagccaatccaggacaganggattagaagtgtatctgatgacaaaaaatctgatggaagtgatatatttgacatgaaagtgaacattttcttagttgggtgtttataacttttttttggtaaattgtttttagtttttatccttattttacttgatgcttggcaatagatggtcttttttccccaaatcttcttctgaattccaaggaaacactgttttagcatttatttgattactttggttcattcttttctccactcccatttatttgttttccattttgtgacttctataaagcagataaaaatctggaacttctagatctgaccttcatgtcttgtcttttctatggtgcttattctttccatctcctgggattgggctatcaa

SEQ ID NO: 166850 - DNA, 409 bp, Homo sapiens
ctaatttcaaggttagagggcactttagagagttcatctgccaattaaagaactgaattccatctatataataaaagccaagtggtcttccagcttttgctggaacatctgcagggctgaggaacccacccattccattttcagaacgttctgaaattttattcttatattttacaaaaatctgcctccctaagacttctatccattggtcctaacccaatatcttgagttcccacataataagctagacaccctttacacatgacaattattcaaagagctgaagacagctatcatgtcccctgagtctttcatgtaccagaaatggtgaataataaacacactgcttttgacttaaagaaactgtagcacattctcagcaactgttagttaataaggagagtaaaaa

SEQ ID NO: 166851 - DNA, 321 bp, Homo sapiens
tacagcctgtgatcaactggtagtttctcccattagaatgccgggaatcactcatgtgtttttatcattagactacttggtgtcggctgggagtctttcccattggaatgccttgggtcgtccaggtgaatttattattagactgtctggtgtctgcgggagtctcttccattacaatgctttgagttgcactggtgtctcaatcgttagactgttgggttctgccaggagtgtctcccattacaatgccttgggtcaccctggtgtttttataattagatttcctggtgtcatctaggactctttcctattagaatgcct

SEQ ID NO: 166852 - DNA, 303 bp, Homo sapiens
agtctgcatcccacaattcagccataatgccatactctcatcccctgttcattgcccaggacctacagatggaagtatccaaaggcagatggacactccctaaacggatgaacttcccaacaactgcagttgccaatgttagaatgggtggcctcaggagagataaaattctccatcattaaagtgtccaagcagaaagcacctatctggacaggctgggaggatgttgtgggtctgaatgggagatggaatgaggtggtcaaaaagagtctgattttattaaatatgagaacaaagactgta

SEQ ID NO: 166853 - DNA, 340 bp, Homo sapiens
gctcaacagggttgtgaatgtcatgtaggatccataggattgtggctttgtggagtaggtaagatcacaggaaactgaatgtgtctgtgctaattgttatttatcatggttttgtgtgtacattccatgataactgaaaatggatcactatgtaagtgatgttaatgactgaagaactctgtgtgtctggtgtatttcattttgcttgcagaattatgacagtttctaataactaaaatatcacaagcattggaaactaggaggtaaaattataatttctagatgacagggttgcattacctggaaacatcatacaaactaaatccaatatgttgaaatg

SEQ ID NO: 166854 - DNA, 560 bp, Homo sapiens
tgcagtggcacgatctcggctcactgcatgctctgcctcccgggttcacaccattctcctgcctcagcctcccgagtagctgggactacaggtgcctgcccccacacctggctaattttttgtatttttagtagagatggggtttcaccatgttagccaggatggtctcgatctcctgacctcgtgatcccacccgcctcggccctccaaagtgctgggattacaggtgtgagcgaccacgcccggcctcataacctagtttttaagaataaacccattgcttgtctgggtcttaatgggcacccccagagtcctgtagtcagtgtctaagctgcacctatatgccctgaatttctcccatcctccccttcctgcctggactctcgtttcctccttcctcacccagtctgtggcgagccccttcccagtctcctgcctccatcatgtcctctctcaaacctttcttccacctgtctgcaagtggagcttctcttaggcccctccctgcctgaccgtctgtctcctcaccactggaacagtgagacaccagcacacacaca

SEQ ID NO: 166855 - DNA, 404 bp, Homo sapiens
gggaggctgaggcaggtcccttgaatcggggaggtggaggttgcagtgaacctagattgcgccactgcactccaccctgggtgacaagagtgaaactccgtctcaaaaataaaaaatacaaaaataaaaaataaataaaagcaaactgcctgtaaatatagggtcaggaggctcaaacacagtacatgaacttcaacgtaaagcccaaccccaacataaaattagggcatgttcatatgggactagcagcttccccaaggctgcagagacctaagaaagtcaggtccatctgctacagaagcccaggtaaaagaggcagaggagcaaaggctaacatggaggtggccagaccaaaatatgcaaagtcataagtagcatggagattggctctctaaacctcaatg

SEQ ID NO: 166856 - DNA, 492 bp, Homo sapiens
aggcaggagaattgcttgaacccaaaagatggaggctgcagtgagccgagattgcttcactgcactccagcctgggcaacagacacagactgtgtctcaaaaaaacaaaaaaagttccctttgtgcctcaccacaaaatgtagccacaatcctgactcctaacattgtacattaattctctctgtttggaactttttataaatagaattataccacatactcttttgtatgagagtcctgtcttgtgtgtagcagtattttattccttttcattgcttcattgctttagagtgtgaatataccacaaattatgtattcattctacagttgataaaattatgggttgtttccaatattttgaatattattactaatgctattgtgagcattgttaagtatgtcttttaatgtatgtgtacattcatttttcttatgcattcctttctaggagtgaaattgttgggtaatagggcatctctgtgttccaatttg

SEQ ID NO: 166857 - DNA, 423 bp, Homo sapiens
ctcaggaatgtacatctaattgacactacattgcattaatcaatagctgcactttttgcaaactgtggctatgacagtcctgaacaagaagggtttcctgtttaagctgcagtaacttttctgactatggatcatcgttccttctgtggcagatttttacagttcctctaatgcatttgggacgactgtctcaaagtaacctgcagctttcctgacaactcctcgctctctctcctgctaagaactgtagcccttttctgctgtttttagaaccttctgctaccatatccaccacttccccatccagatcgcatcccaggcgcgcgatgcccgggcccgcgagcgcgaggctggcaggccaggggtcctgcaggcgccccccggctccccgcggcctctggaccggcccgagggcctgcgcga

SEQ ID NO: 166858 - DNA, 376 bp, Homo sapiens
tgattcccattttataaatgagcaattggaagcttagaatcaccaaataattttcccaacatagcaaagaatccagctctggctgactccacactcacagcaactacaccacttcgcttctgccgaagcaatcctacttgcactcctccttttggattgctgagaagcatcactatctaattaccataaagccccctcctctccatgcctgctatctttgtcctggtttgagacctctttatccctcccatccctaccttcagtctatcctgcacaggactgacaaagtcatcttccagaatcacaagcatgactacatcagtattctacttaaaatccttcagtaagtattctctctaccagtcgagatgctcga

SEQ ID NO: 166859 - DNA, 387 bp, Homo sapiens
atgggtgatgcaaaggttcgaaattagattttggtgatgcttgcacaagtctataaatgaatgaataaaagtcattgaattatacacttacaacaggcgaatttaattgcatgtgaattatacctaaacaaagctgtttaaagaaatatttaagattggctggaagcaggaaaaggaagggacgtcttgacaaaatgatttaagttcattgatcagatggggccccactgattatttgctatgtcattattcttcaccttggaagcttataatcccaaagccttaccctgtgtcctaccccactacagagtataatagcaacttcttgtttgggaggtgactcaagtgtttggagttgctactgatggacctagagtgaatgatatt

SEQ ID NO: 166860 - DNA, 409 bp, Homo sapiens
atttattattcctataagaataataaaaactggcctgaattatactactctaggaccctaaaaccttaaacacaacttcccactgtttctgcaggctttgaagttacagattgaattttaatttttaaagtgagaattttgcaaaactgagaattctacatatggatttcagtaattcttttgccactgtctgatttattgatatttactgcatttaggtaagtgtaagatgaaataataggtaaattaagaaaaaaataaaataatttcagccaaataaaattcaaggttgtgaaaacattatttctttccattatcagttatttgaaaaaatattatttctggcactggttcatgaaatacttgatttcaactaccaactagaagtacactatatttaagtaaaaaa

SEQ ID NO: 166861 - DNA, 502 bp, Homo sapiens
tctctttatcagctaggggcgatggagattgggaaaatggagcccaaagtccaatgtgaccacagggttttgggggaatcataacctaaatattacagctaacaccgcctcagccatcttgatgatcaattctatttaggtaaggaggaaatcataaagtcttagtgcaggctctgtgttaaacgtgttatttaaatgaactacaattttggggtgggtgtttgctgtgtggtctccattttagagaaaactgaggcttagagagaaaggaaaacttgcccaagatcactgagggagaggatgatgcaaacccaagtctatctatcactgatatcagcgccttggacctgtggaattctgaatttccatctgcccctgtgtctggtttgccgctgttgttttgcattgctaattcaatcttattaaattattagatgctgcattctcatgtttttcccttacgtttgtctcccaattaagtaacctcctacagaaatttgga

SEQ ID NO: 166862 - DNA, 328 bp, Homo sapiens
attctctagcatctaaaacattgaaaggagcaggcttgatttatttcttttcaatagaatgtttaccaaatatatgttgtccaataacaattccatcaagaaaattctggcagcaagccaccagaaaacctaactacattggctgaagagattcatttcattaaaactattgattgcccatttctctgaagtacttacattgaatttgtcatatcagacaaatgtggtttaaaaatagtcactgacaaagacagtagagtttgtgtatataatatatatttgtagcagacgtgcagaactttaaaatataaattcttagaaattgagg

SEQ ID NO: 166863 - DNA, 509 bp, Homo sapiens
aataataataataaagaaaagtaaaaggggattgtctttagagagttcctgtagagcttggtggctggaggagagtagaggggaattcctaattttcatgatccttttatttgctttcagttttgtttttgttttttaactacgtgtgagaagtggttctttgtaggaaagaggggagggtgggctctcagatcacattacatacccaggtgtccactgatacccacctgtaaggttttgggaagacaagatccaagagggagaaatagtgaatcaagcatgcggattgaagctctcattctgctgctcctaggggcatgacctctgcaggtaatgaaaatgggaagaataatagtcttacctctcaggttgttctaaggaagcagagaaattataaagtatttcataacggcaaaacaatattaaaaagcaaggtatttattagcaaacatttattgaacatttactatactccaggcactgaattaaaatggtaattatttcaatac

SEQ ID NO: 166864 - DNA, 510 bp, Homo sapiens
agtcaatagagtagaataatagaggcatgcaggggatactatgtgaacaccatgaaccctaagaaaagctacctaatccataagacattgtgggatgggggtagttggtcaatttatcagaactgatgatactggactgaatcttgagtattagtagaagttaactggctgtaggcagaagaagctacatgggtaaaggcagagccccaaaaaacagagtgctgggggatctgcaaacatctcagcttaggtggaagtagcatgggatgaaagtctaggcgtgtaagaggagccatgacaaggagtttggatgtgattcttagtatgctgagaatccatggagagatttatacaggaagtggcaagatcagatttgcattttagaaagaaccctctaaatgcagaactgaaaagggactgaagggaggcaagatttgaagaaagggaggctgttgcattaatccacataacactactactagagcctgaactaaggaagcagcagtaggg

SEQ ID NO: 166865 - DNA, 390 bp, Homo sapiens
cttgtagtcccaactacttgggaggctgagggaggagaattgcttgagccgagatcgcaccattgcactccagcctggtcgatgagagtgaaaccctgtctcaaaaaaaagaaaaaagaaagaaaagtaaaaaatactgagtaggttgaaatgctaatattttgggttagtaaataaaaatattatttaaatgattttttttaaatgtgacttagaaaacttaaaattacatatgtggctaatttttcttgtgggtagggttgtctattctatattcttaatagtaattttttgttttcttattatattgattacttagagttgttaaactctccaaatgtggccaggcatggtggctcatgcctgtaatcccagcactttgggagggcg

SEQ ID NO: 166866 - DNA, 856 bp, Homo sapiens
aaaacactggccagcgttctcagttggcgtaccttgcattctttcagcattgcactgtggttctagaccccggtctgacgcagtgtcgggcagccctaccgcgtgttcgagtgctgctcttcggtagcacttggtctagcagaatataccgagtcctgtctgcagaaccttgacaagtcttggaaagcggtctcagaatgcttactcacacacatctgggacatttccaatttaataaatgtcacggaaaaagtttggcagattgtttaattacatgtaaaagctgcttgtggctttccttgctaatatgagcctgaaaaatgctaactacaattgttatgaaatcagggaaagcttgtgcataccctaaggtttttctggagaattgcttacctgtgaactctaaagccattcctgagcggtgccaagtgtgatattgtagcataagaagagatgtacatttggtctgtgccctggcccctggcacagagcttctcaaactcctggactctctggagtactgagagtgtccttatgtgctgatcaggtgactggtgactggctaccccctaggtagcctcaaggtaaggactggtaactggaggcctggcacggtggctcatgcctataatcccagcactctgggaggctgaggcaggcggatcacttgaggtcaggagttcaggagcagcctggccaacatggtgaaaccccgtctctactaaaaatacaaaaattagccaggcgtggtggtgtgtgcctgtaatcccagctactccggaggctgaggcaggagaatcacttgaacccaggaggcggaggttgcggtgagctgagatcgcgccactgcactcca

SEQ ID NO: 166867 - DNA, 316 bp, Homo sapiens
ttaaagtgattcatagaacagggtaaaatcggccaggctcagtgacacatgcctgtaatcccagcactttgagaagcccaggtgagaagattgcttgaacccaggagttcaagaccagcctgggcaacatagtgcgaccctgtctctacaaaagatataaaaattatccaggtatggttgtgcatgcctgcagtcatagctaatggggaggtggaggtgggaggatcgcttgagacagggaggcagagattgcagtgagccaagatcaccactgtactccaacctgggcaacagagcgtgactgtctcaaaaaaaa

SEQ ID NO: 166868 - DNA, 426 bp, Homo sapiens
cagctcagtgaggactttggactggcataaatcataggaatatgattatgaggatacatccaattttcagattgggcaatgtatacagtttattatcatttctgattttgagtagagttagtactaagaacagcattgaagaaaagcagtataacattaaaattaagaagatttaaaatacaagaggattcataacagtcacttttaaaatattgttttggctttctactttggagctgtaattttaaaaaaccaatgaacaggtttttgtatgaatatgttagaatgactaattatagagcatctttcaactggaatacatgtagatactaacacctggttgtatttgatgtaatttcagtgcatacagtgtgtgtaatctgtattaagtgaaatacttatgaataaagttgtttctgcattgca

SEQ ID NO: 166869 - DNA, 313 bp, Homo sapiens
atctgagtggttacagatctcacaacagtgttccgttggctgcgtgacaggttacaccaggattccgagggtcagctggctgcagtaactaccacaggctacactgtcgtgggtttagaaccccctaaagttttgaactgatgacttttggaatgtcactggtagtgtgtctccctaaggatcttgagcaaacacttccctttaaaccctgcccgtctgctttccaagactcaaaagcagggttcacgaactatgccaggaatagtgtgagcgtaaccagcctaccaggacacaagtagaccagtcactaaat

SEQ ID NO: 166870 - DNA, 318 bp, Homo sapiens
cttgattacttctgcaagatggggagggtatgctagaaaggttacaaagactgtaggaagcaaggtaaaaaggtgagagagtttaggaacatgggatcatctgtgttgcacctttctgaagacttgggcagcacaaggcaccttttcttgcgcagtgcaaggaagcaaaatagcacagcatcatatttccattctcatgtgcctctacaaaattgggcagttacctgaactcatcaataaagaatcgtgaattttatgaatgtatcttggagtcgttgagtggggtagcaattgagaaaccacagtgttatttgtcat

SEQ ID NO: 166871 - DNA, 220 bp, Homo sapiens
cccagaaggaatggaggagaggaaacactagagcttcttcccatcctcactgaccaaggaaagctgttcttccttctgatgcctctgttttaacagctgtagaatggaggtaaatactaaaaatacaaaaaactagctgggcatggtggtgcacacctgtagtcccacccacttgggaggctgtggtgagaggatcacctgagcctgggaagtcgaggct

SEQ ID NO: 166872 - DNA, 364 bp, Homo sapiens
cagaacatgagggaacagagatgggatggcataagagaaggccagaaagataggaaggtgccatgttgggaagggcttgactttcaggcttgtgaagtgagggtgttttgtgtctctactggggaacatttgaaggcttggagcacggagaggcatggagtgtgggagtgggatttgaagtataatgaagtataaagcgttgagcgccacacattcagtttctttatctgtaaaatggagaccaccccccgccacgctgaacggtgattctgtgactggtaagagatgctacatttttggtgcttgttcaggtcgaggaaagatgatagttaacactcaggtaataagtattttgaaggcagta

SEQ ID NO: 166873 - DNA, 88 bp, Homo sapiens
attttatgtaatagtatttatttgtatattacattttattttggaaaatagaggtaacatgtttatttaaatatatttacctgtaatt

SEQ ID NO: 166874 - DNA, 354 bp, Homo sapiens
agcaatgctttctggtccctggttttgtgcagaggctcagagacatatctctgcctcagttcagcctgaagtctcatctcctctcttagtctccagttcctataatcaagtccaatatcctgtgacgtgttcattttcagcttccatcaattactccagtttgagttttatcttcactttgagctcttggagatttttctttccttgcttttaagcttggctttgtatttgaagagttttttgttgtattgtatccaatatttttatttgtttgggctggggatgggcagagtggacagtccgtctgtgccagctcagtccaccatatggaccgggcatctgaacatccacatt

SEQ ID NO: 166875 - DNA, 562 bp, Homo sapiens
tgtgaggagtgaagatgagatttggcgcatctttcaacggagtctgagcaaagctaaagggctccgattcgtgcaagccaagggctgcccctcctatcctgtcctccttgaggacctgtgctaaggctttctcatccaccaggccaccacgggctgcgttcacaaggaatgctccctgtctcatctgctttatagtaaagtcattgacgaggtggtggttatgttcattgagattgcagtgcaacgaggacacagtcactctgatacagcaaaccctgcagggtgtatcagggtcccctctgcatgccctgggacctctctatcttgtcctacaagtaggggtcataaaatacgacgctgaatccaaaggccttggctcaaactgcaaccgcctgcctcatgcaaccgaagcccatgaggcctagcgtcttccacgaatgagggccactcccatggccacctcgagaatctgctccacgctctgaacccgcgcgccttcccacagtgtctggtacagccacatattcctccggcagagattgaggatgtggcagatagtgga

SEQ ID NO: 166876 - DNA, 666 bp, Homo sapiens
tgccagacataaaactggaagagccccaattgccaagtaagtcctctctggacagtcattttttcacatgtaaattttgccaagtaagtgcagactggaaaaaagtctgaaaaagagaaacagatttacagtcgtgaaatatcacaattttgaagtctcactgtcttgcttcttatggtcttgcaacctcacagtcacaaattcctgtggtctgaggtcttaaagtatttcattggttggagagaaaccaatcaaattttgatgaactaaaacatacttacgtataactatatacatatacattaataagtgtatatattcttatataagaatatgtgtgtgtatatattactctatacgtgtgtgtgtgtgtgtgtgtgtgtgtgtgtgtacaaatcaatggttaagttgtttagtggcatgattactttggtggggccttagaatttaagcaccaaaagtctaataagacttctattttctttcagcctaggatccaatttcctgtgttgccacagggctgatatctttgatctattaaaatctgcattggtataggtaggtggcaggtatggttggattctgttcaactgtgtctttaatcactttgaatataaggcaaggctttctctctaggagggcgtaaggacagagcgtcatcaaact

SEQ ID NO: 166877 - DNA, 367 bp, Homo sapiens
ctgcagttgagagtggaaatcatattagctttattcacaaatccgtttactaaacattatggaatgtacataccctctgacaagaactggaatgtacataccctctgacaagaactgtagtaacactaggttggatgattatggtggggtgagttaatgagatgcaagggtagcagtgtagggatggacatcatcatgtcagatacaaatatttggtggctttatacaaaagaaatgtgagagatgcaagattatccattaaaataaaagcaaaacatcttgagaacctaaattatatggctatcattcattgagaacttcctaggttctgattaaggacttaacatacatttcctcgtttaacctt

SEQ ID NO: 166878 - DNA, 470 bp, Homo sapiens
tcattcaaagcgtaacccaaacgctttcagctagacagaaataagattcaagcctaacacttgctgagtctccatttcctcatcaggaagataagaatgccacccacctccttcatgcaatgatagggaaacgcaagtaacaggagggcgcttaacagtttgccagacatgtggcccacgctcgctcactcctggacaggatagggctgtgtcttatcttttctaatgccatgcactacctagcacagagcctaagtgtgtaattatttgctaaattttagcgacaaaaggtcaacagacagtaagtggcagaacaagtccttgaatcaacactttcagatcaaagtgttttccgcaacaccaggctgcctctctggtggtttgaaaatactttttaaaaatcccattgacagaacttggacctacctataaaatcaatgtaagcaaataaaatactttgtttagtcctt

SEQ ID NO: 166879 - DNA, 259 bp, Homo sapiens
ccaaaaagtagaattgctgaatcatatgataatatgattttgtattttttgaggaaccactatactgttttccatagcagctgtaccatttttatataaccaccaacagtgcacaagggatcttatttttctacattcttaccaacaattgttatttactatttgtttttctcaacatagcttacccatatcctaatgggtaaaaagtggtgaacaataatttctgaatgaataaatgagtgcttaacaattaaaatga

SEQ ID NO: 166880 - DNA, 248 bp, Homo sapiens
tatcatgatgttcaaattgcctcaaatcactaactgcatggacagcatgttatttcatttgccattggaaatatcataattttaaaacttgggggcttgagattgtgcattaatttttgaaaaatcagtattacttattcaccataaattaaagaggcatatggaacgaaggtcaaaattactgattcattagaaataaaaaacaaaaaccactcaccacacaatttctcaacttatctaaaatgctc

SEQ ID NO: 166881 - DNA, 423 bp, Homo sapiens
ttcctaccttgtggggttgttgtaaagattaaatgagctaacaactggcaatatttagtttgtagaactcagtcctggaaaatggtggggagaagtagtgaagaaaaaaaggcacaaattgggcttcctggtaggtttggtggctctgtggttttagagttttttatttgtttgttcttaccatttctctactcttcagtgcctgtgtgacctcagatgtgccactgaggtggggatctgagcatggacaccagagacgccctacatcttgcggttccctctggctggaatgttctttcctccagatagcctcatgcagtgaaccccaacttcctttaagccttgacttagaagccaccttcccctgaggccttccctggccactccccaccttctaaaacttcctatctcccgaccctactt

SEQ ID NO: 166882 - DNA, 418 bp, Homo sapiens
agaatttgcattaaccaaaaaatgtgcaaacacactactatgatttaccaaaagactctctgcaagtggtaaatcattagctctagtgttgctctttgtaacctcaggtctttggggaatggtgcagaattagtattgcttccttctttctgtgtgtgataatggtgggggaaggctagtaccatctctgtcatacatcaaattcccatatgtgaataaatttatgtatttttactgcactctttttataggtttattcattcctgcaccaacaacgaatgccattattataactttatagaaagtctcaatatatggcacagtgcttcattttctttttttcatctagagtgccttagccattcttggctttctgctgttccacaaatagcaatgtaaatttgtcagtataatagag

SEQ ID NO: 166883 - DNA, 489 bp, Homo sapiens
tgtgcaagaagtcaagcatcattatgatttgtgattaaagttacatatatcacatatcatggatatttttattccaaaagaattattacatacagtacttgtcaaaaactgatagacctatagatactcgtgtagcctttcctacacttccagtgaccagaaagcttattggagagttttactgataaagatcttccttttatagtttctaaaattgtttcctgtaacttcaacctatttgtctggctggactgataaagattaaattttttttttccacaagtcagcctttttaaaaatcagcataatctttgcaaatagtctccatgttaaatattcttagtcctggctgggcacggtgcctaatgcctgtaatcccagcactttgggaggcccaggcgggtggatggcttgaggtcaggagtttgaggttgcagtgagctctgatgcctgggtgacagagtaagaccctatcttaaaaatacaact

SEQ ID NO: 166884 - DNA, 119 bp, Homo sapiens
acactgacaacaactttaagcttaagttatcaaataaggactctcctaaccctgagcttgcataataatccattttttaaagtgtgtaatttagtaaccttccaatttcttgaccacaa

SEQ ID NO: 166885 - DNA, 328 bp, Homo sapiens
atttaatgttgaggaaatgaataaaaaaaagaagagaagagatagtacattctaactttcacctatttgtttattcatttacttaacaaacattgattgagtttgtactatgtctcatttagcatgtcaaagctctgggaataaaagatgactgaaacaggattcttttccctaggaaggtcacagtctgatagaggaggtaaaaacacatccagtcaactataacacaatgtgatatattaagcttttactctgccaccattatatttaatgtactgagggaagacaaatgagtgaacaactaattatattggggaaagtatttggg

SEQ ID NO: 166886 - DNA, 602 bp, Homo sapiens
attgggtgcttaacaatatgctgtatagcctcttattctgaagagtggttaccaccaagaatatccagattgcatctcctaaaatgacagtatttacttcatagggctggtgtaagaattacatgagatgtggcaaaaatcttagcagagttcctgacgtacagcatgtgctccacaggtgtcagctggtagtattactatttttactgtctgttcaagagagcagctagactgagactagactcttagtattgatttcaagttatctttgaagggattcagattggcaagcacaagagtcagacccaatcctgagccctcaactgtttgcaggaaggaataatctcttgtgtcagatgcagcttgctggggcttcaccttgtgaattagggacagggggagaagtgttggaaggcagcctaccatctcaagtgatgcaaattataatctatcaaaggaatgaatgaacgttggtctggcaacaaatatcaccatcccattttatttactaaacttactaaaccactttagcaagttaaaagtagcactgaaggcagatttacatattctgagctctgaagtgaggcttttcttttatgggc

SEQ ID NO: 166887 - DNA, 389 bp, Homo sapiens
gtacattagaactttgattcatgtgacgcctatcatgccatataaatgaaaattcagagtttagattaagaacagtaaagctttctctgttgtaccttaaaaggtacttccctcctcctcataataataagctacatgcttctggaagttttaccaagacttgagatcaggagggagcattctgacgctgagcacacctctgactttgcacatggtggtttcgaggggttgacagcagaagatctccagagtctagtaacagttctgtcttactgttcaaatttgccttttctacctcaatttctcctccattttaacagaaaacctactactactacttcatatgtatctaaaatatttcaaaatctttagtaatgggatataagcac

SEQ ID NO: 166888 - DNA, 463 bp, Homo sapiens
aagtaacatgatacgactcgagttagtacccggagtagtccactatcgctgatcattagagaaatgcaaatcaaaaccacaatggcataccatctcacaccagtcagaatggttattattaaaaagtcaacgccgggcatggtgttcgtgcatcaggtacggccaccagaggttggcacccagcaccttcagctggccctgggtcccagcctggttgtccacgactttgttgtctgatttcaaaagacacacttccaacttgaactggttactgcacttgacggagatatggtaattcaccagccctgcaggaggcaagagagaccagggcttagggagggacatgacctgggtcacacgaacaggaatgccccacaatgaccactcccaggcactctcatttgcttctgttgctttttttttttttttttgggagatagaatctcgctctgtctcacccagg

SEQ ID NO: 166889 - DNA, 136 bp, Homo sapiens
gcccagagcccttcattttctttctttaatctctctgacacagcaagaagcagccaacccacttacagtttctgcccatcacactgtgatatggcagtcaccactgggtccacaaaaaggcatttttttctaaact

SEQ ID NO: 166890 - DNA, 383 bp, Homo sapiens
ttttctgacctggacattttaattttgacaaaagctctaacatatctaaaacatttttccctgcagagttcctacttttataaacactggaagcacatttttcctaccttaaggcaaaaactcaaatgacaaaccaaaacataagccttccaaacccagcaaatggctaaatttatcaatgttctctgagtttatgtgaagtattaagttgaaccttaattggtgtgttttgtttatttttcttgctttatttgcctctttctaaaagaaatgtatcacagaacaaagaattgtatctccaaagttctacgcggttgagtatatttcttggagaaaactccacggtgatcaaactaagaatccactctattttgggactaggt

SEQ ID NO: 166891 - DNA, 328 bp, Homo sapiens
agtgtgctcttcactctgtcaccaactctgtgtcattatgtgcaactcatttgactccttgagctctcagattactcatctgtttttaattaattaattaatggtttctgagcaaggccttgttctgtcacctgttctggagtgctgtggcactatcacagctcactgcagactggacctcctgggctcaagtgatcctccttcctcagctacttgggaggctgaggcgggagaatcgcttgaaccctggagacggaggttgtagtaagccaggatcgtgccactgcactctagactggcgacagagcgagactccatctcaaaaaaa

SEQ ID NO: 166892 - DNA, 399 bp, Homo sapiens
ggtcttcattttggggtatttgctgagtcccaacatcattccgactaaatctgttgaagcaaggttgagaagagccagcccacttatccttagtgcaaaaaactcccaagtgcaaaaatattacttatcacatagatcacgaaatcctcagagaaaaagtcttctctgttattagttccaaaagtaagtctatgtcctctaaataactggtttgtttcagctaatgaacacagtatattgcatagacgacccttctcacataggctactagagagctgagccaaatttatgctttgctgtgcttttttttactttacatctggctccacttctatactccaattttttttcttgatttatcttctgtcatttataataaatattacgtgttttgttgga

SEQ ID NO: 166893 - DNA, 400 bp, Homo sapiens
ctggctggcttccaattccgagctggtttccacagaggagccagttataggattcactctcagccctctgggaacaaagctcaccttttatttttggaatttcctgaaatgaagtggaatggagggactgactgccttcattttcagcttatgcttttaactacagtggtagttggcagtttttgtcaaggatgtgctttgagaaaagccaaggagccttcattcactcctgggacacaattcaatgctgatactagccatctacagccaaggagcccagaagttgtcatgtagagttccctaatgctgactagttttgacaaacacatggacaaactgcattatggattaagatttacctgtgagatcactttagtctgtccgagagaccttcccaacc

SEQ ID NO: 166894 - DNA, 188 bp, Homo sapiens
aagcaaattctctacctggctccccaggaataaaactgagagaatcaatctttctatgtatgcatcagccccctaatccacagaggacattttaaagtctccatattctagctactatttcattacttatttgattgaaggctgtcaatcaagaattttacaaccagaaaagctacctataaaaaata

SEQ ID NO: 166895 - DNA, 543 bp, Homo sapiens
gggtgagaggaaggagagaaagctggagagttaagtagggccagatcatagaggccttgtaaccatagtagagtcagacttctattctaagtgtaatgggaagcagggagtgacatcatccaattagtactttttagaagatcactctagctactgtgtgaatggattacatagggcaatcatggcaatagggggaccagtgaggaggctgttaggtgagaaaattggtgcccacatcatttgtcatccagaccaagatagttgtgcaggtaaacaggggtgctacaaataattaagcagggacaacaggcataaccagatggtctctggcaaagtgggacatagggacactctggatatgatagattagggcagtagttttcaaggtgttgttcctagatcaatagcatcagcatcacctgagaacttgttagaaatgcaaattctcaggcccctgccccagacctttgaatcagcaacttgggatgagcccagtggtatatgttttaacgatcccgctaggggatgcaggctaaagtttga

SEQ ID NO: 166896 - DNA, 271 bp, Homo sapiens
aagaaaaagattgctaattccagaagatgacgcacgatacggagaagcatgtaaaattagtgtgctgttggcctctacactgagaagagcactggttctaagatgttattctctatttactttcagaatttcggttacggagtatcatcctctttatttagggctggaagagatgtttattgaatttttcatactacttaaatctgaactagctcgcaaacggtgttgataaaatcaaacatgctattagccttgatgtctatacaggtgg

SEQ ID NO: 166897 - DNA, 365 bp, Homo sapiens
gaccagagtcacgttttccagcggggaagggtgtaaactcagcgacggccgcccaagcacccacgggtccctcgcaggaccagagtcacgttttccagcggggaagggtgtaaactcagcgacggctgcccgagcacccacgggtccctcgcaggaccagagtcacgttttccagcggggaagggtgtaaactcagcgacggctgcccgagcacccacgggtccctcgcaggactggcgccacgtttagacagggctctgcgaggactcacccctctgccccttaggaacctggccatgggacagtcacgggggaggccttccacagcctttccaaggacacctgaggccacctaataggctcga

SEQ ID NO: 166898 - DNA, 515 bp, Homo sapiens
aattttcctaacggctaatgacgttaaatgttgtcatggacatttctgtcatttgtatattccctttggtaaatgtctgttcatatctctaccccattttctaactggatttttctttactgttgagatttaaaagatctttacgtattctagatatgtcttttgtcaaatatgttgttttataaagattttctcccagtctgtagcttgtctttcatccttttataggatgttcaaagcaaaacctaaattttcatttagttcaatatatcacttttcccttttaaggacagtgttttgtgtcaaggctttaaaactctttgtttaatgtttaaatgaaaaatcttaagacttttccaaaaatactagtagagcactttggccacctaagtaagtaaccttaatttattccatctgctgggaatatacttttgatccagctattgtttcataaactagtgtgttttatattatagtacctagcacatggctacagttttcaaatgaaagctaag

SEQ ID NO: 166899 - DNA, 535 bp, Homo sapiens
tcctactcactggctgcatgggagacatggtgggagtgagactggcctttcaggctgtgtgggagttgggcgaggccggtcactgctggcttttccccactcccctggtggcctgtataatgcagtaaagtcagccataatatccctgggaacataactccatcagcctgagaactacacccccatcccctacagcagccacacacagcaagctccgcccaaggagagcctgagctcagacatgcctaaccctgccccaactgagggtctttctctaccaatcctggtagctgaagacaaaggacatactctcttgggggctctatagcccccaaacttcagcatcctttatgattaaaacctcagcaacacaggcatagaaggggcatatcttaatgtaataaaagccatctatgacaaacgcatggccaacattacactgaatagagaaaagctgaaagcattccctctgagaactggaacaagacaaggatgcccagtcacaccagtcctgttcaacatagtactggaagtc

SEQ ID NO: 166900 - DNA, 341 bp, Homo sapiens
aaaatggatattttagaatgagactgattttatgttacaacttttatatttgttttcatttgagtaatagagataataagaccaaattaagttttttgaactccttatgtgcatagcaccccctaatacatgtatgaggccatttagtagttattgtaaactttagtattaaatattccatagaacaaagagcttaactaagcttataggtattttttcatactgtgggggcactaatgattaatggaggtggcattaatttagtcatggaattgtggactgttttatcatggtcaactacttcagagtttggtatgtagcttttaggactgatacaccta

SEQ ID NO: 166901 - DNA, 323 bp, Homo sapiens
gatgagccactgcacctagccatatatttatgttataatcccaacaatactgttttatacttaattattttacgtaattgtcttataaggtaattaagaatacatatatacctttccctacaagatgatcttttctggtattcattatttctgtagactcaagtaactggtgtaatttctttctaacctaaaagattttcttcagcatttcttataaaggcagctctaccagcagctattctttcagtctttttgtcattggtttattttgtttttaaatatgtggatgtctattttgccttcatgccttcatttttgaaggt

SEQ ID NO: 166902 - DNA, 392 bp, Homo sapiens
ttttagggcaagggttttgctgattgctgggaggagttcaaggtctgaagagtctaactctttcagagacattgagattttaataccacacatctgtcagtgttataaccatgtttttgacttgtgtagtaagtttattggttaaaaacaaggactctttattttttgtggagacggaggtctcacttatattgcccaggctggtcctgaactcacgggctcaaaaaatcctcccacctcagcctccttgggattacagatgtgagctgctgcacctgaataactggggggctgaagtgggaggtttgcttgagcctgggaggttgaggctgtagtgagccatgattgtgccactgcactccaatctgggtgacagagcaagaccttgtctc

SEQ ID NO: 166903 - DNA, 652 bp, Homo sapiens
tgtatcatggaaaatattagagatacagtgttagcagacagtgtgggaaagccaggctttccctgtgcagccttctgtgagctatcaaggttgtacttcttataccctgcaattagaagactggggccaggtgcagtgactcacgcctgtaattctcagcctcctaagtagctgggattacaggcacgtgccaccacacccggctaatttttgtatttttaatggagatggggtttcaccatgttgtccaggcaggtcttgaactcctgaccttgtgacctgcctgcttcggcctcccaaagtgaggcgtgagctaccgtgcctggccagcaggattatttttaagttactgtgtggttagtgatttcggccttcccagaagctctggaaatggactatacttctactgtatatatttgcactagctttgctttactccagaggtataaggttgctggagtaccagttttattcaattcaatgagtagggacaatacagttaggcctactgtgggaaccaagtgaaagtttaagacataattcctaccttcaaggacactccaaatttcctaggagaaatacgatttatgaatatgaagcaataagcaaatgaagcaaggtagcatgtgaaaaagtggcataatgtgactgg

SEQ ID NO: 166904 - DNA, 387 bp, Homo sapiens
actctacaggatctcgacggcttcaacggaactttatttgaaaaaggattgataataatgcatggttacaggtgactttttttaaaaacttcttattctgaaatactgtcccataggacaagggggaactgtacagaaaggtttcctgtaacctttacccagtttctcccaaatgctaacaccctgtataactctagcacaatatcaaacccaagaaatcgacagtggtgcaatccatatactttatagtccccccacccctgccccatcggcattttcaattacttgtggtcaagcccagtctgagaatattaaatggaaaataacagaaaaaataaacaattcctaagttgtaaattttgtgttgttctaagtagcatgatgaaa

SEQ ID NO: 166905 - DNA, 681 bp, Homo sapiens
cgggaagctgtttcgcctggaggctcgcgcgctttttggaattcagttatcaagctttagagcctggctactcacagttgaagcctgattgcagggttcttttaactcttctctccacacccgcactggagaccactggtaaccatctgtggccatcacctaaactctcacccagtagagatggggtttcaccatgttagccaggatggtctcgatctcctgacctcatgatctgcccgcctcagcctcccaagtgctgggattacaggcgtgagccacaatgcccggcccacgttttgctgttaataatgatggtgctgaagactatggctttgatgactagttctgctttaagaaaacattccgttgatttgtacaaatagcacaagaggacaccaactccatgcagatggcagcccagcaggtcacaccagtccttctgtcctcacactggcagacagaggcctcctctctggagtcttcacaggggcctgagctagagctggaaatgcagctggagctgcagccaaagctggggctgcagggccttgatttgagacttggccttggtcttgggtgggcagaggtaagacccttggcaatgcaggcaggagcacgcttcccgagcttggggtaggcaatgtaggcaagtcaattgagcttctggatgatgtgctttgg

SEQ ID NO: 166906 - DNA, 602 bp, Homo sapiens
ggaactgacctggtaacaccatagaatgctgcctctggcaatttcctttgacccagtaggaaaattaggagcagggcttgttttatttctcttatcgacagtgccagaatggtgtccactgtatattgtgtgcacacatcatcacatttttttgtgtgactgtttgtttgtttgttgttgttgttgttgttgagatggagtctccctctgtggcccagcctggagtgcagtagtgcaatcctggctcactgtaagctccgcctcccaggttcatgccattctcctgcctcagcctcccaagtagctgggactacaggcgcctgccaccatgcccggctaatttcgttttgtatttttagtagagatggggtttcaccatgttagccaggatggtctcgatctcctgacctcatgatctgcccgcctcagcctcccaagtgctgggattacaggcgtgagccacaatgcccggcccacgttttgctgttaataatgatggtgctgaagactatggctttgatgactagttctgctttaagaaaacattccgtaagtcttcatcattgcagtgatatatatttccttgcagtgatatatatgta

SEQ ID NO: 166907 - DNA, 358 bp, Homo sapiens
agacacaatgttccctgtttctaaataaataccaagtagatcaaagcttattttccaatctcttagcagtatatttttgacaccaattgaaaccacataagacagggtggaatattggacattttaaagtatcagaagtcccttgtactaacacacagcgtactaataacacaatgtgtctcccatgtactttagcatagtagagagcctgagcagggcatagcctataagacatctaaatctagatgtagaagtctaggacagtgcaggctatgggtatactgatgtgaaaggaacatccatagaacaatacatcaaagttgttgaagtgttgcaggggagggcaaaaaaaaaaaga

SEQ ID NO: 166908 - DNA, 451 bp, Homo sapiens
gtaggcgcccacttgcaaagaaatttgatattgtgcgtcacctaagtctgttactgagctctcatatcagacaggagtctcatttatttagctggcttcttagatcagaggtggtccttggccgacatcgattcaacgttttgtgacttggttgtttggctgcagttggtgtcactctcgatagttgtgtgactctatagttcatcagctgacatgtataaaccttctggatcaatgcaagtgggtgaacgcgcaggttgggaggagagtgagagtaggaattagggacacctggtgccctattccttggagacagaagtcacacaggctgtgtgaggttggggagggcgctctgcaaaggaagaaatgatttcatcaattggccaatggcttcagcaacctgaagtttactccaacgaagtttgtcatgcaataaaatcatagacaataa

SEQ ID NO: 166909 - DNA, 446 bp, Homo sapiens
ttgatagaccattagcaaggttaaccaagaaaagaagagaaaatccaaataagctcaattagaagcaaaatgggagatattacaactgacaccactgaaatacaaaagatcattcatggctactatgaacagctttatgcacatcaactgggaaacctagagatggataaattcctggaaagatataaccctcctagcttaagtcaggaagaattagacaccctgaacaataacaagcagtaagattgaaatggtaatataaaaattaccaacaaaaaaagtcaagaaccagacagattcacagaagaattctgccagacattcaaagaagaattgttaccaatcctattgacactactccacaagatagagaaacaggcaacccttcctaaatcattctgtaaggccagtatcaccctaatagtaaaaccagaagaggacataaa

SEQ ID NO: 166910 - DNA, 496 bp, Homo sapiens
agccagccagggtccattggctcctcctcgcactggtcctggcctggctgtcagggcagaggatgccaccagtctcaagacccagagtggccgcaggaacaagggagactctgccatttgagccaatgctccagggactagaagcctgggttctgactccagggcccttgctctgccctcagcgtctgccctcccaggcccagtacccatgcctccctcagccctaagacttccagtggcctcctgatggtcagaggccctcagaacactgtggtcgggcatcctgaagccccagcctggggtcggggatcgggggcagaagccttgcagccagtcccactcctgatctgaccactgcttccagagaattacagggtcaggaaggcccctgctatcccgtccctcataccattaaaatcagatacttaaaattatgcaagaaatacatgaacagcgtctcttcagatgattcagacaatacagaagtggggtaaaa

SEQ ID NO: 166911 - DNA, 341 bp, Homo sapiens
tccataatgtgtgcccaggaggtggaggctgcagtgagccgggatcgcaccactgcactcccagcctgggcgacagagtgagactctctctctcaaaaaaaaaaagcatattatttcaatagacactgaaaaagcatttcgtaaaattgaacatcactttatgataaaaacccaacaaaaataagtatagtagaaatatacctcaaaatgacaaactcacagccaacatcaatactgaatggggaaaaaaattgaaggtctttcctctaaggactgaaacagacaaggatgccccactctcacttactgttattcaatacaatactggaagtcccggccag

SEQ ID NO: 166912 - DNA, 379 bp, Homo sapiens
gtgggaaactgaggcttagagacagcagagctggggagtggcagcaggatattgtggcaggtggtggcagtcggggacttcaggctgtggtctcacaccgccacactgcctttcccttttctcacagagaacattcaaatggctgtctttctctggcaaggtagaaagcctctcaaataagtaaggaacatgctttggttaacagctaacgaggcattaggtctggacagggagacaagcagtgcagcagccaaatcccagtggacactagacacgaggaagaaagcacggtgctgccagggcaggtcctcctccctccttcctccttcctccattaggaggattcctgagcctgcaaacctgttccctttgtgcatcc

SEQ ID NO: 166913 - DNA, 293 bp, Homo sapiens
gcagagccaccaacccttcacccccaggggagtctctgggaccctccctctgccagggccagggctcagagttcagcccttactgggagccatgtgcccagccatgtgccagccgggagcagagtgggctcctggggagacaggaggaattcccctgaggctctggcctgaggcagggcccagtcccctcaacccacagagcccataagccccctgcccaggctctgtgcaagcctctgctggatccagagcccacaggaccccgccaccttcagctttccatttcccagtgc

SEQ ID NO: 166914 - DNA, 282 bp, Homo sapiens
gacattttagtatagttaactatccagtaggacattgagcatcttgctttctaccttttactttactttctctgccaggattttcctagtgagcatgtgttagttttgtaaagaggaaaaaaagcaaacctggttttaaaaaaaaaatcccattgccaagtacaacaatttacagcactctttttagtatattctgaaatagtctcctcatgatttctttctcttctgtactccaaatgtaacactaaatcacacacatgtacacacacacacacacacaca

SEQ ID NO: 166915 - DNA, 375 bp, Homo sapiens
gagaacggaacccgcatcccttctgggcttggctttctgcactgagtttgaagcagaatggagtgctctcacctcgcccgagctacttggggatacagcggtcccatcttcttgtctgaactcaacttcaagtgcaatgtgcaatgtattaggtttctggttcaccccaaggcaagtgttcagggtcccagaacatgtggaaactgcgctgggtgccttagtttgcccttgagcttgtattcataagcgagtcgaggtcttaatttctccctaaatcccacactgcagagagaaaagtatatggaaggtggaactgagttatttccaccaagatgctgaagtgggtgcgttcaccgtgaatgaacagcgcaccag

SEQ ID NO: 166916 - DNA, 326 bp, Homo sapiens
gagtgacagacagctcagaggcgtgctcacttgcttccacgtcttcctctccaggtttcccctcctctccagctgctcgtcagcctcccaggtgaaccccctgggcttatccctcgaatgcggctgtcatcgggccctgggcccccttctcctctcacgatatccctgcccgagccatctcgctatgtccccaactccaagtccctctccagcccaggttgccctcagagcttcccatacctccaaccggatgcctgatagatgattcaggctcatcttggttaaaatagaacttgctgcctccattccccccgtgaccagctcct

SEQ ID NO: 166917 - DNA, 272 bp, Homo sapiens
aaaatactgtatttttgctatcttctctggttatttctacatctctcccttaggatgacacctttgctcttcttctgccctgagcatttgccaaatggatacaacaaaattctcgttatccagtttggtttatatttaactcttgcaggtgcagcagtggcacagacgagggtattgtgttgcctgctaccctcttcagcctctaagccatatggcatggctattggggaagcaatatgactgtgataggatttttgtttttaaataaacct

SEQ ID NO: 166918 - DNA, 551 bp, Homo sapiens
gagaacgctggatgagcccgagcgaaggcagacacctccagttatgccccccccagtgaggtgcccccagcagccgccctcttccctctgggctctgaaagagctcaagccccaatccttaagcttcacgatggctgagaccaggaggcctcttcctggaggcaccagccctgtctcgctgtgtcacccaggttggagcgcagtggcacaatctcagctcactgcaaactccgtcccccgggttcacgccattctcctgcctcagcctcctgagtagctgggactacaggcgcccgccaccacgcccggccaacttttttgtatttttaggagagacggggtttcactgtgttagccaggatggtgtcgatctcctgacctcgtgatccgcctgcctcagcgtcccaaagtgctgggattacaggcgtgagccaccgcgcccggccaggcatctttctttctttcttgtttattctggtgaaatacacataaggtaaagtttaccgtcttaaccctttttaagcgcacaccttggtgacatgtagtgcatt

SEQ ID NO: 166919 - DNA, 301 bp, Homo sapiens
attttagaagaacaggggtgaattagagtaactgttaagatgacattctctaaactccacttcaacttctttacagttaatgccttcagactgttccattcatcatcccttcttcacttgatgtgtcatcttaaatttcttaatttaactactcaagtaataagatcatattttttgacatgagtctgagcctagaaccttagtttaagccattgggagacattagacttccatttttattaatagattatcttttatttgtaaacaaagtatctttcattgaaggaaaatggtgctttct

SEQ ID NO: 166920 - DNA, 488 bp, Homo sapiens
tgaataaaatgagtaacaataaatgaaataaaaatgaaagttcagctgttgttcaaatattcctctcttaagctgctgatcaaatattcctctctcttaaatatgaagattctgacaatgaatgctcatataacaagatttgtctgtgtacagaagcatcatttatttaggttcctgtgatacggatgatttaaaaaaaaaaaggactggattgacccagatatattaattgacatggccctatcttccccaaatagattaacttttaaatacaatttccccttcctttgggaagttttccatcttttacaagaaacaacacataactgctgttgtaattactgatgacggaacatttatttagtaaaaggcactatgtgactacgcttgtctgcaacatttcccctttggaagacgctgggccccaacacctcacgaactgtgtctaaacacctgcagcatttcccagcagatcactgtcacactgg

SEQ ID NO: 166921 - DNA, 487 bp, Homo sapiens
caattcttcatcaattccagagtctctgtccattatttaaaccaatattttattaaaaccctcatactcttgtccttctccctaattcagccttctatctcatgtgctcaatgaaatcccaaatttggatcaatctaactaactgcatttactgcacctttatttctgctgctgggttctaaaatcacatacaaaaaattaaatcatacgaattaaaagtctccttcttcacctgggcccgcaatgctacatacagtccctccacatgtgcttagtcagcatcctctctcaaagaactatttcaaattttaaccacttgtcaggcccgaatctttaccacatctcttcttctcactctcaggagataagcttatatgctgtttcacagagaaggcaaaaatcattaaatggaaattatcttgtcacaaaaaatgtatccatatttaaactcacctagatcaatttacctagtaaaaagcatcactcc

SEQ ID NO: 166922 - DNA, 165 bp, Homo sapiens
acctgccttggccttccaaagtgctgggattacaggcgtgagccactgtccccagccaggtaaagaagtaatttagtccttcattctgcagttggggattttaaagttgtctgccagttctcttccctggccctcgtcatcacttaaaatatctttcgtaaagcc

SEQ ID NO: 166923 - DNA, 479 bp, Homo sapiens
agaatggctaaaatcttaaacactgacaatattgtatgctggcaaagacacagagcaacaggaactctcctggtgcaaccactttggaagacagtttggcaatttcttataaagctaaatatagtcttaccatacagtccagcaattatgcttctaggtataggtattaacccaagtgatttgaaaactgtccacacagaaatctgtaaacaaatatttatagtgactttattaatgatcaccaaaaactaaaagtagccaaaatgtctttcaataagtgaattgatcaataaattatacattaataagatggaatatgtatggaatactatttagcaataaaaataaatgagctctcaagcaaatgctaaaaggcatggataactcttaaatatgtattttgtaagtgaaagaagccagttcgaaaagtcaaaatactatatgattctatttatatgatatatgaaaaaggcagaact

SEQ ID NO: 166924 - DNA, 213 bp, Homo sapiens
atgactaaatgaagtcctgagttcagagtactcatcctagaaatttctcaggggacagatacatcctgtgatcaaacaagattgggacccatcgtaccccgtcttcccttagaaagtcctaatacgcattatgtaggggactctgaggtgcgctccaactagaaaacaaaaagcgtcagtaagctaactttcttcacctcatgtttcctaaac

SEQ ID NO: 166925 - DNA, 371 bp, Homo sapiens
ctcattttgatgaattaccataagtctcgcacaggtcatcatgaatccactttctgcccaggtgatgtgtacctaggtgagtcagacgcccataagttaaacactcttctctcttttcagctcctccaccctgacgactcagtgctatgtgctctggtctggccccagctcccaggtggttagtattgatctaagaaagcaagggcaggaagggcaggctgagaaggaagatagaggccacgaggcatggaaagagacaggtggggctgtcattattcaaaggccatactctgggtgtgttttatgactgcttctggatttgaaatcttctcctctttgggaccattccaggaagtcaccctcctcctact

SEQ ID NO: 166926 - DNA, 386 bp, Homo sapiens
atcctgcatcctggacatcataaactagatgattcctttgcagaattacatattcaacctcttccttttacatgattccttcccatcgtattttaaacattcacaagtttgtgcaatcaacatatgaaaacaaacctaaatcaataatttttaaaaaataccgatcctgtgttctcctccagcgaatgccttctttcttccatagcccaatttttttaaaggagttatctatacttatagtctgtattttcttttctctagagtatgccaatctggcttcagttcccaatagtccactgaaatagtttttttgtgaggacggtgctgactttacatcaccgaatccaatacatattttttactcttcttacctgacctctcatcag

SEQ ID NO: 166927 - DNA, 310 bp, Homo sapiens
gcctcacagagtgggtgtgagaattaaatgagaataaagggacttgaatgtatctccagcagccatgtgattattgtcatcagggggtggcagcaagtgtagagaaggcagggacacgtttggggttgacattgcacattatagagtgaaacataagtggagcccaaatgctatgcttatgtgacacacattgtcctagtaatgatctcatgcacctgctgcacaaataagaaaggaattgtagcctgctgcgcatggctgccccttgagagaggaggagaggagttatttctggaatttgccccaaggt

SEQ ID NO: 166928 - DNA, 224 bp, Homo sapiens
ctcctgagaattatggttttataaagggcttccccctttgctcggatatcaactctctcctgtcaccctgtgaagaggtgccttctgccatcattgtaaatttcctgaggcttcctcagccatgtggaactgtgagtcaattagaactctttcctttgtaaattatccagtctctggtatgtctttattagcagcatgagaacagactaatacatacggttttg

SEQ ID NO: 166929 - DNA, 904 bp, Homo sapiens
atggtgggagtggggaagacagtgaaaagttgtgcagggaattcacagaactacagaacccactttgtacttctggaactgctgagtggggaactagttctaaggaacaaggttagtgccccagcagttggagcagtttggtgagagagtggcacaaagctgacactggtacatggccctggccactagttgttaagttccacccatctccagcactgccctccccatgagtgacagtgaaaggtgggagggacgttacaggactgtatcaggcattagacctgctactccaagtgcagtctggtgcagtctgcaggccagcagcctccctgctgtccagcactttccgcatcacttggaagcttgatggaaatgcagaatcttggaccacactttaaagcttctgaatcgggcggcatgcgatgcctcatgcttgtaatcccagcactttgggaggccaaggtgggtggatcacctgaggtcaggagttttgagaccaccctggccaacatgttggccccgtctctactaaaccccatctctactaaaagtacaaaaattagccgggcatggtggcgggcgcctgtaatcccagctacttgggaggctgagacaggaggatcgcttgaacccgggaggcagaggttgcattgagccaaaactgttccgttgcactccagcctgggcaaccaagatgtcccttcttaggaacctttgtagttaataccactgtatacagtcagaccacaattttgtttcatgaaaaaggctggaagtaaacataatgaaaggttaaagatgcttgggggtgctaagaatcattttctacctatcttttcccttttccccccacgtttttgaaactctgtctcaaaaaatttaaaaaataaagcttctacatcaa

SEQ ID NO: 166930 - DNA, 330 bp, Homo sapiens
aaagagtttaatggacttacagttccatgtggctggggaggcctcacaatcatggcagaaggcaaagaggagcaagtcacatcttatgtggatggaagcaggcaaagagaagagaagagagcttgtgcagggaaactcatccttataaaactgtcagatcttatgagacttattcactatcacgagaaaggcatgagaaagaactgcccccataatttaattacctcccactgggtccctcctacaacacgtgggaattcaagatgagattttggtggggacacagccaaaccatatcaatcagttaacctcccagggtctcagttttct

SEQ ID NO: 166931 - DNA, 167 bp, Homo sapiens
tacacatgtgaatcatctttttgagtcctccttataactctatgagatagtgtttgagtttttctattgctgtgtaggaaacctccaaagccctagtgacttcataacaagaatcactcattatctcacagctctgtgggttgccaaggcatttcttctgcctcctg

SEQ ID NO: 166932 - DNA, 315 bp, Homo sapiens
gcttgataccctttgaattttcagtcagacattctggagttctagcatcctgtacctaggaccttcctctgtgtcactcttggcctcctaaactctaagaaaataactatattctggagcttgggcagtgtgttttgcataatccagcaatctcctcatgacatgcatgtgttgatagtcctgaaacattcattgagagggtaaatgcagttgacctagaatgaccaataccaaacagaattttaagaacaggtggccaactcctatggagcttactcacatattactattcttttaagaacggaaagtaaaatt

SEQ ID NO: 166933 - DNA, 451 bp, Homo sapiens
gtccaggttgggggtgtccacatcctgatcctagttccagcggaagcgctggaaggagatcagcagcagctgtgagtgttcttcttccctgggacgaggtggccgcccagcacgaccggcggcggcagcagcagctggagggcgccgagccatgtcatcccacgagcacctgtcatgcactcctcacacagttcatgggcttcgccctctttagtccgttgttgaacaaagtccacattaataattcagcccagctctgttgtgggacaaacaacctggagtgaagcaaggtgctgcatatttgcaggacaggatgaaagcgttctggggatggatgggggacatggttgtacaatgtggtggacgcacttaacaccactgaatttttccttcgaaaatggctaaaataatagattttttatgtactttaccacaataaaaaatcaaactg

SEQ ID NO: 166934 - DNA, 393 bp, Homo sapiens
gcctgtaaaacctgtgacgacatgttgcttttccctttggtgtcacaaattccaaaatgaagtcaaaagagaccaattcagatgtgagcatgttttatgcttcagttgattttctatgctgtcgtgagctcctcaggttccagagatatcatatatcacaaaggcttgaaattgagctacaccaaccattttctgagatgagatctactctatctatgccttaatattcttggcatccaattattgtttgacatataaccttcagaaccagatgagagcaaacaacactctctactagaaagttttctagttctttatcttcagcatgcctaactctcagtcataaaaatgactgtttaccaactacagctgtgtagttgttcagtttttttt

SEQ ID NO: 166935 - DNA, 326 bp, Homo sapiens
acaccggatggattaaggtagggatgggggaaggagtagaaggtgagttgggagggaggggcttgtgtggcactgagacccccagcagggatggggagaaggggtgttggccacctaagcttcctggtttgatccttttttggctggtttcagctggggaagtgaagggtcctaaggcttggatatggagaggtgggaatatggagaggtggggatatggagaggcggggataaggagaggtggggataaggagagtggccccgcagctcccctggtgaaccagaatactttctcagggttgttcccaggctggagggagggaatt

SEQ ID NO: 166936 - DNA, 393 bp, Homo sapiens
ctttatcataggcctgactcagaacctatatataaaagtaccttcaaactttagtgttctttcagatgccaagtattttacttaatccatgtgaatgaaaagatatttggactgggtatccattgagttaagctctagccttggtatttgtgaacttaggaaagactgtttacccagtcataaaattgaaaaaatcatacttggcttgcctacttcatataaattgttattaaaattaggtataatagagtgacttttaacatgccttgcaaaatggaaaatgctttgtaaaatagaataaccatttaaaattgtcatttatgtatcattctcccctaaaccgcacaaataggaaataattctatcccccaaggaaaatgttctttgtttaaa

SEQ ID NO: 166937 - DNA, 371 bp, Homo sapiens
tgaaggcacaaagaacggagaacgctgcgtgaacgcacacacgtgggggagaaagccaggggaacgcacagagtaaatagaacgcaatgggaacgcacaggaaagagaacgccacgggaacacaccgggggagaacgccaggagaacacactgaggagagaactccgcgtgaacacaatgcgggagaactccaggtcaacgcacggagaggagaacgcctgctgaatgcacggggttggagaacgccggtgaacgccggtgaacgcacggggaagagaacgccacgtgaacacacgggggagacgccgcacgagacaatccagcagcccaggaggttgatccggccgcgaatttagtagtagtagtcgacc

SEQ ID NO: 166938 - DNA, 370 bp, Homo sapiens
actaaaaaatttgagttctagtttggttctgcaactgaatagccctgtgaacttggaaagtgggaaagtgactttaactctgagttttgttttcctcaactctcccaaagagactggaccagaattgtttttttttcacaccttattttcttgaactgtagtgttgattccatagaggtgccagaaaagaactaaatagaaacctaagcaggtaaaatgctgagcctctagctctgtttcagtcagagcgctttcactttatactctgtaatgaggtgtagcacttggccgggtgcagtggttcacacctgtaatcccagcacttttggaggctgaggcatgcagatcatgaggtctggagatcgagacc

SEQ ID NO: 166939 - DNA, 315 bp, Homo sapiens
cctggatgttcccgctgcaggacagccccggggaggcggaagggctgcaccacttctctgcagactcttctgccacctgctgcctctcctcctccctgtggctctcccagggattttgtgccttactctctgctttctccagggcctggccaaaggaggaggtgctggggattccatcagtaccctcccacctctcccagaggaggtaaaggcaggaaagtctctggacaggtgcagagaaccgacagctatgtcagcaattccccaggaagcttcccaggacctccccaggcggagcaggtagtgtggatgtcc

SEQ ID NO: 166940 - DNA, 312 bp, Homo sapiens
aattatccaccgatgaggcacacactgctgccacgtcctgacagaaccaggcgtccatgtgtgcagcacagatgtgtccacctaagactgcgtgtgcatgctgacgtaagcactattatttacaacagcccacacggccgtcaactaatgatggatacacaacatgtggtccgtccacacagtggagtattactaagccataaaaacgaacgacgttctgatcgacgctacagtgaggatgaaccttgaaaacttcattgtaaataaaagccagagggcggggcgtggtggctcatgcctgtaatcccagca

SEQ ID NO: 166941 - DNA, 408 bp, Homo sapiens
gggttatgtggattaataataatgtgtgtaagatacctaacacagaagatgacatgtggggaatgttcaatagttgttagctgcagtaatcaccccaacatatgacatcttttataaaggtatgtgattatccccttatgacaaattcctaagaataggatttgctcaggcacatgatacggacgttctcagtttttatttgcatcaccaaatagctctccagaaaagttgcagcaatttatgtactcccacccaccgtagaagaaggtgctctggtccctatgccctcactggatacattttgtcaagtcttttaatctttgccagtctgaaaggcaaaaatgtcatatttttctttttctttcttggctcactacaacctctacttcctgggctcaaaacccagcg

SEQ ID NO: 166942 - DNA, 500 bp, Homo sapiens
cattccagggccatgcagtggacaactgaggaccaccccaatagcccagagcccatagaaattattcaaaccatccaatcctacccctgctttgctccttaccctttctctcccatcctttcccatgacaaccacaatcaaggcttctgcccgtgctttcccttttctctttctgcctctcctctgacccacatttcgaaatctatgtgtccctgtgtggtactgcaagctccctcctcctgagaactgtgagaaacagactaccttttcagtggcaactgtctcctcatgtgttggcctcaccatacctgaataaaaacaatatcccaggtgcatttccaaacaagtgcatttcacttaggtaagctccacgctgtctatgaaacttttaagaattcatgactaattttatttaaagtgctaaacagtactcaatggtcttgaagtgtccaaaatgaaaaataaaataaaataaaaataaagtgctaaataggtttact

SEQ ID NO: 166943 - DNA, 247 bp, Homo sapiens
ggagtttgtgtttttaggactttagcgtgaaactgagaatcatcttgtgtttcgagcatagagataacgatgaaagaacacaaagaaatgataaatgcttgaggtgatggataccctgtttaccctaatgtgattattacacattgtgtgcctgtatcaaaatatctcatgtaccccataaatagatacacctactacggaccataaaaattaatttttaaaaagaaatactgatgaaagcacagat

SEQ ID NO: 166944 - DNA, 299 bp, Homo sapiens
gcaactggtgccgtccagaaatgtcgggtgagtgtcgttggattatctcatttttcaaaagaaaccaaagtccagattttactataaaatcccaatattcattgttagtcctaattaaaaccaaccaaccaaccaaccaaccaactaaccacattttgggccaaaaccaaaaacatgttagagggcaaaatacagaacttaagccaccagtttacaatatctgttccatcaattcttcctaggcagccaaatctacttctgtggctacataacaaaaattcccccatttttctcagtag

SEQ ID NO: 166945 - DNA, 248 bp, Homo sapiens
gagaatcgcttgaacctgggcggtggaggttggcagtgagctgtgatcgcaccactgcactacagcctgggtgacagagcaagacttcgtctgtgtttaaacaacaacaacaacaaaaaagtgagattttgtgtattagcacccttggaaatggggagcttctacaaaggatgctcatgcctcaccacaaaccaatcaaatatttagtgggcagtcaaggcattgatagtttttaaaagcttccaggt

SEQ ID NO: 166946 - DNA, 713 bp, Homo sapiens
gagcatttgtggtagggcaatgatgtgtatcataattataacttatttaaagggcctctgtgggaaacactagtaacattttattggctctctacctctgatccttcatgtggaattggaatttaaaaaaataagagcagtttggggatatgatctaataatcttcaaggaatccttgatagttggtgtgataatcaaattagggccatggctgtattttcattatttctataactttgtttgatgtttgataacgttaggaacaggataaactttggtcagcattttttcctgtttagctgaggatttaatctaccctaggccatagttcttgaatggtcatctttactgacagtgtcttcgaagcctagaccatagatttggggggttttgtttttaaggctaatacttttatttttgaacatgaagtttaattttttacttgcatcttcatgtatccagagaattttttttttttcttgattagaaagtttactttttaaaggctgggcgcagtggctcacacctgtaatcccagcactttaggagactgaggctggtggatcatttaaggtcaaggtggcctgcgcctgtaatcccagctacttgggaagctgaggcaagagaatcccttgaacccaggagccggaggctgcagtgagccaagatcgagccactgcactccagcctgggcaacagagcaagactccctc

SEQ ID NO: 166947 - DNA, 216 bp, Homo sapiens
gggggctttgttccaagtccttcctaggggcatgggaaggtgcttaatggagagaagcaagcagcatgagtaggacactttgggtttcttttctctcgccagtatcaaaaggaacttttcttaggagagaaaggtaactgggagctttagggtggatatagtacacacttcattctctggggtccaagaattatgtctttttcctactaggtgggg

SEQ ID NO: 166948 - DNA, 351 bp, Homo sapiens
agcataaaaagatggaaagcttccaattcacgctgccaagcataactctgacagcaattcaacaaagcagcaccaaaaaatacacctacaggttaatctcacttgtggaatatataaacacaaagtaaaagtctaggctggctgtggcggcaggtacctagaatcccagctccttggaggctgaggtgggaggattgcttgagcccaggagtttaagaccagcctgggcaacacagtgagaacccctgtctcaaagaaaaattttaaaaatccatggtattgatcttgtgtttacccaagaatgccacaagacaacacaaaataagggagagataagatatcaaaaggaaa

SEQ ID NO: 166949 - DNA, 481 bp, Homo sapiens
tccacctcccaggttcaagtgattctcgttcctcagcctccagagtagctgggattacaggcgcccgccaccacacctggctagtttttgtatttttagtagagaggggttttcgccatgttgcccaggctggtctcgaattcttggcgtaccaaagtgctgagattacaggtccgtgcctggccaaagcggtatacttttaagaatcaacctgagacctccctgtgcgttcatgccaagtgtgggcttgagggaatttccagatttttctcaacgcacagtgccccagcagactgcatcactgagcagcaccacagtgatgttagctttgaaggctaagctttcaaagtaagccttacccacccttgccatagaaaattctcagtcatgcactcattaaatgagctgacttaaagcaaaagactcagggtgcgaaaaggaacacatgtcagttcgtttgtggaaaataaataattatagt

SEQ ID NO: 166950 - DNA, 200 bp, Homo sapiens
gcctggctaatttttttctatttttagtagagatgcagtttcatcatgttgttgaaactggtctcgaactcctgacctcaagtgattcacctcccttggcctcccaaagtgttgggaatacaggcataagtcaccacgttgggccgggactgttccttttaaatcatgggggtttttacctctatccttatagtttattc

SEQ ID NO: 166951 - DNA, 291 bp, Homo sapiens
aacagttgtgcattgctggtggaaatgcaaactggtactgccttttggaagggtatttggcaatatctagcagctttccttcaacccagcatcccacttctaggaatttattccaaagatataccccaacagtatgaaaatacatgggcaaaagggtatttattcattgtagcattgtttataattgtgaaatactgaaaatcatctaaatgcccagataaaagtgattgaattaattttacattcacaaaatgaagttctctaaaactgttaataaggtatttgaactga

SEQ ID NO: 166952 - DNA, 563 bp, Homo sapiens
ctaactggttcccatttgtgttcattcccaacacagcatacccagtgatcctgttaaaatgttaattagaataagacattccccttctcaaaaccctattttgtctcttcatgttactcaaagtcagaattcttagggttgtctgtagactctacatgattgaaccaccctgtttcttccctcatttttagctgctctctctctcattcacactgccttccttgagattccttgaacatgccagggacattccaggtctcagggcttctcttaactgcttctgcctgaaactctttttctagctatacacttggcttgttccttcatctccttcaggtcttgaatgccattctctcaacaaagccttccctaaccacttattcaaaattgcagtttctgtcctgccattccttatctctcttgcttgttttatttttctcaatagtacttactgccttctaatatactacatcatctgttcattattttatatagtaattgcttccttgcattttatcacccaaatgtatatccctaaatagtatagtttattcttgcctctt

SEQ ID NO: 166953 - DNA, 340 bp, Homo sapiens
caaaattgctgctcgttaagctcctagagtgtgggactagatttactcttcttgttctccctggtctttaatactatgcctggcatacacagggggtgccataagtattttgctgagtgagttggtgaatagatgtgttcctttacaaagtactgttttgatcatctcataagaaagtcacatggtacctgggtggcctgagggaaaagcaaggcaggtctccagggttgagtttagcatgcctgatctttgctgagattcaggatttccaattgcactggagaggattgtgtaggtagtagcaagagggtggctacatttagctgacgtttctcatgcg

SEQ ID NO: 166954 - DNA, 444 bp, Homo sapiens
accaagcctaagacagaggagagaaaatgcagacggaaggaaaagatgaaaagaggaaggaaagaaaagagcacacctcaattaggccattttcataaaatcgagaggagccgggcgaccccaagcagttcagccagacctgcgcggccggcgggaccgtggagccaacctttcgggagaggggagcgtcgcgctgcagagaaatcctctctattcatcaccaccgacctgacggccgccatcgtcgccgccacagagtttgctccagttgggagaacgaaggcagcgggcgctcactttacaaaaaaataaaacgtagtttagcaaatgcccactagtgcgacgggtgggcgcctcccgcccccacccctcgttggcgggtccctagcctgggtgggggcgggagctgacaccgaggtgccaagtccccgttgccggaacccc

SEQ ID NO: 166955 - DNA, 490 bp, Homo sapiens
cctggagtggtgatggctactgaccttattccttgactacatagtctcttctctctcagtggctctcaggagtacttgtgattaacatagtccttgagcacaactctttaaataacgaactcatttaaaaaaagaaattcaaactccattaagggctagtcctcagtaagcctagcagatgtttccacactttcctacggtttataagctgtctatgtaatgcttctgttgcctcaacaatccagttaaagactgacagtacttgtttataacagcagtctaatacagcctttttacaatttctctttagatgtttttttttttttttgagatggagtcttgccctgtctcccaggctggagtgcaatggcgcgatcttgtctcactgcaacctccacgtcccggggttcaaatgattctcctgcctcagcctcccgagtagctgggattacaggcacccaccaccacacccagctattttttgtattta

SEQ ID NO: 166956 - DNA, 427 bp, Homo sapiens
agagagtaggcaccatcctaaggacctagaacgctacaggtcattttggctttaaagacttagtcttgccgaaactttaaattgtcaaatgactggcaaccatcaggaaaatatttcttccacacagtttattcagaaaagcctggaatgcagcacacacatagagtcagtggacacctctccagtgtaacctgtttcaaagatccctctgactaagttataatcctgggcttatttccatccaccactcaacatattagcaagtgtctctcccacggcccagccaccaggctaacaattaaaaccattgtttcaactgacctaacaagacacttgacaggttaaatctactaaatgcgctccaagctaaaaaagatccatttttggagtatttattttggactctgagctaatctgcccctttcat

SEQ ID NO: 166957 - DNA, 361 bp, Homo sapiens
ggtgcagtcattgaaaggtgtttatacagagaaacgtgcccatacagagaaaggtgccctctctggtgggaagaggagtttcctcaatcaaaaaaggaggtcatatggaattggggagttcaaagttttcagcctgcccaggcgcagtggctcacacctataatcctagcattttgggaggctgaggcaggcagattgcttgaggtcaggagttcaagaccagcctggccaacatggtgaaaccccgtctctactaaaaatacaaaaattagctaggcgtggttgtgtgggcctgtagtcccagctactcgggaggctgaggtcgacgcgcccgcgaatttagtagtagtagtagtcgacc

SEQ ID NO: 166958 - DNA, 280 bp, Homo sapiens
gggttttgcctcaaagcatcttgtctcaggcagcttacagtccgaaggggagaaaaatgtatagaagttatgcaataaggtttaaaaaatgaaataaaaggcatacatattagaaaggaagaagtaaacctttattagcaggttacataattatatatctagcaaatctgaagaaatctatctataaacaactacaagaatatgtgaagtaaggagagaaacaaaatagagttagtataccaaaacaaattgtatttctatatactagcaatcagcaatc

SEQ ID NO: 166959 - DNA, 263 bp, Homo sapiens
aatttatcatgtgatggggtctcaggttttacagagtaaatccactctaacagttccatccctctgtgccttctgaccccttcttcagaactatgctgaggaagtttcaatatcttcacccaatttactgtaggccatcattctgctcatggttcaaggagccctcccagtatggtatcaggactggttccaggtatccttatcagctaattgaatcccaagtctcaggttaatgttctcatgtcaatcaccatccccatctg

SEQ ID NO: 166960 - DNA, 429 bp, Homo sapiens
caagctatccggttcaatatccaatgccctgggacagcgggggaagtgggattccagcctttcatttattctttcacctatttgtcctctttactctgtgtacaaaaaaagagaggattatactatcatagactgttgtttctaaacagaaactcaggctgggcacagtggaatacgcctgtaatcccagctagttgggaggctgaggcaggagaatgaatcgtttgaacccaggaggtggaggttgcagtgagctgagaccgcaccattgcactctagcctgggcaacaagagcaaaactccgtctcaaaataaatacatacatacatacatgcatacatacatacatacatacggggattaaaatagtctagtagtgacacctgaacagagagattgaccggatagctgccggatcctctaggtcag

SEQ ID NO: 166961 - DNA, 322 bp, Homo sapiens
ctaggcacacacaagagctctgcagtgttttaagtaagacagcacacagttcgattctttcttattttgcattttaattttttaactttttttttttctcttgagactgagtcttgctctgttgcccaggctggagtgcaatgacacaatctcggctcactgcaacctccgcctcctgggttcgagtgattctcctgcctcagcctcctgagtagctgggattacaggcaccaaccaccatgcctggctaatttttgtatttttagtagagacggggtttcaccatgttggtcaggctcgtctcaaagtcctgacctcatga

SEQ ID NO: 166962 - DNA, 362 bp, Homo sapiens
acagataaattgaacttcatcaaattttaaactctttgcgcagcaaatgagactatccaccaggtgcggtggttcacacctgtaatcccaacactttgggaggccaaagcaggaggactgcctgaggccaggtgtttgagatcagcttgggaaacacagtgagacccccatctctactaaaaatacaaaaattaactgggcgtggtggcgcgtgcctgtaatcccagctactcgggaggctgaggcaggagaatcgcttgaaccagagaggcggaggttgcagtgagccgagatcgtgccactgcactccagcctggcagcagagcaagactccgtctcaaaaaaaaaaaaaaaaaaaaaaa

SEQ ID NO: 166963 - DNA, 703 bp, Homo sapiens
caactttttgtcgcttattaagacttcagagatacaaaccagtagctcagtaattgctttcttgaatctgcctttaataattacatttagtaaagctgtatcgaaaattagaaaggcagagactaatggaaaactagatttttcactgaattagaaagcaagacaatccatatattgacaacacttcaagttgaaacagatcaggaaaactgttttggactgtttgtgcaaagaggcaaacctgggcctgatgggcagtggcttccgtattttatggaagcagagaaactctaagagattgcatgtaaatcggcatattgggaagagagagtccaggtctgatttagatacaagtcatttgaatcttttaaagcctggaatttctccatggtactagcaaagaagtagaatataaagaattgtgttaatgaagtgggaatatctttgaatttaaaaaaagtacaaaactcatttagggtcatatcttgcagtcaaaaagaaacgtgtgcaggaagattatagtagcttctgtagtagttgatgtggtgttttgacttcatggtcagaaaaattagtcattttagttttttttttttgcgtttcagaaagcatattaaaaatatcccaatggtggattaactcaggattttttacatgttaggaaaataattaaaactaaaatataatgatattaattgaaata

SEQ ID NO: 166964 - DNA, 524 bp, Homo sapiens
  misc_feature (512)..(512): n is a, c, g, or t
tttttcaagtttatttattattcttcttaaatttcttttagagacaggatcttgctccattgcccaagctggaatgcattggtgcaatcatagctcactacatcatcaaactcctgggctcaaacaaccctcctgcctcagcctctgaagtagctgggactacaggcatgagccactgcactcgacctgatcacccattaatttggtagaactggatgttttcagtgggaataccactggaccccagtctggtgggcattagaaactaggcttcccagaggcatttgaaattagactgccatttcttaggcattctaagatccaaccaataatattgaaagaacagcccattttacttgaatttctttgatcccaaagtaaggaatgacttgaaaagatttactctgttcctgtgttttcaggttcagaatttcagttgtctttaaagagacaagaaagtactataaacccctctagtgacctaatccaaaatccgatttacatatatgtantttcttgtacaa

SEQ ID NO: 166965 - DNA, 682 bp, Homo sapiens
aaaatgtaactgagacagaaaaattgtctcaatccttccagtgaaaatagttttggtcaacagttattgtgtgcatttcttcctactcagtatatattttttggatttcactttttaaatgtactatggatatatttccattcagtattatacatcattgcttttaaagttcctgtgggtgtgtatatatctatatctcatcccattgtttagacaaaacaattacttagacaaagcacagtttaatcattctaccttttggtaatataggttctcaaattttctgtgtactctttcaatgaacatcctcatatatatatatatattgtgctgagagcagtatagtatagtggttaagagctcagttgtgtgatctgggggaagttattaaatctccttgtgcctcagttttctcatctttaagtagggaatagtactttacctgagtgctgtttatggattaaatgagttaatacatataaaatcttggagtagtgcttacaaacattaaatatttaataaatgctgctagtattagcagtatttagtcattttaaattataagaagctgaattgcttcaacttttaagtgtgtaataagcaatgagtttcttattgccagatccttcgtatacccttatttttgacctgtggcatattccaccagatccctttttcttat

SEQ ID NO: 166966 - DNA, 388 bp, Homo sapiens
ctttgagtccccagccccaaccaacccattcattttctgctttggtgtatccaccgtctatcgctgttagaataatgtccatgtgccaattacagaaggccgtgggcagcaaaacttgagagcgctggcttcagcctgctttgtccatactctcccccgtgactttgtggcactttgaaggatagcaactagcttctctgccatctctgcacttgcagctgaccaggacagaagtttttgtctaacatacaaatgcaaccatcccagggaaattgatgaattacagtcctgttagttctccactctatatcatgtggaatgctgaacaatatgtcaggtaaccaaaaacagcatcacttaatggaccaaaataaaattgaacactatc

SEQ ID NO: 166967 - DNA, 409 bp, Homo sapiens
agcaatgaaaaataccttagtagattcaatgagcctcttggttttacaaaaactgggctgatcctctctggaatagtgtggctggctctgcataattatgtaaaagccttcttcctttgggtggggaccatctccagaacattctgaccaaagcattttcactcaagaatatttagatgtccacccccatcccagcccagctaacgttctttgttccacacaagaaatgtcaatgctcagtgtcctatccagctgtcaaccaatactcaggatctggctagtaaagaataacctacaggagaccaggcacggccactcatgcctgtaatcccagtgctttgggaggctgaggcaggaggattgtctgaggccaggagttcgagaccagcctgggcaacacagtaagacc

SEQ ID NO: 166968 - DNA, 218 bp, Homo sapiens
tttaaagcttcaccttcataaaaattctaaaataaaacttataacatcccattatggcactaacaccataattatagctcatggcatgaacccaagaggctaacattatgatatgtgtttcaaaacagttatagtatgataaggagtattttaaagccaagtaagttaaaatatattccagaatgtcaaatactctagcctacacctctacaccagta

SEQ ID NO: 166969 - DNA, 376 bp, Homo sapiens
caggaggggtttggagaatgttccaacgccccgaacccacgggagtaggctgtggtggggagggagtgcctcgttttcatccctcagcccccacccaccaggagagccaggcaggctgctgccgtgtgatgcgccgctgtgccgatgagaggcgacctgagagcagcagcggccggaaggacggccctctatccacatcgcagcacgaagctcactggcacagaacacccccacctcctgctgtcctggcagcccagaaacacccagcaccagccagtcacccagaagtgtcaccaccgtatgggtgtccccagccaccacttccaaatggctcagttggtcccttggttttattgttggtgcactggaattctta

SEQ ID NO: 166970 - DNA, 414 bp, Homo sapiens
gggcgaaggggcaatccctggcactccagggcctgggctcaccctaagatgacagggaggggctggcagctgaggagatgagggagaggatgagaggtgttttaggaagaggtactgctcctgaagctccagtgggatcacagttgggaggacacttgggcccagaagctccatgcatcaaggcaggctccacactgaggctctgatggcctggagcagaggccagtatgaatgaccgtgaattgtcaaatcagggtgattatgagaagagcggagcaagtgacaagaacaaagaaatcaagaacaacaactgattgggaagaagaaaacacacatctggttttggttcatacacccggagcgtgaggtccaagggaagaggcctcaaggcatgcgcagtcactgccatccctg

SEQ ID NO: 166971 - DNA, 354 bp, Homo sapiens
ccatatatagtatagtgtagtaaaaacttttcatctgttttctggaaatcttgattttcaactctttctaatgtatttttcttttgggggcccactcagaccttacaatatgtcttctagaggcacagagtgaaaagccttgttagtctgctgatgtgccttcagaccttctccggactattccttgaccagaaccatcccttttctagctggcttttctggtagagtctatccacactcctagaactgtctactgtttgcttggcaaggtctacctagatccttccttggcctgcatcctcctgggagctgtggggtcaccatgagccttgttacttctttcttttcccccct

SEQ ID NO: 166972 - DNA, 262 bp, Homo sapiens
agaagatttttggggtgagaaatcttgattgtggtggtagttacatggatgtataaatgtgtcaaaattcgttgaaaggtccactttaatgtttgcatcttatttgtttacattatacttcaataaagttaatttttaaaattcaatttaggtctgggccagagagaagtaaacatttgtgagttagtggtgtttaaatcgtggctgaaattccaggaatggatgaaatcatccaagccacatattgaggataaaaaaagga

SEQ ID NO: 166973 - DNA, 506 bp, Homo sapiens
ttaataacctctgttatagaagaagtagagcaggaataggagggcagaaggcctgtgtgaaggtttgtttgaaggagttagaggggctggagagtcaggtaatgtgctagatacagagttctaagaagggaagtgctttgggaattgtgccatttatctgaaagcagtcaagtttttttttttgttttttttttttgagatggagactcactctgtcgcccaggctggaatgcagtggtgtgatctcggctcactgcagcctccacctcctgggttcaagtgattctcccacctcagcctcccaagtagctgggattgcaggtgtgggccaccaagcctggctaatttttgcattttttagtagagactgggtttcaccatgtaggccaggctggtgtcgaactcctgacctcaggtgatccacccgccttggtcttccaaagtgctgggattacaggtgtgagccacggcacccagcctgatatttttttcatttaattaaattg

SEQ ID NO: 166974 - DNA, 709 bp, Homo sapiens
tccgcggccccagcatgcagacgcagagaaattaaagtgacggggcaaggtctctggggagggaacgacctcccacctagaagcaatgacagcagcgggggcgaggaggccgtgagcgccagggaggctgctccaggggaagctgggagccccacctgaccccggctggatcatctcattgtcccatggcggcagtcacttatcacaatgtatttattcttatcagcctcccctactagaatgtcaggcctcattcactcctatctcctagaggcccagaacagtgcctggcgtgtagtagatgctcagtaaatatttgtcgaatgaatgagtctgggtctctgtagacaaaagaaagaagaaccaaaaacccagtagtatgtgctgtacgtgctgagcactgaccttagtgagcacgtctgaaactgagccctagagggcaagtgacttcccacagggacacacagctagtcaaacagccaggacgagctgcggtcccacttgaggtccctgtgtccagccacatggtgggacggggcctgcacggggcctcccttcccatgtcccagcactggacacgagacagtttctgcagtctagcatgagcggtcacaaaacatcagagcctgcaaggagtgcagggtgcagaggctgccaagggcagcttcctgggcactgcagatttcctgaacattatgcaccctcagct

SEQ ID NO: 166975 - DNA, 358 bp, Homo sapiens
ggatgagaactcaagcaagccaggaaatgtttcagtggacatgaaagccaagggaaaaatcctagggcatgaatcatgtgggatttcaatttccctgatgccaagtatgataactatcatggattccaaacagtgttgacaatacatgttttctttgactgcaaaatttcatagaaatgtgttcctacccttaaaaatcctgggtccagaattcaattgttataggaagtaaaagttgccaggtggcagaggaatgaagagcaggaacactgcaatgttagagatgccttcttacctccccttctgtgtgacttctacagtttctttcaagatagccaagaaactccaacaatttaag

SEQ ID NO: 166976 - DNA, 181 bp, Homo sapiens
ctgggattacaggtgtgagccacccggcccggccggggttcaactttttaagattcaacacattggtgatatcacgtggtaattgtttttctgaggtgatagatatatgttagttagcttaacttaatcattccatattgtatacatatatctaaacatcacatggtacccataaatgtat

SEQ ID NO: 166977 - DNA, 403 bp, Homo sapiens
ggtttgtaagggtagagagttagattccagctttttttcttcttctaccatctgtggtactttactatgtgaatatacagttcaagtcacagcaagaactctaaaaaactgacaagcaaaaacaatgtcaaaaatgaggctgatgctgggcacagtgtcatgtgcctgtagtcacagctactcatgtggctgaggcaggaggatcacttgagtccaggagaccagcctgagcaacatagcaagcaagacccagtctcaaacaaatacccacccccacaagaaaaaaaaaaaaacaactattgaggttgaaaaagagaaggaccaaaatgtgttcattggacttagccataatgaagtttttggtgactttggaaagattggattcagtgttgtgaaggtgaaa

SEQ ID NO: 166978 - DNA, 377 bp, Homo sapiens
acagactgtcacgtgagtgggaatgaaacttttgctgcgtttagaccattatctttcttcactctgtcacatagtctatccccgctaaacagaacttgacctcctccagaccatttacatcaagacctgtacgtgcggtgcagtggcctgagcctccaatccatgccccacctatccaactggccttaccatattcttattctgagagtggtattctgggggcagaagctcagtgcatagaattgactaatgccagatccttcaggtgctttgcactttgaagtatatcagtcctagcacattccaagtacaaagaagacacgtcagcagtacaacctgccctacactcagttcaattccttcttcaaaaacctagg

SEQ ID NO: 166979 - DNA, 494 bp, Homo sapiens
tattgtctttccatatgataaaataataaagtgactagtaatttttgaattgtatgccatacatgttatgggcccagactgcttgggttcaacattctgctgcaccagctactggctgaaggaccttggcaagtcacttagcctctctgagacttggttttctcgtctgtaaaatggggatgataatacaggtcaagtagccctaatccaaaatttcaaaatctgaaatgctccaaaatccaaaacttgttgagtgccaacatgatgctcacagaaaacgctcatcggatgtggggcatggtggtttacacctgtaatcccagcactttgggaagccgaggtgggagaatcacttaagcttgggagttcaagaccagcctgggctggataacacgttcgcgagctcgcgaacgtgttatccctgcactttaggaggctgagcagggtggatcacctgaggtcaggagtttgagaacagcctgggccacatggtg

SEQ ID NO: 166980 - DNA, 822 bp, Homo sapiens
tgccaagccagtcagcacagacctctgccatttgctgtcattgccatgcaaggaaagagtcccagctcacaggcagacgtgctccacaaggcagccaggacctgcaacctggccacatccatccatcatctagggtcacctctccgtccagacccatgcctggttattaagaagtatttagtgatggcaggagacccacctggagactggatgggtgatggtggcagtgatgatggtggagttagtgaagacagtggaagtgagaatggaggtaaggacaggtgtgaaggtgaaggtaaaggtggaagtaaggatggaagtgaaggcagaagtaaggatgaaggtgaggataaaggtgaggttgaaggtgaggataaaggtgaggttgaaggtgaggatggaggtgaggatggagagcggaggaaggggaggacagaagtgaggttggagaggagaatagacgggaggacagagatgaggatggaggtgaaagagggacagtgagtgagaagagagtgagaatggaagggaagattgaagtgaggaagggagaacagaggggaggatggagatgaggaacgaagaatggaggggaggatggaggggaggatgaaggcgaggatggtggtaatggtggaggtcagggctgggtgcggtggctcacacctgtaatcccagcactttgggaggccgaggtgggtggatcctgaggtcaggagatcgagacaatcctggctaacacagtgaaaccccatatctactaaaaatacaaaaaattagccaggcatggtcgcacgcacctgtagtcccagctactcggga

SEQ ID NO: 166981 - DNA, 449 bp, Homo sapiens
  misc_feature (217)..(217): n is a, c, g, or t
ctgtagaagttatgttggaaaaaaggagagtaaattgtgtgattaatggggaaggatattggataatgttataccccggactatgaaaaaagctggtggtaaatgggaagaatgtgaaattttaaactgctctcaacgtaggaatcttggtggaaaagttcctacctgaggtctgatatgattcaattatagaatgcaatgggcttggcccaggggnctttggtccagggggggcagtgaattggtggcggcaggtgtaagtaattgctgagatttgggtttggggagtgggctcacgagtgtttatgacattattataaatgaatatatgagtgcataaattagcaaaataaaagggggcttttctggaccaatgatgagacagtgtttatgaacaaaagatcatgattaatccagttctgcacaaaacactgaggtccattagaaga

SEQ ID NO: 166982 - DNA, 144 bp, Homo sapiens
ttaggtattttgttatagcagcaggaacagattaagacagacagctataacatcaagatacaaaagtcactacagtaaacagctataaaaagttaattttagaaatgcaccacttgtaggagttccacttctacagggtataga

SEQ ID NO: 166983 - DNA, 503 bp, Homo sapiens
gaatgacagttcaacaagaatagtgttagagaaagaaggaatagcctgcgatgagacttacttagtaagaaaaatcagaaagacttggtcattgactagacaaagaaagaaataaaaggaaagaagttgagaatgatgtcaaattctagctgagacaactgaatgaatgatggctcataggagtcacaggaagagaaggggcgtatgatacagtccagctatgtacggaaagatccatggtacaacaaaggggagatgggccactggtcagggtctgaagctcaagagcaatctaggcttgagaacaaaatggtagtcattaacacagagatttttaaaaaatgagaaaatataaatgaaaataatgatggacatcttttatctgttagattaataaaccaaaaattaattgtaatgcccattatcaatgagaggatggcaaaattgatatcctcacaactagtggaagaaaagcacaacttttctgaaattatatgtgatag

SEQ ID NO: 166984 - DNA, 560 bp, Homo sapiens
gtgctgtcgtgttatcgattacagaacaggctcctctagagggtatgaagcaccgccagttctttgagtttaaagctgtgcttcgtagtgtctgggcgagcagtttggttgattaaactgttgaggtttagggctaagacatagtggggtatcaaatcccagttggggtctaagctatggtgtgtccagatatgtaaaagccactttcgtagtctatttaggtgtcacctggaagtttttaacacactcaggtgagtttaagctttacattggggacagggggtgatctcaaaacactctttacgccggcttctatggacttgggttacccacgacacagtgtccagttcaagtggtacgtggacggcgtggaggtgcataatgccaagacaaagccgcgggaggagcagtacaacagcacgttccgtgtggtcagcgtcctcaccgtcctgcaccaggactggctgaacggcaaggagtacaagtgcaaggtctccaacaaagccctcccagcccccatcgagaaaaccatctccaaaaccaaaggtgggacccgcggg

SEQ ID NO: 166985 - DNA, 615 bp, Homo sapiens
gaacataaactgaaaagaaaaaggaaacattgagagatgacacaggggtcaggaccaccaacttgctttatttatgttctactccatctgttatattcattagatgtattttctaaataaacatcttaatgtgactaagaaaattggttaacatttcaggattccatattatatctagtacactagaagaggaaaaaactctttctggtttgcacataggaatgtaagagatagccatctagtggtctctctctcatgtaacaagatgtttgtacagattctgctctgaaactttattctggcaaggcctgtgcaactgtgtgcagccaagcctgttgcattattttaacaatttttgctttcctaacccaataacaattttaaatgataaattcacatgaactggagtgctctacctttggtattttatcacagcttttagatttcctcttacaaacctgaatgactatgcatagttctgaacctgtcttcctccatcaagattaccctaaacacagaggttgcagtgagccaagattgtgccactgtactccagcctgagcgaaagagagagaccctgtctcaataacaataatagcttaaacatatggattc

SEQ ID NO: 166986 - DNA, 1043 bp, Homo sapiens
agagttcagagagatcatagaggcagaaacaacaggatcctatcactaggaaagtctggagacactgggagagggattggagcaggacagcccagggttatgatgtaggtgtctgattaaatggtacttctattcatcaaagtgcagaacacaggaggaaaaacaggtttaggggtggggtggggtgacgatgattaatttatttgcagaccagttgaatttgagacacttgaggtgtccaagagacaactgaatgatctagaactcaaaatagagatctaggccagagatagaaagagagcatacggggataactgaatccatggggttggatgaaggtagccatgaagactgcataggaagggcagagccctaaacaatcatatttaggcaatagagtatgagctgctcacagaggagattaagaaggaacagctagagagatgaaaggaaaacaaggagaatgtgctgtattggcaccgagggaaatgagtgtttaaaagaatggcagagtggttaaattccacaaagtaaacaaatagaataaagactaaaaggtgtgttcagataaagcaacaaggaggtccccagttacctcatcaaggctgatgtctgtgcagtgcgggggcagagacgtccagggtgatagtgagcatggatgccatttcctacagcttagctaagacggaaaggagagaatgtgggaattggggagaaagagccagtaaaagggaatgttgaagagagagagagatgtttaaaggagcaaaggtcgtgtggaggcaggagagaaaagattctaaaaagtgggtttgggtaatagtctgggacagaagagggatatcctttccatgggataaaagagaaacggaaggccgggttcggtggctcacgcctgtaattccaacacttcgggaggccaagacagatggatcacttgagggcaagagttcgagaccggcctggccaacatggcgaaacctcgtctctactaaaaatacaaaaattagctgggcgtggcggtgcgtgcctgtaatcccagc

SEQ ID NO: 166987 - DNA, 427 bp, Homo sapiens
gctagaggtctcatccccggttctgggtgatagtgagcatggatgccatttcctacagcttagctaagacggaaaggagagaatgtgggaattggggagaaagagccagtaaaagggaatgttgaagagagagagagatgtttaaaggagcaaaggtcgtgtggaggcaggagagaaaagattctaaaaagtgggtttgggtaatagtctgggacagaagagggatatcctttccatgggataaaagagaaacggaaggccgggttcggtggctcacgcctgtaattccaacacttcgggaggccaagacagatggatcacttgagggcaagagttcgagaccggcctggccaacatggcgaaacctcgtctctactaaaaatacaaaaattagctgggcgtggcggtgcgtgcctgtaatcccagc

SEQ ID NO: 166988 - DNA, 457 bp, Homo sapiens
tcactgcctctgcgcacattttacattaggaaagtgttgcatcgtgctcgagtagaagatttcatgggaaacagactaccatctttggaacaggatccgatatgaataattctttgaaacatttttctctgcatgtctgtatcttagtcaactttcagtttcccctgcttgaggagagtggggcatgtagacaatccaaatgtcatctatatttggctttagagtgtgttttctacttagctttgagttctggatagatctgcgattctgggaactgactttaaacaaaatcacgaagctttgcagtgaagacacatctgactcacaagtaagttgaatgctttccaagggcccatttttttagaacttgctcaactctttcctgcaataatgctgtgcttggatcagcccactttctctcagaccctggcaaactggccattccaatattccttcc

SEQ ID NO: 166989 - DNA, 795 bp, Homo sapiens
tgaggccggcgattattcagcccttcgggagctttgagttctggatagatctgcgattctgggaactgactttaaacaaaatcacgaagctttgcagtgaagacacatctgactcacaatgtcctttgctgcatctgcatttgagctgcccaagagcccaactaaattaatccctccagaagtaaaggagatgaaatcaaccaatctgaggaaagcctgaccaaggcattcatgtatcaaaaagatatggaatacctacccactgcatacatgatactagaaatcctacagcttccctgcacagtggctgtggttttcatttatatgaaactgaggccagagaggtaaagaacttggcctgaagtcacatggggcactgggtattatttgaagcagtttttttcaaaaaagtcacggagaaacattactcagagcctctccctcacaccctgcagatagagctctgaatctcggcatctgtgagttgtttcttttgggctttttaaaaagtcttccagaattgtggaatgggatagtttcagttaaaatatctgtttttgaaaatcatgaccaataataaaaatcaagaatgtcctattacatatttcatacctttaagaattttgttttgctctaattggtcttattggattaaatgatttctaaagtcttctctgggacttcacttttgtgtttcaagtttcttatccatctgaaagccatatatttgggttaaaccaaattattagcaataggtatctttgtagaatttctagtagtttggaaggagttgaa

SEQ ID NO: 166990 - DNA, 213 bp, Homo sapiens
tctcttgaattgtaactatcacaattcctatgtgtcatgggaggaactggcgggaggtgattgaattatagtcttacttgtgctgttcttacccgtgctgttctcgtgatagtgaatgagtctcacaagatctgatggttcttacctgtgcgggtcttacctgtgctgttctcatgatagtgaatgagtctcacaagatctggtggtatagct

SEQ ID NO: 166991 - DNA, 576 bp, Homo sapiens
aacttccaccagaaaccattggtttctatcccacaagaattccactgaaatgcttctctttggaagccctactgagctgtttaaactgtgtttctttagaacttccaacattttcagcttttccttgactttttctctaatagacatgctttagttaaagctccttcattctgagttgttctgtgaactagatttcatggtttactaactcatatcctaaatagaatcatccaaaagaacgcatagaaacattctgttgattccattttggttggtatgtgactattaagggttcttacagtatggtgaatctcagattcctcagggggctccctgaggctgaggatgatagatctgacgattcacaactctcatctctttgggatacattggtcattgttacagagttaaactgcccgggcagataggaggttctggagttgagggctggtttaactgatcagggcatttaacctgtgtggcattggacctgtaaaatatgacaaatctttgggctggaggaataaggttctgcaactgttaaatttgattaatgattaccctgtgtatggaaaa

SEQ ID NO: 166992 - DNA, 126 bp, Homo sapiens
atgaggttctcaatatatatttgctaaacgagtgaatgaagtggtaacaagtttctgaaaaaataagttggccatctctgctctggtcctatggggccatctcacagatggaaacactgaggtttg

SEQ ID NO: 166993 - DNA, 518 bp, Homo sapiens
tcccgaattcaagcaattctcatgcctcagcctcccgagtagctaggattataggcatgtgccaccatgcccggctaattttgtatttttaatagagacggggcttctccatgttggtcaggctggtctcgaactcccaacctcaggtgatacgcccgcgttgccctccaaaagtactgagattacaggcttgagtcattgcgcccggccaactcactagactttttaaattcaaatataagtagcagctaacatgttttgaatttttactgtggaatttttactgtgcatatatattggtggtttctcattcaaccatcatcacaagtctatgatataggtatttattcctattttgcagatcaggctactgaggcacacacagatgaagtcacttgcttgtatgttggacacacacagctgctatgtgacagagtagaaatctgggccatctgactatctacactcataatcactacacaattctgccttcccaaaggaaaaaaagtattaatgag

SEQ ID NO: 166994 - DNA, 671 bp, Homo sapiens
tcatttgttaaagagattatcctttcactattgtatgttctcggcacctttgtgaaaaataagttggccataaatgtatggatttatatctgggatacctattctattcctttggtctatgtgtctgtatttattccagtaccatgcttatttgtttaccatagctttgtagcatatttggaagtaaagtaacatgatggctccagctttgttatttttgatcagtattgctttggctatttgtgctctgttgtggttccgtatacttttttaggaatgttttcttctatttctgtgaaatgacattgatattttgaaagatattgcattgaatctgtattaattcttctaattcatgaacatggaatatttttccattttattgtgtcttcctcaatttacttcatgagtcatttatagtttactttgtatagacctttcacttctttgcttaaattaacttctaggtaatttatattatttgaagccattgtacatgggtttgcttcttaatttatttttcagattgttcactgttggtatatacaaatgctactgatttttgtatattgattttgtttactgcaactttactgaatttatcagttctaacaattttttgttagagactttaggtttttctaagtataaaactatgttattttcatata

SEQ ID NO: 166995 - DNA, 646 bp, Homo sapiens
taataattgcatgcatttctgaatgcatatttacttaatatttttcataattaattttggaatttctaacactaaatgcatcacctactctgaactttaaacagacaataataaattgtataacagtgtagattctgaattaactgtatcagatattatgttaagaactaatatatattgcatagtctacatctagtgataaggactgaaactggagaaatagttctgagaaactatatagaatagtgatgaacatttaaaaataaaatcaaattgagtcttcaactaaaagagacttctgaatcaaagaaggcagatggaaaatacgaaagaaagaaaagaatagaatttttaaaagaggcaaagtaattacaggtagtgcagaatgtggacaaatggcaagccctaatcattaaggtaggcataagatgagacacacatgggacataaaattgtgattcacaactttgggaataagaatttcaaatgcaattgataaatacattgaatgctttcacaatgaataggttttgctcaactggctttgtgagatatcaaatactatttaaagagctgattaagtggattgacgtttaagaacaaaaaactacaaaatcatatacaagattgcaattcaataacgggt

SEQ ID NO: 166996 - DNA, 200 bp, Homo sapiens
acctcagatgatccacccgccttggcctcccaaagtgctaagattacaggtgtgagctactgcacctggccccctctagtttctttcgggatttttttctttatctttgattttctgtagtttgaaaattatatgcctggttgcagttttctgtttttgttttttatatttatctgcttagtgttctctgagcttcctgg

SEQ ID NO: 166997 - DNA, 295 bp, Homo sapiens
agtgtacacagtatccacttcaaatcctgaggggacaatatttttactcaaatatatgcaacttatggggccaggtctatgttcaacactccagccgcgtttatctctgggtaagtttccctctctgtgtgccatgttcttggttggctgagtgagcagcaggttatactagaggcatcagacattcagggtttaagaattgagtttgaaacctgcccatgctgtatacaaccggtgtggctgtggggaaggcccaagacatctctggacctctgcacaggtcctgcaaaagagg

SEQ ID NO: 166998 - DNA, 339 bp, Homo sapiens
ttaagcaaataaactcatgaaagagaatacaaaaacaaacagagaagtgcactctacaagatagaaatagtgtttaataactgaccttgatggggaatcaaggtaggcttctttggtaagtgactcctgagctcacatgtgaaagacgagtgttagctaggctggtgtggaagcaagcagaggtggcacagacctccaggtagaagggactgcatgggaggaggggccttgtagtagaaaggagcatggcacagttaatgaagcaaagaaagagggtggatgcatctggaggtgggctggggtacgtcccagaaagcacagcaagccacattaaggaca

SEQ ID NO: 166999 - DNA, 204 bp, Homo sapiens
agcactcaggacccaacagcccgcatgagactcagcggcttcccagtgctgctgaggagcagggcggcatcaacggaatcccaaacccacgtgaaagctccccaagaatgggtgccaatttcaggcccatcgtcacgcgttggccccacctctactgctccccgttttcggaggatttactcaaggctacttggtgcctgtgga

SEQ ID NO: 167000 - DNA, 174 bp, Homo sapiens
ggttgagatatttgtcccccttggaggtagaaatgggcccaggttcaggttaaggtcagagagctcagcgggtgtcatgttttgcctcaggttctagacagagttgttctccttcattaaccatggattccctacagttaatctccactcatgaattctccattcatcaacaat

SEQ ID NO: 167001 - DNA, 362 bp, Homo sapiens
ctaggttcatagaaaaatggagaagaggccaggcactgtggctcacacctgtaatcccagcactttgagaggctgaggcgggcagatcacgaggtcaggagtttgagaccagcctgaccaatatgatgaaaccccaactctactaaaaatacaaaaaaattagccaggcgtggtggtgcatgcctgtaatcctagctacttgggaggctgaggcaggagaattgcttgaatctgggaggtggaggttgcagtgggctgagatcttaccactgtattccagcctgggtgacaaagaaaaaaaaagaaaggagaaaagagagaaagaaagaaagagagagaaagagagaaagaaagaaaagaga

SEQ ID NO: 167002 - DNA, 869 bp, Homo sapiens
cgacatgtgatgtctcccccggacacccagctttaaaatttctctcttgtactctttccctttatttctagaccggccaacacttagagaaatagaaaagaacctatgtgaaatatcgggggctggtttcccctgatagtgaaggagacaggttagatacactggagcttccacacaggagagagggaaggagctggagaagaaggtgagttggaagatttgggggttttgtttttaagtgagagagctttgaataggtttaatgctgatggtggggatccagttaagagaaacactgaaaattaactagagggaaaggtaactgacagtatagagttcctaagaacccaagcagtaaattctagcctagctgggggtggagtgtgaagaagtgaagaaccttttttattttttttttaatgggctgggtgtgaagctacatttgtagttttgtggcaggaagttcccttactgtaacttctatattttctgtgaagcagaagacaagaactctgttcaaagttagggagatgatagattgagggctagaagagtaaggcaggcttgaaacaatcattgtcacgaatgggagttgaccagagattagtaacgttgctgggccatgtgtaggggcccatttgaaaccagcgattacaaatgtgcagtggttccaggccgtgcggctgtgtgaatctacctgatgaccctcggctgcttgggtactgccatggatagcgcatgtgttggctttgtccagctttgggctttttcccacattgattttaaaaagacaggagccacagattttggagtactgcaaaatgactttccaaattgatgaaccatggactccaagctggatagacaca

SEQ ID NO: 167003 - DNA, 337 bp, Homo sapiens
taaacatggatgaatttttaggtatcgtgaagtaaattcagagaaaaaaatactgtattacttagttaacttaaagtccacaaaaagtcaacactaaaccatatattgtttaggattgccatttggaataatagaataagagatggctacatgtgattgggaagaagacatggtgtgttcctaaggtacatgtaatgttctatttcacaggctgagggaggtagcaacgatgtttattttatcatttttcttaaagtatgtgtatacagcaaacctttgaataatccaggagttataggtgccaatctcccatgcagttgaaaatttacgtgtaaca

SEQ ID NO: 167004 - DNA, 611 bp, Homo sapiens
ttttcctgtacacagatgggaacaagaggtacaggagtgagagtggtaccccttctagaatggtggcccactcattcattcactcactcattcattcataagctcaacagatacttactgcctgccttgcctagccatctgcagcccagggaggccaagtgagtaagctgatgtgggcctcatcagcctctctggagagtgacagctatgaccaaattgctgagagagctaagcaccagtaggggagggcgggactcatgcacgccgtggccctatgcttgtaccatcctgcgtgtgcacagcagcctgtcctgaagggtgtatgggagatggtaggccttggggttggggaagacctgggttcggctctgtcttactctgctttgtgctcacaggctgggtaatttacgactaacacaaatgtattggctcatagttcttggggctgggcagttggacagcaggggccgttgcacagcaggggccggtatctgtcaagggccttttgctgtgtcagtccatggcagaagaacaaagagaaggtgagagaagaagaggggctgggcttgtccttttattgggaagctgctcatgtcatacgctgtttcctg

SEQ ID NO: 167005 - DNA, 460 bp, Homo sapiens
tactctgtttgtaaaacaagtcttgtgtctacaaattgttcactggcatgtattaacgagatgataataaggcccctgatattcatatttgtatgaaagcattgaatatatttgcatttgtctatatctaataaatgtttatttttgcttgacactttatactagttacttaggtgagtgcttaaattgatttttcttttctggaaaattgaatcattttgaaaagcaaaatcttgcagttctggctgtaaaaaaattcttttgctctttttgatacatcagctgattctcattttgaaattttctatttgacttctctctgctgtctttgtgtgttctctctctccagcccccctctccccaaccctagttacacattctcttacacttggtattctctttttctcaggaatagtaaactattattcatatatttgtttcatgacagtctctcctcccc

SEQ ID NO: 167006 - DNA, 1275 bp, Homo sapiens
cagctacgtagaactgtgagtctattaaacctctttttctttataaattacccagtctcgggtatgtctttgttagcagtgtgaaaacggactgatacagccttggagctcgtggcataaccacgatgtatagacccacccatcactgggggatgtacagaaccccccatcgtggcacagccagggatggggggtgtacagacccccccatcgtggcacagccaggggtgaggggtgtacagacacccccattgtggcacagccaggggtggggtgtgtacagacccacccatcacgggatgccacagatgccgagacagagagaatgggttgtgggagagcttgcaactgcttcactctgggcccaagccctctctacacacttggctgtgaacccacctgacccacccagggccccggccctgccctgccaccctgcctgagccccgcgctcagctccatctctcccagtagacatgtcgctgccttttggctctgccagacctatcagcctacacatccctctttcatcttaaaaaaccttccaaacactaaagtagatccctagacccatgtgctcctctccctgcatggcaaagtggctctccagcttcttccccacatccttgctcaaacctaacaggatccgatggctcccttgcctgctccgtgaaacaaccaaaggtgccctgtgcgatggtcggagctctctgcacaggcctcctgctacacccatgtgctctcgggggatgaatgtaaacccagctgcaggccgggggtggggacatggcttccctaggaccccagccctgacacaggacctggccattgcctggaactggagagccgcaatggtgcagacctggtccctgccttcagagtaatttgcccaggagcaaggaggagctgggccttgtgagccacccgagtggccaccagtgtcacctctggctccgactgtcccttgagctctttctgatgtgacctgtcaggggcaccttgcaggctcccccacccactcaatataggactccctcgaggaaggctcccggagcccccaccctcaggggagaggctggtggagacctacaggggccaagcgtttccctccacaccccaccttcctcccagggcaggcgcctgtggagccaacacaccgaccaccccggccccactgttgagccctgggaggagtgctctacaaggcaggaagggtagacagcaggtgcttcataaaggccacggagattcaacctgcagctgacaagtagcacc

SEQ ID NO: 167007 - DNA, 200 bp, Homo sapiens
atattatattttaccatgttatcgaagctgagcttgaactcctggattcaagcgatctgcccctcagcctcccaaaatactgggattacaggggtgtgccaccacgcctagcctgaagcccagatttgtatcatttgcctgtttctgtggtataaatactcccaccaccatgacataacaagataaggtggtggagtata

SEQ ID NO: 167008 - DNA, 697 bp, Homo sapiens
tctatcccctatgaattaaaaatgacatctatacatttagaaaaatagatgttaaaaatatttagcatatccaccagcaatcaattaatgtttaggggcaatttaatgaattaatgttctgagaggtgatttaacactcccactagcaaaaggaaagtagtctacctgtttacaatgtaatgttaacatataggtaagaccaccaccaccatcttcacgtggatttaggtctggaggccctgcaacatatgctcatatgcacacagggctccaacaccccaccctcttatctcctaaatccacatctaatattgcctaatactaacaaagccatctaagagtctaaacactcctatcagtaaccaatgacatcattgtgtaacaatttaatgtcccccaaaatgcaaaatgtcagccatctctatgctggttaagattcagtaacacaatcctgtcggttatatacacaaagtaatacaaatcccacccaacccttaacatgtaagtgttctagaggctggcctttttggcaattccatcatgaaaagaaaatcttacaccacgtaaattttaacagaaagaccactgacaaaataacatccacatccatgactttcatacataaagcagcattaataaaacttcttagttagaagttgtatacattaagttcccccagaaaaacatccatagcaat

SEQ ID NO: 167009 - DNA, 670 bp, Homo sapiens
cctactttgcagaattgtcgtgacgattaaatgagagtgtgtgtgagtacctagcacatcgtaagagagagctcagtaagttatagtagctgttattgtttaaacttcaggaattagctaggttttgctagaactttcatctgtgcttgtaagatctttttgaatccatatgtatttttagcagctgtggctaagatagtttttttcccttgctgtgataatattccttatcttttatatttcaggctattgttagaattaaatgcgtttgcgagtgaggaatagatttaagagttatttcaattcagaccgtggaacatctcttcacaaaatgggttagtttggattggcagtatacttttaaatctgccttcgatcactcagaatttgtccagttctgtatttattaacatcagtttgtttatttattcagtaaatattgaatgcctgttctgtgtaggtcattgtcttggcagttattttgagctcttgctacctgctgaattatatcttaaaatgaagaaatttacatgatagagtgatatttattcatctgtgctgaagattaaagtgagaagtatgtggcaggcgcggtggctcacgcttgtaatcccagcactttgggaggccgaggtgggcggatcatgaggtcaggagatcgagaccatcc

SEQ ID NO: 167010 - DNA, 371 bp, Homo sapiens
aaaaaagctccccataacctcgagaaacgtttctggatctgagatatccattagcacatttagaaggtacctatttccattattgtgaaggagttgtaaatgaaataaacaactttaaataatacctcccttggtcaaactgcattaagtattccctgatggaattcattcatcatcattcaaacagaatggtttgcaactcaacctgcctagtgtggggtctggaattcccaccacagtcactgtgccttaagcactgttgcagcagaaggacttgaagtaacacatgaatatataatgccaatttgcatgtcagcatggattgttgaaattgaagttagttaattgtcacattgtaacaggaaaagaat

SEQ ID NO: 167011 - DNA, 466 bp, Homo sapiens
acatgtccttcaaagtccctgttggttgatattataaaagaatgtaatgggcatcttttggaaacaaagatccatcacattttgtgtggtgttctcagctggtggagaggtgtcaatatccctgcagagatttaaaatatacacgtttcttttacaacctaaagatcagagagccttcctcagaaccttcatgatttatgcggtgtgagaaatgggttggtattcgattattttctgttctaactcattcattcattcattcattcattcattcattcgcttattacatgccaaggcctattccatagtcaatattatgtagttaaagaagggtcatctggccgggcagggagccttatgcctgtaatcccagcactttgggaggccaaggagggtggatcatgaggtcaagagttcgagaacagcctggccaacatggtgaaaccctgtcgctactaaaaataga

SEQ ID NO: 167012 - DNA, 142 bp, Homo sapiens
catctcttcgtgatgccaagcctaatttcagcactaaattatacgctttgtagcagagaagcaggaagtattaagaagagcattgatggtggtggtggtgggggcttacatagatttgaagttgattccaacccagataacc

SEQ ID NO: 167013 - DNA, 271 bp, Homo sapiens
gaactggattgtttgtaactccttttttgcatcttaatcactgtactttaggaagattcctccaaatgttctggcatttcttttatgttaatggctgtgtcagagccagttgtttgtatcacaacttattcagctatttcaaattaatgggcattccctttgttttcatttcttaaacattgcaaattatgctgcagctaccatctttgtacatatgccataggaattggtccttttgtttctatggaataaatacttcagagtacaattt

SEQ ID NO: 167014 - DNA, 274 bp, Homo sapiens
ctgagggggtgggcggtgcaacgttagtgaggagaaccagtgtgttatgagacccaggcggttggttgctggctagtggagggctttctccctctaggttaagaggacaatggatgggggctccagcaagggttgaaacctagttcttaaacgggtataaccctggatccttgggtcgggtttcagaggatccttacactgaaatttttgggaacttgagtattcatttttagggggaaggaaccgtggcttacctggccttcaaaacactgag

SEQ ID NO: 167015 - DNA, 257 bp, Homo sapiens
gaacaacatctggcacaaagtaaggtgtaggtgaccagtaagtatttgttgagtagatggattcatttctgtaatttgctaccatgcccacctacctgttagcatctgcagtgacatactggccttcctgccagttcttatagataaactctccaagggcagaccttccacttgtattcgtcttccaaactccatcacctcttgcctgctaagacaagcagttctctcctctcctgcatcatcaagttttcccctct

SEQ ID NO: 167016 - DNA, 342 bp, Homo sapiens
tgagttggaggcagcatcgtaatgacaggatgccaccaagtgttaagttggtgttcattgttggggctggaggaagctggtctgcattccattcagagggatttggatcactccatggagatgagggtgtggcctggattattccaatggggcagggatggacagggaggctccatgaagagtagtgaaagggggtattgtgctatttgagggagatggaggaactgatgtgctaaagagatggaggtggagagtactggattttcccacctgcctgggagggtactgggacgaggggatccagatgagagggatggcctgtggtgacaggaatagagtggc

SEQ ID NO: 167017 - DNA, 611 bp, Homo sapiens
ccaccccagcatgatttcacactaaaatggctatttctcactcttcagatattaagtttcttaacatgtaagaaaagatgaaagaatccaaggcaataatggaaaatattctttttttttttagcagaaatatgttagagtacaaactttgccaggcactggtagctactgtgttttcacagccctagtcacatctaaccattttcctttaaaatgacagacttaaataaaaaaaattcctctgaggtgtcataatagaatcctatgaaaaagtagccagaatttaaaaacttttctgtttcagagagttctagcttcccatgaacagcctgagtctgaaagcatatcaaagcaatatgacttcaccatccatcttctggaattaatgaagtagcagtgacttttccttatgaaaggtctgtttggagggcaatgttggaaacacagtgcattcagctggcagaccttgaaggcaagatgtgcagaagaactgactgcacaggaatcagtcctgagcagagtgattaccccacagtgtttggctaagctgctgttatccaaggttctgctgaataaaactcatagaagaacaaatgaacaaagtctgtctt

SEQ ID NO: 167018 - DNA, 451 bp, Homo sapiens
atgggcatttacatcatttattcaccaagaactgtaattaggcattttctttctcttttattatattttaaaatttaatatagagacagggtctcacgctgtcccccaagctagagtgcaatggtgcaaccattattcactgcagcctgaactcctgggctcaagtgatcttcccacctcagcaccaccacgcctgtcttgtttctgttttacatgctcttggctagtttctgtttcccactggtgttagggttttaacttctgttgattcacaggatgcaggtgggggagagatggcaagggggaaaatatgaatttgattactcaagtggaacaaggtgaaaccattagtttaaaataattttaggctgaaaaattaaaatcattaaattatttccttcatgctgttattacactgtttttgtattaaagaagtaagcataaatatgag

SEQ ID NO: 167019 - DNA, 240 bp, Homo sapiens
taagacaacaaaaaacctgtgctttcttctactacattcaaatttgaaaggcacttctactcggacacaacagcacagtcagaaaaatgaaacagactcccaagattgctccttcaaagcagtaacatcaaagcatctagaaatggaattggagaatgccacagaaatacgagaagacattctatagcttctacttgggctttatagaaataaatgttgtaagtggataaaaagggattt

SEQ ID NO: 167020 - DNA, 202 bp, Homo sapiens
acaaaatggtgcctcaactagagataaattttctttttgagaagttagtttttgaaggagtgagttcatgccgtagtttcctgtttggtttctacagctttaacttgccctggaaaactcagaaggaaatggttcattcaaagtctacttactcttttctacttgaaaacatacccatgccctccaccccccaacccccggc

SEQ ID NO: 167021 - DNA, 393 bp, Homo sapiens
tgcatagatatggaggggtcaatcaaagataatcttaaaaaacaataaaaacaattacatgcaaaaattatttatggtaaagagtcagaacagatatggaggattggttattaagggagaagggacacgagggagccttcaagaatgctggaaactttccataacttaatcttagtagatacattggttaaaaaaaaaattcacttaagcactttattgtttgtacatcacaactgaaaaaaatacacacaaatggttgccagattatgatatagaaagtacttctgtaggccaggcacagtggctctcgcctgtaatcccactacttgggaggctgaggcaggagaattgcttgaacgtgggaggcagaggttgcagtaagctgagatccta

SEQ ID NO: 167022 - DNA, 468 bp, Homo sapiens
aatgaatagaaaatgcatgggaaaacaagatggacagagctttagggacctgtgggactatgaacaatgatctcacatctgtgtcataagggttccaggggagatgggaaaaagtgtggggctgaaaaatcaaagaagcaatggctgaaaatttcccaaatttgacaaaagacataactctgcagacttcagaagctgaacgaatcccaaagagaataaatccaaagaaattccacactaaaacacttgagttaaacttctgagaactattaaataaaaaaaaaaaaaaattaactgagcatggtagctcatatctgtagccctagctacctgggaggctgaggtgggaggattgcttgagcccaaaagttcaaggttacagtcagctatgattgcaatgctgctctgcagccagggcaatgaagggagaccctgtctttaaaataataataataatgataatcatta

SEQ ID NO: 167023 - DNA, 132 bp, Homo sapiens
atccatcatatatagggtgttttgattgtccaatttttacttgcttttgctctatcccccatcctttccaatgagagagctgtcatgcagcagatagtgaacaagccttggagtcggacgaccgtgttccag

SEQ ID NO: 167024 - DNA, 304 bp, Homo sapiens
ggcctgagtttgtgtttgtgcactgacagccttacagagtgtagggaggtgctttgtgatgatacctgagtcaagaaagttctgggaagcccttaagtgcttctgcagttcttggactaatgtcagtgttcttgaggaagcagtgcggtgttgagaggcagggtgttgcacttctcgggagagggaatgtgggtggtgctgggttaatcttgagggttctgtggcgttgttcaggacgctcttctctctcaaggagccaaggacctgccagcatcagatgggaacagcttggcagggatttgag

SEQ ID NO: 167025 - DNA, 482 bp, Homo sapiens
agcctccagacatagaagttgttacctaaaaagaataggagtccgctggcattggacttcttcacagcagcagtagttggtagaaggcagtggagtaatacattcaaagttcggagtttctaatccagaatttgataacagccaaatgatcactcaaatgtgagaacaaaaaaagacattttcagaaatttaaggacttgggaaggttaacttaaacgagttcttgaatatgtacctagcaaaatgaaatagaagttcaagaaagaggatgaaatgagaccccagaaacggaattcctaactaacacaccagtgaaaatctcaggataacaactatgccataggcctagaaagcagttggttcaaattagaacgaaatggcagagttgtctgtgaagaatgtcttcaagaagaaagtaaaagccgttatatgaattatgtggtggaattttttaatgttaagataaaagtcaacgagagaaa

SEQ ID NO: 167026 - DNA, 407 bp, Homo sapiens
cacccacccacaaagaccatgcgtgctatttgtgtgccctcttgtttcccaggccatcagttatttgcagttgcatcatccctgaaggacctgaggttgctgccccacaggcccaggagctgccacccaactgataaagatgtaccatgttttaaggggtatctttggaatttaaaatctaaaatgtgaactccaagtagaggatgcgacacacccgctttgccagccagggctccaaagcaccctgagtccacggctcctgcatcatttgtggagaggcacttccagaggccagagaggctaaagtgcaccccattcctgcctttcccctgcttgctctcccacctccctcccaggtgacacaggacagacgaaaagccagctgcttttggataataaatagcctt

SEQ ID NO: 167027 - DNA, 644 bp, Homo sapiens
tgtgtacatggaataaatgccatagcatgtgggagagggaaaggaacaatacttaattaatttaataccttaaagggccttctgctcaagaatggacttattgctaggaatcaatttgccagctgagactttgagtgtccacatacctgcctaattagaacatgaacccacaggaaacactagtttctcctcactgtggaggattaagttgtgtagctggtttgaatcttcttactgaccatacatgactgtggattgctgccctagatgattggttttcaagtattttaagaacatgataaaatatagatgatagtaaaattatgttgaactggatttggcctttctttgattcactggcttggcaggtctctgagagccttggtcattttcatgagcattagtggtcagagtccagcctgaagcagtacaaaatgcctaaaagtacactcaatttttcctgaccctttgacatactctggggaattagttttttaaatattaaatccctgatatcaacttgcacagtattcttgcttttcatataagcagaaggcagactatgaaatgatctatctctttgtgttgtttttggtggttttaattttgcgcaagtgagcacttaaagcatatttgggaaggta

SEQ ID NO: 167028 - DNA, 169 bp, Homo sapiens
acaaacagcagacatatgaaaagatgctcaacatccttgatcattagagaaatgcaaatcaaaactacaatgagatagtatctcaacccagttaaagtggcttatatccaaaagacaagcaatgaaaaatgttggtgagaaagggacacccttatacattgttggtgga

SEQ ID NO: 167029 - DNA, 195 bp, Homo sapiens
atggaccaataccaggcttttaaggtagctgagcaaagggttggtggaccctaggggactgtgtctgcctttctccttgtgttccccaagaggccagtgtggcatggacctctgtgagatgatatgtggttgcagtttttaggtgcgaaagggacttaacttgctcatggtctcagctagtaaatggcacaagag

SEQ ID NO: 167030 - DNA, 408 bp, Homo sapiens
actggaactctacaagttgtgcagtcaggatgctgagcaaaagaagccagatgggaagagcacacactgtgtgcttccctttatagaaagttcaaaaccagcaaaagtcatctatggggttagaattcaggacagccattaaccttgggggtggtggtggggaggatttaccaggagagacatcaagggggcttctggaatgtcctgtgtgccgagggactgctgggacagtggtgggaggtagcaggagagcggctctcagacatacccctccgttgggaaccacaggggcagcaggccagggagtagggtagggatagggcaccccttctgtaacactgcagtgtacatggaggaaaggggcagcccagaggtaaggccaggcaagtgacaatcagcacaataatc

SEQ ID NO: 167031 - DNA, 236 bp, Homo sapiens
actggaactctacaagttgtgcagtcaggatgctgagcaaaagaagccagatgggaagagcacacactgtgtgcttccctttatagaaagttcaaaaccagcaaaagtcatctatggggttagaattcaggacagccattaaccttgggggtggtggtggggaggatttaccaggagagacatcaagggggcttctggaatgtcctgtgtacatctgggtgctcattccacgaatg

SEQ ID NO: 167032 - DNA, 227 bp, Homo sapiens
cagtcagcacacaaattcagctaattctctccagtgtgaattgggcatccttctctccttttgtcggctcattctgatcagaaaaggtcttagaaacaaaatatttctctatccttatggttgctgtatctggaaagcccaagagttatagaaaggctggagaaaagctaccaaaatgaccataaggtggggtgaagagcaattctcctaagatacagcaagaagga

SEQ ID NO: 167033 - DNA, 146 bp, Homo sapiens
atacaggttggtgggggctcagttgcagtcatagggatgggctgtgggaggtttcaccctctagcagttgaacctcttgtactgtgtgtcctcttcatttaccatcacaggagaagaaagacagacaagcaaaagcctgtatgcct

SEQ ID NO: 167034 - DNA, 343 bp, Homo sapiens
gcagctgattaggttgtgcccaccagattaagggtgggtctgcctttcccagcccacagactcaaatattaatctcctttggcaacatcctcacagacacacccaggggatcaatactttgtatccttcaatccaatcaagttgacattcagtatcaactgtcacataaatataccagagtccctgactatctaagcaaactgttagccactgtccatgaatcaatgttgacctactcctctgccatgtctctttttagtctaagtggactgctagatatacagtctgaagttctgcctacttggagaatctcccttctcagtttttaaagactatttctgag

SEQ ID NO: 167035 - DNA, 199 bp, Homo sapiens
atcgagctggtccgcagttaaagaaagagagagagacagagagagagagagacagacagacagacaggcaggcagagaaacagagtaagacagaagataggcacagagagagagagacagagagacgcagaaaaagaaagagagggcgctttatttttttagtgcgtctgctggactgcggcgcactgtccgctgcgcg

SEQ ID NO: 167036 - DNA, 238 bp, Homo sapiens
atcaggtaattaaataaaagaaacatctagaggattctgggtacaaatagagtcattttggagaaacttccaggtgaactctttggtggcagctgtctgtcataagtcaccctcggcagtggagttcactgttattcttggaatcaggaatcgagtagatcacagggagtttggccccagggtacttgggttgtcttctccaagcatgggatttttggaatgaagtttagaggctgtc

SEQ ID NO: 167037 - DNA, 130 bp, Homo sapiens
tcctttacatggcattccgtgttcatcatgatctttgttcctgcctcaatcctcaaatgccagatcttttatcctcttatcctctgtcctctacaccccagctcagatgcttgacgacggcatgctattt

SEQ ID NO: 167038 - DNA, 378 bp, Homo sapiens
cattatgtgatccgccgcttagctcccaaagtgctgggatacaggcatgagccaccacgcccggggtcttttttttttcttaaatagaaatggggtttcatcaccttggccaggctggtctcaaactcctgacctcgtgatccacccgccttggcctcccaaagtgccaggattacaggcgtcagccaccgtgcccagcctcaactccaaattttaaaaagggcttaaacgaagaggatgaaattctggaaggctaaatgaaaagagaatgtgtctgttgaattcgataagcaattccttgcatttgagaaggcaaggagccgacgggaacctaccgacagggctgccacgcactgctgcagagctttccgtgcaaag

SEQ ID NO: 167039 - DNA, 553 bp, Homo sapiens
tttgcaataaaaacaagtttggtcccctggctctccctcacccttgccctctcttgctctctttctctcttgccttccaccaagggactatacaaaacaaaggctctccccagatgccagtgccatgcttttggacttctagccccagaaccatgagccaaataaatttctgttcattataaattactcagcctatggtattctgttttaacagtataaaacaaactaagacatgcatgttttaaagcataactagattccccttcttaaaaaatgggtatttggggacaggcatggtggctcacgcctgtaatcccagcactttgcgaggccgaggcaggtggatcacctgaggtcgggagttcgagaccagcctgaccaacatggagaaaccctgtctctactaaatatgcgtggtggtgcatgcctgtaatcccagctactcaggaggctgaggcaggagaatcacttgaacccgggaggcaaagtttgcagtgagccaagatcacgtcattgcactccagcctaggcaacaagagcgaatctccatctc

SEQ ID NO: 167040 - DNA, 652 bp, Homo sapiens
gtatgtcagagctggcaagatacgtcagaagagaaaggagaaactcttaactaaatagagttggaaataaaataattgtctgtatggaataagatcaaaggtcccacatgttaaagtcaaccccagatgaattaaagtcttacatgtcaaaaaaaattgaaacttttagaagaaaattaaggtggatatattttagaccttaaggtagagaaagatttcttaaagaagacacttacaggattgattacaaacaaaaagactggtacatttgaatgtattatgttaagaacttttccaccaaaagaaagcctcgatttcctcatttttaagatgaggataataatccctaccttatagaattctaataagatgaaatgaagcaacatatacaaaatacttagcacagatcctaacacctacaaaataataaatggtaacgattattattcttctcaaacaacaatcctattatttatcaaataatactgagtaatatgacaagacatatttaaaccacacaagccatatgcagacaagtgtttaatatcatagtgatagtttcaagagagagataataatttattctacatttatcagaggtctatagcccagtagtcaataaatacttatctatagtcaataagtactatca

SEQ ID NO: 167041 - DNA, 397 bp, Homo sapiens
gcctggccagagcatcaggcagagcaggtggaggcttgttcctccaccccaacacgaggagtccctcagcccctgccctcaagtttgagaaccacatacttcccagaaagtggaggctagcatggtgagggcaccctgcagagccatctgccatcccctgcacccacagaccaccctgccttgtagccccaggctgtgggatactcaggaaggggtgaatggtggagtcaacagactgaggggaaatcaaagcttttagagacatttgcaggatgaacagatgttcaaacgttcctttatttggtctccagacagacgcagaggcctcccttttatcccagtaatcggtgcattatgctttaatttgcaaatggcattaaaaatattaacaggggca

SEQ ID NO: 167042 - DNA, 532 bp, Homo sapiens
tgaagagtttggtcactattaaaaaaactattaaaaaaaggatgactttgcaatctaagaaggacatgagatcaggacacaagagtaaaatggtatattttagatgatggtccctgctaaatctcaaggtgaaatgtgattcacagcatttgcggtggggccgactgggaggttttgagacatggggaaagatccttcaggaatggcttggtatccaccccatggtaattagtgaattatttctgtattatctactgtgagatctgattttcaaaataatctagcaaccatcctcccctttcatgtcctccctctcaccatgtaacacagcctgtttcccctttgccttccaccatgactgtaagctttctgaggccctcacatgatgcagatgctgatgccatgcttctcacttagcctgcagaactatcagccaaataagccaaatagactagtacactgtccaaagcaatatacagattcaatgcaatttctattaagtaaccaatataattgattacatattttaaaa

SEQ ID NO: 167043 - DNA, 473 bp, Homo sapiens
cctcaggcttcccatctgtgaaatggggcaaacagttttactccataaatgagggtgatgtgggttaccatgcttagaacaatgcctggccataattggcacaaggtaaatgtcagccatgtaaaatgactattcttcagtgtcaaatgggacagtcactctcctacaactacacctcacttgagttccaatggccacccttcgtcttgaccttaaggcctaggggaggtcggactttcagctgttgtgagcccggtgcttccctttccgttgttggctttgcttaaccctgtactcttctctgtaatcaggccctccatttactcagtccttgctactctgtgtgtaccatctctttgctacgaccctaactctggtgcctgcacacacatcacatagacacatagcacagacacgcacaacacacagacacacacaacacacacacgtacacaacacatgcacacagttca

SEQ ID NO: 167044 - DNA, 288 bp, Homo sapiens
cagcaacacgcactcttccaccttcaatgttagggctggcattgccctcaacaaccactttgtcaagatcatttcttggtatagcgatgaatttggctacagcaacaaggtcgtggacctcatggcccacatggcctccaaaaggaagaccaccagaccaccagccccagagagagcatgagaggaagagagaggtcgtcactgctggggagtccctgccacactcagtcccccactacactgagaatctcccctcctcactttccatgtagaactcctgaagaggga

SEQ ID NO: 167045 - DNA, 317 bp, Homo sapiens
taggaagctgatgattttaggtaggggtggggcggtcagggaaaaaagtcaactactggctgggctcagtggctcatacctgtaatcccagcactttgggagaccaagctgggaggatcacttgaacccaggagttcgagaccagcctgggcaacatggcaagaccccgtctctacaaaaattagccaggcatggtggcatgtacctatagtcccagctactcaggaggctaaggtgggaggattgcttgagcccaggagattgaggctgcaatgaactgtaatcgcaccatggcactccagcctgggtgatagagt

SEQ ID NO: 167046 - DNA, 440 bp, Homo sapiens
gcaacaacataaaaaccctagtttcttgggccctaccgccgaccacttgaatgagaatttcctggggatggtcctgggaatgtgtatttttaacaagtgcccatgagagtcttaaattaggtaagtttgggaaatgagatatcagtagaaacaggatactgtggggtcagaggaggaagttgctcagtctgtctgtaggtgggaagattagccaaagcctcacagcaatgtttaggccacaccttaatgagtgagtaagcacccaaggagaaaggactttccaagcaaggagaattttaaaaattagccaggtatggtcggtgcacacctgtagtcacagctacttggaaggctgaggtgggaagatcacttgagttcagtgagccatgaacatgccactgcactgcagcctgtgtgacagagtaagcaagaccctgtct

SEQ ID NO: 167047 - DNA, 144 bp, Homo sapiens
ctgacaacttgggaggctgaggtgggaggattgtttgggtccagagttcaatgctgcagtgagctgtgatcctgccactgcacttaagtagtctagatgatagaggaaaaaacaaaccccacaatgatatagtacttcatactc

SEQ ID NO: 167048 - DNA, 866 bp, Homo sapiens
tccaaaggagtggtctagagttgatatagaaaaagacttctttagtaagaaatgttcagcaaagagctcattttaggtgtatgactcaccttctgtacccagttctccctcttttttttttaaggctagtggttattccccagacagagagaatcctgcctcacctttgatcatttccttgaacaacatctcaactttgcactaatccttttatctccatcttttaactctattaaatagagttaaaaaggtgtgagctacctttttttctaaccacagggcacttctatatactcctctaaccaacgggcacttatgccagtatttacacctactaatcttactgattagaatctactttttttttttttttttttgggagacatggtctcactttgtcacccagactggagtgtagtggtatgatcatggttcactgcagcctcagcctcctgggctcaagtgattcttgtgcctcagccccccaggtaactgggtctacaggtgcatatcatcacacctggctagtttttgtattttttgcagagatggggttttgccacattgcccaggctggtcttgaactcctgagctcaagcaatctgcctgccttggcctcccaaagtgctgggattgcaggtatgagccactgcgcccaacctagaatctactttcacgtttctgacgtgcagttccagtaaatgaatggaacttttatcttgatttgagagctcttggatatggatgtacctgtttttattaatacatcttggatctgatcaactgtagtactggaggcatatgaaatagcatccaaaatttgagaaattaaggcatagactgatctataggatatttggattcta

SEQ ID NO: 167049 - DNA, 408 bp, Homo sapiens
ccattggaaagaaaaggaaagaagaaagaaagaaaggaagaaaggaaggaaggaaagaaagaaagaacgaaagaaagaaagaaagaaaaagaaagaaaagaaagaaaaagaaagaaagagaaagaaggaaggaaggaaggaaagaaagagagagaaaggaagaaaggaacgaaggaaggaaggcaggattgcaggcaggctgaggcaggagaatggtgcaaacccgggaggcagagcttgcagtgagccgagatcgcgccactgcactccagcctgggcgacagagcgagactccgtctcaaaaaaaagagaaagaaagagagagagaaaggaaggaaggaaaagaaaggaaagaaagaaagaaaggaacggtcgacccggccgcgaatttagtagtagtagtcgacc

SEQ ID NO: 167050 - DNA, 428 bp, Homo sapiens
ctctctcttccatccttggtatttcaaagaaacacttgcagctccttcaaagccacatagcctcacttcccctcttctccctggtaaactcagcaaaaaagggacatccacagcaaaaggaactcaagaaacagtaataatcctggggacctggactcactgagacagcccagagaccgtagtgatcagggtgcggcccttttcagtgccattgagaacaagggagggagaagtcaccttctcttgccacatctttgtcattgcactccttccccaacctggggctgcagagaaggtctgcccacctggcttctgagtcatccaagtctaggaggttgctctttgcctatgtcccctggtccccaggtaggtgccagttaggagtgaggtgtgggcagtggccgccctggtgggttcccctctctctg

SEQ ID NO: 167051 - DNA, 1098 bp, Homo sapiens
ctatttagattttcaatacatatggtccaccttttctaggcatagtgtattttgcgagatggtcttaaaatgcatcagcataaagcaaaatccaggctgtgtctccaatagtacatataattagttgcattgttcttagctattagaagaaacttttaaatgtgtgcgtaaagactggaagaacagaagtgtcagtattaatttactaaatgagtagagtgaggacatcacaatggtgaaattcagggacaacctgtaggaaacaatagtgctttgtgtgtgtgcagggagcagtgcagaatggccagaggagcaagtgcagtagcaggacaaagcttccccagggagacgcaccctgagctgagttcgagagttgaccaagagaagggacagcattgggagaaagttacctgaatgtcacagaagtaaacagaaagagagagagcacatacgatgttttgggcaatgcaggggagacacccattcatcctctccttcagtgaatacatactgaactcttacactgtgcctggtattgctgtaagcctcggggatatggcagggaaccaaacaaaaagatctgctctcatggagctttcgttctaatggagagagacaagacatttgacaaattaaagaaacagaatgtatagcacaccagacagcactaagtatctagcaccttctgtagagagaaagaaacccagatgggtagtcaagaatactggagaaggaggtatgatcttaagtaggataattaggaaggtctcactgagaaggtgctgagccaattcccagggcctcagggagggaaatatgaacaatatatcatctgcctcaatgatatataactttctaggaggatattgacattgtaatccaataaattctataattttaaaatctaagatgtgctaattatttaataaatatttttcaacaagtgtgtggaaagtaccattcaaagtatgaaaacattaggaaactaaaggacaaaagttcttgtcctcataagtcttatattttggaggaggacagacaaaataaaaaaaaacatggttatacataattatctagtgtgttcaaaggtggtaagtg

SEQ ID NO: 167052 - DNA, 483 bp, Homo sapiens
ggcgtgagccactgtgcccggcctgccttggttattttcataagatttctagaattaggttcactgagttaagtgatataaacatttttgaggcttttgctacatatttttagattgctctacaggagtggtctagtttatacacccctaccaggtcgccatgtatgtttctacacaatagccctgctcgcaacagatagtatattttgctctgttgcccaggctggagtgcagtggcgcaatctttcttggctcactgcagcttgaaatctcaggctcacaagtgatccttccgcctcagcctcccaagtaactgggactacaggcatgcaccaccatgcctggctaatttttttttttttttgtagagatgggtttttgagaccagcctgggcaacatggcaaaactccgtctttactaataataccaaaattagctgggatagtggtatgtgcctgtaaatcccagctacttgggaggct

SEQ ID NO: 167053 - DNA, 1094 bp, Homo sapiens
ggcgtgagccactgtgcccggcctgccttggttattttcataagatttctagaattaggttcactgagttaagtgatataaacatttttgaggcttttgctacatatttttagattgctctacaggagtggtctagtttatacacccctaccaggtcgccatgtatgtttctacacaatagccctgctcgcaacagatagtatattttgctctgttgcccaggctggagtgcagtggcgcaatctttcttggctcactgcagcttgaaatctcaggctcacaagtgatccttccgcctcagcctcccaagtaactgggactacaggcatgcaccaccatgcctggctaatttttttttttttttgtagagatgggtttttgccatattgccaaggttggtctcaaactccagggctcaagtgatccacccaccttggtctcccaaagtgctgagactataggcgtgagccactgtgacccactgtatgtttctcaaaaatacaaaatgtcgtaaaagtgaaagtctatatattcctatcatttagtaaatagtaaaatactggctttttttttttttttgtctgccataaggatctgaattatgactaatgtctgcactgaagggaaggtacctggcgtggcatctgggtgcctcccttgtaggtgtatcagagcatgattcaggagcagcaggttgcccttgtattctgggcaggaacacggcgtctgtccaggcagatggccatgctcagaggcctcacggtggggaccgctgtgctgtcgtcacaccctgtggcagcagattgttgcccaggagggtgctgcttcagttgctggtttctgcccttcctctttcctgtcgagcaggctttctgcttctgaacaggctggattcagaaaggccgaatgaatctgtccttgaattcatagtgacactgtcagttggtggtgggcagagatgcaagttgagcccaagcaccagactctcaggggtgcatttaagcagcaagcatataggctgaaaacagcttccaggtattttgttcgatcgctgttaaaaatctagaaagtgtacataaaaatgggctcttcta

SEQ ID NO: 167054 - DNA, 315 bp, Homo sapiens
ccttccctgccagggctccctgggaaggccagagccaggacaggtatccgaagctaagctgggagcgctctcccctgcctcccattcctgcttggcttgggggactggggagtcccggagtggagtctgagatgctgcattcaaagcctggggaccgtgcaaggcagcctccacaagcactgaggaggccacagggactgtccagctcccccaagccacattccctccagcctggctagagccacgcacctcctgtgctatgatttccttcatatgttttcctttcaatcaatggacttttaaaaaacttagcct

SEQ ID NO: 167055 - DNA, 427 bp, Homo sapiens
ctgaactttcttttataacaagctcactggtgataacctcctcctgagatactgacagtaatcttttcctaatcacctcttattaggccctacctcccaacactgttgcgttggggattaaattacaacatgggagatttggagggggacacagtcaaaccatagcaatgtctgtttaatttttgtaattatggcacagatatccatttgaaatatgtgtaatatggaatactataacttccatatcttatgtgtctatgtaagccaaatggaagtattatatgaattaacataatatgatgtcattatctagttatgttaacaacacctttaaaaatttaaccttggaagcgaggtgaagaccagaatagttactcagtgtatgtttattctgcacttgactagcattgtactctgctagttacca

SEQ ID NO: 167056 - DNA, 291 bp, Homo sapiens
gtgggttgaccgtggcttgtgggttgaccgtggcttgtgggttgaccgtggcttgtgggttgaccgtgggttgtgggttgaccgtggcttgtgggttgagcgtggcttgtgggttgaccgtgctttcctgagtgatatttggcagctctgggccagcattctatcagcccagcattggattccagttacctcacgcttatcagcagctgattcatctgtgctttcattcatgcccctgtccaatcatccttccatccgttcattcattcagtaagcatttgccacggtcca

SEQ ID NO: 167057 - DNA, 377 bp, Homo sapiens
caagacaagctagcttagataagaagacaggggaggagagaaactcagagggttagagtcctcctggggcgatgttttggggtgggaatgggctgcctgagagtcactcatagtgaccgggcctggccttcccagcagatgccacatgccctggagttaaggggcaaatgttaagtagagcgatgcctggttctggtctagagatttctgaaggcaggaagttgttggaactgtccacgatgtaatgtacctgggaagaggcagaaccaccctgcccctccctcccaggtcttcacagcccagaaggcagtggaaggaaagttcagcacttcccggtgggagggcagagaccagaaccctcaactgcccagttacct

SEQ ID NO: 167058 - DNA, 414 bp, Homo sapiens
gagaacattctgatttaccataagaactgtttttattaaaaaaggcataggaaaaattggatctcatctaaatgtttaaatgcccccaaaaacctcaataaatatggattgtaaaaatctactctcaggacaatatacatgtaggattactaattttgaacaattactatactagttcattctttagaggtacagtttttccaacctgagaaactaaacatttcagtgatttttactctcctgataatattgagtaaagaaagccattctttttcttgttatttatgtccaatggtgggggagcacaacgttttcatttgttttgttttgtttttgagacagagccttgctctgtcaccaggttggagtgcagtggcacaatctcggctcactgcaacctccacctcctgagtt

SEQ ID NO: 167059 - DNA, 221 bp, Homo sapiens
tcttctgtacaaccccatattcaacactactgctaatctagataattttgaagcaaatctcagatgtcatataatcaagtctttaaataatgcagaaagtaactagaagggacttagagccagaaaataggaatgacagaaaaaagtcataatagtttataagaggaaaagggcagttgaatgtctcctcatatctgcagtgctgggattacagacatgag

SEQ ID NO: 167060 - DNA, 403 bp, Homo sapiens
taataaaagaaaagaaataactagaatcaggctggaactgtacaaaattgagacccaaaaatccatacaaaggatcaatgaaagaaaatgttggttctttgagaggataaaacaacattcatagactgctgctagattaacaaagaaaaaaacagagaagatccaaataggcacaatcagaaatgacaaagatggcattataactaatcccacaaagatacaaaagatcctcggagacttttatgaacacctgtatgtataaaaactagaaaatttagaagaaatggataaattcctgcaaactccaaacctcctaaggatgaactgaaagaaattgaaatcctgaacagatcaataataacttctgaaattgaatcagtaataaaaaacctatcaaccaaaa

SEQ ID NO: 167061 - DNA, 317 bp, Homo sapiens
ggtcgactactactactaaattcgcggccgcgtcgacgtgtgttccaggtcagggaggccacggggtggctagaagcagagagcgagtgaagaggttggtgctggtagggccacttggggcctttgtcatgaggggtggggagaatcctttacagcagtgtaagcagggcagtgacataattcacatctgcttgtgtcggaaatgctttaggcactgtggagatacaggggtggcggtagagaggctacctggaaggccactgcagttgtctaggcaagaggtggtgggggcagggactgctgcagggttagatctg

SEQ ID NO: 167062 - DNA, 307 bp, Homo sapiens
ttcctgtttcccagcattctaaagtttcagacttatgcaatgacatcagtcctcatgttttgtaaggtgctaagcagttttgcaggccacacatctcaatggacagcaacacattttaaacaaggactctaccttccaccacatcaattatatccattccccacatctcatttaccatcagatattcaacaatattattgtaagtaggttgggaactgaactgcttgggaacaggcagaggtcatgcctcatttatttctatatttcttgtactcagtagagaacgaagtttgcagatcattttcaa

SEQ ID NO: 167063 - DNA, 340 bp, Homo sapiens
tcccgggcacgggtcaggctaaccgcgggaggaatttaatctagagtctaacttgcgtggctgtccccactgagtcccgggcacgggtcaggctaaccgcgggaggaatttaatctagagtctaacttgcgtggctgactccactgagtcccgggcacgggtcaggctaaccgcgggaggaatttaatctagagtctaacttgtgtggctgtccccactgagtcccgggcacgggtcaggctaaccgcgggaggaatttaatctagagtctaacttgtgtggctgactccactgagtcccgggcacgggtcaggctaaccgcgggaggaatttaatctag

SEQ ID NO: 167064 - DNA, 445 bp, Homo sapiens
attagcaaagcatttttgaaataaaaaaaaacccatagatgtgccaaatgtaatagtagagcaacaataataaatatttgtaataaaaatcagaacttgttaggcattatgtggtttctggtcaaatatggttgtactaatttttctaatgctattttctgtacaaatataagaattttttaaattaagctatggtaggtatatgaacacatcttgatattactggaggtaggatttaccactcactttttgtgaccccaagtgtaaccctgaacagacttctgtcttaacaccaataacacatgattgcactgtcttctccagtgactggggaaagggacagtgctttgttcatttttgctttaccagcattcagcacatcgcctaaaaacaattgtgggaattcataaaatgtttgtaaataaatgagcaattgagtggacta

SEQ ID NO: 167065 - DNA, 111 bp, Homo sapiens
aaatggagaagcccttccttctggctgcctgaattggagctcttttcacacagccctatcaataacccggctgatggtagcaaccatcattcactgagcatttagtaccca

SEQ ID NO: 167066 - DNA, 192 bp, Homo sapiens
tatggctcactgcagcctcaacctcccaggctcaatcagttctcccacctcagtatcccaagtagctgagaccacaggcacacaccaccacgtttggctaattgctgtagagatggggttccatcatatgggccagacgggtctccaactcctgggatcaagcgatctacctgccttggcctcccaaagtgc

SEQ ID NO: 167067 - DNA, 299 bp, Homo sapiens
gttacacgatttcatgtctccatctactaattttgccttctgtgtcaattctgggtagcttttgattgacttttttttctcctatgtaatcatattttcttatttacatgcccaggaatttttttcaatatactttttatttttgaaaaattttaggtttacagcaaagttgtaggtcgggtgtggtggctcacgcctgtaatcccagcactgtaggaagccaaggtgggaagattgcttgagcccaggagtttgagaccagactgggcaacgtaaggagacctcatctctactaaaag

SEQ ID NO: 167068 - DNA, 338 bp, Homo sapiens
gagtaagtatagacatagatgagtgaatggaataatgtccagaacagtcatttgatttttgacaaaagtggcaggtaattaaataggtgaagtatagttttttcaacaaatggtgctagaacaactgcggtatcttttggtggaaaaataaatctttactaacatcatacataaaattaactctaaatggataataggcttagcataaacactaaaactatgaaactttaaaaagaaaacgtaaggttatatccttaaacttgggatagaaaaagatttcttagataaacacccaaaccacaaaatcttcatcaaaattggaaatcttttgggaaaat

SEQ ID NO: 167069 - DNA, 139 bp, Homo sapiens
gtctcaagccggttctctaataaattcctcaggaagtgcttataggatccgagttcttacatgttgtggacagttttcttgtgtcctttgctagacattagaaggctgtattttctggaaataaaatccatgtctcgtg

SEQ ID NO: 167070 - DNA, 186 bp, Homo sapiens
gagctcagtattctggtgacccgaaataacccccattgctcagtagagcctggatgccgtgcatggggccagaggggcctgtgctcatgcttgcagggaagcactgtgcagctggcgggtagtgggcagtgtattttcccagctaggatgcactttctccatgtgttgtcctgggagtggcccatg

SEQ ID NO: 167071 - DNA, 544 bp, Homo sapiens
ttagggtaagagcattcagtcatttacaatcattgttcatgactgctctttatcaggatgagggattcctattctttctctaatttcctgagagttttcacaagagctgatattagatcttgtaacatgctttttcttcttttttgagattgtcatgtgttttgtttttataataatttgttaatatgtggaattaatgattgctttttgactattataccaactcttctccacttgatcacaatgtattatcctttatattattgttgagtttaatttgctagcctttagaatatttacatctatgttcatggcggatattggtctgtagttttcttttcttgtaatatgacttcttgcttttagcaccagaatatggctagaagtatttcctcctcttcaaatttcccgaagaatttaattagaattggtattatttttctttcaataactgattgaatttgcttgtaaaactgtcaaatactgggtgttgtattgagcatgttaaactacaaattaaattagtagatattaaatattcaga

SEQ ID NO: 167072 - DNA, 372 bp, Homo sapiens
aattaagccaatgggacaattaaacaatgctagatgagaaaggaaaagtgttgaaaggttactatagggctcaattgtgcagtttccacataatcccaataatgtgaattgaatattgagctagacaaaattatggcataactatattggaaatatgtgtgtgcatagaaaagagctaaaccctcattttccatggcggggagtcagtgggtaacgctgaaacaaaattcaccaagcagcgtatcatctagagacaagagggtaaattgaaaataaaaaaaaagctaaaagaggtgcctgcaagcactgtgaggggagtgtctgcttttcttatccttttaaaaaaattgtagaattgtttgattcttaaat

SEQ ID NO: 167073 - DNA, 4394 bp, Homo sapiens
  misc_feature (108)..(108): n is a, c, g, or t
  misc_feature (295)..(295): n is a, c, g, or t
  misc_feature (1670)..(1670): n is a, c, g, or t
gagcaggaaaatatataccctaaacagaaactcttacttgttttatgagcaagtctgagtgagtcctaaaatggctggcgaagagctaccaatactgactgacaggtnaccttaaagcctctaggtgtgccaagtttgatttatcttagggactagaacctagtcttctaaatgtgattttgccttgctgtttcgtcctgatgtgaaggtaaccacacagagagattgggctgcatcagtaatgatatgcatacctttcgtgcatcagtgagcttcttccctgttaactgtatgnccacaaaatttagctggagtaaataaatatgcgacagaaatcctggaacaagatggtgaaattgcttaagaatcgagacttcagggctcaatgacctctgagcatgtttcccaaagtgtgacccacatgaccatctgtctctcagtctcctggtccctccgtagagcttctgaaactgaatctttgtggggtgggggtagcgttcaagaatcaaaagttgaaccaagctctttgggtgatacttatgtatactgaggttcaggaactgctggagagatgactgggcaccaagaggatgacagtgactcagctggcatcccttagctggttcatggcagagctgagtgggcactcctgtctctgaccccagcttcagtgctctttatctcctccatgcctcctcagtcgtgctgctctaagactgcttactggctttccttcatgtcctgggcacagagcagttcttttggtagcagatttgagtccacttcccccgtgcacagatcactgctcaggacccagagaggagcagctctgctccagcagggttttccattgcatcacacacccaaacggtaggatccaacagtcacacttgaaagcaaccataattgtgaggtttctgatgctgtagacttccttacatttctcacaacctagttagagagtcacatgggggtgaagtgtggctcgcgacctgccccaacaagtgcgtgcagaagccaggaaacaaaggagtaaattcacttcaaatgggatgcacatggtgtccgtgatgaagagacacattcagaattgcccaaggacaggaaaatgaccagagagagccagagctgagctggtaataaagagactccgagactgagtggagttaatgagggaagcatgcaacgagtggggcaatttcagttggtttctctcattgctttaagcgaaatgaactatacggacaggagaacagcctgcttgccccagtctctccttggccgccctctgttgtccctgtcaactcaggtgcccacggtgctcagaggaggtgctggcaaagcccctggagccttatgtaggccatgggggctcctaaaaggaacctgaatgaatcatttacagcaggtctctcttgtaaagcccagccacagtaactcgtacactgactgtttcaaaagacagcctttcttaatcatttaattgtttcatattcaaatatatctcctaattgtttttattttttcctgatctagaagatatgacaacagggtagaacttgggaagagggaataggaagctcgcccttcctccttccctcctcccctctctactttccttccttccttggtcatcaggtaccttctttgtgcctgctgttgtaggctanaccctatgtttggtggaaggcaaaaagaaaaatcagtaggatacaactcagtagggaagacagagatattcaagccccttgtcctcccagtgtgataagtgtggtggttgaggtgtgaacaaggggctctgtgaacagagaggacgaaagaggagctcctcctgaggctgttgggaaaagcatcactgaagagtgactttcagaagaagagaagaaaaagaggagaacatgcgtgattttataatgaaatagattagataaggggaaaaaaggcatttaaacaaggcaaaaagaacaggagaatagagaagagatgtggaggagaaggagcactgtagtaaacacgcagaaggacaggaacacttagacatgcaacccactcccaccctccgtcttgggggaggaaagcacactactgtcccaaagaactaatactgaaccagtgctgccttgtggagagaggcatggccaaggcgttcagagacctgggcctggtcccaccgctgcccacagcactcagcctctgagcacagcctggggtcatctgtgtgccctctggccaaggctgatggtagttctctgagtaattgagagtcattgcctgtctgtgcagtattgtgaaaacaagtcaccttttaactttaaaactactttaaaaaactttaaagttttaaaaaaacttctttaaaaactactcatgagatgacagtttctctgaccctcagaggaaggctgggctgcgcatacgtgaggaatttttacatgaacatcccaggacttgctgttcgcaggtgataaactgcacctccccaggactcccgctgcactcacatgcagctccctggacttctggtatctgacccggcccatttctgtgtttcaggggagaatttggcttgcgggagtactcagaagttaagacggtgacagtaaagatcccccagaagaactcctaagaaggccaagaaggaggatgaagcccagcctgcacgtctgtccctctctgctttctctgtagggcccagctctcaggaatacaaagttgagccacggtccttacttaaagattgaaaagataacatgtaggccaggcaggtcactgcacaactaaagcaaaccagctgggtacagtttcttggcactctgtaaggggccaccttaatcataccaaatattggggaaagtgggataaagggaggaggaggagctagcagacacatccagtatctccttctggagcacaggatgaaataagggagctgtattatttcatgtctttgtcacaaagaactttcctctcaaggaaaggtgacctttctcctgtcttcattttcctccttccaggccctcctcgctcacccacccctccctctcttccaaggagatgtcagctgagctcattctggggcagatgtttgggccgggaacaatttttcaaggttgtaaagccaaattatcatttcatgttatccatttcttcaaagcaaaacatgaaatggttttagctagagtcagaccagaatgaaaatgccaggagctggtacactacagatgtagtaagaacctgggatattcctgacccaatctggttttcttttacccataaataacatgaatgaaaaaagattgggacaatagagactggaagtcatcatgtgcagttcaccgcttctgagcttgctgcagttttggggtgtgtgtgtattagattccttctcagttattctggaataaggcaaggagtgggtggtttttcatagctagataagatcttttccaaagtttttcttagaaccaaccaaaaaacaatccgagtaggcccaagaatttgataatgctggatgccttgcagacatcattcagtttctaatattgggcaacaattattattaaatgaattatttctgtagttggaatctgtaccttctgaacctctacaccaataactgctgcaggtgtgattttggtctgtcacactgtacatctatcataatgtgccctgtatctattggcagtgaccttggaaaatctggccaagcctaggggtttccttttccatttgccaagttccattgtgccaggactgccgtgctccactgagctcctctgtcacaccccattcttgcccctcactgggcaggccatggcctacagcttgcagggagtaaagcaggcccgcctccctttcttcccatccacatactcctcttctgctttccagtgactccaccagtttgatgtgggaagtgttagcttcctttccttcttccatcccttcttccatctttccagctgtcaaatccaatccagtctctaacctaaatgcagatcatttatttaaaagtaccaaacataacccagagtatgtggaatatgggcaacatatatatagccttctgtatttaacgatcttctgcttcttaaccgtaccagttttctatttataactcttatctatccatgatgttttaaagtctccacttgctgttatttacaaacgacagtgcattcagcagcccagtgccgtgagccctgacagatgccgtatttctgagtgcttccatgtgaatgctgccctcctgtagcatgtgtccaagtggacatagccactaaccaactagttacctttggactgcaacaaaaaatgtgaaaatgaagatttatttcttttaatttacttaaaaagaaacctctgtgctagcaataaagcatttatattgtgta

SEQ ID NO: 167074 - DNA, 1268 bp, Homo sapiens
ttatagatgttcacttgggccagtgtcactgcctgagaggctcccggtgttagtgctatgtcgtttagctcggccaaccggtcttggtgttgacccaaacgagggtgcccaatgtcgtccttgttgtgttcaggcagcggttggaaacgtgtgcctccgtaagtctgtcccgaggtggccccgtgttgtttgccacagaccggcgccgatcacctgggcaagggggtgctgccaaatgcccgtgttcccatgcaggccccgttcaagaaaagctcggtgtaagctgggaatgttggagttgcttccgtggtctgttaaagcgctgattattgatggaagttactggcgctcaatccccaagtaccccaaagttgaaagcttgctcggaacaattatgcgaaatgggaatctggggcccttacaatcaaaggcacatctagttcccatgtttaaaatagtctccggggtccatttggagtgaggagtaaggaagggaagggacttatgcaggtctttccatgcggccttgatttagtccacggagtccaaagcccattctgaggcagggtctctaggttcttggtttacacctatatacaggcgagcgcgcccccgagcggggaccgcgcgcacagcccgcactgccccacgccgcgggctagggacacccggcccgccaccatgacttccagcaagatagagatgcccggcgaggtgaaggccgaccccgccgccctcatggcgtcgctgcacctcctgccgtcgcccacgcccaatctcgaaattaagtacaccaaggtaagcggccgcccagcgcccgtcgtccacggagactttctagaaccttcttcggtttccccgatctcttcagcgggtgagggctgcgggacggggccggggtcgtcggggccagcctgtcatcccggcgcagcagagggaccccctgcctgtcttcgggactggggcgtttgaagccccgccgtggtctgaggacgccttggggacttaacccaacccgaagcgcagcgttgaggggcagccgtcaacggctcctgccccggactctgaggctggtttctgtccgattctcccggtcccgactgccgcgggggaaggcgtcggaaccgcttagtatcctcagatggaggccggggttccccgtcagcttggccacgcagcctggccgtcgcctctcggtcctccgccttccgggcccctcggctgttggtcccaatcaggtcctccacagcccggagggtgctgagggg

SEQ ID NO: 167075 - DNA, 4006 bp, Homo sapiens
ttatagatgttcacttgggccagtgtcactgcctgagaggctcccggtgttagtgctatgtcgtttagctcggccaaccggtcttggtgttgacccaaacgagggtgcccaatgtcgtccttgttgtgttcaggcagcggttggaaacgtgtgcctccgtaagtctgtcccgaggtggccccgtgttgtttgccacagaccggcgccgatcacctgggcaagggggtgctgccaaatgcccgtgttcccatgcaggccccgttcaagaaaagctcggtgtaagctgggaatgttggagttgcttccgtggtctgttaaagcgctgattattgatggaagttactggcgctcaatccccaagtaccccaaagttgaaagcttgctcggaacaattatgcgaaatgggaatctggggcccttacaatcaaaggcacatctagttcccatgtttaaaatagtctccggggtccatttggagtgaggagtaaggaagggaagggacttatgcaggtctttccatgcggccttgatttagtccacggagtccaaagcccattctgaggcagggtctctaggttcttggtttacacctatatacaggcgagcgcgcccccgagcggggaccgcgcgcacagcccgcactgccccacgccgcgggctagggacacccggcccgccaccatgacttccagcaagatagagatgcccggcgaggtgaaggccgaccccgccgccctcatggcgtcgctgcacctcctgccgtcgcccacgcccaatctcgaaattaagtacaccaagatctttataaacaacgagtggcagaactcagagagtgggagagtgttccctgtctataatccagccacaggagaacaggtgtgtgaagttcaagaagcagacaaggcagatatagacaaagcagtgcaggcagcccgcctggctttctctcttggttcagtgtggagaaggatggatgcttcagaaaggggacgtctgttggataagcttgcagacttggtggaacgggacagggcagttcttgcaaccatggaatccctaaatggtggcaaaccattcctgcaagctttttatgtggatttgcagggcgtcatcaaaacctttcgatattacgcaggctgggctgataaaattcatgggatgaccattcctgtagatggagactattttacctttacaagacatgaacccattggagtgtgtggacagatcatcccatggaacttccccctgctgatgtttgcctggaaaatagctccagctttgtgctgtggcaatacagtagttattaagccagcagagcaaacaccactcagtgcactctacatgggagccctcatcaaggaggctggctttcctcccggggtcatcaatattttgccaggatatgggccaacggctggggcagcaatagcttctcacattggcatagacaagattgcattcacagggtctactgaggttggaaagcttatccaagaagcagctggaagaagtaatttgaagagagtaactctggaacttggaggcaaaagtcctaatattatttttgctgatgctgacttggactatgctgtggagcaggcccaccagggtgtgttcttcaatcaaggtcagtgctgcactgcaggctctcgcatcttcgtggaggagtccatctatgaggagtttgtgagaagaagcgtggagcgggccaagaggcgcatagtggggagtccctttgaccccaccactgagcagggtccccagattgataagaaacagtacaacaagatcttggaactcatccagagtggtgtggctgagggcgccaagctggaatgtggaggcaaaggactgggccgaaaggggtttttcattgagcccacagtgttttccaacgtcactgatgatatgcggattgccaaggaggagatctttggccctgttcaggaaattttgagatttaagacgatggatgaagttatcgaaagagccaataactcagactttggactcgtagcagctgtctttactaatgacatcaacaaggccctcacagtgtcttctgcaatgcaagctgggactgtttggatcaattgttacaatgccttaaatgcccagagcccctttgggggattcaagatgtctggaaatgggagagaaatgggagaatttggcttgcgggagtactcagaagttaagacggtgacagtaaagatcccccagaagaactcctaagaaggccaagaaggaggatgaagcccagcctgcacgtctgtccctctctgctttctctgtagggcccagctctcaggaatacaaagttgagccacggtccttacttaaagattgaaaagataacatgtaggccaggcaggtcactgcacaactaaagcaaaccagctgggtacagtttcttggcactctgtaaggggccaccttaatcataccaaatattggggaaagtgggataaagggaggaggaggagctagcagacacatccagtatctccttctggagcacaggatgaaataagggagctgtattatttcatgtctttgtcacaaagaactttcctctcaaggaaaggtgacctttctcctgtcttcattttcctccttccaggccctcctcgctcacccacccctccctctcttccaaggagatgtcagctgagctcattctggggcagatgtttgggccgggaacaatttttcaaggttgtaaagccaaattatcatttcatgttatccatttcttcaaagcaaaacatgaaatggttttagctagagtcagaccagaatgaaaatgccaggagctggtacactacagatgtagtaagaacctgggatattcctgacccaatctggttttcttttacccataaataacatgaatgaaaaaagattgggacaatagagactggaagtcatcatgtgcagttcaccgcttctgagcttgctgcagttttggggtgtgtgtgtattagattccttctcagttattctggaataaggcaaggagtgggtggtttttcatagctagataagatcttttccaaagtttttcttagaaccaaccaaaaaacaatccgagtaggcccaagaatttgataatgctggatgccttgcagacatcattcagtttctaatattgggcaacaattattattaaatgaattatttctgtagttggaatctgtaccttctgaacctctacaccaataactgctgcaggtgtgattttggtctgtcacactgtacatctatcataatgtgccctgtatctattggcagtgaccttggaaaatctggccaagcctaggggtttccttttccatttgccaagttccattgtgccaggactgccgtgctccactgagctcctctgtcacaccccattcttgcccctcactgggcaggccatggcctacagcttgcagggagtaaagcaggcccgcctccctttcttcccatccacatactcctcttctgctttccagtgactccaccagtttgatgtgggaagtgttagcttcctttccttcttccatcccttcttccatctttccagctgtcaaatccaatccagtctctaacctaaatgcagatcatttatttaaaagtaccaaacataacccagagtatgtggaatatgggcaacatatatatagccttctgtatttaacgatcttctgcttcttaaccgtaccagttttctatttataactcttatctatccatgatgttttaaagtctccacttgctgttatttacaaacgacagtgcattcagcagcccagtgccgtgagccctgacagatgccgtatttctgagtgcttccatgtgaatgctgccctcctgtagcatgtgtccaagtggacatagccactaaccaactagttacctttggactgcaacaaaaaatgtgaaaatgaagatttatttcttttaatttacttaaaaagaaacctctgtgctagcaataaagcatttatattgtgta

SEQ ID NO: 167076 - DNA, 4185 bp, Homo sapiens
ttatagatgttcacttgggccagtgtcactgcctgagaggctcccggtgttagtgctatgtcgtttagctcggccaaccggtcttggtgttgacccaaacgagggtgcccaatgtcgtccttgttgtgttcaggcagcggttggaaacgtgtgcctccgtaagtctgtcccgaggtggccccgtgttgtttgccacagaccggcgccgatcacctgggcaagggggtgctgccaaatgcccgtgttcccatgcaggccccgttcaagaaaagctcggtgtaagctgggaatgttggagttgcttccgtggtctgttaaagcgctgattattgatggaagttactggcgctcaatccccaagtaccccaaagttgaaagcttgctcggaacaattatgcgaaatgggaatctggggcccttacaatcaaaggcacatctagttcccatgtttaaaatagtctccggggtccatttggagtgaggagtaaggaagggaagggacttatgcaggtctttccatgcggccttgatttagtccacggagtccaaagcccattctgaggcagggtctctaggttcttggtttacacctatatacaggcgagcgcgcccccgagcggggaccgcgcgcacagcccgcactgccccacgccgcgggctagggacacccggcccgccaccatgacttccagcaagatagagatgcccggcgaggtgaaggccgaccccgccgccctcatggcgtcgctgcacctcctgccgtcgcccacgcccaatctcgaaattaagtacaccaagatctttataaacaacgagtggcagaactcagagagtgggagagtgttccctgtctataatccagccacaggagaacaggtgtgtgaagttcaagaagcagacaaggcagatatagacaaagcagtgcaggcagcccgcctggctttctctcttggttcagtgtggagaaggatggatgcttcagaaaggggacgtctgttggataagcttgcagacttggtggaacgggacagggcagttcttgcaaccatggaatccctaaatggtggcaaaccattcctgcaagctttttatgtggatttgcagggcgtcatcaaaacctttcgatattacgcaggctgggctgataaaattcatgggatgaccattcctgtagatggagactattttacctttacaagacatgaacccattggagtgtgtggacagatcatcccatggaacttccccctgctgatgtttgcctggaaaatagctccagctttgtgctgtggcaatacagtagttattaagccagcagagcaaacaccactcagtgcactctacatgggagccctcatcaaggaggctggctttcctcccggggtcatcaatattttgccaggatatgggccaacggctggggcagcaatagcttctcacattggcatagacaagattgcattcacagggtctactgaggttggaaagcttatccaagaagcagctggaagaagtaatttgaagagagtaactctggaacttggaggcaaaagtcctaatattatttttgctgatgctgacttggactatgctgtggagcaggcccaccagggtgtgttcttcaatcaaggtcagtgctgcactgcaggctctcgcatcttcgtggaggagtccatctatgaggagtttgtgagaagaagcgtggagcgggccaagaggcgcatagtggggagtccctttgaccccaccactgagcagggtccccagattgataagaaacagtacaacaagatcttggaactcatccagagtggtgtggctgagggcgccaagctggaatgtggaggcaaaggactgggccgaaaggggtttttcattgagcccacagtgttttccaacgtcactgatgatatgcggattgccaaggaggagatctttggccctgttcaggaaattttgagatttaagacgatggatgaagttatcgaaagagccaataactcagactttggactcgtagcagctgtctttactaatgacatcaacaaggccctcacagtgtcttctgcaatgcaagctgggactgtttggatcaattgttacaatgccttaaatgcccagagcccctttgggggattcaagatgtctggaaatgggagagaaatgggagaatttggcttgcgggagtactcagaagttaagacggtgacagtaaagatcccccagaagaactcctaagaaggccaagaaggaggatgaagcccagcctgcacgtctgtccctctctgctttctctgtagggcccagctctcaggaatacaaagttgagccacggtccttacttaaagattgaaaagataacatgtaggccaggcaggtcactgcacaactaaagcaaaccagctgggtacagtttcttggcactctgtaaggggccaccttaatcataccaaatattggggaaagtgggataaagggaggaggaggagctagcagacacatccagtatctccttctggagcacaggatgaaataagggagctgtattatttcatgtctttgtcacaaagaactttcctctcaaggaaaggtgacctttctcctgtcttcattttcctccttccaggccctcctcgctcacccacccctccctctcttccaaggagatgtcagctgagctcattctggggcagatgtttgggccgggaacaatttttcaaggttgtaaagccaaattatcatttcatgttatccatttcttcaaagcaaaacatgaaatggttttagctagagtcagaccagaatgaaaatgccaggagctggtacactacagatgtagtaagaacctgggatattcctgacccaatctggttttcttttacccataaataacatgaatgaaaaaagattgggacaatagagactggaagtcatcatgtgcagttcaccgcttctgagcttgctgcagttttggggtgtgtgtgtattagattccttctcagttattctggaataaggcaaggagtgggtggtttttcatagctagataagatcttttccaaagtttttcttagaaccaaccaaaaaacaatccgagtaggcccaagaatttgataatgctggatgccttgcagacatcattcagtttctaatattgggcaacaattattattaaatgaattatttctgtagttggaatctgtaccttctgaacctctacaccaataactgctgcaggtgtgattttggtctgtcacactgtacatctatcataatgtgccctgtatctattggcagtgaccttggaaaatctggccaagcctaggggtttccttttccatttgccaagttccattgtgccaggactgccgtgctccactgagctcctctgtcacaccccattcttgcccctcactgggcaggccatggcctacagcttgcagggagtaaagcaggcccgcctccctttcttcccatccacatactcctcttctgctttccagtgactccaccagtttgatgtgggaagtgttagcttcctttccttcttccatcccttcttccatctttccagctgtcaaatccaatccagtctctaacctaaatgcagatcatttatttaaaagtaccaaacataacccagagtatgtggaatatgggcaacatatatatagccttctgtatttaacgatcttctgcttcttaaccgtaccagttttctatttataactcttatctatccatgatgttttaaagtctccacttgctgttatttacaaacgacagtgcattcagcagcccagtgccgtgagccctgacagatgccgtatttctgagtgcttccatgtgaatgctgccctcctgtagcatgtgtccaagtggacatagccactaaccaactagttacctttggactgcaacaaaaaatgtgaaaatgaagatttatttcttttaatttacttaaaaagaaacctctgtgctagcaataaagcatttatattgtgtaaaaaaaaaaaaaaagaggagtggcccttttgtgtgacatcaagtaagttcatttccatctgctcagggcaccagaacccacatagacagcctgtgctattgagggactcagtgatgtgtgtgtcttttctccccagtaattccttaattactctttctacattaaaaagttgatgttct

SEQ ID NO: 167077 - DNA, 3943 bp, Homo sapiens
ttatagatgttcacttgggccagtgtcactgcctgagaggctcccggtgttagtgctatgtcgtttagctcggccaaccggtcttggtgttgacccaaacgagggtgcccaatgtcgtccttgttgtgttcaggcagcggttggaaacgtgtgcctccgtaagtctgtcccgaggtggccccgtgttgtttgccacagaccggcgccgatcacctgggcaagggggtgctgccaaatgcccgtgttcccatgcaggccccgttcaagaaaagctcggtgtaagctgggaatgttggagttgcttccgtggtctgttaaagcgctgattattgatggaagttactggcgctcaatccccaagtaccccaaagttgaaagcttgctcggaacaattatgcgaaatgggaatctggggcccttacaatcaaaggcacatctagttcccatgtttaaaatagtctccggggtccatttggagtgaggagtaaggaagggaagggacttatgcaggtctttccatgcggccttgatttagtccacggagtccaaagcccattctgaggcagggtctctaggttcttggtttacacctatatacaggcgagcgcgcccccgagcggggaccgcgcgcacagcccgcactgccccacgccgcgggctagggacacccggcccgccaccatgacttccagcaagatagagatgcccggcgaggtgaaggccgaccccgccgccctcatggcgtcgctgcacctcctgccgtcgcccacgcccaatctcgaaattaagtacaccaagatctttataaacaacgagtggcagaactcagagagtgggagagtgttccctgtctataatccagccacaggagaacaggtgtgtgaagttcaagaagcagacaaggcagatatagacaaagcagtgcaggcagcccgcctggctttctctcttggttcagtgtggagaaggatggatgcttcagaaaggggacgtctgttggataagcttgcagacttggtggaacgggacagggcagttcttgcaaccatggaatccctaaatggtggcaaaccattcctgcaagctttttatgtggatttgcagggcgtcatcaaaacctttcgatattacgcaggctgggctgataaaattcatgggatgaccattcctgtagatggagactattttacctttacaagacatgaacccattggagtgtgtggacagatcatcccatggaacttccccctgctgatgtttgcctggaaaatagctccagctttgtgctgtggcaatacagtagttattaagccagcagagcaaacaccactcagtgcactctacatgggagccctcatcaaggaggctggctttcctcccggggtcatcaatattttgccaggatatgggccaacggctggggcagcaatagcttctcacattggcatagacaagattgcattcacagggtctactgaggttggaaagcttatccaagaagcagctggaagaagtaatttgaagagagtaactctggaacttggaggcaaaagtcctaatattatttttgctgatgctgacttggactatgctgtggagcaggcccaccagggtgtgttcttcaatcaaggtcagtgctgcactgcaggctctcgcatcttcgtggaggagtccatctatgaggagtttgtgagaagaagcgtggagcgggccaagaggcgcatagtggggagtccctttgaccccaccactgagcagggtccccagattgataagaaacagtacaacaagatcttggaactcatccagagtggtgtggctgagggcgccaagctggaatgtggaggcaaaggactgggccgaaaggggtttttcattgagcccacagtgttttccaacgtcactgatgatatgcggattgccaaggaggagatctttggccctgttcaggaaattttgagatttaagacgatggatgaagttatcgaaagagccaataactcagactttggactcgtagcagctgtctttactaatgacatcaacaaggccctcacagtgtcttctgcaatgcaagctgggactgtttggatcaattgttacaatgccttaaatgcccagagcccctttgggggattcaagatgtctggaaatgggagagaaatgggagaatttggcttgcgggagtactcagaagttaagacggtgacagtaaagatcccccagaagaactcctaagaaggccaagaaggaggatgaagcccagcctgcacgtctgtccctctctgctttctctgtagggcccagctctcaggaatacaaagttgagccacggtccttacttaaagattgaaaagataacatgtaggccaggcaggtcactgcacaactaaagcaaaccagctgggtacagtttcttggcactctgtaaggggccaccttaatcataccaaatattggggaaagtgggataaagggaggaggaggagctagcagacacatccagtatctccttctggagcacaggatgaaataagggagctgtattatttcatgtctttgtcacaaagaactttcctctcaaggaaaggtgacctttctcctgtcttcattttcctccttccaggccctcctcgctcacccacccctccctctcttccaaggagatgtcagctgagctcattctggggcagatgtttgggccgggaacaatttttcaaggttgtaaagccaaattatcatttcatgttatccatttcttcaaagcaaaacatgaaatggttttagctagagtcagaccagaatgaaaatgccaggagctggtacactacagatgtagtaagaacctgggatattcctgacccaatctggttttcttttacccataaataacatgaatgaaaaaagattgggacaatagagactggaagtcatcatgtgcagttcaccgcttctgagcttgctgcagttttggggtgtgtgtgtattagattccttctcagttattctggaataaggcaaggagtgggtggtttttcatagctagataagatcttttccaaagtttttcttagaaccaaccaaaaaacaatccgagtaggcccaagaatttgataatgctggatgccttgcagacatcattcagtttctaatattgggcaacaattattattaaatgaattatttctgtagttggaatctgtaccttctgaacctctacaccaataactgctgcaggtgtgattttggtctgtcacactgtacatctatcataatgtgccctgtatctattggcagtgaccttggaaaatctggccaagcctaggggtttccttttccatttgccaagttccattgtgccaggactgccgtgctccactgagctcctctgtcacaccccattcttgcccctcactgggcaggccatggcctacagcttgcagggagtaaagcaggcccgcctccctttcttcccatccacatactcctcttctgctttccagtgactccaccagtttgatgtgggaagtgttagcttcctttccttcttccatcccttcttccatctttccagctgtcaaatccaatccagtctctaacctaaatgcagatcatttatttaaaagtaccaaacataacccagacgtaccagttttctatttataactcttatctatccatgatgttttaaagtctccacttgctgttatttacaaacgacagtgcattcagcagcccagtgccgtgagccctgacagatgccgtatttctgagtgcttccatgtgaatgctgccctcctgtagcatgtgtccaagtggacatagccactaaccaactagttacctttggactgcaacaaaaaatgtgaaaatgaagatttatttcttttaatttacttaaaaagaaacctctgtgctagcaataaagcatttatattgtgta

SEQ ID NO: 167078 - DNA, 3447 bp, Homo sapiens
ttatagatgttcacttgggccagtgtcactgcctgagaggctcccggtgttagtgctatgtcgtttagctcggccaaccggtcttggtgttgacccaaacgagggtgcccaatgtcgtccttgttgtgttcaggcagcggttggaaacgtgtgcctccgtaagtctgtcccgaggtggccccgtgttgtttgccacagaccggcgccgatcacctgggcaagggggtgctgccaaatgcccgtgttcccatgcaggccccgttcaagaaaagctcggtgtaagctgggaatgttggagttgcttccgtggtctgttaaagcgctgattattgatggaagttactggcgctcaatccccaagtaccccaaagttgaaagcttgctcggaacaattatgcgaaatgggaatctggggcccttacaatcaaaggcacatctagttcccatgtttaaaatagtctccggggtccatttggagtgaggagtaaggaagggaagggacttatgcaggtctttccatgcggccttgatttagtccacggagtccaaagcccattctgaggcagggtctctaggttcttggtttacacctatatacaggcgagcgcgcccccgagcggggaccgcgcgcacagcccgcactgccccacgccgcgggctagggacacccggcccgccaccatgacttccagcaagatagagatgcccggcgaggtgaaggccgaccccgccgccctcatggcgtcgctgcacctcctgccgtcgcccacgcccaatctcgaaattaagtacaccaagatctttataaacaacgagtggcagaactcagagagtgggagagtgttccctgtctataatccagccacaggagaacaggtgtgtgaagttcaagaagcagacaaggcagatatagacaaagcagtgcaggcagcccgcctggctttctctcttggttcagtgtggagaaggatggatgcttcagaaaggggacgtctgttggataagcttgcagacttggtggaacgggacagggcagttcttgcaaccatggaatccctaaatggtggcaaaccattcctgcaagctttttatgtggatttgcagggcgtcatcaaaacctttcgatattacgcaggctgggctgataaaattcatgggatgaccattcctgtagatggagactattttacctttacaagacatgaacccattggagtgtgtggacagatcatcccatggaacttccccctgctgatgtttgcctggaaaatagctccagctttgtgctgtggcaatacagtagttattaagccagcagagcaaacaccactcagtgcactctacatgggagccctcatcaaggaggctggctttcctcccggggtcatcaatattttgccaggatatgggccaacggctggggcagcaatagcttctcacattggcatagacaagattgcattcacagggtctactgaggttggaaagcttatccaagaagcagctggaagaagtaatttgaagagagtaactctggaacttggaggcaaaagtcctaatattatttttgctgatgctgacttggactatgctgtggagcaggcccaccagggtgtgttcttcaatcaaggtcagtgctgcactgcaggctctcgcatcttcgtggaggagtccatctatgaggagtttgtgagaagaagcgtggagcgggccaagaggcgcatagtggggagtccctttgaccccaccactgagcagggtccccagattgataagaaacagtacaacaagatcttggaactcatccagagtggtgtggctgagggcgccaagctggaatgtggaggcaaaggactgggccgaaaggggtttttcattgagcccacagtgttttccaacgtcactgatgatatgcggattgccaaggaggagatctttggccctgttcaggaaattttgagatttaagacgatggatgaagttatcgaaagagccaataactcagactttggactcgtagcagctgtctttactaatgacatcaacaaggccctcacagtgtcttctgcaatgcaagctgggactgtttggatcaattgttacaatgccttaaatgcccagagcccctttgggggattcaagatgtctggaaatgggagagaaatgggagaatttggcttgcgggagtactcagaagttaagacggtgacagtaaagatcccccagaagaactcctaagaaggccaagaaggaggatgaagcccagcctgcacgtctgtccctctctgctttctctgtagggcccagctctcaggaatacaaagttgagccacggtccttacttaaagattgaaaagataacatgtaggccaggcaggtcactgcacaactaaagcaaaccagctgggtacagtttcttggcactctgtaaggggccaccttaatcataccaaatattggggaaagtgggataaagggaggaggaggagctagcagacacatccagtatctccttctggagcacaggatgaaataagggagctgtattatttcatgtctttgtcacaaagaactttcctctcaaggaaaggtgacctttctcctgtcttcattttcctccttccaggccctcctcgctcacccacccctccctctcttccaaggagatgtcagctgagctcattctggggcagatgtttgggccgggaacaatttttcaaggttgtaaagccaaattatcatttcatgttatccatttcttcaaagcaaaacatgaaatggttttagctagagtcagaccagaatgaaaatgccaggagctggtacactacagatgtagtaagaacctgggatattcctgacccaatctggttttcttttacccataaataacatgaatgaaaaaagattgggacaatagagactggaagtcatcatgtgcagttcaccgcttctgagcttgctgcagttttggggtgtgtgtgtattagattccttctcagttattctggaataaggcaaggagtgggtggtttttcatagctagataagatcatttatttaaaagtaccaaacataacccagagtatgtggaatatgggcaacatatatatagccttctgtatttaacgatcttctgcttcttaaccgtaccagttttctatttataactcttatctatccatgatgttttaaagtctccacttgctgttatttacaaacgacagtgcattcagcagcccagtgccgtgagccctgacagatgccgtatttctgagtgcttccatgtgaatgctgccctcctgtagcatgtgtccaagtggacatagccactaaccaactagttacctttggactgcaacaaaaaatgtgaaaatgaagatttatttcttttaatttacttaaaaagaaacctctgtgctagcaataaagcatttatattgtgta

SEQ ID NO: 167079 - DNA, 2334 bp, Homo sapiens
ttatagatgttcacttgggccagtgtcactgcctgagaggctcccggtgttagtgctatgtcgtttagctcggccaaccggtcttggtgttgacccaaacgagggtgcccaatgtcgtccttgttgtgttcaggcagcggttggaaacgtgtgcctccgtaagtctgtcccgaggtggccccgtgttgtttgccacagaccggcgccgatcacctgggcaagggggtgctgccaaatgcccgtgttcccatgcaggccccgttcaagaaaagctcggtgtaagctgggaatgttggagttgcttccgtggtctgttaaagcgctgattattgatggaagttactggcgctcaatccccaagtaccccaaagttgaaagcttgctcggaacaattatgcgaaatgggaatctggggcccttacaatcaaaggcacatctagttcccatgtttaaaatagtctccggggtccatttggagtgaggagtaaggaagggaagggacttatgcaggtctttccatgcggccttgatttagtccacggagtccaaagcccattctgaggcagggtctctaggttcttggtttacacctatatacaggcgagcgcgcccccgagcggggaccgcgcgcacagcccgcactgccccacgccgcgggctagggacacccggcccgccaccatgacttccagcaagatagagatgcccggcgaggtgaaggccgaccccgccgccctcatggcgtcgctgcacctcctgccgtcgcccacgcccaatctcgaaattaagtacaccaagatctttataaacaacgagtggcagaactcagagagtgggagagtgttccctgtctataatccagccacaggagaacaggtgtgtgaagttcaagaagcagacaaggcagatatagacaaagcagtgcaggcagcccgcctggctttctctcttggttcagtgtggagaaggatggatgcttcagaaaggggacgtctgttggataagcttgcagacttggtggaacgggacagggcagttcttgcaaccatggaatccctaaatggtggcaaaccattcctgcaagctttttatgtggatttgcagggcgtcatcaaaacctttcgatattacgcaggctgggctgataaaattcatgggatgaccattcctgtagatggagactattttacctttacaagacatgaacccattggagtgtgtggacagatcatcccatggaacttccccctgctgatgtttgcctggaaaatagctccagctttgtgctgtggcaatacagtagttattaagccagcagagcaaacaccactcagtgcactctacatgggagccctcatcaaggaggctggctttcctcccggggtcatcaatattttgccaggatatgggccaacggctggggcagcaatagcttctcacattggcatagacaagattgcattcacagggtctactgaggttggaaagcttatccaagaagcagctggaagaagtaatttgaagagagtaactctggaacttggaggcaaaagtcctaatattatttttgctgatgctgacttggactatgctgtggagcaggcccaccagggtgtgttcttcaatcaaggtcagtgctgcactgcaggctctcgcatcttcgtggaggagtccatctatgaggagtttgtgagaagaagcgtggagcgggccaagaggcgcatagtggggagtccctttgaccccaccactgagcagggtccccagattgataagaaacagtacaacaagatcttggaactcatccagagtggtgtggctgagggcgccaagctggaatgtggaggcaaaggactgggccgaaaggggtttttcattgagcccacagtgttttccaacgtcactgatgatatgcggattgccaaggaggagatctttggccctgttcaggaaattttgagatttaagacgagtatgtggaatatgggcaacatatatatagccttctgtatttaacgatcttctgcttcttaaccgtaccagttttctatttataactcttatctatccatgatgttttaaagtctccacttgctgttatttacaaacgacagtgcattcagcagcccagtgccgtgagccctgacagatgccgtatttctgagtgcttccatgtgaatgctgccctcctgtagcatgtgtccaagtggacatagccactaaccaactagttacctttggactgcaacaaaaaatgtgaaaatgaagatttatttcttttaatttacttaaaaagaaacctctgtgctagcaataaagcatttatattgtgta

SEQ ID NO: 167080 - DNA, 1194 bp, Homo sapiens
ttatagatgttcacttgggccagtgtcactgcctgagaggctcccggtgttagtgctatgtcgtttagctcggccaaccggtcttggtgttgacccaaacgagggtgcccaatgtcgtccttgttgtgttcaggcagcggttggaaacgtgtgcctccgtaagtctgtcccgaggtggccccgtgttgtttgccacagaccggcgccgatcacctgggcaagggggtgctgccaaatgcccgtgttcccatgcaggccccgttcaagaaaagctcggtgtaagctgggaatgttggagttgcttccgtggtctgttaaagcgctgattattgatggaagttactggcgctcaatccccaagtaccccaaagttgaaagcttgctcggaacaattatgcgaaatgggaatctggggcccttacaatcaaaggcacatctagttcccatgtttaaaatagtctccggggtccatttggagtgaggagtaaggaagggaagggacttatgcaggtctttccatgcggccttgatttagtccacggagtccaaagcccattctgaggcagggtctctaggttcttggtttacacctatatacaggcgagcgcgcccccgagcggggaccgcgcgcacagcccgcactgccccacgccgcgggctagggacacccggcccgccaccatgacttccagcaagatagagatgcccggcgaggtgaaggccgaccccgccgccctcatggcgtcgctgcacctcctgccgtcgcccacgcccaatctcgaaattaagtacaccaagatctttataaacaacgagtggcagaactcagagagtgggagagtgttccctgtctataatccagccacaggagaacaggtgtgtgaagttcaagaagcagacaaggcagatatagacaaagcagtgcaggcagcccgcctggctttctctcttggttcagtgtggagaaggatggatgcttcagaaaggggacgtctgttggataagcttgcagacttggtggaacgggacagggcagttcttgcaaccatggaatccctaaatggtggcaaaccattcctgcaagctttttatgtggatttgcagggcgtcatcaaaacctttcgatattacgcaggctgggcctcacgatccttctgaccttttgggttttaagcatgtggggtaacgaaaatt

SEQ ID NO: 167081 - DNA, 446 bp, Homo sapiens
gcttcagaaaggggacgtctgttggataagcttgcagacttggtggaacgggacagggcagttcttgcagtaagtaacctaagaaaacattaagtctttaacccacatttgccattctgctgaaatttacattcttcggctgtattttattttatttttatttattttattttttgagacggagtctagctctgtcgcccaggctggagcgcagtggcacgatttcagctcactgcaacctctgcctcccaggtacaagcgattctcctgcctcagcctcctgagtagctgggattacgtgcacgtgccaccacacctggctaatttttgtatttttagtagagacggggtttcactatgttggtcaggctggtcttgagctcctaaaaggatactttgaagcagacctggggaaaaagcaaaggaataggtaatacatatgaaaa

SEQ ID NO: 167082 - DNA, 3146 bp, Homo sapiens
  misc_feature (318)..(318): n is a, c, g, or t
  misc_feature (694)..(694): n is a, c, g, or t
tcggtcatttagcaactaatgcacgtcagattaagctgttttgaagtgtaagatataagggatgaatatggaagagttatcataggattttacacaagtccatgtcaatctagaggaaatttagtgtcttcaaagaagacccattggtgttacggtttaatcccccaagtaccaaacatacagccccaaggccctgtagatttaggagttgtaaattggccaaatacaaaatatagacatgtttacctgtctaaacattacactatgttcaaaacaagaactgcacattaaaatattgatttctgtgaaaattgagangatctggcaacctggggctcatatttatgcatggcaatgattaaatgtagtggctttccttcttagcccctccattacattgctttaccacctggcagactcatacctgtaccttatctcccaagccctgtggtatataggggtttgagactcctgttatacacgaggttcagtacctctgtttgcagaataagaaagagacccaaagaagtgaagttgttcaagttcacatagcatgtcagggtgtagttagaactagttgcattcccaatccagggctattcatggttatgtcatgcagtgagcacactatacctagggctttggagaggggagggaggcggcttcatagacaggcccctccccaggcaaagcngtgagaacatggctgtttcctcttgtagtggactatgctgtggagcaggcccaccagggtgtgttcttcaatcaaggtcagtgctgcactgcaggctctcgcatcttcgtggaggagtccatctatgaggagtttgtgagaagaagcgtggagcgggccaagaggcgcatagtggggagtccctttgaccccaccactgagcagggtccccagattgataagaaacagtacaacaagatcttggaactcatccagagtggtgtggctgagggcgccaagctggaatgtggaggcaaaggactgggccgaaaggggtttttcattgagcccacagtgttttccaacgtcactgatgatatgcggattgccaaggaggagatctttggccctgttcaggaaattttgagatttaagacgatggatgaagttatcgaaagagccaataactcagactttggactcgtagcagctgtctttactaatgacatcaacaaggccctcacagtgtcttctgcaatgcaagctgggactgtttggatcaattgttacaatgccttaaatgcccagagcccctttgggggattcaagatgtctggaaatgggagagaaatgggagaatttggcttgcgggagtactcagaagttaagacggtgacagtaaagatcccccagaagaactcctaagaaggccaagaaggaggatgaagcccagcctgcacgtctgtccctctctgctttctctgtagggcccagctctcaggaatacaaagttgagccacggtccttacttaaagattgaaaagataacatgtaggccaggcaggtcactgcacaactaaagcaaaccagctgggtacagtttcttggcactctgtaaggggccaccttaatcataccaaatattggggaaagtgggataaagggaggaggaggagctagcagacacatccagtatctccttctggagcacaggatgaaataagggagctgtattatttcatgtctttgtcacaaagaactttcctctcaaggaaaggtgacctttctcctgtcttcattttcctccttccaggccctcctcgctcacccacccctccctctcttccaaggagatgtcagctgagctcattctggggcagatgtttgggccgggaacaatttttcaaggttgtaaagccaaattatcatttcatgttatccatttcttcaaagcaaaacatgaaatggttttagctagagtcagaccagaatgaaaatgccaggagctggtacactacagatgtagtaagaacctgggatattcctgacccaatctggttttcttttacccataaataacatgaatgaaaaaagattgggacaatagagactggaagtcatcatgtgcagttcaccgcttctgagcttgctgcagttttggggtgtgtgtgtattagattccttctcagttattctggaataaggcaaggagtgggtggtttttcatagctagataagatcttttccaaagtttttcttagaaccaaccaaaaaacaatccgagtaggcccaagaatttgataatgctggatgccttgcagacatcattcagtttctaatattgggcaacaattattattaaatgaattatttctgtagttggaatctgtaccttctgaacctctacaccaataactgctgcaggtgtgattttggtctgtcacactgtacatctatcataatgtgccctgtatctattggcagtgaccttggaaaatctggccaagcctaggggtttccttttccatttgccaagttccattgtgccaggactgccgtgctccactgagctcctctgtcacaccccattcttgcccctcactgggcaggccatggcctacagcttgcagggagtaaagcaggcccgcctccctttcttcccatccacatactcctcttctgctttccagtgactccaccagtttgatgtgggaagtgttagcttcctttccttcttccatcccttcttccatctttccagctgtcaaatccaatccagtctctaacctaaatgcagatcatttatttaaaagtaccaaacataacccagagtatgtggaatatgggcaacatatatatagccttctgtatttaacgatcttctgcttcttaaccgtaccagttttctatttataactcttatctatccatgatgttttaaagtctccacttgctgttatttacaaacgacagtgcattcagcagcccagtgccgtgagccctgacagatgccgtatttctgagtgcttccatgtgaatgctgccctcctgtagcatgtgtccaagtggacatagccactaaccaactagttacctttggactgcaacaaaaaatgtgaaaatgaagatttatttcttttaatttacttaaaaagaaacctctgtgctagcaataaagcatttatattgtgta

SEQ ID NO: 167083 - DNA, 3131 bp, Homo sapiens
ttcagttgtgcctcttcctctctaacaggcagatatagacaaagcagtgcaggcagcccgcctggctttctctcttggttcagtgtggagaaggatggatgcttcagaaaggggacgtctgttggataagcttgcagacttggtggaacgggacagggcagttcttgcaaccatggaatccctaaatggtggcaaaccattcctgcaagctttttatgtggatttgcagggcgtcatcaaaacctttcgatattacgcaggctgggctgataaaattcatgggatgaccattcctgtagatggagactattttacctttacaagacatgaacccattggagtgtgtggacagatcatcccatggaacttccccctgctgatgtttgcctggaaaatagctccagctttgtgctgtggcaatacagtagttattaagccagcagagcaaacaccactcagtgcactctacatgggagccctcatcaaggaggctggctttcctcccggggtcatcaatattttgccaggatatgggccaacggctggggcagcaatagcttctcacattggcatagacaagattgcattcacagggtctactgaggttggaaagcttatccaagaagcagctggaagaagtaatttgaagagagtaactctggaacttggaggcaaaagtcctaatattatttttgctgatgctgacttggactatgctgtggagcaggcccaccagggtgtgttcttcaatcaaggtcagtgctgcactgcaggctctcgcatcttcgtggaggagtccatctatgaggagtttgtgagaagaagcgtggagcgggccaagaggcgcatagtggggagtccctttgaccccaccactgagcagggtccccagattgataagaaacagtacaacaagatcttggaactcatccagagtggtgtggctgagggcgccaagctggaatgtggaggcaaaggactgggccgaaaggggtttttcattgagcccacagtgttttccaacgtcactgatgatatgcggattgccaaggaggagatctttggccctgttcaggaaattttgagatttaagacgatggatgaagttatcgaaagagccaataactcagactttggactcgtagcagctgtctttactaatgacatcaacaaggccctcacagtgtcttctgcaatgcaagctgggactgtttggatcaattgttacaatgccttaaatgcccagagcccctttgggggattcaagatgtctggaaatgggagagaaatgggagaatttggcttgcgggagtactcagaagttaagacggtgacagtaaagatcccccagaagaactcctaagaaggccaagaaggaggatgaagcccagcctgcacgtctgtccctctctgctttctctgtagggcccagctctcaggaatacaaagttgagccacggtccttacttaaagattgaaaagataacatgtaggccaggcaggtcactgcacaactaaagcaaaccagctgggtacagtttcttggcactctgtaaggggccaccttaatcataccaaatattggggaaagtgggataaagggaggaggaggagctagcagacacatccagtatctccttctggagcacaggatgaaataagggagctgtattatttcatgtctttgtcacaaagaactttcctctcaaggaaaggtgacctttctcctgtcttcattttcctccttccaggccctcctcgctcacccacccctccctctcttccaaggagatgtcagctgagctcattctggggcagatgtttgggccgggaacaatttttcaaggttgtaaagccaaattatcatttcatgttatccatttcttcaaagcaaaacatgaaatggttttagctagagtcagaccagaatgaaaatgccaggagctggtacactacagatgtagtaagaacctgggatattcctgacccaatctggttttcttttacccataaataacatgaatgaaaaaagattgggacaatagagactggaagtcatcatgtgcagttcaccgcttctgagcttgctgcagttttggggtgtgtgtgtattagattccttctcagttattctggaataaggcaaggagtgggtggtttttcatagctagataagatcttttccaaagtttttcttagaaccaaccaaaaaacaatccgagtaggcccaagaatttgataatgctggatgccttgcagacatcattcagtttctaatattgggcaacaattattattaaatgaattatttctgtagttggaatctgtaccttctgaacctctacaccaataactgctgcaggtgtgattttggtctgtcacactgtacatctatcataatgtgccctgtatctattggcagtgaccttggaaaatctggccaagcctaggggtttccttttccatttgccaagttccattgtgccaggactgccgtgctccactgagctcctctgtcacaccccattcttgcccctcactgggcaggccatggcctacagcttgcagggagtaaagcaggcccgcctccctttcttcccatccacatactcctcttctgctttccagtgactccaccagtttgatgtgggaagtgttagcttcctttccttcttccatcccttcttccatctttccagctgtcaaatccaatccagtctctaacctaaatgcagatcatttatttaaaagtaccaaacataacccagagtatgtggaatatgggcaacatatatatagccttctgtatttaacgatcttctgcttcttaaccgtaccagttttctatttataactcttatctatccatgatgttttaaagtctccacttgctgttatttacaaacgacagtgcattcagcagcccagtgccgtgagccctgacagatgccgtatttctgagtgcttccatgtgaatgctgccctcctgtagcatgtgtccaagtggacatagccactaaccaactagttacctttggactgcaacaaaaaatgtgaaaatgaagatttatttcttttaatttacttaaaaagaaacctctgtgctagcaataaagcatttatattgtgta

SEQ ID NO: 167084 - DNA, 2765 bp, Homo sapiens
ttatagatgttcacttgggccagtgtcactgcctgagaggctcccggtgttagtgctatgtcgtttagctcggccaaccggtcttggtgttgacccaaacgagggtgcccaatgtcgtccttgttgtgttcaggcagcggttggaaacgtgtgcctccgtaagtctgtcccgaggtggccccgtgttgtttgccacagaccggcgccgatcacctgggcaagggggtgctgccaaatgcccgtgttcccatgcaggccccgttcaagaaaagctcggtgtaagctgggaatgttggagttgcttccgtggtctgttaaagcgctgattattgatggaagttactggcgctcaatccccaagtaccccaaagttgaaagcttgctcggaacaattatgcgaaatgggaatctggggcccttacaatcaaaggcacatctagttcccatgtttaaaatagtctccggggtccatttggagtgaggagtaaggaagggaagggacttatgcaggtctttccatgcggccttgatttagtccacggagtccaaagcccattctgaggcagggtctctaggttcttggtttacacctatatacaggcgagcgcgcccccgagcggggaccgcgcgcacagcccgcactgccccacgccgcgggctagggacacccggcccgccaccatgacttccagcaagatagagatgcccggcgaggtgaaggccgaccccgccgccctcatggcgtcgctgcacctcctgccgtcgcccacgcccaatctcgaaattaagtacaccaagatctttataaacaacgagtggcagaactcagagagtgggagagtgttccctgtctataatccagccacaggagaacaggtgtgtgaagttcaagaagcagacaaggcagatatagacaaagcagtgcaggcagcccgcctggctttctctcttggttcagtgtggagaaggatggatgcttcagaaaggggacgtctgttggataagcttgcagacttggtggaacgggacagggcagttcttgcaaccatggaatccctaaatggtggcaaaccattcctgcaagctttttatgtggatttgcagggcgtcatcaaaacctttcgatattacgcaggctgggctgataaaattcatgggatgaccattcctgtagatggagactattttacctttacaagacatgaacccattggagtgtgtggacagatcatcccatggaacttccccctgctgatgtttgcctggaaaatagctccagctttgtgctgtggcaatacagtagttattaagccagcagagcaaacaccactcagtgcactctacatgggagccctcatcaaggaggctggctttcctcccggggtcatcaatattttgccaggatatgggccaacggctggggcagcaatagcttctcacattggcatagacaagattgcattcacagggtctactgaggttggaaagcttatccaagaagcagctggaagaagtaatttgaagagagtaactctggaacttggaggcaaaagtcctaatattatttttgctgatgctgacttggactatgctgtggagcaggcccaccagggtgtgttcttcaatcaaggtcagtgctgcactgcaggctctcgcatcttcgtggaggagtccatctatgaggagtttgtgagaagaagcgtggagcgggccaagaggcgcatagtggggagtccctttgaccccaccactgagcagggtccccagattgataagaaacagtacaacaagatcttggaactcatccagagtggtgtggctgagggcgccaagctggaatgtggaggcaaaggactgggccgaaaggggtttttcattgagcccacagtgttttccaacgtcactgatgatatgcggattgccaaggaggagatctttggccctgttcaggaaattttgagatttaagacgatggatgaagttatcgaaagagccaataactcagactttggactcgtagcagctgtctttactaatgacatcaacaaggccctcacagtgtcttctgcaatgcaagctgggactgtttggatcaattgttacaatgccttaaatgcccagagcccctttgggggattcaagatgtctggaaatgggagagaaatgggagaatttggcttgcgggagtactcagaagttaagacggtgacagtaaagatcccccagaagaactcctaagaaggccaagaaggaggatgaagcccagcctgcacgtctgtccctctctgctttctctgtagggcccagctctcaggaatacaaagttgagccacggtccttacttaaagattgaaaagataacatgtaggccaggcaggtcactgcacaactaaagcaaaccagctgggtacagtttcttggcactctgtaaggggccaccttaatcataccaaatattggggaaagtgggataaagggaggaggaggagctagcagacacatccagtatctccttctggagcacaggatgaaataagggagctgtattatttcatgtctttgtcacaaagaactttcctctcaaggaaaggtgacctttctcctgtcttcattttccctcctgtagcatgtgtccaagtggacatagccactaaccaactagttacctttggactgcaacaaaaaatgtgaaaatgaagatttatttcttttaatttacttaaaaagaaacctctgtgctagcaataaagcatttatattgtgta

SEQ ID NO: 167085 - DNA, 2282 bp, Homo sapiens
  misc_feature (2109)..(2109): n is a, c, g, or t
  misc_feature (2119)..(2119): n is a, c, g, or t
  misc_feature (2126)..(2126): n is a, c, g, or t
  misc_feature (2128)..(2128): n is a, c, g, or t
  misc_feature (2133)..(2133): n is a, c, g, or t
  misc_feature (2144)..(2144): n is a, c, g, or t
  misc_feature (2152)..(2152): n is a, c, g, or t
  misc_feature (2164)..(2164): n is a, c, g, or t
  misc_feature (2168)..(2168): n is a, c, g, or t
  misc_feature (2172)..(2172): n is a, c, g, or t
  misc_feature (2176)..(2177): n is a, c, g, or t
  misc_feature (2182)..(2182): n is a, c, g, or t
  misc_feature (2185)..(2185): n is a, c, g, or t
  misc_feature (2192)..(2192): n is a, c, g, or t
  misc_feature (2202)..(2202): n is a, c, g, or t
  misc_feature (2214)..(2214): n is a, c, g, or t
  misc_feature (2235)..(2235): n is a, c, g, or t
ttatagatgttcacttgggccagtgtcactgcctgagaggctcccggtgttagtgctatgtcgtttagctcggccaaccggtcttggtgttgacccaaacgagggtgcccaatgtcgtccttgttgtgttcaggcagcggttggaaacgtgtgcctccgtaagtctgtcccgaggtggccccgtgttgtttgccacagaccggcgccgatcacctgggcaagggggtgctgccaaatgcccgtgttcccatgcaggccccgttcaagaaaagctcggtgtaagctgggaatgttggagttgcttccgtggtctgttaaagcgctgattattgatggaagttactggcgctcaatccccaagtaccccaaagttgaaagcttgctcggaacaattatgcgaaatgggaatctggggcccttacaatcaaaggcacatctagttcccatgtttaaaatagtctccggggtccatttggagtgaggagtaaggaagggaagggacttatgcaggtctttccatgcggccttgatttagtccacggagtccaaagcccattctgaggcagggtctctaggttcttggtttacacctatatacaggcgagcgcgcccccgagcggggaccgcgcgcacagcccgcactgccccacgccgcgggctagggacacccggcccgccaccatgacttccagcaagatagagatgcccggcgaggtgaaggccgaccccgccgccctcatggcgtcgctgcacctcctgccgtcgcccacgcccaatctcgaaattaagtacaccaagatctttataaacaacgagtggcagaactcagagagtgggagagtgttccctgtctataatccagccacaggagaacaggtgtgtgaagttcaagaagcagacaaggcagatatagacaaagcagtgcaggcagcccgcctggctttctctcttggttcagtgtggagaaggatggatgcttcagaaaggggacgtctgttggataagcttgcagacttggtggaacgggacagggcagttcttgcaaccatggaatccctaaatggtggcaaaccattcctgcaagctttttatgtggatttgcagggcgtcatcaaaacctttcgatattacgcaggctgggctgataaaattcatgggatgaccattcctgtagatggagactattttacctttacaagacatgaacccattggagtgtgtggacagatcatcccatggaacttccccctgctgatgtttgcctggaaaatagctccagctttgtgctgtggcaatacagtagttattaagccagcagagcaaacaccactcagtgcactctacatgggagccctcatcaaggaggctggctttcctcccggggtcatcaatattttgccaggatatgggccaacggctggggcagcaatagcttctcacattggcatagacaagattgcattcacagggtctactgaggttggaaagcttatccaagaagcagctggaagaagtaatttgaagagagtaactctggaacttggaggcaaaagtcctaatattatttttgctgatgctgacttggactatgctgtggagcaggcccaccagggtgtgttcttcaatcaaggtcagtgctgcactgcaggctctcgcatcttcgtggaggagtccatctatgaggagtttgtgagaagaagcgtggagcgggccaagaggcgcatagtggggagtccctttgaccccaccactgagcagggtccccagattgataagaaacagtacaacaagatcttggaactcatccagagtggtgtggctgagggcgccaagctggaatgtggaggcaaaggactgggccgaaaggggtttttcattgagcccacagtgttttccaacgtcactgatgatatgcggattgccaaggaggagatctttggccctgttcaggaaattttgagatttaagacgatggatgaagttatcgaaagagccaataactcagactttggactcgtagcagctgtctttactaatgacatcaacaaggccctcacagtgtcttctgcaatgcaagctgggactgtttgggatccaattgttcacaangccttcaaancgcccananccccntttgggggganttcaagangtcttggtaatngggnaganaaannggganaantttgggnttgcgggganttactccagaantttaaaaacggtggacaattnaaaataccccccaaaaaaaactccttaaaaaaagcccaaaaagaggg

SEQ ID NO: 167086 - DNA, 417 bp, Homo sapiens
agaacaattatataatataaaaaagttaaatgaatgtgatctctctctcaaaacacctcttgtactgtacttcttgtgatctgtcagtctgataatcaagatagttactaatgtgaataaggggtgggtagcatatgtagcaaggatatcatgtcccaggtgggatggagcgggatgtcagaaaatttcatcacactcctcagactggtgcccaatttaaaacgtatgaattatttatttctggaattttccatgtaatatttttgtactgcggttcaccatgaataactgaaactgaagaagaagaaaccgcggataaggggagaactactgtagtttcttaagttgtatgattgaatgattcattcatttttacctggtgatgctgctgcatttgggtgctttgccctttatgca

SEQ ID NO: 167087 - DNA, 412 bp, Homo sapiens
tcaaataatcatgttttgtttcttttgaggatgttgatcaagtcatcaccagccttttatcttgaacaatgtgttttaaatcatctgcaaatttttccattggtttcacaattgttcattgtcagtttcaggtttaattgcatctattgcttttaatacaagcaaaggaaaagtactattttcctggtatacaatccctttaggttaactttaaaataactcaatacattgtgattggaacccactagacagttaggatctgttctctttactcatgcatggttaaacttttctgttaataaacatgtctttcccatgctctaaacataaaagtgttatatgtgtataatcttatgctcatttaggcttgcattgtttgataaaaactgggtgaaaagcaaaataccctaga

SEQ ID NO: 167088 - DNA, 342 bp, Homo sapiens
gtgaacaaggcccttgaatgggcttcattcaggagggtgaacaggaccaacaccagcacagggccgggtggcgtccagccaagcccacctgtccctttggcagcacccctctcttcttcccccgcaccttgctccaccccccacccccagcagcctctcagctcctgcaggatctgtgtcctgtgccagaggacaccaccgacctcgggacccccgctcagtgccctgaggaccaccagagagctaacgggcagcatctccaggaggcgtctgggaagtgggggagggggccaaagcccaaggtccccagtattctggccaccctgtccccaggtccagcct

SEQ ID NO: 167089 - DNA, 553 bp, Homo sapiens
caccagtctgtgtcttcatgcagcagtggcttttgagatctcggttgtcttttcagaacattgggacggcctcaacaacttgcatgacgctgggcaagtgaatttctctctctgggcctcagtgtccccatctaggcaatcaccagccgttaggccctatggatggaaggttcctgcctgcagtggcattttaggatccactatcatctgctttatcttcctagtggcaagggactggaccagatgcttttggaaagcgcaccaagcttaaaggtggctctctctgcaggtgcccctcctcccttcacgccagaggctcacccccaccccgcccgggctccctgttagagccaggcctggctcttcagccttgcagctcaggaaaccagagcgcagcgctatagccgcgactgcggcggcggcggcggcgcagggggcgggggaggagagaagcgcccacttcgtcccgctgcctccgcagcagccctggccctagccccggcgcatcagagcggtccttgggaatctttgggcttgttgctccggcggccgc

SEQ ID NO: 167090 - DNA, 536 bp, Homo sapiens
aaacaaaaatgtaaatttgccaggatcagccctgccctaagggcagaagtggcttccctgcttgcttacttcactgggttcctatttaccctctatgtagcacttatccctttctgtcttgtcaaaaagctagttgtttttaagatttttttttctcctcccagtatttttagttgttttcagtgggaagtttggtccaaataacctaggccgccattactggaaactgaaagtcattaaatccttcctaattaggaagcagaacttttgccagatgcatttgcaggtgtttttgtaaggctgtgttcctaaccagaagatttgattcctctatcacagaaagcagtataggaaacaaatccatctctttggccttactcatttattcaatagtattatttgagtgcttcctgtgtgccaggcactggggtaaaggttacaacagtgagccagtagaatccctgcccttcactcctttgttaagaaaaagcagagtaaatcatctgagctaccagtttcaagattagataagccct

SEQ ID NO: 167091 - DNA, 325 bp, Homo sapiens
agacacaagcttgttccaaaagaacagaggagctggcccaggaagcaagaagccggaatccttgtccttgtcctttgaacatgtagcaaatgtgtttcttctaggcttcagattccttaaatttaaaacatggggctggaacaagaggatgactgaggtttcctccagctctaaatttctctacaagctaagggaatgagaggaggaaaaggtgaagaattacagccccttggccatgcccctaatgtctgggagggctcacaggtgcaggtctataccaggaagatcatgagctcttggagtcatttctctgtatttctgtttg

SEQ ID NO: 167092 - DNA, 177 bp, Homo sapiens
ctctgaggcacagactagttccttatagagaggaggcatttacaaggcacttggtagggaaggcgtcctgaaatcggggctgtacacccaggatgtgagtcgtctcccacccacgtgggcctgtctgtgtctgtgcgttgctggttttcattttaatggttctaatttgagaatgcg

SEQ ID NO: 167093 - DNA, 495 bp, Homo sapiens
cgcccggccgtctcaatgcgatcacaggagggacacggagatcgaggagggccacagccggaccaggccaggcgtgctgcggcaggaggaaggctccggaggtggggtgggaaggggaggccgagagacgggtgtcgccgcgcccccgctgccgccagagaggagcctacggctggcagcctggcctgggcagcagggtcctcggcgctcggctgggaaatcgcacgtctctccgcggtgacctgtgcacagcccctgggcctccgcctccgtgctggcagcctccgcctcagcgcacaaagccccgtcaccccgactctcggggcgccgccgccgccaaatcctcagcccctccctcattggccgcggcgtctgccgggaagtgcagtcccgggtttggggcgatggagcccaggaggaagcggcgagtcagcgcggcggaaagggcggaggggacggagggggcggaggggacgaaccacgaacgcccgcggc

SEQ ID NO: 167094 - DNA, 320 bp, Homo sapiens
tctgagctactcgggagcctgaggcagaagaattgctttaacctgggggatggaggttgcagttagccaagatcatactctgcactccagcctgggtaacacagagtgagactctgtctcaaaaacaaaaacagaaaaagacattttttttaaatacactcttttttgaaactcttaccataaagcacaaaccacaatcactttcctaatttcctttaccacagccagaaatgaaatgtgtaaagagtaggtgggaacaaaagggaagtaagtacaaaaaatcaaaatagcattaaaaatgatcaaatatccacaatgca

SEQ ID NO: 167095 - DNA, 403 bp, Homo sapiens
caaatattgatgcatgtttgtttcatgacaaccctgtgaagtaggtagtgttaccccgttttatagatgaggaaacaggcgtagagggataaagggacttgcccaaggtctgtctctaccttacacgcacatgaacgctcactcatgcggcaggcgctagtttccctctgatgtgagtcaggccttgagctggttggggtctgggtcccactttggttgtgttttgctgtgggcaccaaggaagcttctagcagcctcatctccctggtatgacctagctccagggactggatttccccaaatgctcctgcccagcctggagcctcctttccagctgggggagggctgaacgacccctcactcttggaggctgccggagcccctcctgcctgcatgcggccgc

SEQ ID NO: 167096 - DNA, 187 bp, Homo sapiens
caccaaccttcatcagcattagtattgacgggacactctatggagtcaagcagccaaatcacctttccctcccctctcctcacagatgctctccagggctacacttggactccacaaaacaccaaagagctggaagcacagaagcagcttcataagcaacaaggcaggttgaaaagaccgagaccca

SEQ ID NO: 167097 - DNA, 258 bp, Homo sapiens
  misc_feature (7)..(7): n is a, c, g, or t
  misc_feature (15)..(15): n is a, c, g, or t
ctctagnggatcccngatgttatcgcccaacactctgagaatgcagaccaggcacgtcattttaggctagactagacaaatcattctaaactgctgtcctcagacagttatatcttaagtctaaacaagacttctttggtcattcttcccagttaaaatattggtttcaactattttagatttaaggtatggttccaatcatgtttaaagtttaacatgtgcaaaggtgtcttttattgtgttggggataagaaagtt

SEQ ID NO: 167098 - DNA, 192 bp, Homo sapiens
tgctgggattataggcacgagccaccatgccggccctatgttttcttttaactgccttcaaactgtttctacttgaataatgccccgttgtttcatatatccaaagtcaaactcttcatatggtttctgacagagttccctttcttaactagtattatttctagtacagtaatcaatattcttctattcctg

SEQ ID NO: 167099 - DNA, 194 bp, Homo sapiens
attgtcactgtttaaccattaatattcttttctctaatgaatgcctttaaaaaatttccagttcagaatttacctctttttaatgaaatattttgtatggacttaccaaatacgtatatagtttgtaaaaagccgatggtagaaaagatttctaagttaggtgaccatatgctttatcatccaaatgaggccac

SEQ ID NO: 167100 - DNA, 421 bp, Homo sapiens
cctgcctcagcctcccgagtagctgggattacaggtgcacaccatcatacaccgctaatttttaatttttttagtagagatggggtttcaccatgttggccaggctggtttcaaattcctgacctctagtaatccacctgccttagcctcccaaactgctgggattacagtgagccactgcacccggcccatcaaaatatttaagagtaatcaaatacactttcttctctcatgaaccttaaaatatggcaggggaagatagacattaagtgatgaagcaaagatactgagactctctggggcgagaggatcacacgttgagaactgctgaattgggataatgaagggaaggaagcatacaatcccaaatcaccattaaaccaaaagttgtttacaggattcaaaatggacataatagaaa

SEQ ID NO: 167101 - DNA, 218 bp, Homo sapiens
acgaaaaggactgctatgaacatttgcgtataagtttttgtttgaacacctgtatttaattcttttgggtaactacccaggagcccgccaaactattttttcacagcagctgaaccattttatattcccaccagcaatgggttccagtttcttcacatccttgctaaacgcttattttccattaaatatatatatcatatatatatcatatatatgat

SEQ ID NO: 167102 - DNA, 292 bp, Homo sapiens
gagggtgggaagtaatgcttttaattttaaaaaaatttattgagtaataatttatgtatcatgaaatttgtctaatttaagtgaataattcaattattttttgtacatttacccatttgtgcaatcatgaaaacaatccagttttagaacagtttcatcgccctagtaagattccccatgcccatttatagtcaattcctattttcgctctagccccaggcaaccactgatctactttctctctctatgtattcatctattctggacaattaatataaatggaatcatacag

SEQ ID NO: 167103 - DNA, 260 bp, Homo sapiens
tcacctgccagcaaccctttcttttctctttactcacaaattcgctctagggaccagaggatgctgtattcttttcttagtaaaatagatgaaatctgaaatgtagcctaacccagacacagaaaaaccacatataaaattcgaatgttcttagacatactatacagtgagccgtgctgaaaataatagcctttctgtgtaatttatcctgtttttctcctcccttatttggtacctcagcttctcattcctcctaatct

SEQ ID NO: 167104 - DNA, 169 bp, Homo sapiens
gaaaaatcgagactcagtgagatttagtgacttgtccaaggccttgcagttaatcagtgaaggagctggaatgcagctgtagtctgaacccaaagcccatgctgtgtgtgctgtgatggtgtggggccccttgctttggtgtaatcatagacataactgaaccggaaaa

SEQ ID NO: 167105 - DNA, 282 bp, Homo sapiens
tagcactgtgtgcagtttttttctatataatcacagtagtgtattggtaaaggggttgggggagcatggtttgtaacactgccaatttccatagtgtaaatattcctatcatggctgatttcacactaaccatagcttacagtgtttgtagttattaaacaattggctctttcaagctggtaggaactagctccagcttgttgcactgctgcaacaattactcaataaatacaagtcattaaatagaatcactgggcaagaaatagggatggtatggtaagg

SEQ ID NO: 167106 - DNA, 547 bp, Homo sapiens
ccactgctagtcctttctctcccatttattaaaatggtataaaaccagctattcttaatgagatgggtatatacataggtatataatttctaaatatcagattctttgcattttgttttttccctacaatagactcccaactatcccttggattagttttctgaacaacttatataactttatacatctttgtactatactttgtcctcttcaagtatatttcttgagctaattataatgtttagttatttaatatcgagtaattccctttagagaagagtttaccttatacaaagcatgttcaaactctatcaccatttcctagtgccatttctttcattcaaactacatttttttttccttcattacatttaatgtagaattttaaagcaaggcttctgaacctgagattcatagagtccatggaatggatcctctagtccttgggcctcctgaaatacatgcagaattttgtatgtatgtatgaatacgcaaagatggtaccatagtattaagatgtccatggctttcatgagattttttaatc

SEQ ID NO: 167107 - DNA, 414 bp, Homo sapiens
tgttgcccaggctggtctcaaactcctgggctcaagtaatcctcccacagcgctgggattacaggtatgagccactgcaccagccccaacagcagattttaagatgcattacaaatttaaatatgttaaaatgtggaaaataaatggcttgaaatcaatgaagtatcatagacaaataaatcaccagaagagatgagaaagcctaggaaacaaatattaattaaaatgtcaaacaacagcaaaatatttggcatatgataaaaatatcaaaccaatgacaaaagggtacattattcaatatatggcacagacagaaacgattatgtaagaaaaaagttaaattgttctctacaccttactcttctaaattacaaagccaaatggggaaaaaaagaactaaaaagaaaataaatg

SEQ ID NO: 167108 - DNA, 477 bp, Homo sapiens
agctggtggccggggtgctggggcagtggccgtagttgcagcagaacacacggatttcatagttgaagcacatcttgaacttccccacctgctcacggttcctgcagaccaggccaaagtccaggctgcattccacgacctggcccaactcccgcagggggacaccaggctgggcctgggcacggcactcgaggcccaggggctgctcacagacggcccctccggccgcacggatgttggagtaggtgtcaaagtccccgccagagggccccggcatggggtagctgtagtccagccactctgaccaggcacactggggctcacagcccatggtcaccaccgtggttattggggccgatgtggggctgctgggcagcagggtcgaggtgcgggtcttgctgggtgtggccgtggccgtggtcctggaggtggccctggtgtggcccggggtggtcgtccctggagaagggggtgact

SEQ ID NO: 167109 - DNA, 110 bp, Homo sapiens
gcgaaccagggaacagttcctcccatgactatttatgtatcctgtagaacatgagctccgtgaaagcagcaagaatgggcttgcttttctcacctatgctgcttacgaca

SEQ ID NO: 167110 - DNA, 326 bp, Homo sapiens
tgatgacttacatagatcgtaagataccttctacccccgcagaacattaagtagacttctcgcagttgaatctgatcccagtatatcattatgatatccacaacttttgataagacttgggggaaggaacagtattgattgagaagagataaatcagctcaacttttttttttttttttttttttctccctgagacagagtctcactctgtttcccaggctggaatgcagtggcccgatctcggctcactacaacctccacctcctgggttcatgcaatcctcctgcctcagcctcccaagtagctgggactacaggcatctgcca

SEQ ID NO: 167111 - DNA, 343 bp, Homo sapiens
ggaaacagcattggaatttgggatggtaccttcttggtgattgctatttctttaattcttcttaatcgctaaatccttgtttggttcagtttctgggatttatgttttacattcatatatttaataaatgtttctgaatgtattatcatagattcttgaagggtattttttaacttcaaaatatttccaatttcatggattcaatttttctccataaggtttcttagagaattggggtaacattttttcacccaacatcacttattcaccaacactaacattcagagtattttggggatcaaaatactgttaagaaaacaattttaaatttcgcacatgttta

SEQ ID NO: 167112 - DNA, 302 bp, Homo sapiens
ttgggatacagcctttctctactaaattatataactttttgaaattaataattgttagaatttcaggaaatgttagattgtttgaagcaatgcttttctcaccttttgtacctgtggataaaggtgagaagatggactcccagtgtcttcgctagtggagatagttttgcttctggcttttgcaaaagtaatgctaactacagtaatcttcgtatgcttttagtcatatctgctcacaataatcatagatgatattaaagacataattccatatcagatttgtgtaattgtttaattttgtt

SEQ ID NO: 167113 - DNA, 537 bp, Homo sapiens
gcacaagttccacagatcattccaacccagctagaacctcactcagcctggcttcctaagacaaatgcctttaactcttaaggccacctgtagaatcttccaagcaaacatttggaatgcactgttgggctgaagctcttctaccttagaggaatttccaagcttgttagtgtgtaatgtttttattatgtgctttagtatctgaagtgggaaggcttcttaccttccctagactctctgaagagtcctggacattcaaggcctgaccttcaggggaggttcctaccctagactctcccgtcggcatttaaatgcatcttctttaacttcctttatcctatattttcttctgttttcacactggttaaaatcttgcagaatgctcttaaaaaggcccgcttaaaaatgcatccatctatctgtctttccaatagagaaatacatgcacatttagatcttattatcctggctaggtagacagtgttccatagttggatatacttaactatttctattgttgatctttgcagtaaatgg

SEQ ID NO: 167114 - DNA, 298 bp, Homo sapiens
tctaccccaacattcacatcctgctgctcagcctgactaattcctattggtccttcagagttcaacttaaacgctttttcctctaggaagcaccccctggctgcccagaccaggtcagccctctggctctctatcccgagcatgcccgtggctctatcagggaacagagattacatctgtcttgttcaccattgtctcttcagtgtctagcatggcacagggccataatacccgacaaatatctgctgaataaatgaagtcatggctggaactgtcaccatggggtcagctatagaca

SEQ ID NO: 167115 - DNA, 213 bp, Homo sapiens
gaaaagacaccaaacactacatacaggaagaggctgcagcattaaaaaacaaaacaaaacaaaacaaaaaaccccctcagtttattcagttgctatcaatgataatcctaaagaacatcacttacaatatctgaataccaatttgtagtgatgacctcaaaaggtaggtagcaagagtgtctgctaatatgtattctctagaaaactcaactt

SEQ ID NO: 167116 - DNA, 421 bp, Homo sapiens
gaccagaacagtgccaccaaaaggcaggggcactgccctgtggctcttgttcccagcaagtacaacctctattaaaataattctcaccctgagaggaagcttattccaaatgaaagttataaatggcatcccttattcattgagttaggatctttgtattcagcattcttatcaccagaatcatcatttattgaactttaattgtgcaacataacctaatgggtgagatactccaagtatggacaattggaagtgagacacagcaggaatactggaaggcctcaggtgttcaggtccacatggtactctatacaaaggtagacatgtgtgcctaggttctgcgggtattttatcatgtctcttccttccagcatctggccatttcatccctggctgcttttggagggagtcgaatcctgac

SEQ ID NO: 167117 - DNA, 277 bp, Homo sapiens
agaaaccccagggtcagacgctgcagggttggtggctatcttcagggggattcagataagtttcacccaaagggaacccagacctgctgaaggctgaggtctccgaggccccgtatacagtcagtgctcagcatacatccagcctctctttcccaccagtgtgttccttaaggaatgtccaaaaatcacattcaattcagtcacaccacctcccttctcatataccttctatggttcctcctccaagagaacaaagttcaaatgtacccgcctaaca

SEQ ID NO: 167118 - DNA, 297 bp, Homo sapiens
taagtgagaccttgtctcaaagaaaacaaaaacaaaaacaagaaaaactaggagtgagctactttacccaaaagaacgcttcagaggtttgaaactcagaaggcaccaccaaagttgtgaaaggagcagggctgaacacagaactggtttaaagcatgtaaacagagaattgtttgttttaggttccctctgccatattatatgcaaccagagccatcacttctcagctgtgtgcaaacatgaagaagcttcctaacacctctaaccatcagtttcctcatttgtaatgatattacg

SEQ ID NO: 167119 - DNA, 378 bp, Homo sapiens
aaattctcctcacattatcccaattcaagtggccccttgttgcctgcttggacgctgactgatgcaaacatttactgtgtgtgcccagatgggcaaaatatggatcttgccctggagaagctctcagaagggagacagatccatgagcagtttctgcctcctgcagcaggtgacaggagcccatgtgctgtggcaacactgacccaggagggtcagaaaggcttcctgaggagatgcccagagcctggaagctggacagtcagagttagtcaagtgacaggctgaagtgggaataccctttcatcccagccaaaaccagaggtgtgatgccgggtgggatgtgccgggacctgccagctgtttgaggtacctagaggg

SEQ ID NO: 167120 - DNA, 483 bp, Homo sapiens
gcggggatggcaggtgtatctgggacacaagggtgaggagccaacacttggtcttggactcagccttgcacacagacgtggtctgcattgcctttttctaccaactgatctcacaccttttgtgtgtgtgttttccagccttgcttcctgactagcatttgctgccagaagggaaaattttccagacacctccaatggatttttgcctcctacttcattgacccatacaggtcacaaccaccccttaaaccagtcacttgcaagagggctgggattatcaggatagaccaggatttaaacaaaaaccagaaatagtgtggttttattgaggcatggatttagaacaaaattgaggttccctcatcaaggaagaagggaagaattttttctaggtaggcaactgactgcttagatataaaacgaactggcatttttttgcagttcttcataagtatattaatacgactgcttggattacaagga

SEQ ID NO: 167121 - DNA, 574 bp, Homo sapiens
tcttcactccacactgagaacaaaaatcagggtttgttcttcctctaggcctgccttcctaatcctaatcccaatcccaatgggctaccattcagctctcaggacatttaaactagcaacattttgtgactaaacactgctgaaatttacggcacaggtaagagtctaaggtaaactgtatttaatacttcttaaatagcttctgaagccatgctctcaaaaataatttcaaagaaagcaaatatctgagttctaagaagttcaacttcttctcaggttctgggaagttggaataaggcttggcagtggcttggtgctatttatgaatgtgctagttggaccatgccaatctcacctacgtaatgggctgggagacttaaattatggcttgactactacaactgtaagttattgtgctgaaaagttatcctcaggccccaaaaatgaaccgattatcattatccattctgtttcttctattcacactgcatttacattcactatttaaaagttttatttttcttatatcaggcctagaagcaacttccacatcagacgcactgtttacaaaaaa

SEQ ID NO: 167122 - DNA, 373 bp, Homo sapiens
atgtaggtacaggtgtagatgcaggtgtgggtgtggatgtaggtacaggtgtagatgcagatgtgggtgtgggagtagggtcaggtgtagatgcatgtgtgagtgtgggagtaggcacaggtgcaggtgcaggtgtgggtgtgggagtaggcacaggtgtgagtgtgggagtaggcacaggtgtacatgcaggtatgggtgtaggtacaggtgcagatgcaggtgtgggggtaggtataggtgtagatgcaggtatgggtgtaggtgtaggcaccagtgtagatggaggtgtgggtatgggtgtaggcacaggtgtagatgcaggtgcgggggcaggtctatccggccgcgaatttagtagtagtagtcgacc

SEQ ID NO: 167123 - DNA, 450 bp, Homo sapiens
ttcatctccttttgtgtagtaaaaaccactaatgaatcagcacctatttaattgctggacatgaactgattgaaatagaaacaaggaggcatatttgtttagggctctaatatttttataaactttttagttaaaatatttcttttattggcttaggttgagtgaatttgaaataggaatatcctacactttgtgtagtttttatatccagatgcaactagctaaagtaagtggttcttttaatctactcatagaggaactaatatggaaaagagcaagagactttgcaggatttgaggggaaataattaactaatagcaattctgtcttggttattgatgttttctcttaaatatttttgcatttagtgatgtggtccaaattcctctctgtcttttatggaagaacagattgggagttagtttgtaagttaaagttctgttgaaggga

SEQ ID NO: 167124 - DNA, 231 bp, Homo sapiens
ccacacccggcctgcttttgctctttctttgaaatatactcaaaatgcttatattggtttctaactatagatcatgaactcctgaagcaaagtaaccactttgttcttcattatttctttcactcttctactctgcgcggtgccagatattggatatgtaggtgcctaacctttgcttttctgatttcttacattttatttcataaaaatcagcctaaccacgttgtagag

SEQ ID NO: 167125 - DNA, 280 bp, Homo sapiens
aaggcttacagggcctctgggagaagagagtcatcattgtggtgcttgctggcatgctcgagggttcagtgggctccaaggataatgatgataaaagcaggtttgtttcaggatgcaaataattacagttgagtagttcactgaatgagtaggattatcgaattaggctagagactgcctttggaggtgaggagaggaaggaaacgaaggctaacaaaacagtaaacagccagtaatcattcctgcctgattttgcaaatatgctaagggactacaaaaa

SEQ ID NO: 167126 - DNA, 475 bp, Homo sapiens
aaggaaggaaaaagaaaagaagaaacaagtgaagtcaactttacatacgtagtaaaattagtcttgcctgagaatcatcagtctttcagttaggaagagaacagcagcagaaggggcacacagttattcccagacagaagatacccaattaaaaaaaatcaaaggaaagattatcctcatttgatgattaacacaccagcaatctgtaataacatcaaatacatgtagatagtcattcgttgaagtcagcaacagcaggttcgtcagtccaaaacataaatcatgttgcttggagcaaaggctttcaaaaagtatgctccctgttcatggaatttattactaattccatccatggtacatgtttggaaattcagaaaactgtgttttaagatatacattgtatttgttaaacgcacatgtgtttctctctctgtgagcgtgtatgtgtgtggagagagagagaacactaccaata

SEQ ID NO: 167127 - DNA, 320 bp, Homo sapiens
cctggaggctgaggtggaaggatcatttgagcctgggaggtcaaggctgcagtgaaccaagctcacatcgctacactccagcctgggccatagagtgagaccctgtctcaaaaataaaaagaaaaaaaaggttttcttttttaaatcttaagtgactttttgttaagaaagatgatgagttaaaagtgtgttattagttcattcttactctcagaggaggatatataaatagctgttcttgttctttcctccattcttttcaagagaatgttctatttctgtagtacatggtgacagaattacaacaggtaaacatgcca

SEQ ID NO: 167128 - DNA, 319 bp, Homo sapiens
agcaagggagagacagtgcaggtaatggaatgtcaggctgtgggaccagagtctgcaatgccaacccaccaaggttatgataggaaaataacaccttctgtgtgtttaaggaaagtaactcttttttttgagacagagtctagctttgttgccaggctggagtgcagtgacatgatctcagctcactgcaacctccgcctcccgggttaaagcgattctcctgcctcagcctcccgagtagctgggaattacaggcacacgccaccatacctgactaatttttgtatttttagtagagatggggtttccccatgttggc

SEQ ID NO: 167129 - DNA, 135 bp, Homo sapiens
agtgaaatgcttcccgcctcacccatgctatttatctttgctcatgtggaggaattagtgggactttgggctaatcaccttgcctttcaaggcctcagtttccccatctgtatgattaggtggttaggcccgaag

SEQ ID NO: 167130 - DNA, 415 bp, Homo sapiens
ctatggaattatagccttttttttgttttttaaatcaaagatttaaatttttctcaaatgcatctttatgattgaagtctgcttatcattaacatttgatatcagaagcactaattctttgttgtagccttgtttcatcaaaagctgatcaactatgtctgtatgagtctgtcagagagctgaaaaagtaatcaaaggtcaagatggaagctgcagctacatacaggatccctgtgccagatcatgagagctgagagttacgacacagatagttctgggtgaaaagcttactagtaatagagtataatatgttttaatttaaaaacaatttactatatttaattcaaactaaaatcataaaatcattagaataaactatagggataaattttaatgaccttggcaacaaaagaaa

SEQ ID NO: 167131 - DNA, 1168 bp, Homo sapiens
atttgtgtttcgtatattactgaattgttgaatttgtgaaagagtcaattttaaatcacagtcatttagtagtagaatatattgttaccatttttaaagctcttgacaaaatttctcattttcttgactatttaatatatttagggctggcactcacaggtctagctactgggatgtgggaaacacgagtaatgagcaaggcaggttcctgctctcatggagcttacaatcaataggttaccgagcatattcgtctgctacaagtttgattataggacactttgtgttgagtagtcttgttctatttgagtacttgtttgagcttactcctgtttattttttaattgtattgctataactgttgactatttttttcgtgcacagttcgaaaatagtggtaaccatttgtttgtacacattgtgccattgaaaactacgtttttacagacacttatgtaatatatacatgctttggtaaatgaatggatgaatggctctgtcatttgacatgtcttttaaagtctaataatcatgtataaaaaagataacggttcgctgcatctgttacctttaggagtatgtacaagtggaacattatgttttcagtagtgacctgttttgactgttacattcttgacccttattaaatagtgtcttgaaagaaattaaggtaatagagaataacatagtttctatgagtagttctctctacagtgaaaagtggttcctttttgatttggggaaatatatatatgtatagacttttaggtgtattagtaaattaaagtattttgtgcataagatggaaatttgaggttactagaccagtaattctcaagaactaattgcatagttgatttaaatgttttaaaaattaagtggggaccgggcacggtggctcatgcccgtaatcccagcactttgggaggccgaggcaggtggattacctgaggtcaggggttcgagaccagcctggccaacatggtgaaaccccatatctactaaaaatctaaaaattagctgggcgtggtagcaggcatctgtaatcccagctagttggaagactgaggcaggagaatcgcttgaacctgggaggcgcggaggttgcagtgaaccaaaatcgtgccactgcacttcagcctgggcaacaagagcgaaactccatctc

SEQ ID NO: 167132 - DNA, 766 bp, Homo sapiens
agatccccaggaagagcagagaaaagaaagaatgaagaaaagtgattttaaaaaaagatcttactgtgaagaacaaatgaatggatgaatggctctgtcatttgacatgtcttttaaagtctaataatcatgtataaaaaagataacggttcgctgcatctgttacctttaggagtatgtacaagtggaacattatgttttcagtagtgacctgttttgactgttacattcttgacccttattaaatagtgtcttgaaagaaattaaggtaatagagaataacatagtttctatgagtagttctctctacagtgaaaagtggttcctttttgatttggggaaatatatatatgtatagacttttaggtgtattagtaaattaaagtattttgtgcataagatggaaatttgaggttactagaccagtaattctcaagaactaattgcatagttgatttaaatgttttaaaaattaagtggggaccgggcacggtggctcatgcccgtaatcccagcactttgggaggccgaggcaggtggattacctgaggtcaggggttcgagaccagcctggccaacatggtgaaaccccatatctactaaaaatctaaaaattagctgggcgtggtagcaggcatctgtaatcccagctagttggaagactgaggcaggagaatcgcttgaacctgggaggcgcggaggttgcagtgaaccaaaatcgtgccactgcacttcagcctgggcaacaagagcgaaactccatctc

SEQ ID NO: 167133 - DNA, 384 bp, Homo sapiens
ggagctccccaggtagcattttatgaactgaataggaagagggaagggcttctctcccagcacatgccacagttaccagattaagccggttgccttggtaaccttctctctgggcaggatttgggaattgttggttaggaagggcgaattggggagtgtgaagggtgtagggggttgaaaataaaacagactgagagacttctggaagctagaagcttgggacacaggaccccagtactcccccaaatgctcaaggatgtcaggcagagactaagttcaacattttgaatcagtgaggagagccagcatcagtatttctgagaagcttccctgtgattccagtgtgtagtcagggtgaaaaccactgccactccaggaggacca

SEQ ID NO: 167134 - DNA, 242 bp, Homo sapiens
gttacttcagttttttacaattgtgaaaaacattgctatatacatttgtgtgcaggctcttacgtgaatataagtcttcaattcagttggattgaggagtgagactggtgggttgtatttttaaagtatgtttacttttgtaacaaacggccaaactgtcttccaaagtggctgtactcctgcattcccactgcagtgaatgagaattcctagtgctttgcatctcaccaacatttgcattt

SEQ ID NO: 167135 - DNA, 477 bp, Homo sapiens
ctgtgactggctttttttgtttatcatgttttgcctattctggatatttcatataaacagaatcatatgatatgtggtctcctgtgactggctttttttgtttatcatgttttgcctattctggatatttcatataaacagaatcatatgatatgtggtctcctgtgactggctttttttgtttatcatgttttgcctattctggatatttcatataaacagaatcatatgatatgtggtctcctgtgactggctttttttgtttatcatgttttgcctattctggatatttcatataaacagaatcatatgatatgtggtctcctgtgactggctttttttgtttatcatgttttgcctattctggatatttcatataaacagaatcatatgatatgtggtctcctgtgactggctttttttgtttatcatgttttgcctattctggatatttcatataaacagaatcatatgata

SEQ ID NO: 167136 - DNA, 414 bp, Homo sapiens
aggtcagatgtaagttaaaatgcaaatattcccttggaagggtaacattttgctgttaccattcacctaaagaactgaaaggaggctcagttaacagagaaagagaagccgtaagggtagcaaaggtgtagcttcccaggaagatgggagctgatcaaaatctaactttgctttccttgtgctgtatctgggccaggcccagagaacggtcaccctgagtgactctctgtgaacagggcatttggtttctgcaggcttgccgtccccatgtgcctctaacatcctcatgcttaatagcgtccttgaagtgtgctgttcttcttacataagtgtgcttcctttggctaatcagacagaagttgttaagcatctctggagagtatgagaaaagctattacaatatcaaaaaaaaaa

SEQ ID NO: 167137 - DNA, 512 bp, Homo sapiens
tgataaatggtgactattagcctaaggaagagacacaatgagtccacaaaggagatgcctgtgaaacaggtcaaacaaactccgatttctataatcccttggaaacagaaggaagcactagaaaacttagcatcttttcttttcaacagcttatctataatattccttttctcactgccactatttataaccttcaagtctcattgcctcaatattcctaaattactctttttagatattattttaaatatgagtaaattcattaaataaacactgtaatattttatctagctcattatttccttacaaattttagtgaaacacttttaaaaaaagatcttccctctggtacaagttggtgtttgaaaaaaaagaaaaatgaaaatgaaaagatcttccgaagggtgaaaggcttttctttagggtcaccttatatgtaggtattctctctcttttcctctcattctctaacaccctccctctcctgcatagatgtttcaggtaccgtgctc

SEQ ID NO: 167138 - DNA, 421 bp, Homo sapiens
agggtgggaggaagtgaatgaagttccaaagccaggaagctaggcacaaccctgtgagtagtaccaatacctaaggatggtttctcagggacactcagaaaaaagagcccagtctcctgagagcaagcatgcagccctatccccacattttcccctgaacatggtcctgtccaccaaatcaggcctgaggatcctgaaacacctccaggccctgggccctcacccactagacagcccaggaaccaggagcctaggcctgaataatgggaagctctggtactgggctttatattcctgcattttcaacaggaacaagactatgatgtgtggggtttcacaccctttctccctcccttttcctctcagagccacctttgtctttgccaatttgtccctggggtttggtgacacagaggcagtg

SEQ ID NO: 167139 - DNA, 508 bp, Homo sapiens
tgatctccaaaatcattgcagcaattacaaagaaaattttcaaagaaccatgatggcaaaagctaagaaaatggctaaataaacatggttagctttatgaaaatgatattaaaaactatggtaacaataataaaggatcccatgttcctttattatattattgcgctaagtcgaaaaatggaaaattttaagaaaatactcaaaagctgttgcccacttttctgtatttttctttgttttgatttctctgtattaaagctggtttcactggtatagtgggaggaacactttttaaatgaaagattcctaatgatgaagcccctgaagcaccagaaggcaccttgatcttttattgaggagtgctgcttacctatagcagaggaacactttgatactgattccgtgtttacggtattaagggttgatttcaggcgttcttttaaactttaatgaaaaagtggagtctcctaactatgatgacaatcaaataaaatacataaagtaactt

SEQ ID NO: 167140 - DNA, 366 bp, Homo sapiens
taggcacatgccaccacgcccagcttacttttgtatttttagtagagacagggtttcaccatattggtgaggctgttctcgaactcttgacctcaggtgatccacctgccttggcctcccaaagtgttgggattacaggtgtgacccaccgcgcccaaccttttctttagcttttattgtaagaatacagtatacatataacacacaaaatatgttaattgacatatgacctgtaaggcttccagtcaacagcaggctactaagttttgggaagtcaaaaattatacatgggttttcttttttctctttttttttttctttttttttcctgagacagagtcctgctctgtcgcccaggatagggac

SEQ ID NO: 167141 - DNA, 327 bp, Homo sapiens
aggtgcaggcctgtgggtgggcgaggccggatcctgcctgtgcaggggggcaggtggccggtggaggggagccaggggttgtgcaggctgcctggatgagtcggcagctaggactatgtccttgatgggcccccaagcaccctgagcctcataggtcggctgggtagaggggacgcaggccagtgctcacagctgcactatcagagcatgtttctgggtggcccagggtctggcaggctcttggcacccagtgcccctcagctgtgggagccatcttcactgtcccagaccccagctccacccagggagggggcagcagggcggccg

SEQ ID NO: 167142 - DNA, 231 bp, Homo sapiens
cgttggggaaggaaatcgctaagaagtgtgaaaccacaggagacattgcccagtacctcggctggtgatatcagccccacaaagcccttagtgatctgaaagtttcctctcccagtgcagaaatcattccagatttctctatagaggccaggtatttgccctaaagagattcaatcaattcatgagaatcaaggagtagatctaaattaaatttgatctttcttaagtctg

SEQ ID NO: 167143 - DNA, 342 bp, Homo sapiens
aactagtcttatttggttcactaaaaccatgtaatgtggttctccttccccattcgttggttaacagtaaacaccccccaccccccgacacactgtgcaaaagtttccatctcccaaatgtatgaggcatttgatatttgatgtcataaacgggtttttcttaactcctatgaatattcttagctccttctcgtcaggaatcgcttgcagctcttagatgatgtgaatcacctccaaagcatttgttttccaacattcaaatgcattttttgaaaacgaacatcagctgttaaccagagctttcccaggtgcagcagaaaccctcttccacaaggctttacc

SEQ ID NO: 167144 - DNA, 335 bp, Homo sapiens
tttaattctcagaacatccttaggaggaagatgacttttccatcttacagattaagtaacaggggcttagaaggtgatggttgtacaactgataaatagcagaggtaaaatttgaaccaggctctgtccaattacaaagctcaagttcttttaccatattatgctacttctctaaaaaagtgatgatgagctgagtgcagtggctcatgcctgtaattccaacccttgaggaggccaggtgggtggatcacttgaggccaggagttcaaggttacagtgagctatgattgagtcattgcaatccagcctgggtaacaaagtgagactctgcttgt

SEQ ID NO: 167145 - DNA, 473 bp, Homo sapiens
taggattttatagatttaaaaaattatgttaactaagaaaatatagatggaagaaatgagtatctgttgagtgttgtattctgggctagacatcctaatatgttctatgcatatatcatctcataaagccatcacaacatctgtgttcctataacctactgtttattaaataaacaactatggattagagctgattaattgcctcatgatcccatagttaacaaagtagctggcctacagtttgaccatcagcctgcctgccttccaaatcctgtctcttgctcctcagcatagattgacagatatctgtgcagcccttggatcaaggtataggtctgaatcagattagtcagattgattaatttgattaatgtctaaattaatgagagtttaaataccttgaactctcatttaagtttatcattagaatgtggttagtccaagagtttgtcctaataaatttgacaatttca

SEQ ID NO: 167146 - DNA, 465 bp, Homo sapiens
aaaagcatatgaaaggagatgtgagtcactgggctgaaggaatacatgccgctttgatttagcagtcactaagtcatgtcctgctacaagcaggactcccatgacaccccaggccaccaccacctgagtctcatctttgaatgacttctacatgctatgaagagcagctgcagattcagatgtgcagatgatactgtatcatgtctctcaacctgatttctaactttgagttctcgtgccactggacgggtggaaaacttaatttgttattcttgagctatccctcctcggagttatatgaggtttcaggtgtccctagacattaacagatataggttgcccttgagacatcatcctcccatctttatggccactcaggccctgcttgggaagtaggaatcttttacctatggtcacctatggtcctatctgccttgatgtgctagcactaggtgactacctgtc

SEQ ID NO: 167147 - DNA, 503 bp, Homo sapiens
aggtggttgacctgcccaggctatacagctagaagtgccgttagaacttggtacaggtggaactgattctgatacttgtctcaaactgttaccagtggagggtgttcaggttcttggtgtcttgaacaaataattggacaaaacggcacaaacaaagcaagggaataatgaagtaacaaaagcagagatttattgaaaacgaaagtacatttcacagggtgggagcaggctgagcatgggggctcacgagcgctgttatagaattttctgggggttaaataccctctagaggtttccattggttagttggtgtatgccttatgtaaatgaataggttaaaagttacaaaggcattgtatgccctatgtaaataaagaggatatttcggcggggagttgtggcttacacctgtaatcccagcactttgggaggccaaggcgggcggatcacctgaggtcaggaattcgagaccagcctggtcagcatggtgaaaccccatctct

SEQ ID NO: 167148 - DNA, 120 bp, Homo sapiens
gccgggaatttaaatttggtttcagtctgggttgactgggggattatgctgaaggggtacatctcccttgcctctttctgatccatgaagttctcccccagagttggggcaggagggagg

SEQ ID NO: 167149 - DNA, 296 bp, Homo sapiens
tcgttccctgcccttaacgagttttccacgtagttatgaaaagataactaacatcataaagaagtacttgacaaggtcgtagcactcaggatggtcattttagaccaattcccgtaaaggggagaaatgagagaaaaggctgaagaaattagctggcagccacactgagaggcccttggatgcccatctaggaaagagggacttgactcagctgctggagcacgatgcttgaacaggagattgagagggctggaattcagccctaggaggactgatctggcatccgagtataaagt

SEQ ID NO: 167150 - DNA, 435 bp, Homo sapiens
agaacattaactgattgtctacttctaactactagcagagctgggcccagcccatactcctttcactgcactgtgatgtatataataaactatatacttgtcataccatatcttagagcatactttttgtttttttgagacagagtttcgttcttgttgcccaggctggagtgcaatggcgcgatcttggctcaccgcaacctccgcctcccgggttcaagcgattctcccacctcagcctcccaagtagctgggattacaggaatgtgccaccacgcccgggtaattttatatttttagtagagatggggtttctccatgttggtcaggctggtcttgaactcccgacctcaggtgatctgcccgcctcagcctcgcaaagtgctgagattacagacatgagccactgcacttggcctagcatatattttttaa

SEQ ID NO: 167151 - DNA, 377 bp, Homo sapiens
ctacataatccactgatacacacacactaagaaatcaaacatttccaattccataaacataatacatctgaagcaaagataatgccaccaggtattttttactttataagttggtccccagaaaaggataattataaaagacaccaggaagcctcttttcaaccttgttaaataaacgacttgcaaatattaaccacaaaactgtgggtgaagccactctgtcctgtcatgattactcgctcataaaggcccaaaatgcgtcttgaagggagtttttgcaatacaaatcctaatcttaattatataaactctattcttaactatcttaaaatacattacaaaagaccattctcaactttctgaaaactttaatatct

SEQ ID NO: 167152 - DNA, 481 bp, Homo sapiens
ctgctgagtagagcctttattccttcatcatcatgcaaagtctttctagtagctgctgcccactcttcctggaatgagcaaaaatgttttgctatgtgaggagtgctgagtgaattgattctatcacttgtatacttcctggaagttgatgtgttttttaaaaaaacaaaaaggacaaagatggaaccagcatgagctttgtaacaggaccagtttgctgagaatacattatattaaaggtagaataatgggaagacatgattttgattcaacagacataataaataacgtactgaagtgaaagaagaccataaatcctctccaacaatttttttttagtttttaatttttgtggctacacagtagatacacacacacacacacacacacacacacacacgaggtgtatatatgtatggggtacatgaaatgttatgatacaggcatgcaattcataataattatatcatggagaacagca

SEQ ID NO: 167153 - DNA, 2341 bp, Homo sapiens
  misc_feature (935)..(935): n is a, c, g, or t
  misc_feature (1419)..(1419): n is a, c, g, or t
cttttctctcgttaatctgttttttgtcatgggggtattggccatggaccttggaatgggtgaggaaaaggtactacacctctttgccctacaaaagcaggctggcaagtaggatggcccagcacctattgcatgccaagtgtcttcactcaggcagttccatccgtgtctaaacaacctcgcacttttcacttccccactttggggatgaggaagctgagactcaaaggggcagattattcgtcttagatcactcagctggcaaatggaagaaatagtgtttgaaaccacaatctgttgcagcctcccagatgggtacctgcccaccagaaggtcttatgcctagtgttccattattggaatgctaagcaggtgggagttatttatatcctgcggctcaaggtcatcaccaaggcctgatttttcacacacgtctgcaattcaaattgtaacctctgggccgggcacagtgactcctgcctgtaatcccagcactttagaaggctgaggcaggtggatcatttgaggtcaggagtttgagaccagcctggtcaacatggtgaaaccctgtccctactaaaaatacagaaattagctgggcatggcagcctgtaatcccagctacttgggaggctgaggtgggagaatcacttgagcctggcaggcggaggttgcagtgagctgagaccacgccactgccctcctgtgtgggcatcagagtgagaccctgcctaaaaaaaaaaaaaaaagtaacctcttaagctctctccttagcttctgggaaaaatgagtaggggaactcattcacactagaattctaatataggttaataatatcctctttcccagggggctccaagatgtggacccaagtctcacctttctctatctccctcacagccagtcatgaccatgcgatggcctcggaccgtagnaagtagtttaactgaactgtttctcttgggaatttcccctaaagctgaggcatttccttctaagtctcactggaaagttcccaagagcccacgaggtcaaggctacagtgagtgatatttgcaccacagtgctccagcttgggtgacagaacaagactctgtctcaataaatagattaataaataaataaataaataaagtactgaaatctgtattggcaggtgcatcaagacgtagaaactctccttgctcattttggttctgtgaacttccaagtacctttgagaacccccaaggaatccaactcgatttctttcctttcaacttaacccattttctaaataccgtgcatctcagctctgtgctaaggtgcttggattgtgctgaagaagtcataatctccatccttaaatggttgtacaaactaaggaaataaaagcctctcagtggatggtatttagagatgaaagaattatatacaggnaggaaaaatgtagagtgaggcttcccaactgggcaagggaccctcacaggctgttacttgggtcccccagtgtcctctcaagttttgcctaggattggggtccccaggtgtgctgttgggggcccaggccccacaagggtagctctctgaagaggtccatttgtccctactgactctgagggcacagctgttgagatctgggtccctgggatgagcatctggggagctgcctctaggctagccttctcttggtgtactccctcagcattcctggagcctggttgggggctggccctagggagcccgcccctgcctgtgcagagttgctcctggcccaggggagagtgaatgcattgtgctcaggcctcagtaagaggcagccttggcaaccagaatcctgagggagggtgtgcctggcaggtcccctatggactcaaccagccactgtcctcatcaccaagcattagtttggacactagctgcaccctgctaccaacaagagatcaaagaatcatgtctgggacatagagtccagagacctgggctctagtcctggccctgtcactaattctcggggcaaacttggtcatatttgttacctcatatgtgccagacactgtgcaagatacttcacatacttaaggccaggcacggtagctcacgcctgtaaccccaggactttgggaggccgaagcaagtggatcacctgaggtcaggagttcaagatcagcctgaccaacatggtgaaaccccgtctctattaagaatgcaaaaattggctgggcctggtggcacgtgcctgtggacccagctactcgggaggctgaggcgggagaattgcttgaactcaggaggtggaggttgcagtgagctgagattgcaccgctgcactccagcctggatgacagagggagaacatctc

SEQ ID NO: 167154 - DNA, 133 bp, Homo sapiens
tcaaaatacataatcaaaattgggaagagtagaaaacttcaggaaacgtatttatttgttccagagatttctgaaaataaatgactcaaataattgtcaaaaatcataagcaaactgaatagaatactgggag

SEQ ID NO: 167155 - DNA, 100 bp, Homo sapiens
ggcaccagaaccctgaacccctaaccccaaggctcagtcccttacaaggaaccccaaacccttccttcttatttaggccatcactcctcaaaccctgaga

SEQ ID NO: 167156 - DNA, 497 bp, Homo sapiens
tagcttaacttttaggtagtgatttcattttccttattttcagggtcttggggaggcccctgtaagttgcttccatgtctcagcgatacattcaaagatatgttgagattgatatgaacagacaggcagatagcctggccatcttactaacattagggcccaagatcatgcactctgtctaggctgtctaactgctctaattgtcacaaaaatctatttcagtataagattgtaaaaattggtatcgtgccggggtcagtaattacatggtctttccccaacacagcaaaaggatgtgtatattgacaaggaaattacaggattggacataaacaattcactacacgaggggctttggcagaattgagagcatcactttgaaaaagagataccttgggaacaaaaatgtaacccatgaagaagacacctctggccatctctgagaatcataagcataattcatgatatctaataattacaacattaagtctatattt

SEQ ID NO: 167157 - DNA, 688 bp, Homo sapiens
gggacagtcaataataataatgatgataataagtcataacatgttagcaatagtgaatggtatagaacgaacaagagtaggttaagggggtctgggcgtagtggctcacgcctgtaatccgagcgctttgggaggcagaggcgggcggatcacctgaggtcaggagttcgagaccagcctggccaacatggtgaaaccccatctctactaaaagtacaaaaattagccaggcatggtggcacacacctgtaattctagctactcgggaggctgagacagaagaatcacttgaacccgggaggtgttgcagtgagctgcgattgcaccactgcactccagcctgggcgacaagaacaaaactcttgtctcaaaaaaagaaaagtacataatacctactttagagattgtcatggaaatataaagtatgtggtccttactaatgctagataatgctttgtttactttgatttgcatcttaccctcttccgtgagtattgatactgtcttaaacatagtagggtttgattagatatttgctggttgccccttcacttgaagggatacatacaaatgttggtttgtattggataatgaatatgatgttttaacgagtaatatgtgagtttgttactttttgaagggcttaacaacattaacctagttaaagaagtagaacattaagtctgga

SEQ ID NO: 167158 - DNA, 360 bp, Homo sapiens
caggttagggcttcaacatggaactttggggtaacactattcagtgtgaatgaaatctttggcctctcaaatacagatttgtgattcaaagacttcagatttatgaaattatcagcaagattattcaggaattgttcgtgtgcagcctttctgctttttagcacaatgagatttctaatatgtaattgaaggcctcacaactaaaatatatttgttttctaccatgaatctctgtatttttccaaatatggcatttccagagttttcttcataacaaaatgaccttttcctctattcttaactaaatgatgttacagttaaggatcataaagttccgttgaagccgttttaatgaaatac

SEQ ID NO: 167159 - DNA, 112 bp, Homo sapiens
cagggaaagggatggaactaagatttgacctctgttctaacttcagagccaaaatctaaatcacaacgttatactatcttgaaaactagcctagcttattagtgtgctgggc

SEQ ID NO: 167160 - DNA, 527 bp, Homo sapiens
aatctagacataaactgaagagtagttactttgagagcagaagattggggtcgtggagagtggggaggtcagtgagtatggaaggagactttgcttttactgtacgaccctctgtaatgtttaaaattttcaaactttatatcttgatcatgtttacaatcgctacatttttaatttaaaaagattgtttctatcagtgaatcttgccaagaaaaagaggtggcgatagagaaaaagagcaacaaatcaaaagagattatgattatattgcaataaagctgttttttaaaaagaggatatggattttagaacattaggaaacattgtcctaagccatagaaaccactgtttaaaacctgggtacgactacatggcattaatgagtctagtgctgctcagaagagagaaatgctagaggaccagatatttgtattattttaagaaatgacttctattatttagaaaatttattattttaaatttatacttatttaagtattaaatatttaggtatatctgaatttaaa

SEQ ID NO: 167161 - DNA, 421 bp, Homo sapiens
cagttgagggaccataaacagcagagtagagaaaggtctcaattgttattataaccaatagccccaagctatccaaactttggggtcaatatctcctttaatattcaaataatataacctattccttcaccttacataaccttggaaagcacagacctgcactagcatttcaaaggcgtccttgagcaccactgccctatcttagcagcatagctcagagctgctggttacttcctgctccaggctgttgtgctaatgatcactttgttaaaaaaacagcttcattgaggctgggcatggtggctacacctgtaatcccagcactttgggaggctgaggtgggaggatcacttgcgcccaggagtttgagaccaggctgggcaacataatgataccttgtctctatttttaaaaattaaaa

SEQ ID NO: 167162 - DNA, 735 bp, Homo sapiens
gcgtaaatacccagtagtcggattgctgggtcaaatggtagttctacttttagttctttaaggaagctccatactgttttctgtagtggttatactagtttacactcccaccagcagttaaaaatgttcccttttcaccacacccacaccaacatcaattattttttggtttttaaattatggccattcttggaatgcaggaaatgttaataataagaaacctgaacagtgtatctatggggatccaaacagtgctaattgcccacaggtgaactaagcatatgcttagggtgtttgcaaaaatagagtaccgtatgtttttaaaataatttaaattattaatttttaaaggcataagagtggccattgtgaggaaatttagaaatctgtcaagcttccttacatgtttttttctcttataggttagtattgtttttattttgaattacatagtggggatgtatagggagggggaagtctatgattttcagtcctttaaaggttttagaccttaatctgaaaaattcattgttcaagccaggagtaagtgagtcatatgtataacagacttttttctagtattccccagggcctcagaatttcagtctttactggtcagatattccctctccttttgcttgtagcctctggtcaatttgaaaggttacccaccataattgggttgtttctgggctctcccaagttaaaatcttacatctatctgcaacaagtggc

SEQ ID NO: 167163 - DNA, 210 bp, Homo sapiens
agaagattagtgcaggtaaagttgagtgattcctggtaagctgtgtgagttaaggcaaaatggattgagatggtggtaggggtgggatgccagattcagaggaaccccagatgcaggcaggaggtcaatttgtattcatacacagacttggagatcttggccctttaccatcaggaaggaacttagaaatgttgtggctcgtgcccctta

SEQ ID NO: 167164 - DNA, 435 bp, Homo sapiens
attgttcaatgtcctcttcttcatatcaaataacccttttttacccctttactgacatgtataggctaatatggccaactcatacttttcttaaaagcattctttttcactacaagtttcagaaaaaaaaatcaaagtctttctaagccttaccgagtttctgcatctataaaataggggttcataataagaacaagtatttggccagcttatgcacattttagcccaccgttcttttcagtagggagcactgcaaaaccaaccaagtgaatcatgccaagctttattcagtttcctcacctgtaaaatggagcactaaatatctggctagttctgcctacagggttgctgtaaggaggcaatagatgtggaagtgctttgtaaactgtgtaggaattcacatattaaaggaatcatctttaggattacttgttc

SEQ ID NO: 167165 - DNA, 354 bp, Homo sapiens
catttaaagcacttcatatataataccttatttggcttcatatctactgtgagcaagcaaaacaaaaaagttattctcattttacagacaaggaaaataaagctcaaaagccaagtgacaaccaggaaaagtaacccacaatgagacatattaaactaaaattattggaatgtatagaaaaaatctgggtgtccaggaaaaatgaccaggtcactccccaagggaaagaaatgagaccagcatgagactttatgtaggatgacaatggagtaacagactttagataattaaattaaaaaatatgaaccaaggatttcttatttagctgacatgaccttcaggtataaacagcac

SEQ ID NO: 167166 - DNA, 266 bp, Homo sapiens
ggagatgctgagtgccagagggtactgtaaggagagcttgtgcagctgatggatcatgcatgatgcctgtgaacaattgtcctactagacctcacagtagttagggatgtctgcagtcatctcacagtagagcagtagctcagctttggagttttgtttcttgaatgtcttcttttttaaccgtacacgtgcttgagctcactctgataagcccattacatttgaatctcagagagcaaaggcagcatctccatacttgttgctga

SEQ ID NO: 167167 - DNA, 262 bp, Homo sapiens
ctctcatctgtaagcccagcactttgggactcattcttgcaaacatggctcccctcatttctacaacatcacgcagacccagtgatcaaatctcttttcctgtgtacatgtctgagataatgggaaagtccagaatatagcacacatatgctatgaagagctttcctcccagatggtatcaaaataagtgaagtttattatctagcacctcttatccaacaaagcagattacaactatgattacagaaatgacatctacaaa

SEQ ID NO: 167168 - DNA, 327 bp, Homo sapiens
agcgggggggaaatcataaattgatttagcaggattcttgctaaaattggtcctacaggtcttgaataagcttatttcttatttcttataagactgtagggtatactcttttcagtcttattactaattctttatcagtaatatgtattcatctttactgtcttgtgtctttttgctgattcttctggtcttaaggcactctccttaataagttttgaaatctgtccagaactcactgcagccaaatttcctggatttgtttactgtacctgtgattcagctggagatataattcccaaattcatatttttagcatgctggtggtca

SEQ ID NO: 167169 - DNA, 179 bp, Homo sapiens
cttagtgaatgagtctgggtcatggctggaccggagaaatcccagggtgagccagcccaaacacaccatccatggaataaaaaaaggaactgctactccaatggtcagccctgtgagaaacgcatccttccatccagctaaaatctgcctgtgtccatcttgtctgctcaacaccagtc

SEQ ID NO: 167170 - DNA, 142 bp, Homo sapiens
ttatcaatggactttagttcttttgtgtaaattttagtgtcagttggccccattccccagtgggataacaataataagtatcatcaattttattattacttcttgttatgctagcattccaagtctaaccttcaattcctta

SEQ ID NO: 167171 - DNA, 228 bp, Homo sapiens
tgctcaatgccgcttgctaaactgagctgaagacatgcctcccgattccaaggagtgcacagacaatgtgggaaacaagtccagaaataactggaacatgagacatgatggcaggtccacaaatgaagcctgaagagtgtcacaggaacgctaagcagaggcagacggattcctcctgggggagaccagggggggcttcactggggaagtggagtttcatctggggat

SEQ ID NO: 167172 - DNA, 255 bp, Homo sapiens
agttacagtctacatggagtatttcatgaaactgaatgaaattttgataatttggtagcttgactggtgctataattctactatttaaaatgatccatttcttatggaagaatgcatgttattgggtgaatattactgcattttcctctttgcttgatatgttttaagacctctcaattttctcattgtgtcaatgtgtgttgtgtgggttgtgtctctgtgtctccttgtgaagtagctgaactctttagggtt

SEQ ID NO: 167173 - DNA, 326 bp, Homo sapiens
attcaatacccaaaccacatagctgccaacttccacttcttcacttttgttctatattttgatttgggaagacacaaagctaagagaacatgatgtatcccagggagtggggagagtatagcatcagttacaaaatagggatagccaaaagtctgattttaagccagttattaatctaccttacctcattttattaaattattctgtagatccaggacccaagagatgagaagagtcaatcaagctattcatgataggatgctaaaaagaaaaaggcacagagcaaaatgaatgatcacatcagggcggctcagaacaaaaggcga

SEQ ID NO: 167174 - DNA, 284 bp, Homo sapiens
gcctccctgtaaactctctgcttctgctcttgctcattccccagtctgttcatttgcactgagtgattttatttttctctcttccgagtagcggagtgacctttttaaagtgcacagccttatttggaaggctgtggtgggaggatcgctggagcccaggagttgaggctgcagtgaactatgatcatgccatggcactccagcctgggcaacacagtgagaccccatctgtaaaaaaatatataaaatgtgcatcttatcctagcacccctagtaatgcttca

SEQ ID NO: 167175 - DNA, 264 bp, Homo sapiens
caagcaattcccctgcctcagcctccagagtagctgggattacaggcgcatgccaccacgcctgcctaacttttctgtatttttagtagagatggggtttcaccatgttggccagactgggctcgaactcctgacctcaggcaatccgcccattttggcctcccaaagtgctaggattacaagtgtgaggcaccacgcccagccacagaacacttttaaaccactgaactgataaaggggctataaaactcttctatttcattc

SEQ ID NO: 167176 - DNA, 322 bp, Homo sapiens
gcttactgcaacctttaactcctaggcttgagcaatcctctcaccacagacttttgagttgctaggaatacaggtatatgccaccacacctggctaattttctttttattttttattttgaagtggtggggtttcagtatgttacccaggctggtcttgaaatcctggcctcaagcaatcttcctgcttcagcctccaaaagtgctgggattccaggtgtgaaccaccgcaccctgccataagttctgaccagtgatatttaggtggaagtaccatgtattacttgtaggaagtatcttccttctcctgactgcaaggatgg

SEQ ID NO: 167177 - DNA, 247 bp, Homo sapiens
ccacagacttataattacagcacgtttgtacaacctgaaacttgggttcattcccatcctgccattagctatgaattatcctgcagacacatttattctttcaaccactgtcctgttccagagggtccactccctaccaggcccacaccaaggcaacaatctccaaaaagcagcgagtgacagaaacgagcctgtggatcatgagggccaaggtacgctgaaaaatgaaatcgacaagacagcatcc

SEQ ID NO: 167178 - DNA, 599 bp, Homo sapiens
tgttaaaagcatgggtctgaatcccagctctgtcacttattgtgaccctaggacatatttcctattgcccagtgtttcctccaccataaaatggagattataatcctcatctggttgggtttagctggggattcacacaaaactgctagtgctgttggctcagcactgcaaagcacctgcagctccccggtggacgtcaagggatctgaaagtgcagagggttccttagccctttgtgagaggaactaggaaaggaatccactgttcacctaggaacatttgttaaccctttatttcccactgtgggccaagggctaagtgtgcagatggacgattctcctcctgggggcatttgtgacgtttctccagtctccaatatctgccactctccctcttgatacttgcaaagatcattactgcttcctgacagctgcggctacccccactgctactggccactgataccggagatagaaattatttaggcagatattcagggcaaaagagtcctcggcggaatttcccttctaacaaaaaagcagccccagaaatcatttcttttctaacaaagagcagcctgaaaaatccagctgcaaaca

SEQ ID NO: 167179 - DNA, 566 bp, Homo sapiens
aattaagtaggagactttcaggtgggtcttatgtggcctgaaaagctttccttccagatggttctgggtggtacctatgactcaacaaatcacaaacccaagttgttaggataaactcctggttaatgtatagaggcacaatcttaagtagtaagctgtttcctcaataaacccatgtgctttaaaatgttttaactagggaaaactttttaacttattaaaattgcttagaggaaaatcattctagagcataattttcataatttaacactacaatatgtaatataaaacagtgtaactactcgttcactctacgactcctgaaacatacagtctttagttcaaacagactgaaccaagcctcagacacaagattaagaagaaaactcaggccgggcacggtggctcatgcctgtaatcccagcaccttgaaaggctgaggcaggtggatcacctgacatcaggagttcgagaccagcctcagcaatatggcgaaacccatctctattaaaaattccaaaaactggccaggcatggggcgtggtggctcacacctgtaatcccag

SEQ ID NO: 167180 - DNA, 144 bp, Homo sapiens
ctgttttgagatatgttaaagatgaaggattttggtgtcaaatatctttaggtccaaatcttggtccaaccatgttctagcagtgtatccttgggccagtaactacactgagcctgtttttttgttttttggtttttggctata

SEQ ID NO: 167181 - DNA, 554 bp, Homo sapiens
ccagtatcttattattttattaagtgtatgtagaaataatgatatttaatttttgcatgccaaattattttcatttacttttacattccctttaccccaacatttaaatacaatgaaattgtagtaatttatgtacaactaaatacacaacatgtaatatctaagcaaaacttacaacaacataggattgaaatagacaagttgtgaaccattttgttagaagtatttggtgtgccacatttactgtagtatgtgtccatagattgttgcatttgtaatacctgttctaaatatgggaaacttggttgtaatttatgctaagtatgtgagaagctataaaattgccatgtgtaggttactatgggcatatattattaatggaaactaactaaaatttgctgctgaaagtcactgaaataaagtttagtaaaactttgtaaatcttgctttgaaatattttaaaaatgtatacaactttaagctctaaactactcttagaactgtagaccaaggtaggcaaattagggcctgcctggtgcactaccagttttgtt

SEQ ID NO: 167182 - DNA, 251 bp, Homo sapiens
tagaggtttgacctaaggccagcccatcttgcaaatccctgccactaatctgagggtcagtgaacaagggaaggatttggatgtctccatgcaacccacccccacagctggatacagtaactccatcccaagtcctactggtgagtttcatccccttaactgaaggaaacacacacacagtttggactcactcacaggtgtgatggagtctatcatggagagtgatgaaatgagatgtggctcggaaatca

SEQ ID NO: 167183 - DNA, 630 bp, Homo sapiens
acagctagtaagtgacggaggctagtttacaactgaggactgatcactgaaatcaggttaaacataaaagtaaattatatgttaacttccatattgtgtagcagttatccacctaaggttcagcagtcctgggttctaacactgaatggcatggggtagtggttagctcacctacagtggccaacatgttctagaagccatctctgcgactgtgtagatgacttgtgctctccatgctaagatttttgctggagttttaaattttcctccaaaagctgattgtcttcatgataatgagcaccagcgatccctttcctaagtctaaataatgcatcacatgttgactaaagtggagattcaacttcatggttggttgtttttacatagggttggttgtttctacatgtgttacagtgactcctaacattttctgaggtggaaagggcctaagcaatcacaaattcctttcctatattaaagctagagaatctgtgacagaataagacacggagtggggtagttttgtagttgacagcagaagctagggtttctgactgccaggtcagctttttttcccaccatatcaaacagctctctatgacaaaaaataatgcaagtcttgcagaataa

SEQ ID NO: 167184 - DNA, 520 bp, Homo sapiens
ttcctctcctcaccatttactgcctggtatccactccattccttcttcatgccaggcattcagacttttgtcctcactgtgtcccctagacacgtacactgctgtttttcacttccttctggtctttactcaagagctacctcagtgacgccctccctgccattctgaaattctcacacataccttgacatttcttatctcccctcccctactttttcttcttagtgtttataaagaacatacttacttcactgatagatctgtttcatagcttgtcctcgctgctagggctttaagtcccataaaggtatacatttatgtctgttcattactatatccttagtgcctcaaacagtatgcttagttggagctcagtaagaacttgaagactcaggctgcctccccaaaactggtcagcaggtggcaccacaggatcatacaaagtagctgtggattacttactgatggcctccaagaagtgcccatgcccaggttgatgagatacccacccctgatttta

SEQ ID NO: 167185 - DNA, 225 bp, Homo sapiens
gcaggaaatagcataatcctgtttaggttttaggaggctcactgtggctgctaagtggacagtatactgtaggggaaggtgggagcagagacatcggaggctcctgcagtaaccacgcggagtgttgatggccgcttggatgtgcacatagcgggagtagtggcagaaggagtttggccgaaggaattggtaaatgatggttctgtacagaagacagaggaacac

SEQ ID NO: 167186 - DNA, 493 bp, Homo sapiens
tacggaacacagatctgactgtgttttgtgatattagtattattagaagtagcatgcattaaacaataatgataaccattcgtgggtggatgttctctggctacctgaccctctaagatgctgcatgttcagagcattaagggacatcttgctgcatgacagatttcctgccatcaccaacccctatccaaacctgctcttaagtagaagcgtcaagtacagatctggttcttctgttgccggtgatcagatgtcctgcagagctgggccgagggcgccccctgccgccagtcagcagtccagctctgggcagcctgtgcggctgagggcagcagtggctcaagctccctggtaggtactcagagaaatgagacgagggcgcaggaaaatcagcccaagaagtgaacccggaacctggtcctgcgtctccctcaggggggcatgtgcgctgtacacaaacattgttcatcttttcctatcaggagctggaagg

SEQ ID NO: 167187 - DNA, 194 bp, Homo sapiens
ggtcacagtgaggcaaaaactctgagttatttgtagagtaccttaagatttaacttttcaaaaaccatatttaagcttagctttagaagtattcttcccagcatcccttcaccaagctatttcaattttttaaagtgaggagtagggagggctttttaaagtattattcctttatattcagtttctcttatccc

SEQ ID NO: 167188 - DNA, 423 bp, Homo sapiens
tctcaaacacttctggtcccaagagatttggataagggctattcaacctgtattaggtcctactcagttgtccccaaatgtggcccagatggctacatcaaaatcacctaaggaatgtattaaaaacatgtatattcccatgacctggctcagacattttaatttactagggtttagccaaagaatctgctaaatcaaattaaccatgtaccccaggtaactactgctgtttaacattccttcttacctcttattcctgagaagatttgagtcagcccaggcctaggcctgatatggtatcagaaaaaaaactgccctgagtgggtggagtggttcacatctgtaatctcagcactttgggaggccaaggcaggcaaatcacttgaggtcaggagtttgagaccagcctggctaacatggtga

SEQ ID NO: 167189 - DNA, 158 bp, Homo sapiens
gcagctatctccaacgggcatctgagaagatggagatggatgtagctaaaataaatgtgtgtgctggatcgaagtctagctaccaccataccttctaggctctcatccctgtcagtgacctgctgtgtgaatttcagaaatcaaatcttttatgctgt

SEQ ID NO: 167190 - DNA, 532 bp, Homo sapiens
ctggaccaaattgaagactagctaaaacaaaaggcaaaagcagctttccataagacatacccaccagtgtcccatgtcagtttactattgccatggcaacagcaggaaattactgcctttttccatgaggaggctctgacaactgggaagttaccacccttttcctagaaacctcagaataatctgccccttaatttgcatataattaaaagtgagtataaatatgcccagagtaacagcactgcctctgagctgctactctgggcagactgcctatggggtatacctgctccacaaggagcagtgcctctgctgctgtacattgctgtttcagcaaaagttgctgtataacatcacccactcacccttgaattctttcctgagcaaagccaagaacattccccggctaagccctgcatcaatatctgcagatccaaggcttcatggtgaggtgtacatgagctggatttttttttatcaggtgtttggtccaccttttccacttgataacaatccctgtggatgggactgg

SEQ ID NO: 167191 - DNA, 506 bp, Homo sapiens
gcctgcttcctcagcccccagccctcactccgctacagagtgcggtgcccatctgaccctgtgtggcatgcagtgtcctcctctgagctgtgggtatatgtgactaaaacactgctgtcaatctcatccatccacgccaggtgtcgtgttcagccatctcctacactttagggcagggacccctccttcaccaatggggtgaaaaggaagtgaccataacaactgcttaatgacaaaaggattaacccaccaagaagacatctacttcaacatcctcctcttagcaactgttaaaactaggcagaggccgggcacagtggctcatgcctgtaatcccagaactctgggaggcaaagacaaaggatagcttgaggccaggagttcgagcctgggcaatatagcaaggcctcatctctccaaaaaattttaaatttagccaggtgtgccggcacacacctatagtaccagctactcaggaggttaagccaggggaagtacttgaccct

SEQ ID NO: 167192 - DNA, 493 bp, Homo sapiens
tggtgacatcattttattataacacaaaaaggacctgatgctttgaaattactgaggtatttagagttcacatttgtttagatatgagcattcttttacgagtgtagagttgacaaggcattcaggacaaagaaaaatgagaaatgatatgacatcatttcaagtgcggaagataagtccagagaaactctacagattgattgattgattgagggctctttgaatgtgacgtcttctcaaaccatctgagactgagtagaaaacaaatattaataacatttgcagatgatacgtgagggtgagtgttacaaacaccagtcatgactaaggcaaaattaatacctttttaaggcccacagggaattgaaaaatgtggaagacctaacaaatgaggtccaacttggaaagtatgagctgacatatcaggagaagaatattctgaagcagagaccaacagaaggaagctaaagttaaagatggaaaaggattttgc

SEQ ID NO: 167193 - DNA, 994 bp, Homo sapiens
ctagtttagtaatttttatgatttagttacatatctgtacatgcataacttttttagttattaatctagtgttacatttctttatgatttagtcatatcttttttggtataagtttatttggtattaggtataactctttgctgtcctagtagttgctttgggatttatagtgtatgaatttacctcatcacaatccaccttcaagtaatattatatcatatcatagacggtataagaaattacaaccatattttcatttcttttctatcagccagatcccagcctagatctgtgggattatggctgtcgttaagtttaaaacatatttagccaatttttttctcaagttttttattctgcctctcctcctacctctttggggacttatatattacctgctggaagtttgctcatagttcactagtgtctcaaatttgtgactcttttatttcatgatggcgaattaatctatgctcatatctactcagtgcagctttcatctccagcattgtaacttgtatctctacaagtgcaatttgatttttaaaagtatcttctactgctttacttatcttcttgaattttatggtagaatagagttgagttacttataaagagcttgatccttttcatttttctttttatggtatgagctaactccccatacctgaggcaaggcctttctgagtattcattctcctgtgaagtctcagttttcccaggcaaatctataaaaatagatgctcttcttggcgctgtgtgaacaccagttgtgatttcctataattttataggccaccccccacccccacctggtttgttcttaggtagttttctagctcacatgcaatttccaaaattttgctaaatattgacagggggtttcttgccattgattctgtatctctctctcctcctcagtgtttgttctgtaatatctgtctgctttggttttaccagactctaagcttcatcaatgtaaccaagagagtc

SEQ ID NO: 167194 - DNA, 198 bp, Homo sapiens
gcactgctccgtggcactctccccgtgtcccccgcttcccctactgcatcctctctggtaatcacgttccttctcatgtgtgaatcagtgaccatcagagccggccttcactctttactattttggattcaaatctcatgtccagctgccatcctgtcacctttccttgaatatgccacaaactggactcacccaacg

SEQ ID NO: 167195 - DNA, 405 bp, Homo sapiens
caaaaaaaggccaatgtgactggtagaaagagccaggtcacagagccctgcaatcccatcaagggtgttatgttgagtatactggggatgcggggggactaaaagcacagccctgacatgatctgctttataaacagtaaggctaattaggaagctactgagatagcccaggaagagaaaatggtggcttgaggttagaatgcctacacctggactgggccgaagaaagtttttataaacatccttagaaaaacctttgactccatttacaacagcaaccaaatgtatacaaatttaagaaacaggccattcatggctaggtgcagtgactcacacctgtaatcccagcactttgggaggccgaggcaggtagatcacctgaagtcaagagttcaagaccagcct

SEQ ID NO: 167196 - DNA, 488 bp, Homo sapiens
tgattattttgatcaagtttttactttacttttaagcaaagactgaaagtatctccttatgataaatttcccaaagtgttattactttacacatatctatttcttgatacataaattattttccaaaaatactgttatcagttcacttgcctgtgagcaattcgtgtagtcacatgcccatttccctgtgtttccctggccacagtcaagccagtgtgaataaatgatcactgccacagccacagagcttgcactctcctcctcaaaattctgctccattgcccttttgaaaaatggaaatataagtgatatagttttaggtagggatacgtggtaaatttattattttcagcattgttaaaattattttctacattgttgagctgttctagaggaacctattattgttttggactagagattttttttttcgcttcagatttattaagttatgattaacaaataaaattgaatatatttaaaaaaaa

SEQ ID NO: 167197 - DNA, 309 bp, Homo sapiens
agaggtctgcgaaccttctctgtaagtattttactgtcactgctcaactctgccacagtagcacaacagcagccatagacaatatggaaacaaatgaacatggctgttctccaacaaaaccttacttactgggacactgaaatttgaattttatatcatttttatgcaccaaagaaaagttttctagccaggtgcggtggctcacaactataatcccagcaccttgggagactgaggctggagaattgctttagcgtaggagttcaagaccagcctgagcaatatagcaaaaccccatctctacaaaaa

SEQ ID NO: 167198 - DNA, 389 bp, Homo sapiens
tccagcctgggcaacacagcgagaccctatgtcttaaagaaagggcagaagtggggacccctctcccacccccttcccctgctccaagccaaagcgtttgaagcaagaggttgcctcctgtgagtttcccccagtccctggaggcctgggctttgggaggtgtgtccaggcagaggacagaggtcttgtgcaaagggccgcttttcccttcgcccaccctgcgcccgcccagccccttatccgatgggaaagccttactgactcttttcctcgcagaagcgcccagatgctgtttatgcaacctctccagaatctcagtgtactgtactttttaaaaagtgatttgattcaaagcactcattctttaattaaacttcatttagctgcca

SEQ ID NO: 167199 - DNA, 341 bp, Homo sapiens
cttgaactttaccactagtatttatggaaaagtcacaattccaatgggtttctaccatatttcatcaaatttaggatgccactgattgaaagaggcattacgattcaagagatgttaaaatggggtgggtatggtggctcatgcctataatcccagcaccttgggaggccaaggagagtggatcgcttgagctcacgctttttagaccagtctaggcaatgtggagaaatcccgtctacaaaaaatacaaaaattagctgaatgcagtggcgcacagctgtagtctcagctactcaggaggctgatatgggaggatcactttagcccaggaggtcgaggct

SEQ ID NO: 167200 - DNA, 231 bp, Homo sapiens
aacactatgattcctgcttgtgcaagcaatgtttgtggcccatacaagggggacccggctgagttcttcatggttggcttgtggttgacatttttttttctctaaattttctctggacataatgctgctgatggaatttataaagagatagagcattctcattccactggattaggccaaaaagtaattgagctactgaagctatttagaagaagagcctctgattgcatt

SEQ ID NO: 167201 - DNA, 393 bp, Homo sapiens
cttcctgtaagatctgaataaagctccaatgagccataaccaatctcttctgaagcattccacccattgataagagctgcctcaattgaatatttccattgcagcagcaatagggcagacagttgcagaaaatcctcaaaagaactaccatagacacaaagttaactggcagtaaaaatcgctctgtgacaccaccaccctatgttcagaaagataggcaaagctctcctctttgtctagaccttcctttaattagggtcccgggggccaggaaaattctctgaagtaagtctgtgcactgctccggcttttgaagagtaatggctttggtgggaagaaacatttgtaaaaattcagatctaatctaggaacccaaaccaatctaattagagt

SEQ ID NO: 167202 - DNA, 445 bp, Homo sapiens
gatggacatttgggttggttccacgtctttgctattgtgaatagtgctgcaataaacatacgtgtgcatgtgtctttatagcagcatgatttataatcctttgggtatatacccagtaatgggattgctgggtcaaatggtatttctagttctagatccttgaggagtcgccacactgtcttccacaatagttgagctagtttacagtcccaccaacagccactgtatatatctttctaaaactcaattctgatgattttgctcccctgattaaaagccctcttggactatctatccaaattccagcctagctttttgaccttatttcttgccaatccctataaatgcacaatttattctagctatactgaatttctcaatgtaatcataatttactgggacatctattatcctttgccgccttctttgtacacagaagcactat

SEQ ID NO: 167203 - DNA, 556 bp, Homo sapiens
atcgtagccatcatgaaatcttagcataatgcgttgtgctaagatgtgtttgtggtgatgctggtgtaaacaaacctactgtggtaccagttgcataaaagtctaggatatatgagtgtgtgtgatacacagtatttgataatgatcatagattgatgctgttttatgtgtttactatacttttaatcattcttttaaagtgttctcattctactaatgaaaaaaagttaactgtataatagcctcaggcggattctgcaggaggtcttccagaagaaggggttgttatcataggagaagacagctccatgcctgttagggcccctgaaaaccttccagtgggacaaggtgtggaggtagaagactgatattgatgatcctgaccctgtgtagacctaggacaatgagtgtgtttatgtcataatttttaacaaaaaagtttaaaaagtaaagtaaaataaaaatagaaaaaagcttaaagaaaaaggatataaaaatatttttgcacatctgtaaaatgtgtttgtgttttaagctatgttattacaaaagagtc

SEQ ID NO: 167204 - DNA, 528 bp, Homo sapiens
cttgccctgctggaaagtcaacaggagaaaccccttcatctctgaaccccaaactgaaaacaaaccatcagctagcaaaatctaaaccataactgggcctagaaacccagactgctaaagctgaacgtgccctaatagaacactgaatctacccttctcactttgcaggtaggaaatgaggattccaagagaggatctcagacccgcgaccaacacgagtttctagatgttctttgcaatgcgtcacacctctcccacgcctgtatatttgctaacatttccagaccagcacaaaactaggaagagagaaacattctctctccaaagagaaggaacctttccctcgggacacttggggtttcctcctaaggcaggagactggaagcccacaggacaggggcccctctggcctctcccgtgcctcgtcccttcacccacgcacggccccagagcttctctcaagcactcctgaaaccccgccccagcggcccccaggactgggccttctgcttgtctgctacaaggccc

SEQ ID NO: 167205 - DNA, 462 bp, Homo sapiens
ctacaaaaatattaataggctgtaaaagtaaaaatgatgtcagtattatggtttcaaatgttgaggcaaccagagaagaaaataggatagtatactgacaatttgaaaatatgaatataacataatattaaaaagtagaaaaattagccgggcttggtggcaggcacctatagtcccagctactcgggaggctgaggcaggaaaacggcatgaacccaggaggaggggcttgcagtgagcagagacggtgccattgcactccaacctaggcaacagagcgagactccgtctcaaaaaaaaaaaaaaaaaaaaaatagaaaaattttaatgtgccatttgagatccctgcattatagccccaatatcttcccatccttaactgttataaaaactctttaaaccatgctgctctattattactccaaatttcctttcttgccactgaatcttggctcattatgt

SEQ ID NO: 167206 - DNA, 386 bp, Homo sapiens
acctacagccaaatcaacccatctccccaaacacacacagcatatatttacttattcacaaaaatgaattaaagagaaagcaggtacagactcattaatctgattgtgtggttcctctgaaaattctgtgagccactgtaatatcctgttaaaatattctcttctgcatcattaaatcactcaatatttattgaggggttgcctgtggttatcagggggagctggtctggtcatgtacacctgtagtcccagcaacttgggaggctaaggcgggaggattgcctgagctcaggagttcaaggctgcagtgagccttgaaccttcaatgattgcaccattgcatttcacccctgggtggcagagtgaagactccatcttaaaaacaa

SEQ ID NO: 167207 - DNA, 560 bp, Homo sapiens
cagatggggcccaccgtgtctcctcttccagcctggtcctctccctccctggccatctcagtggataccccgcattggagagccaggagaagagctaagagcagctttgcccctcatctggtttcctccgagtctgcttgacaatctctttcaaatcaactttactaaggaagaagttacgtaccgcaaaatgccctcatttgaattgtgtaaagaatgagatttgacaggcttggtgctgtggctcatgcctgtaatcccagcactttgggaggccgaggctggcggatcacaaagtcaagagatcgagactatcctggctaacagtgctctgtgagcttccttgaccatggttcctcccgctcaccatcactcaatctctctcctcttcagtgaagcatccagaaagagttactgttccaggtctacactccccttcccattcactctgcttcggataaattctgatttggacaattacataaatgcccacctgggtccagcctcatcttatttctcctcctccctcatcaaggagcagccaggactctgaagtcctc

SEQ ID NO: 167208 - DNA, 285 bp, Homo sapiens
cgtgcgtgcgtgtgtgcaggagatgaggaatggtggacatggagagttttaataggcagaatggttgttgtctatttccatactttaatcatgcctgtgccagatgtacgtgaagccttttctcattatgtgatgatacctctggttgacaaaataatattgattcattcctttttcatgttatccttcaagttacagtcccatccctttctctccaacagcatcagactttatcgggagagtggacaaatatggcttcctttcctacctttctctctccaattt

SEQ ID NO: 167209 - DNA, 411 bp, Homo sapiens
gaatgaccgctgggcgcgccgccgcggacctggagccagggctctgcgcagggtttaagcctcagggtcccgcgcgcgaatcagggcccgtctcccctcctttattccctcctcgggcgggtagaaggggcgaaggcgggcagtgcacgcaaggctctgggcagcaagtgacgcagccggccgcgctcagcctcctctgccccgaacttggtccgcatggctccggccgggccgcccgggcagcccacgggggtgcagccccgacgctccactcggcggggccgacggccaatcttcccagcacgtcgccgagggagcgctcctgaccccgggaacgtccaggacgcaggcgagggtcctgcgcgcccccagccgcagtcccgggagcctgcccagctggcggcggccgcg

SEQ ID NO: 167210 - DNA, 524 bp, Homo sapiens
caggggttttgttgtttaagagatgtagtgacgcctcccttcagacattgttgggagatggagtaaactgagggctagaaggcagagagtaagtgccccataagcagagcagttatacctccctctctgaagatatgtgtctgcatggcatgtgtatggtggtcacttccacagttggttatgaaattggagctagtgtctcatgatgacacagcaaccttctcagagtaggaaggatagatttatatgtacgttatcctaagtgatggtgaccattattaaaaccagtagggacttctagcttgacttcagcctatagtttcaagcttctctcccactaaatgctttagcagccctgttacaagtagaagagctcctttactttactttcatcttctgttttcccagtctccccagcacagaaagtactgatgagtagtaaaatgaccaaaagctcccttgtcaaaggaaaaaaggtgcatttatcattgataacataccaggctcttacccaagctcagatg

SEQ ID NO: 167211 - DNA, 233 bp, Homo sapiens
tagctgaccttcctcccagcacagctccaatgcaggcatgtgcatccaccacccttccacgcacacttactgagcacctgccagtgctgagcagggtttagagactgcagactctgcagtgattgagatggacagcgtccttagattctggttgggtagacaggtgataaaccagtgaacagatgtgaacattagacctatgatgaataaaatcaggctagtgtggtggggtg

SEQ ID NO: 167212 - DNA, 242 bp, Homo sapiens
cacaacacatgtcatcctgcgttatgaccacctgctctgctctaaatccctggaggacagagtagactccttccttgctgaatccccaggccctgggcactcagaaggcactcatcaacatttgttgaatgaatatatgattgttcccagagcaccttgcagcaaccatcatactcctgccctgtgattagtcctgtccaggtattttttttttttattttttcagacagggtctcactctc

SEQ ID NO: 167213 - DNA, 430 bp, Homo sapiens
tcagccctggtcaaggtggcaaagggtctgtttttctccccccattagacaggggtcttgtcttgctaccctaatggtaaaggggtgactgggaagggttggtaagaacatggtagggatggagactccagccccacttctctgggcttatgctgacagagacctgcttttatttttatcccttgagttttttaaaaaaatccagtaactttattcataactttttcaaaaacttttcataaaacatttttttactttttttccacaacttttgccgcaacttttccacagcattttttatcccataactttttcatcccacaactttttttaatacctgtaacttttttgtttgtgttcttttaataaacacacttgcatagttacattacaattttgtaaaaataaaaaccgattatctcatgccaag

SEQ ID NO: 167214 - DNA, 828 bp, Homo sapiens
ctcagccccatcatgtgagctcaaagtgcttcacctcactgtgcctcagtttccatgtctgtaaaacagggtagaagtagaacttatctcagaagagttataagaattaaactagagaagaagtgagcattgtttatatgtgcttgttgctatggatccaaaactgccagtaataacaataataataataataataatagcttatgctttcgttgagcccttgctttgcacctggccagtgacaggcacattatcagtaacacaaatgcaagtatctcatctaacccttgcatcaacgctcagagatgggttttatcaacatccccattttacagatgaggaaaactgaggcagagcagttgcacaacgtcgcagctgttcctggatgcttcaccgcagagctcattgccagtaaaccactcatcattcagcctttgctgatctgtgcctaatggcttataccaatactttctccggagaattccttagctagcaaaagctatttcacccagggagttatgctctcacatgctgaactggccaatgactaagcgatatgaagcgagaggagtcacacaaaagtccagtcctcctgcttcaaggcagaatacactccagagacccacgtgagatcaaggctagcctcagcctgagagcccattcttgcttggctctgtcccctcccccatcatcctccttccctcactttccttctcctgagaacccccaccttgaataaaccgcacctacccaaatctcattcttgggcttccaaggaacccaagaatcagctttgctgacttgggcgatcctctacatcgtgcctgg

SEQ ID NO: 167215 - DNA, 765 bp, Homo sapiens
agtcgggtggggatgcggcacctgcattttcacaccctcctggtgtgtccccacttggagtgattgcgtatggaaagaagcaccctctcatcaatcccttggaaaaggtaacttctgactaattcactgagtcctggctcatcagctgaaagaactcactgatggggcaggtggaatgtcatgtttccatggggcatttcaggggtggggtgcgtcatcgcttccctgtgtggatctgagaaggagagggggcaggccaggtgcagagactggaaacccaggcttggactagaagagtgttccaagagtaagcagggagcagtgatcagtagccgaggtaaggaaggaccagcggaggcactggaagccctgatcagcaaagacaaggtcttgctgcccaaagctgagggcagaggtcactagcctgcccacagctgcattccacactcccaacggtgactgacttcttaactgaaaggactaaatgcaggagcgtgagccatacccacctgaggcagagaacacgaaaaattgagacaaaaagatttcaggataacacagtgttaatcagaaccctttaatcccctcaatctctcaatctgttgctgaagattttaacctactgcagggttcagctcctgtgatgtgcgtgctagtgttactttgtgtttcctaaggaaacaggacattcacaaataccttgcagcttcttttctctcaaatcccactgcatcactcagagagctatttactggaaaacaaaac

SEQ ID NO: 167216 - DNA, 513 bp, Homo sapiens
  misc_feature (5)..(5): n is a, c, g, or t
cagcncgactctttaggatcccccacgcagcttggactagaagagtgttccaagagtaagcagggagcagtgatcagtagccgaggtaaggaaggaccagcggaggcactggaagccctgatcagcaaagacaaggtcttgctgcccaaagctgagggcagaggtcactagcctgcccacagctgcattccacactcccaacggtgactgacttcttaactgaaaggactaaatgcaggagcgtgagccatacccacctgaggcagagaacacgaaaaattgagacaaaaagatttcaggataacacagtgttaatcagaaccctttaatcccctcaatctctcaatctgttgctgaagattttaacctactgcagggttcagctcctgtgatgtgcgtgctagtgttactttgtgtttcctaaggaaacaggacattcacaaataccttgcagcttcttttctctcaaatcccactgcatcactcagagagctatttactggaaaacaaaac

SEQ ID NO: 167217 - DNA, 370 bp, Homo sapiens
ctgaggtgatctagaggatcctaattctgcaccacagcaattctgcacccgatagctgcgcctctgggaaaattactcccctacctttctttgcctcagtttcctcttctgtgaaacgggaaatgtataacttacttcaaaagtctgttatgagaattaaatgagttagtacatgtaaatctcttagaatagtgctcaacatatagtaattgctcagttgttaccatgcattatattaaagctctaagaattgcctgggtatagtggctcacacctttaatcccaccactttgggaggctgaagcaggagaccatcctggctaacatgatgaaacctgtctctactaaaaatacataaaaattagcctgg

SEQ ID NO: 167218 - DNA, 414 bp, Homo sapiens
ctgggagggcttagaatcagttcactctggatatattccatattttttctgagtgggtttttcttacctttggtgggatgagagatgaattacatttttcccccgtcctttattatttgaaaagaggatgtatctgaagcccaagttttttgtttgtttttctttgtttttgagacagagtctcactctgtcacccaggctagagtgtggtggtgtaatcatagctcactggtgcctcgacctcccaggcccaaacctgggaggatcatacctcagcaacccccaagtggctgggactacaggagcacaccaccaagcctggttaatgtttttaatttctatttttggtaaagacagggtctccctgtgttgcccaggctggtttctaaatcctggcctcaagcaatcctcctg

SEQ ID NO: 167219 - DNA, 464 bp, Homo sapiens
cactctcagcccaatactggtgtgttttaattagccaagcaaggcttagctaagtgggcatttaaaggttccttctaaagagccatttctttacaaaaagttgaaaatcttatgctatattggccaaaaggtcataattcatggaatgtctttgctcatgaaactaaatagatggttagagatgttgctgtttgagacctggtggcatacatgggtgaacaattgcaatgtaaactcttgacttgcatgctttttctttacctcaacccattcattacatgtaggctcaatcatttcactatttaggttactggttcagaagaagccaggaaaaacaataacactatagtaataagaatgttgttacctgagtgtgtattgcttactttcttgcagatactgctgaatggcgatcaatacgtagctttatatttttaaaaataaaaataacttagtggcttaaa

SEQ ID NO: 167220 - DNA, 517 bp, Homo sapiens
gggtcatcaccaaggtctgatttttcaaattcaaaaaattacaatttcaggcataaatgggttaaccattaaacattctttaattctccaaggttcaactctgtaaactctgtacccattctgataatgacaattcatggacatctcttgactgtaaactacttcaggaaagtgatttttgatctgtacactcatatcacagtacctaacagtgcttcctaaaatgcaagaacacaaagcaggaataaatgaataaatactaaagtcaccttcttttctttctttttttttgatggagtttcccactgttgcctgggctaaagtgaaatggcgtgatctcgactcactgcaacgtccgcctccccagatcgaaacgattctcctgcctcaggctcctgagtagctgggattacaggcacacaccaccacgcccagctaatttttgtatttttagtagaggcggggtttcaccatgcttggctaggctggtctcaacctcctgacctcatgatccgtc

SEQ ID NO: 167221 - DNA, 496 bp, Homo sapiens
tcggtaccggccccctgtggaattgattatgctacgtatttgcagaactctggcctggcagcacctggtccgtgtgccagaaatgctcttcaccctcttctctgcccctcaaattcccatgccacacagtggaatcagagaaagtgttctagagaggtgacatttgagttggagtcagttaatcctctggattcatgaaacaactttcacattcactacagcatgatattgctgaggagatgccggtgtttatttgaatagctggtcaccagactgagaacactttcagggcagggatcatgaactatttatcactgtatcctagcaactgacacaaggtctggcccagagcaagtactcacctagatgatcatggggatggatggatggatggatggatggatggatggatggatgcattcatgcatggatgagaggatggatggataagggcgggagggagagagaataaaagaaaggaaggaaaaactgtaca

SEQ ID NO: 167222 - DNA, 514 bp, Homo sapiens
agtcaaggattatgtcactatgtgttttagggcactgtgaagaagcataaaatttctaagttatattatatgcatatcagattctagatatgcaaggcctgagaagactgagagggagatttatggtgtgtgactcagagcatgcagaggaaagatggatgagacactcatgtgcaaacagctccctcaagtacaatgttacagagggagatcagccacctggctctattgtttcttctcatctccttgcttcatcttcaccttcttgcccctaaagcatagccttcacaaaagccttcaactcagcaaggtgcatttatcttacagggtttagtgaagggtaactttgtggaagcatataaaaaactattatataactcttaaaacctgcatttatttacgtatgtctttcagttttccctgttctagcttagatttataccttcacacttttaaaagaaaatagtaacatataaaatctatgtatgatgaactttactagcagatttacttg

SEQ ID NO: 167223 - DNA, 427 bp, Homo sapiens
tttgccattgcttccagtccaacgtccttcctttaatttttcttccagaacattccatcccctccagcctcttcctccattaaactgagaattgaatgactgaatgttcgtgaatttttagattcaccggtgctttcttccaatccctccaaacctctcatttttataaagaaacaaggaaaacatgaagcaccttacatcacaataccagtatcaacaacatatctttatcagctctcattccatattttaactaccttctaaatacagacccaaaccaaaaaattaatactttaagaaaggaaggatcagtgttctcttttcatttatcagtaagattagcagactgcaattagaatttctctcttcccccacggtctttcctccagtaaagacaaaatgctttcctcattcccatgattcaaca

SEQ ID NO: 167224 - DNA, 810 bp, Homo sapiens
gcaggaagcccagggaggatgcccgcacggcagcccagaggagagacaacagtgccgagtgtaggcagtagtaggggaggcaggaagaaacggtgagaggcagtttgtgggcagcactggctggatttactgaagaactgatgtgtaaggcaagagaggactcatgcagcatttttgttgatgtctcttatagcctaagcctggggatgaacagcgctatcatctaatgaaatggagaagacagaagagccaagaagcaggcaggatgagactcaagactgcagattttgacaggttgagtttaagatgccagtgagcaccatcacaggactcttgagcggagagctggataaaccagtctagaatttaggggtgaggccaggattggagccaatagcattgggtggtatttaaagccttgggactgaataagaatgcaggagagaaaaggcccaaggattaaccccagaggcacttcaacatctccggtgggaaggtaaagagcttggactgaatcctgaagtgtagttctccaagtgtagttttccaagatattgtagccaacataatttgggtggtaatgtcagttttattagtcatgtgtttacttttacaggcaaaagggattaaggaaaagaatagtgaagtatgtggacagtacgaacaactgccagacgattctgcagagaggtgagcactgatggtgcagaagagagaggacaacgctgccagagcaaagcccttaggcaggagagaaggaaggagtccagcgcctacactgaggggcttgctgtggaagcagggacagtc

SEQ ID NO: 167225 - DNA, 339 bp, Homo sapiens
ccccactcccaggagagttggctacgcaaatttttagtaaagaggaatatcggaagggaaggaagttttgttttgatttcccagctttgggagaaaagaaaagaagggattgcttatgaactgcaagccccctgatgaaacagcaaactaccaggccggtgctggtccaagatctaatggcaggatgtttgcagtcctgatgttaccaagctttgtctccccaagctgggaaatcaaaacaaaacttcctccaccttccagccacctgtcctgtttattcatttcttccctgtcttttctccttttcttttccatttatccaggcattcgttccttcta

SEQ ID NO: 167226 - DNA, 1491 bp, Homo sapiens
  misc_feature (1203)..(1203): n is a, c, g, or t
  misc_feature (1352)..(1352): n is a, c, g, or t
caagatagaagcgttcagactacaactcccagcagccacgaggagccctagggcttgatgggaacgggaaaccttctaacctttcacgtcccggctccgcgggttccgtgggtcgcccgcgaaatctgatccgggatgcggcggcccaatcggaaggtggaccgaaatcccgcgacagcaagaggcccgtagcgacccgcggtgctaaggaacacagtgctttcaaaagaattggcgtccgctgttcgcctctcctcccgggagtcttctgcctactcccagaagaggagggaagcacaggtgggtttctttagctctgcgtcggatccctgagaacttcgaagccatcctggctgaggctaatctccgctgtgcttcctctgcagtatgaagactttggagactcaaccgttagctccggactgctgtccttcagaccaggacccagctccagcccatccttctccccacgcttccccgatgaataaaaatgcggactctgaactgatgccaccgcctcccgaaaggggggatccgccccggttgtccccagatcctgtggctggctcagctgtgtcccaggagctacgggagggggacccagtttctctctccactcccctggaaacagagtttggttcccctagtgagttgagtcctcgaatcgaggagcaagaactttctgaaaatacaagccttcctgcagaagaagcaaacgggagcctttctgaagaagaagcgaacgggccagagttggggtctggaaaagccatggaagatacctctggggaacccgctgcagaggacgagggagacaccgcttggaactacagcttctcccagctgcctcgatttctcagtggttcctggtcagagttcagcacccaacctgagaacttcttgaaaggctgtaagtgggctcctgacggttcctgcatcttgaccaatagtgctgataacatcttgcgaatttataacctgcccccagagctgtaccatgagggggagcaggtggaatatgcagaaatggtccctgtccttcgaatggtggaaggtgataccatctatgattactgctggtattctctgatgtcctcagcccagccagacacctcctacgtggccagcagcagccgggagaacccgattcatatctgggacgcattcactggagagctccgggcttcctttcgcgcctacaancacctggatgagctgacggcagcccattcgctctgcttctccccggatggtcccagctcttctgtggcttcaaccggactgtgcgtgtttttccacgggccggctggccgagatgcgaagtccgaggcacatttggaaaaaagcagggncagagcggttcttcctggtagcttagccagccaactctttgctgggtctaggcgccctgggtgtgtgccggatatggcctcgtgtgggggccacggtcccccctgttccccgggccgttagaccggtgctgtgccgcgt

SEQ ID NO: 167227 - DNA, 291 bp, Homo sapiens
gctcctgaacagctgtcgacgggagagaggggaccccaaggagtgggagcaggagccaggcagacctcagagccccaggctcctcccgcacatggtgcagtggctggatggcccgggctgggtcctacagcggctgctcagtcaggtgggggggtccctatcccagcagggtcccctctcagggcagtaggggtgttgtcagccatgactcagacttccctgaggcccctcacctggactcaaaaagaggctgcttgatctgcatgaagccacgcgggtgtgcagggcagg

SEQ ID NO: 167228 - DNA, 455 bp, Homo sapiens
cctcctgggttcaagccattctcctgcctcagcctcctgagtagctgggtctgcaggcacacaccaccacacctggctaatttttgtatttttgtggagatggggtttcacagtattggtcaggctggtctcgaacccctgacctcaggtgatcctgagcctcccaaagtgctgggattacaggcgtgagtcactgctcccagcctgtgtgcaggttttattgtgaacatatgctaattctgtagggtatatggctgaacagtggggttgctagatcagtcatttggtaaatataattatgtctttgtaaaaaactgcaaaactttcccagaatggctttataattttgcatttacaccagcagtgtatgagaatttcagttgttcccattcttgtcagcactttgtagtgttgatgccttttattttagacagcctaacaggtaaataatggtt

SEQ ID NO: 167229 - DNA, 180 bp, Homo sapiens
tgtgaaaatggcagcaagactgatcaatgagatcaatgtggagaatgttgtagtcatcgagatgagagacgattgtggtctgaatcagaaaatggccattgagatggagaagatggatggattcaagagatatgtaaaagctggaatcagcaagacttccttgattgaatatggagcatg

SEQ ID NO: 167230 - DNA, 211 bp, Homo sapiens
ccctgagagaatgccaacggctctgcgtaggtcactcgcctttgaggctgggctagcagctcagaaaaggggccaaagggcaggaatagcaggaataaagccgtggttccatgctggctccagggacggggcttgaggctggctcattccagagagctccttcttttcctacagaggccacaagttcccagctcagcacaatagcctttgt

SEQ ID NO: 167231 - DNA, 604 bp, Homo sapiens
  misc_feature (8)..(8): n is a, c, g, or t
  misc_feature (10)..(10): n is a, c, g, or t
  misc_feature (13)..(14): n is a, c, g, or t
  misc_feature (19)..(21): n is a, c, g, or t
  misc_feature (23)..(23): n is a, c, g, or t
  misc_feature (27)..(27): n is a, c, g, or t
  misc_feature (37)..(38): n is a, c, g, or t
  misc_feature (63)..(63): n is a, c, g, or t
  misc_feature (68)..(68): n is a, c, g, or t
agacgcananggnngttcnnntntggnacgagagccnnaaccaaagcttacagcaaagaggcnctggncctggcccagaaggtagatcctgcccagaaggagaaggaagaggttggccagtggctcacgaataccatcgacacgctcaacatgcaggtggaccagtttgagagtgaagtggagtcactgtcagtgcagacacgcaagaagaaggtcgacaaggatgaagcaggaccggattgagggcttgaagcggcacatcgagaagcaccgctaccacgtgcgcatgctagagaccatcctgcgcatgctggacaatgactccatcctcgttgacgccatccgcaagatcaaggacgacgttgagtactatgttgactcatcccaggaccccgacttcgaggagaacgagtttctctacgatgacctggacctcgaggacattccacaggcgctggtcgccacctccccccccagccacagccacatggaggatgagatcttcaaccagtccagcagcacgcccacctcaaccacctccagctctcccatcccgcccagcccagccaactgtaccacgggatccttagatgacctcagcaca

SEQ ID NO: 167232 - DNA, 519 bp, Homo sapiens
gtgctctgcagcccctgagcctggccctgggctcgccagcgaagcaggaccggattgagggcttgaagcggcacatcgagaagcaccgctaccacgtgcgcatgctagagaccatcctgcgcatgctggacaatgactccatcctcgttgacgccatccgcaagatcaaggacgacgttgagtactatgttgactcatcccaggaccccgacttcgaggagaacgagtttctctacgatgacctggacctcgaggacattccacaggcgctggtcgccacctccccccccagccacagccacatggaggatgagatcttcaaccagtccagcagcacgcccacctcaaccacctccagctctcccatcccgcccagcccagccaactgtaccacggaaaactctgaagatgataagaagaggggacgttccacagacagtgaagtcagccagtctccagcaaaaacggctccaagcctgtccacagcaaccagcaccctcagtccccagctgtgccgcc

SEQ ID NO: 167233 - DNA, 588 bp, Homo sapiens
  misc_feature (8)..(8): n is a, c, g, or t
  misc_feature (10)..(10): n is a, c, g, or t
  misc_feature (13)..(14): n is a, c, g, or t
  misc_feature (19)..(21): n is a, c, g, or t
  misc_feature (23)..(23): n is a, c, g, or t
  misc_feature (27)..(27): n is a, c, g, or t
  misc_feature (37)..(38): n is a, c, g, or t
  misc_feature (63)..(63): n is a, c, g, or t
  misc_feature (68)..(68): n is a, c, g, or t
agacgcananggnngttcnnntntggnacgagagccnnaaccaaagcttacagcaaagaggcnctggncctggcccagaaggtagatcctgcccagaaggagaaggaagaggttggccagtggctcacgaataccatcgacacgctcaacatgcaggtggaccagtttgagagtgaagtggagtcactgtcagtgcagacacgcaagaagaaggtcgacaaggatgaagcaggaccggattgagggcttgaagcggcacatcgagaagcaccgctaccacgtgcgcatgctagagaccatcctgcgcatgctggacaatgactccatcctcgttgacgccatccgcaagatcaaggacgacgttgagtactatgttgactcatcccaggaccccgacttcgaggagaacgagtttctctacgatgacctggacctcgaggacattccacaggcgctggtcgccacctccccccccagccacagccacatggaggatgagatcttcaaccagtccagcaccctgcctcagcccaggcctcaccccaccaccagcccaaccgcatcacccgttcggggatccgtgtagag

SEQ ID NO: 167234 - DNA, 689 bp, Homo sapiens
taatcccagctactcagaaggctgagacacgagaatcgcttgaacctgggaggtggaggttgcagtgagctgagattgtgccactgcactccagcccgggtgacagagtgagatcctgcctcagaaaaccaaaaccaaacacaacaacaacaaaaaatgacatattcattgtgaacttttaaaattcatactcattaatcgtcattaaatttccttaaaccatttttcaataaactgtactagagttcgctagtaatcaatgtcaagcttactgggtagttgtttccagaacccgccctttttaccaaatgaaaaaaattaagacttttgcctttctcaccattttctgataacgtattctgcataatttctcatagatgacctacagtgactctgacgctaaatctgcaagttcttttaacaccacggaaataatgtctaaatgctcaagacaaaatcacttatggtggtaggttttccctcattatttccttccaccttagtcatcaattccttcttattcagacctgttcttgcattttcagctttaaaattattcttcctgatggaaaagaaagggaaagcaaaataataattgagaagatccattttctttctgtcgtctatgaatcctataccatctaccccaaacactggctctacctctccttattctttatacaactttt

SEQ ID NO: 167235 - DNA, 558 bp, Homo sapiens
ctatggtatatatgcaccacattttctttatccagtctaccactgatgggcatttaggttgattccatgcctttgctattgtgaatagtcctgcaatgaacatatgtatgcatgggcctttatggcagaacagtttatatttctttgggcatacacccagtaatgggattgcttggttgaatggtagttctgtttttagctctttgaggaattgccacactgcttcccacaatgcctgagctaacttacactcccaccagcagtgtgtaagtgttcccttttctccacaacttcgcctgcatctgttcccctcaaatttaaacatttaccccaaaggatattagggatgtacaaaatcactgaaagaataatgactaaacatttctgaaaggaatttagaatcacttatattttcagtatttttggctgatccctagaacaccttagaatattagcacttacttgtcatctgcaaggactccctcatgatgtttatctaaaggtctagcatactgcagctgtgagttacgttttacaaaaccgttgaaaggccatcat

SEQ ID NO: 167236 - DNA, 438 bp, Homo sapiens
tactattgtagatgctgagggcacagcagcaaataaagccaagtcccagactgtgtaggacacttacattctcacacccagctcgcagcaaattataaactctaaggagataaataattgggggaaatcttgaaacttgactacaggcttaactgggtaagactgccagaaaacaggaacagttttctgtgtatttagtgccattcataacatgacagcatccacagtgactaagcaaacagcccagaggagcaagggtgtgagttaggagttgagtaagaatcagcgacaataaaaatgaacacctgacatatttttcccattctagggtcctctgtctataaatatgtttgaaactaggttattatcctctctcacccatgcttatctcccaaattcttcttaatcatttctcgggtcctgatgatatattgatag

SEQ ID NO: 167237 - DNA, 441 bp, Homo sapiens
cccagggcaaaggaaaggctattcacaaattttttaaaagtggaagacagccataaaatatgccaggataatccccaagaccggctactctcaactttctctacctccaatcttggagcccacccaagggcaagagtggcctggagactcgctataaaatgtatgtgaccaccacaatggaattgctttgccagacatttttactaatgaatctcatagcacggagacagatcccatataaggagttaagcaggttcattctcctccacgctgccccttcacctaccagataagcaaggcaagtgcccccagttccatggaaggagagcagaccacaaaaaggttagaaggctcaagtcctctttccaggtagctgggaggatgtaattggtgaggcaggagattagaaatatcggcagcctctaagtaagactttaattt

SEQ ID NO: 167238 - DNA, 201 bp, Homo sapiens
tttctttttcttctcagttgactgaattatttccctagtctgtcttcttgccactcttgatgctcatatgagaggacctaaggtaattcctgacaacctgggactccttaggaaaaacagaaggtgccatagactccattttaggagaaacgtctgttttccttatggaacttcaagaagtgtaagcagacaggtccctct

SEQ ID NO: 167239 - DNA, 270 bp, Homo sapiens
tgtgaacggggagatgctggaagatggctcagcagacaggccagcccagctccagtgtccaaaaagcggtttctccaataaggaggcctgggaagggaagcacaatcttccccaaaggagaaccaagggctgaggttctgcccctccaggaagtaaggtgctctcggggcctccttggacttgtctgggggctgcagtggagtcagctggacacctgctccacccctgccacctccgcccccaccctctgcagcatctggcatctccatg

SEQ ID NO: 167240 - DNA, 395 bp, Homo sapiens
tccccccgttatgtccgggtgtcttatgtattccagtgtgtatattcaattattctgaacttgagagtaaaaagtgggtcactacaaacttgatgaagatttggtctgcaacattatttgaaataggaataaggccacacacggtggcttacgcctgtaatctcagcacttgctgggattaaaggcgtgggccaccacacctgacctctttctttttttgaagcaaggtctctgtcacccaagctggagtgcagtggcatgatcataactcactgtttcaattggcaataatcagtaataattgtgcctcggataaaccttactggctatgatactgccactgcccaaagctgattataggtcactgtagcctcgacctcctgggctcaagtaat

SEQ ID NO: 167241 - DNA, 933 bp, Homo sapiens
tagggggaggaggaaagacatcttcacaaatccatgtccttatgcagattagctcctttcactgtgcctttaaatcccccagattgtcttgttatgccattctgtttcaagatggttctttcaatccatacatccatttttcattgattcagatgtacagtgctcttaattagcatagacttcccgtggattcagaaagtggttcataatggccttcccaaaaggaaaatttaagtctaatgtaaggaataagaacaacccaaaggaaaagtcacccactgagtactgccagcattagcagtgacaaggacagatctcactcagcctatctgtcctctggggagctccaagaacatacgaactgctgtcattattctactaccttaaatcataatcattctgctgagtgggaacagttccagtctgtgggacaggtaaaaaataaatgggagacatgaagacactatcacgcttcactcacaaattcatgtaaattatgtttagttcagtcttctaaaatatgcaggcatgtcatttagaacagtactcagttgccaagaattattttcaatggaccaatttcaatggaattcctgaaatttttgcttgcatcagtgatagactagacgtggatgacttaacctcttgcaataaatagctagaaaacctgacagtatatataaaagaactacgtgcaggcaccggacaacgggcagttcagaacttggctgttcagctaatttgcataaagatatggatttgtttgtttctccctgcaagaaaagaaacaaacaaggcaagctatacaatcaccccaactttctgcctggaggtgttaataatttccaggtcaccaagtacagggaaggggaactcaaattaaacatagtagccctacagattaaatactgcagacagtaaagaacagagttc

SEQ ID NO: 167242 - DNA, 177 bp, Homo sapiens
caaacccacacactcctcaccacatgtggcggtttcggaagctccttcctggggctccaactacagactacctcttctgacagtctcacccccgctgtcccagctcgaaccttcaccctctttgggcagtctgcatctgggggccccctcacacccaagtgctactgtgtttacact

SEQ ID NO: 167243 - DNA, 491 bp, Homo sapiens
ctacaattaaagaattttgagattgcaattacagataacaactactgtaacctatataatatccttttcctcttatttactaacagaacactgattttacttgaggaagctgagcattcagctaaaaattaaaaatctgcccatcttttctgcagtgggggtggccttgtgacacaattgtagccattgaaatgtaaggagaggtccctggcagtgatgttgaaatgtaagcagtcaagcgggttgtccaggtacagtggctcatgcctgtaatcccaacactttgggaggcagaggcaggggaatagcttcagcttgggagttcaaaaccagcctgggcaatgtagcaagactctgtctttatggaaaaaaaattgtccagcgtggtggtgcgtcagtgtagtcctagctacagccacttggcaggcagaagtgggaaggtctcttgagcccggaaaggtcaagctgcagtgagccatgatacatttaaa

SEQ ID NO: 167244 - DNA, 545 bp, Homo sapiens
aattgggatatcatcttcaggtaatccaaatattgacagtgaagaaaagagcccaaacataatgagaaagtaacacacagcagagtatttcaactttaggatataacaacttaaaagatgttactcacaaatatataatctttatcaactggccaaaatatagccttgaattatccaacaagtctcctatttcttgttataaaatatactggcaaaaaccaacaaacccacactgctacaatgaaacccatcctcacattccatggcttcagggcaattccataaacacaggatcataaaaagacagcctgcaaacttaggtagcccgcactccattttaaggatcggaaattaaatgacatgtgatcatccagctacagcaacctgaggatctttttaaaaagctagcaggaactggcaatcttatgttagaaatccaccaacaaaacagtatacaaaattcatacaatacagatgatgaagaaatttgagtccaacgtgaaaatgttatagcttgtatgctttaggatacaagttgtattcag

SEQ ID NO: 167245 - DNA, 291 bp, Homo sapiens
gacgcttgtcagaactttcatgtttatgggctttcatttctttgttagaacactaacctagaaaactcgggtaagactaagtgaacgtcatctctggtcagacctcagtccatgtggctcttgtgaaagagttttggcctagagctaattaatattgttggatcgtggatccttttgagaatttttttttttaaagagatggggtctgcctatgttgcccagattggtcttgaactcttggtcccaagctatcctctccttggcctctcaaagttctaggattacaggtgt

SEQ ID NO: 167246 - DNA, 473 bp, Homo sapiens
aatttaaagattcttggtaaatttaccaaattgagcaaccatgacaataattactttaataactaaaaattggaaatagcctaaatgtttcaaatggacacatcaactgatgaatgcatagagagaaatgtgttatattcacaccatggcaagctgcttaggaataaaagaatgaactgttaaatacgacatggaggaacttcaggacacgctagtgaaaaacctgcacaaaaacaatttatgtgattccactgatatgagctgtccagaagtagtaaatctgtagacagaagtagattagtggttgcctggggctggttggtggcaatgaaaatcaacacaggtcaagagagagactgaaatcatgaaaatattctaaaactgatttattgtcaaggctgcagtgagttgtgattgggccattgcactccagcctggggcaacccaaagtgagaccctgtccccccaaaaaa

SEQ ID NO: 167247 - DNA, 248 bp, Homo sapiens
agccaaaccataatctacacaatagttattattatctccatcttacagaggaagcaatggaaagtcagagaagtgaagtacgtggcccatgtcacccagctaataagaggcagaacccagagtcacaccaggtctggccgactgcagctgcagtccctcatctcttcatgactgtgccttgtaacaggggatgagttgaaaacctggaacacagcagaagggcaatttgttgggcaagctgtatggtg

SEQ ID NO: 167248 - DNA, 304 bp, Homo sapiens
cagcaacagaggacagaggaaatgtttgtgtgttccaagaaacggggagcagacatccctgtccctccaagaagaatggatggcgggcctttctagctccagacagccctcatgcccccagtcatcccaaggagcttgctctacttttccgatggtacggagtacatatgagactaaatgagattcgacaagttggatggttctgcaagagatgatgggaaaattggccagggatgcaagaggcctgagctctcatcccacatccgctactatctccattgcaaccacacaagtcaaaagaatg

SEQ ID NO: 167249 - DNA, 519 bp, Homo sapiens
cagcgccttttgtatattcatgatctgtttctgggcaaagttttgagaggaatgattgaatataggttcttgtagattatacctttatacaaaagaaaagtgatagattcttagtaaaccaaaatatagttgtccctcagtattgggaactaatgaggaattggtagcagctgcgtgaccttactaaaaataaaaatcagatccgctgctgtaaactcttcactgatttcccactgcacttagaatacattcctaactctttatcatggtcatatcagtgctgtgctacagccaggtcataccagcttttgacggccaattgttaaattttcaggaattctgtgaaccagttgttaagcacagccattgttacaaattaaatgataaaaacttacagttaaataactcatgttaaaaacaaaagtaataagtactcaaaattcatcactttctggttatgttaccactttttactgttgtctgtgctcttgaactatttacattgttttatctgtatga

SEQ ID NO: 167250 - DNA, 450 bp, Homo sapiens
tggcattcacagaatgatggaatcaaagtaactcaaattctgttccttaacttctctaatcactaatattattgttattttgaatctactgtctagatgcaggggtatgtggcaccatggggttgggcacgtgaagtcagcttgaatgattttcaaactgtcaggaacttattcaaaacaaatgtgtgtggctgagttcgtgtgtattggggcgtgactgtataactgggagtttgaattaacttctaagtagaatgcaagctataaaggataagtaataaaaaagtgctaatttgaagcttacatgcatattattaaaactcagtagtaacaaagcaatggtttagaacttagacccacaaaagcttttatttgggaaggagtgctttatcactgacattgtttggaattgccggcacatggtgataataaaaagcagactgacttcta

SEQ ID NO: 167251 - DNA, 137 bp, Homo sapiens
tccatctattaaagaaaaaaaaaaccatcgtttacttttaggagtaggcattacatttacgtgcttaaaataccaaaggtacccaagtgtagatatgaaagactttcccacccccaagtgagtgcccagccccttaa

SEQ ID NO: 167252 - DNA, 239 bp, Homo sapiens
ggaaagtggcagctgcacagtagcaggggctgcctgagcaggaaagcaggtaaaggaccaggggagaaacacctggggatgatgagaaaatcattttatgatacataagtgtgccagaaccaataaaatcggccctagtcacatttaagttactacgagtctgcttgaatataaacacagattttagcatagagttggaaggaatttttactttctagttaagagcatcctgctccagc

SEQ ID NO: 167253 - DNA, 122 bp, Homo sapiens
aggtgttcaagatggaaacacccattgtcaaggttaacaacagcagtagtaataacagctcccctccccaagcacgcacaggccgaagggtgaacaggcacggtgccaggtgttttggacaa

SEQ ID NO: 167254 - DNA, 477 bp, Homo sapiens
gcagagcagacccccagcttggaaaaggagcatgtgttcttcccaagtctgggtgtgctagaactggcctagagattctggaacagctgttctggccacctccccagctgcctttctctttgtcccagaatttcccccatcttaacttctttctttcatctcccattcttgactccagcactgtaagcaggaatctggccttttatctcattcttggatcttgataggctggaatgatggtaaaaagccaatgcgggccaggcgaggtggctcacgcctgtaatcgcagcacttagggaggctgaggtgggtggatcacgaggtcaagagatcgaggccaacatggtgaaaccctgtctctactaaaaatacaaaaattagctaggcgtggtggcacgcacctgtagtcccagctactcaggaggctgaggcaggagaatcactccagcttggtgacagagcaagactctgtctgaa

SEQ ID NO: 167255 - DNA, 215 bp, Homo sapiens
cacctaatggtcctccaattatggaggcggtagttggccagagtttccagctgctgagctctgatattcatcactatgtttgtaccctggccatgctctctgagggctgttcacagacaatgactgagcacagcaggagttctaaggtacacttgttcctgagactcatggacccctctcattgaatgactgtgacttgaggactcccaaatggc

SEQ ID NO: 167256 - DNA, 1011 bp, Homo sapiens
  misc_feature (2)..(3): n is a, c, g, or t
gnnggcatactatacagtaacagccaactttttgttcattctaactcttaccacaccgagctttccttggtgtcagccacaggggtcactaagccatcagctgatcaagaaagtctcccgagtagctggactacaggtgcccgctctcaggcctctgagcccaagccaagccatcgcatcccctgtgacttgcacgtatatgcccagatggcctgaagtaactgaagaatcacaaaagaagtgaatatgccctgccccaccttaactgatgacattccaccataaaagaagtggacacgcatgaaatttggtgccgcgactcagatcgggggacctcccttaggagatcaatcccctgtcctcctgttctttgctccgtgagaaagatccacctatgacctcaggtcctcagaccggaccagcccaaggaacatctcaccaattttaaatcaggttcccacgccgaccctaatgccacttgaagcagccctgagaaacatcgcccattctctctctccatatcaccccccaaaaatttttgccaccccaacacttcaacactattttgttttatttttcttattaatataagaaggcaggaatgtcaggcctctgagcccaagccaagccatcgcatcccctgtgacttgcacgtatacgcccagatggcctgaagtaactgaagagtcacaaaagaagtgaatatgccctgcctcaccttagctgatgacattctaccacaaaagaagtgtaaatggccagtccttgccttaagtgatgacattaccttgtgaaagtcctttccctggctcatcctggctcaaaaagcacccccactgagcaccttgccacccccactcctgcccgccagagaacaaaccctctttgactgtaattttcctttaccttaccaaatcctataaaacggccccacccttatctcccttcgctgactctcttttcagactcagcccgcctgcacccaggtgattaaaagctttattgctcacg

SEQ ID NO: 167257 - DNA, 210 bp, Homo sapiens
cattcatctgtttgttcattcacctattcacccaccaatctatccacccattcacttacccaatccaaccattaatcccttccacctaccgactcatccatccactcatcccattcatctgtccactcatccatccatttactcagcaagcatgtcctgagccctgactagtatgagtaagtcactatccagctctcaaatttctcacag

SEQ ID NO: 167258 - DNA, 594 bp, Homo sapiens
tcccttttgatccttttaaggtcaatggggtctacagtgatgttccatctttgatttctgatattagtaaatcgtgtcctcctttttatctaaattagcctggcaagggactccaattttattgatttttttctgagaaacagcttttgtttttgttgattttctcccctcatgtcccattttaaatttcactgtgccctacttttactattatcttcggattactttggatttaatttgctcttctttttctagtttgctaaggtaaaagattaaatgattgatttaagatattcttcatttatctctaattctgctttcactgcatccataacatttgatgttataattttattttcacttatttcaaaatatttttaaatttctcatgaaatttcatcttgacccatatgtttcttagaagtgtattgcttaatcttcacagattttgagactttccaatgatctttctgttgttgacttctagtttaattcccttgtggtttaaggacagatattacatgattttcattctttcaaatttcttctattttatttttatttttatttatttatttatttatttatttattt

SEQ ID NO: 167259 - DNA, 261 bp, Homo sapiens
caaagtgctaggattacaagcataagtgactgcgcccagcctcaaatttaaactttttaactggcatggtatcacatgcatcttagttttgattccaattacagtagctgtgtaaatgagagattcaaatttggatgaacaggtcaggcacagtggcacacgcctgtaatctcagcactttgggggacctgaggcaggcagatcacttgaggccaggagttagagaccagcctggccaacatgacaaagtcctatctctac

SEQ ID NO: 167260 - DNA, 349 bp, Homo sapiens
tcttgtgtcccaggaatatcctttaaatcacgctgggaacacttatagtaaggcacatgtttactcagctgtctgttcccccttccagaatgagaggagcttcctgaggcagtgactgtgcctcatccaccttcgaataccagggctcagcaccaggtaggtgctcaatcccatgatgttgacaacttccaggttcccaatgcttacagaccatagcaagtcaagatgccagtaatgcttcaggtcagcaggacaggcagtgaagcgggctgtttttattgccagaaagtttaggggattcaggcaaggagacattctgggcaagaatgttgtgaccagggagctggag

SEQ ID NO: 167261 - DNA, 436 bp, Homo sapiens
ttgataactttaataaccctacatctattacagaaataaatttgtagataaaattcttctcataaagaaaattccaggccagatagtttcactggtaaattctaccaagcttttaagaaaaaaataactgtaattttacacaagctcttctaggaaataaaaattgggccaggtgcagtggctcacatctgtaatcccagcattttaggagggaggattgcttgaggccaggagtttgagaccagcctgagcaacatagtgagaccctccccccatcactacaaaaaattttaaaaattagctggatgtgcctctggtcccagctacttaggaggctgaggtgggaggatcacctgagcctgggaggttgaggctgcagcgagccgtgatcacaccactgcacttcagcctgggtgccagagtgagactctgtttc

SEQ ID NO: 167262 - DNA, 630 bp, Homo sapiens
tctgttttcatgctgctgataaagacatacctgagactgggcaatttacaaaggaaagaggtttaattggacttacagtttcatgtgggtgaggaagcctcacaatcatggtggaaggcaaggaggaccaagtcacatcttacatggatggcagcaggcaaaaaaagaggttgtgcagggagactcctgtttttaaaaccatcagatctcgtgacacttaaatcaccatcatgagaacagcacgggaaagacttgccttcatgattcaattacctcccacccactccctcccacaacatgtgggaagtcaagatgagatttgggtggggatacagccaaaccatatcagccatcttcctttggtgtcttcacgtgatgttccctttgtgcatgtgtcttgtaaatctcctcttatatagatactgttggattagagtctacctatatgacctcatttcaccttaattgtctacttaaaatgccctgtttctaaatacagtcacattctgaaggtagtgagcatcagaacgtcaacatttgaatttggggacacataagtcagcccatgataggtgacagtctgagaacccggcataatgatcttttccaaggctctatgcttctctggag

SEQ ID NO: 167263 - DNA, 263 bp, Homo sapiens
attttgccattcttgctaaacgtgttattacatgtaacacagcatctatcaaagaatggaagagtggaaattgctttctccactttattggtcctaatattcctcatttttgtgttgccttttgtaagccaccaaatcatagtattattactttgtttccctcttgaggagttaattcctgaattcttaggatctttggctgaaggagctcaaattgccttcacctttctttaaggtgctttcagagagtggggaaattgggg

SEQ ID NO: 167264 - DNA, 342 bp, Homo sapiens
tttattcttctggttgaagtgttctatccaagattattacatggctgtttcctctcttatcatcaagtctcaggttaccaccactctcccctcactccctgtcccagaggttgaccactctgaataaatccccagccaatctctaacacatcatcctgtttcattttcttcctattaatttttactacccgaaattgtcttctctagttctatagtcacccactaattctgtcttagctcccagaatgtaaagctcctgagcacgggaaattcttaagtcttgtccatcatttactccactttacatcaagcctagaaaagtgttcaggatgcagtaggtgc

SEQ ID NO: 167265 - DNA, 390 bp, Homo sapiens
aactgacaccaaaagcaagttgtctgaaaagatagaaaataaaattatacttgcaacactcttcccaatagtcaagatttggaagcaatctaagtgtccatcagcagatgaatagataaagaaaatatgttacatatgcacaatggagtactatttagccatacaaaaaaaaaatgagattctgtcatttgcaacaacatggatgaaactggaggtcatcattttaagtaaaataagctaggcacaaacaaacagttatttgtgggaactaaacatcaaaacaattgacttcatggagcttgagtacagaaggatggttaccaaagggtgctaagtgtagtgggagcagagggcatggggagaggtagggatggttaatggacaccaaag

SEQ ID NO: 167266 - DNA, 207 bp, Homo sapiens
agcagtgtgttatatcctgggtagggtaaaagataggcctagctggatgcagtggtgcatacctgtagtcccagcaactcagtaggttgagatgggaggatcgcttgaggccggcaattctgggctacagtacagtatgctgatcgagtgtccacactaagttcagcatcaatatggtgacccctcaggagcagggaaccaccaggt

SEQ ID NO: 167267 - DNA, 474 bp, Homo sapiens
acatattatgctcctatttacataacatatttgagggccagatgaatgagggttatctcaggatatctatcataaattactagaactttcttttcaaccttctccctaacatttcactattgttgtccccccaactcttctgttttttctacatctccttccaaatttgtcttctttcctgttaccttttctccctcttttcttttccttattcttttttctcttcccttctctcctttctttccatttaactcttttaattccttttctccatttctttgctttaactaaccacaatatagaactgatgtgtatattaattgttcattaaagtgactgggtaaattccttgtgcttaaatttaaaaagcaattttaaaagagtatatttattgttttaaaaaactcctaacataagttaatcaaaattcacagaaaaatgattaaaaataaatatactagattacaatagtta

SEQ ID NO: 167268 - DNA, 415 bp, Homo sapiens
cagttccatctagtgtaaggacagggcactcctcttcctgacttcaacccttaggtgggggatgttcccagtgagtatttgtcacagtcctggccccaggctatttcagggctgcctggccacttacctgccccttctttgacacattgtttgtgaacaggtggaggaacaaggtgggtacaatcccccttcttaactcttaacaatgcaagctctgattttcctatgtcaaatcctgtcttcgtaggtcgttatgatgcttgtttgtcaggacctgagtcctctcttttgggagagtaggaaagagaagcttgagtacctacccaaagtcactgggtaagccttgcttccataggtgggtgaggaggactacagtgggcagatggtagtaaggaaaatgaaaggaaagggaatt

SEQ ID NO: 167269 - DNA, 257 bp, Homo sapiens
atgccaaccatgcccatcactctgcccagtgccttccctggacatctattagcccaaagccaccaggacctcagctgagccggagtggttttcccacaccgaaggccagggttggggctcgccaaggcgactccaggagctccacgtcttcagaaactccagattcacaaggactcactgaagacctgccatgtgcccggcactgggtccctaggagcacccaccaccccccatagcccaccccaaaactcacacca

SEQ ID NO: 167270 - DNA, 387 bp, Homo sapiens
ggcaggcgctgggatgggggcttatggggtggcatcgtctctgggccctcctttccccctttgcctgttttcggatctgtggttcctttgaaagccagaacaatggatcggcttccttacccagcacccctccggtaggtgggtggccacgtggatgcctcgctggggcggtcttggaggcctggtctctgcctcgacgggagatccccgatcactggcattcaccccctgcaaaaatcggggcgacaatagctcactgcctacttgctgcagggagatgaaaggctttgcagaaagctttgagctctgtgggggaacacactagagaaccaaaaatgtgattatatggtgatataaaaatccctttcctctgtgtttaccaccacc

SEQ ID NO: 167271 - DNA, 238 bp, Homo sapiens
gcaggaaataggtatcagcagagaagtaaggtgtcatgggcccaggcatcctttccggaagggtcgactcaactggatgagcatggatgtccactgctggggagagcaaagagcttgatattttaatgctttggtttctctcagaagaatgaggcaggaagacttaaccgggctttgtaaattagttaacatactatttttttttctccagttttatactcttctctgctggatactt

SEQ ID NO: 167272 - DNA, 352 bp, Homo sapiens
tcaggatttctatttcttcctggttaaatcttgggagattttatgctttcaggaatttatccattccttcaaagttttctaggttgtgtctataaatatgctcatagtagtctctgataatcttttgtttttccatggtatctgttgtaatgtcactttattatttctgattgtgcttatttgaatcttctctctttattgatctctctttattgattactctagatagtggtttatcattttgtttatcttttcagaaattcaacttctcattccattgattcttcttctcattattttttttttagttgcaacctcatttagttttgctctggatctttgttatttcttc

SEQ ID NO: 167273 - DNA, 128 bp, Homo sapiens
agagggcgctgagggcttggcagctgtgcaagcccggctatgtgttcagggaaactttagttcagggagggcacttgggcaaagcaggggagggaggcagtggctggagcacaagaggctgaaagtgg

SEQ ID NO: 167274 - DNA, 621 bp, Homo sapiens
aaaaatcggaaaggtgatgtcaatctccagtgttttgttttaaagcataaatatacattcagtcactcatcttgtgaaattttcaaattgtcatctttgaatatgagttcacccactgctgttcagtatgactacatccacgatttgtccattatgacttctggttcggtttcttccgagtgagatgcttgggaaacagtctacacctcaactatttagattgctgtgattttccccaccagtctttttcagttggtttggcacaccttattaaggagcaccgtttttagtagatcaactcacagtattcaacttctagttttcagacaaacaaaactctgtctacacatacttcaaaagtttgcaacataaattatgactatgatgaatttaactggcataagtgggtttgggaacaaatggggctgttttaaataatgccttttttttctagtagctcgtagtttaatcagcattctcaaatttgagacatgagggagtatgagaagagtggtgttttgttttttagaaatctgtatgctgaatacacaaatatttatgaatatccaagaaatacgtcagtaaaactttccgaatcaaccagtttgattcagaaaatca

SEQ ID NO: 167275 - DNA, 380 bp, Homo sapiens
tgcctcattaagagctttgaaaaggcaaggaattttaagaaaaataaaaccgctaaatacagcaaatagtatgagagctgctatatacaaaatgacaaaattaacaaagttacatacccagcatctgtatagcaatttacagttgccaaaacattttcacatatatattcatgtatacatacatgtatgtgtatattcatgtatatgtgtatatatataattttatgtggtattcctagaacttctctacctaaagaggagcacacttcttccctcctggtgcaggaacactgagttatacgttcaagacctgagtcacattacaatttgttctgaattttaaaaatcaaaaagccaaacaaacactgacgagactaggt

SEQ ID NO: 167276 - DNA, 445 bp, Homo sapiens
tgctggagaagaaaaggaatgcttgcagtccctccagcaccctctgttggcaaagcctggcatcaagcgtcacccaggatttcagagcagggcagggcgaggtctgcatctgagaagcagcaccttcacacctcctccacgctgctcccagagccatctttccaaaatgtgaaattcattctggcatccccctaccagaggatcttcatggctgtcaaacagaaagtgtttcaactttttattttgcagtagttttagagtttcgcagcaaagttgtaaaaatgatacagcattctcaaataccactcctccaacttcctgagtgttaacatcttctgtaacattgtagcacagttaccaaaaccgggaaagtctttgggaggagctatgcaggctgtattcacactgcacgttttcccatgaatgcctttcttctgttccagga

SEQ ID NO: 167277 - DNA, 540 bp, Homo sapiens
cttctctgcaaatggaagaataggtatggctttctaaatactgttctatggcccgagggaacatgtaagtggggcaaaggaagaaaaatcttggttagggctgtaactgcctctgctaaggactctggccccctctaccagccagacatgtagaccactccagagggttctggctcatcactttacagaatggcacatcccaactgtcctttctgcagctgttgagaaaccaggatggcataatgggaattctcaagcaaaccattcaccaccaccaattgaaattttctccaatcaaagaatattcatgagaaatcctaggatttcactaacttactttcttcgatactgcttttttttaattttctttttaaaaaactcatgttccgccaggcacagtggctcacgcctgtaatcccagcattttgggaggctgaggcgggcggatcacctgaggtcaggagttcgagactagcctggccaacatggcaagaccctgtatgtaccaaaaaacatttttatttacctggacatggcacg

SEQ ID NO: 167278 - DNA, 299 bp, Homo sapiens
gaggtgatctagccgatcctttaggtggttgtgggtagatgaccagatgcctaaagaatggatgttgcatgggtgtgctgatggatgaatggatggtaggtgggtgggtgattgggtgggtggatggattgatgaatgaaaaagcagccacttattctcagaaaatatgcattctgaaacagtttagtgacatctgaggtcaatatttaggaaaggaattaaagtgttcttgaatattttaacttttaaaaattaaacacttcaaccgggcacggtggctcacgcctataatcccaaaa

SEQ ID NO: 167279 - DNA, 342 bp, Homo sapiens
tgactgggatgtggggagtgagtgaagaaaggcaacaaagctgattcttgggtttcaggcatgagcagctgtgtagatgactgtgtctacagaatctacctttcaaaaggttccggtattcctagaccatctcacaggagatgcccactttctcctctcagcacagccaccctgcctccaagtcattataacttcctctctagatcacttctttctccttagtttccctactacttgtctatgctgacttcaaatcaccccaggctgtattatctttttaaatacagctccagccatattattccccactcaaaaatctccaatgttccctatcacctacgt

SEQ ID NO: 167280 - DNA, 581 bp, Homo sapiens
gtgaaaaagaggaaagctcacgggactgggaggaggcagcatgcctgagctgcagatctatttttactcagcagtcaagccatgttagtgcctttttggatctcatctataaaaggtggcagctgatcaagggaccactaaggttctttccgcacctaaattctaaggctctattatcctcttccaaaaggaagcaaatgagcttggtagcacatgcaacacagaaaactggagaagcagtctttggggaaattcagggacttccctgtgattcgcctcggaaggagattcaatatgaaaaagacacaagggacaccaattcaagtttgtaccaagatcaggcccagggacttgctgtgcagacaggttatgttcactggggtgagtgctacagaaaagggaaattcatccacttgtttttctctttggtgagggaacgcatgattcagaacagcctaagctatcacatgcatatggttgtggtgctctcctcagggtaactaacaggcacgaagaaatttagatgtaagtggccttagtcaatcagaagggatgagctttcattttgaacgataactagg

SEQ ID NO: 167281 - DNA, 775 bp, Homo sapiens
gtaatcccagctgctcaggaagccgaggaaggagaattgcttgaacccaggaggcagaggttgtggtgagccaagatcgcgccactgtatgtactccagcctgggcgacagagcgagactccgtctcaaaaacaaaaacagcagcacgcttattttatcaaatgcaatattacaaggaatcttaatgtatttaaaaatgcaagtgtgctggcagaaaggggactgatgattctgtgactctgcagttgcagaagctccgtgtaggagattatttggacatagcgattaaccctcttaatcaggtgccacctccttcagggcacatgagatcatattaaattctttttgagatagggtctcactatgttgcccaggctggtctttaactcctgggctcaagcaatcttcccacttcagccccactttgggaggccgaggccggtggatcatgaggtcaggagtttgagaccagcctggccaatatggtgaaacccggtctctactaaaaatacaaaattagctgggcatggtggcacgcacctgtaatcccacctacttgggaggctgaggcagaagaatcccttgaacccaggaggcggaagttgcagtgagccaagatggcaccactgcaccccagcctgggcgccagagcaagactgtcttaaaaaaagaaaagagaaagaaaatctgtatgtttctagcccttctgtaaaatatgaagaaaagtgctcttagcactctgtgtaaaactgtactgttaaatatatgtaattta

SEQ ID NO: 167282 - DNA, 482 bp, Homo sapiens
gtaatcccagctgctcaggaagccgaggaaggagaattgcttgaacccaggaggcagaggttgtggtgagccaagatcgcgccactgtatgtactccagcctgggcgacagagcgagactccgtctcaaaaacaaaaacagcagcacgcttattttatcaaatgcaatattacaaggaatcttaatgtatttaaaaatgcaagtgtgctggcagaaaggggactgatgattctgtgactctgcagttgcagaagctccgtgtaggagattatttggacatagcgattaaccctcttaatcaggtgccacctccttcagggcacatgagatcatattaaattctttttgagatagggtctcactatgttgcccaggctggtctttaactcctgggctcaagcaatcttcccacttcagcccgccaaagtgctgggattacaggcatgagccaccacacccaacaagatggtattaaatctctt

SEQ ID NO: 167283 - DNA, 533 bp, Homo sapiens
tcttcaatatcatctagtaactcttaatatttaggaaactacaacccagagaggggaagtaacccagcaagttagggtcacagctggagttagagcctggtgtttggccttcaattgtgtcctattaaggatttgtgtctctggagcctgtgttactcatcttttgttatcacctatctctaccaaagatatttaaaggttcccgtgagaaggaaagatttcaagaggaaagaacgtagctcttttatttggaagcacttgttccagagtggccttcaggagacatcttcaccttctctaatgtgtttcccgcagagccctccatgaatctagtgattttttttccagattatagaaaactttaggaaatatagagaaaagtagaaaaaagaaaatgaatatcacttatcatccttccatctaatggaggatgggaatttttggtgggaggcgtgggaattttgcagagacctgcataacacacacttttttccctcaaattgttaatcatactgcatatacaggtttgtgtc

SEQ ID NO: 167284 - DNA, 470 bp, Homo sapiens
ctctctcaaactgcgtgttttaatgaaaactcatttaaaagcattgattgcatctgaccatctcatagtcttggtcaggtattttttgaagaattacacattgcttggcatttgaccaatgctaagtgggcctactgacatcaccagcaatctagaaattagaattatttgattccatagttatgtttgtaactaagagattgttattcttttatttcaaagctaccctaatgtcctgcatgtctccagtttatctgatggagctgaactaatctgagtatattatgaacacaagcaagtaagttattttaaaaaatgaacctacttgtactaaaaatttacaggtagaagggttgtctactaaccatattacctagaacagtgtggatctttagaaagttaaattaaatgatggtaaaaaatcacctcttaccaggtgcagcaaacacaaaatacagtaaacaaacaaa

SEQ ID NO: 167285 - DNA, 237 bp, Homo sapiens
gtatgttgaaatggcatgaggaaaagatactatcagaaatcaagctagtaaaaatgaggacactgaaagcagcaaagcacaaaagcatagtgcaaggtactttgaggtcctctctggcaggatgccctcttgttctgctaagaattgaatacttaaataatcattagttctttaaacccatttatatgtcagcatacatggtggatgcgttttcacatgtgactcattcccagggat

SEQ ID NO: 167286 - DNA, 393 bp, Homo sapiens
gaactaaaggaaaccaggagaattatgtctcaacaaatacagaatatcagtaacaagacagaaagtataaaaaggaaccaaagagaaattctagaattgataaatacaataactgaaatgaaaattgcactagggaggtttaagagcagatctgagtaggcagaagaaagaaacagtgaaactgaaaataggccaattgaaattatcaaactagaggagcagaaagaatgaagaaaaatgaatggaggccaaaagacctgtgaggtaacatcaagcactctcaacacataatgagagttccagaaggaaagaatagacagaaaaggaaagaattatttgaagaaataatggccaaaaacttcccaaatttgataagccaatttctcagcagaa

SEQ ID NO: 167287 - DNA, 323 bp, Homo sapiens
ctaaaccctcaggcagccactcatctgctatatgttactgtggattgtctgttctaaaatttcgtattagcaggctctcacagtatgtactcttttgtacagggcttcttccacttagcatgtttttgagattcatcgaagttatatgtatcaatagttttattcctgagttgtactccattgtttgaatacactaaaatgtacccactcatctgataataatatttttgttgcttctaattttgggcaattataaataaagctgctatgaatatttgtgtaacaagtccttgcatgagcaaatgttttcatttatcttaggt

SEQ ID NO: 167288 - DNA, 519 bp, Homo sapiens
taccatagctaaaatcaagacacggcttagatacaaccttacagctgctgccggcaagtggctgctgtgatgcggtgctcactgcacactcatgcttcacactggccacaccgctcagactatggtcatgccagctaagtaacgtgcactgttgctaagactatgttgagtttaaattactaattaaagtattcaaaaagattacactgtagttgcataatacaacaaaaagtaacgttctgcatagaaagatactgaaatagcgcagcacggtggagaggaaaagctaggatgagaaaaaggggatgctagggaataatataggaatagggaagagtagagaagaaaaaaagaagagtggaagaaaattttccagaggttatacctccaagtcttctgtgtgttaaaaacatataaacctcagaaatgtttgttttttcttactgatagcaaacctaaaaataattttttttcattacttctgtatggttcacttcagaatttctgtgcccatttcaa

SEQ ID NO: 167289 - DNA, 327 bp, Homo sapiens
gctacggcatcactaggcaacaggaattttcagctccactaatcttatgggaacaccatcttatacactgtccatggagtgaaacacaggtacgtggctgtaattggagtccctgaagggcaggggagggacaaaaacatggccaaaatgttccaaacttcatgaaaaccataaacccacagatgccaggagcccagtgaacttcaaaaaacatgatgaattgttgcttgtttttaagcaatcttatttaaaatgttgcccactgtcttctggcttgaattgcttctaaagaaatgtttctcattctgctatacattatacttttaa

SEQ ID NO: 167290 - DNA, 344 bp, Homo sapiens
actggtaagaaagtgactaataaggaaagaaggtagacgagtaaggaaggaaggtagactagagaggaaggaaagtagaccagtgaggaaggaaagtagactagtgaggaaggaaaactaacaaggagataatctccagaatgggaggagagtcaacatgaaagtatgaagaaggatccatggaagcagaagccctcagctctccctagagctgtcagggaggctcccagaggacacggcttttgcatgcaactagaagaattaactaggcatctaccaatgggcaaaggaggaaaggagactccaggaagaaaggcagtgatttgtatgatccattgcaatgg

SEQ ID NO: 167291 - DNA, 447 bp, Homo sapiens
gagcccaaacaaaatgcagactgtgctctttggcttgcacagtatttttctttaatttgggattcgttagcaacatttttaaatcaggagattttatataaaagtcagaacttctaacttgtctctaaagagggcaagttctggtgacactgggcacacatcctcacctgccaccatcagctgaggcacttagagtgccagcctcaaatgggctgtgtatcctgcagttaacaccatcagcatctctatgtacagtctcacagccaacctctttccttcatctggcttcctgcccagcccctgggtgcacctgagcatgtggtctgtgcagagtggacagtgggctctgatcttgaatctcacatcccctcttgttagaaccaaaggagatctactctttttgctgtttgagacagggtccgagatacagccgcgagaagtaccgac

SEQ ID NO: 167292 - DNA, 251 bp, Homo sapiens
agtagctgggactacaggcgcgtgccaccacgcccggctaattttttgtatttttagtagagacagggtttcaccgtgttaggcaggatggtcttgatctcctgacctcatgatccacctgcctcggcctcccaaagtgctgggattacaggtgtgagccaccatgcccggccacctttttgtttttaagcccttctgccagcctcagaaatagcatcccatttgcactggcatgtacaaagcattagagt

SEQ ID NO: 167293 - DNA, 542 bp, Homo sapiens
atgactgtgtcatttgttgcaaagctgcacgtcacgtgcttttcctgaagtctctactttgaatgacatttgctcattcattcagtcaaccaacacctatttattgggcctctccttagggccagaagccaggaagagagttagggacctgctgcagagcggttgagtctcatgcagctctcccagcatcccttcggagttagtttaattatccctgtcttacaggtgaagaaactgagatcatagacttgctcgaggattcagaatcaaagttcaaatccaaatgtgcctgcttcgcgtctccaaatctggtttctccatttcatcgcctgtcccttccggggttggggtctagtgactgtgtagccatttgtcatgggttttggccccaaattatcctcaggcgacgacccctggggtctgggttgagctggcataattgggagctctgtggttacacaaacctggtttcaccagggtcatggggcaggtgcagggggtctcacctcaatgggggagccatgcaggggctcctctctcct

SEQ ID NO: 167294 - DNA, 508 bp, Homo sapiens
agaccgtaccctaatacagggaatcccacgggatatctgagggatgtgtacttttggaggaggttgacggtttctaaggatgattctttctgagtgaaatattgtcagtgtcattgaccttttcattatttcaactattattattccaggttatcaatactctggctgaccatcatcatcgtgggactgactttggtggaagtccttggttacatgtcattattgcgtttccgacaagttataaagttgtcattaccctctggatagtttacctttgggtgtctctcctgaagactatctgctggtctcgaactcccaacctcaggtgatccacccgcctcggcctcccaaagtgctaggattataggcgtgagccactgcgcctggccagtagtttcttacagttatcattatgaactcataaattttcatatacttgtgtttaaatcactttttgtttattattttaatgctcaaattgtcctatcgttggccattaggaatgttt

SEQ ID NO: 167295 - DNA, 378 bp, Homo sapiens
ctggcatcacttcccaaataaactacttgaagtcagagcttcagaatctgcttctgggggacccaaacttaaataaagggcagatacggggttttggtaagtcataccatgcagaccttgtccagtgtctgcccatgggtgaaaattcagagcagcactgaaaaggtcattgcatgaagaaaatacccagacttaactgggaaaggagaggaatatagaaaagaaagttttactccctgctgcattatttaatcttttcttgtacctcatttactcttcactgaacaattttgcaagataaatctgtcaatttcctttcctgcaggtaaagaaactgaggccagaaagattaagtaacttgcccaagttcacagactt

SEQ ID NO: 167296 - DNA, 318 bp, Homo sapiens
attaacagttggctatgactatctagagtaagcactgcatttatttttccaagatgttgtcatgtgacataacttatggccagtaggatgtaagtgaatatttttggcagttctggaaacctctcttaaaacacagctggctgaatatattaatatttgagaaatctgggtgagggatatccagaaattctttacgattttccccagttctgtgtaagtctgagagctcataccattctgatgccagcagtggaagaattcatgattggtttggagcaaggccacaatatcaggcttacatccatattatatgacaga

SEQ ID NO: 167297 - DNA, 263 bp, Homo sapiens
tcctatcaatatatgggtttctagagtatatttcccatcagaaatattcaactagcttaaaataccagtacactgatgttgaacattttaagtattttatatttcccacagcaagggcttttaattatatggccaatcttactttgggatgaatttcatcctcaatttctgaacttcttggcatagcaaatgtgtgtgtattgtgtgtgtgtgtgtgtgtgtgtgtgtgtgtgtatacatatattcttttttcagtaacgtta

SEQ ID NO: 167298 - DNA, 437 bp, Homo sapiens
tctttccctaatgacttaggcatatactaaatgtgctatacatatactgaaatgccttcataattcaaaatatgcattatgaatctcaactattaaagtgtgtttaatgtacacataaattctcaaggactactgaaatatgtgaagttatttgatcctctaataagtatacgaaatctccatgttttgtagtgtatctgttttctgttttatcggtcaattcttaaccgtccattggtctgttttttataacctgcccttttttgaaaaagaaacaaaaaagccatgttggctcagtgaattctaattttatagattatattaagacagtagagactgagggagccttctttctttatagactaacgcaatgtaataaaagaatctggaagatcactaacttgctctgtgatccagacaaagttatttaatctaca

SEQ ID NO: 167299 - DNA, 289 bp, Homo sapiens
cagcatgctgtttccatgttttcaccattctttgataactggtcatacagatgggcatttcctgtcttcttttcttagcctctccaaatttagatcaggctcttggctttagcttaagacctgtctctcttagtttatggatgaggtagtgatgattctgtgtaaagccactaaaccagttctggcatgaagaaggctgcttgtgttcttcacaatagcgaaggcatggaatcaacctaggtgcccatcaacagcggattggataaagaaagtgtggtacatatacacc

SEQ ID NO: 167300 - DNA, 309 bp, Homo sapiens
gagagaaagcacacacagttcagggctaatgacagggcaccgcaggtaggaacatgactgagccctacagcttgcacatgtgtggttgggcaaaagacaattgcagatgttcctggaattcccaaaccggatacaaaatcgctagcaggatgcagagaaagaggaatgagccaagtgttttacataatgagaagcttgcctcccgcctggtctctctctctctctctctctctccctccctctctctccctctccctctccctctctctctctccctctctccctccctctcagtgccgtggcgggtcg

SEQ ID NO: 167301 - DNA, 382 bp, Homo sapiens
catgaccacactacccaatatctccaatttgaagaggcagagatgaaaaactttatagagcccagtatcaggaaaagtttctcttccctgaggaagtaattgctacagcttttttctaccttataaacaacaacacatcatgtgtaactcaagctgctcctattttattttccgttttaattgattcaggaaacttaggactctaatcatttgctccaacccaagagctcagcttctggtttatgtactgggactcaagtaagatttcattggaagaaaaggtcttattattaaaaggtttgtaaactactgttctattccctaatttttatagacttacattttcccattttgctgtttttattcctgtaaaccacttcaa

SEQ ID NO: 167302 - DNA, 123 bp, Homo sapiens
aatgacaatgacctttcataatacacacgtatgacagtttcagaagtataactgtgtatgagaaattatcttggattttttcaacattacagctaatcaaacacactgatattttatttgatt

SEQ ID NO: 167303 - DNA, 314 bp, Homo sapiens
gggcagaggactggagggaatgagacagcacacttccaatgactccacttgctgctagactcaagggctgaggtcaaggagactggggtaaggaagggagcagcgactaggtggagtttggatgattgcttgatttagttagtgccagggcgggatagctccaggctgacttggatcatcttccagcctgagaagcaggaagtgaaccccccaacccccacccctgccacaggaaggcagccagtacctgggacctgccaagttcacatggcagaagccacagcttcctttgggcccttcaccctggtcacagg

SEQ ID NO: 167304 - DNA, 245 bp, Homo sapiens
gtgccaccaacttcagatgcccattacaagtagtagattgccacctatacttctgaccaccaagctataaattgggactcccactgccccctccttgggttcaattaatttgcttgagtgggtcacagaactcagagaaatactacttacattttcccatttattataaaggatattacaaaataaacagccagaggaagagttgcatagggcaaggtacgtggaaaggggtatgaagttttcat

SEQ ID NO: 167305 - DNA, 202 bp, Homo sapiens
aagcaagcaacttcccccacggccttaagggcccaccggtcaacccggggtgagtggagacaatagggtttgtgtcgcaggggtcgttgacatcacgtaagaatgcgcaggggtgtccccatctagggtcctcatcccccaccagaaaggccctccgaggctacggtggttgggatggcgtacctgagcgagtgtcgcctgc

SEQ ID NO: 167306 - DNA, 344 bp, Homo sapiens
tctaggtgcacgagccgtgcggtttgttacatccgcaggctggctgccattgcgtagatttatcatgcctggaaaacggaccatttaaaacgttttcttacaccatcgaagcacatctgggctgattccagtttctggtgcttatgaataaaacagctgtgaacaactgagtggagtttattggaccatttttgacctctagtaatggtgggctcacatgtttgagttgagttgggtcaggtgctgagtgcctgctgctgcaggcaccaccttgtgctttcaggttaactctaaccacacatctcatgccttctctgtgcatgtatttgaagttactgaaaaag

SEQ ID NO: 167307 - DNA, 419 bp, Homo sapiens
aaaagcccaatataaagggctaaaaaagacaacttctggcacacaaaaacacacaaagtattactaccaaagtatagcttttctgatattacacaacaaagttaacaaaacaaaaatgaattaagatctcaaacggctgcgcgtgatgcttaagcctgtaatccctgcactttgggagatgaggccgggctagaccatgaggtccggagctcaagaacagcctggccaacatggtgaaaccaactctctgactaaaaatacaaataaggaattaacgggcgttttggtccgagctataatcccagctactcgggaggctgaggcaggagaatcacttgaacctgggaggcagaagttgcagtaagccgagatcacgccactgcactccagcctgggcgacagagcaagactccatctca

SEQ ID NO: 167308 - DNA, 502 bp, Homo sapiens
taaaggaagactacaaagacatcaagtaccaggtaggagtagagaagggagatacttctagcaggaagaacagcgtgggcacatttacacatcatcgtgtagtaatctttgcccattcctctctgagagaagtgcacttatagagtgaccaactgttctggtttgtccaggccatgggactttcaggaccaaaaccaggagagtcccaggcaaactgcaatgagctagtcacttcatcaagtatcactttcaaattttaagtctcccaggtacaagttatgttggcactgatactacatagtttaaaggatgagcttgggagagttgggtttgagtcctggttccagcactcaccaggttaaccttggacaagctgatcaaagcctccattctatcatctgtaaatggtagtaatatctgccccactggattctttgggagagtaagcgatgggaaaaaacactcaggacaatcctcattagtacagtgatgagtaaaaaaa

SEQ ID NO: 167309 - DNA, 521 bp, Homo sapiens
acctcccactgcacggctcctcaggcctcctgtgacctccccgagacatcaaggccggatgccatcttcccctacagttgagaacaacctgacaagtccctgaagcatctcagtaactgtgcgtgtttggggttgttctttttaagtgtagctactgctcagggaatgcttaggcacaaacctgaggggtcttgggctaagaaaatatgtttccccaaaaaaaccagcaaatggagaggagacaccaaaaccataaccaggagaccgattcggggctttaacgaggactcgctgaaaaagcgagggagcaaaacaaaacataacaacagagccgaggctgttaatacccttctctgatccccaggaaactaaacacgaggacttcagggagggttttttggtttggacttgtttttttcaccttcactcggtatcattttgagtttaggaaataccatttccccttttcgtgcaaaggcaaatgtcttaagtatcatctaatttagttctttccctagttt

SEQ ID NO: 167310 - DNA, 517 bp, Homo sapiens
ttatcacttccccaatcaatactcttataatttcctatgcctgtctttactttaatctcttaatcccatcatctttgtaagctgaggatgtatgtcgcctcaggaccctgtgatgattgcattaactgcacaaattgtttgtaaaacacatatgtttgaataatatgaaatctgggcatcctaaaaaagaacaggataacagtgattttcagggaacaagggagataaccataaggtctgactgcctgtgaggccaggcagaacagagtcatatttctcttcctgcagaaagccaataggagaaatatcactgaattcttttcccagcaaggaataaccctgggaaaggaatgcattcccagggggaggtctctaaaatagccgctctgggagtgtctgtcttatgcagttgaagataagggatgaaatacaccctggtctcctgcagtgccctcaggcttgctaggattaggaaattccagcctggtgaattctagtcagactggttgtctgctct

SEQ ID NO: 167311 - DNA, 569 bp, Homo sapiens
gaattcacaggtgaggatcaagcccatctgcccagaagagccccaaacatgaagatggcaagtgcatgtgtcagtgtcccaacacaaagccctgagaggttcctcaattcccctgctcacagtctagaaagtactaatgcagtgagtcagtgtcccaacacaaagccctgagaggttcctcgattcccctgctcacagtctagaaagtactaatgcagtgagtcagtgtcccaacacaaagccctgagaggttcctcgattcctctgctcacagtctagaaagtactaatgcagtgtgtcagcgtcccaacacaaagccctgagaggttcctcgattcccctgctcacagtctacaaagtactaatgcagtgtgtcagcgtcccaacacaaagccctgagaggttcctcgattcccctgctcacagtctagaaagtactaatgcagtgtgtcagcgtcccaacacaaagccctgagaggttcctcgattcccctgctcacagtctagaaagtactaatgcagtgagtcagtgtcccaacacaaagccctgagaggttcctcgattcccc

SEQ ID NO: 167312 - DNA, 192 bp, Homo sapiens
cacgcacctccgacggaacgacgcaaccatcctgcgaaacacaagaaccaaacctggatccgatagggcctcagggtccgctatctttttaaaatgctctttcacagaaagagccaaggacagaacaccttgtccttgtccacatcccagggacataaagacacgaggaaacaccaggagtgccatctccac

SEQ ID NO: 167313 - DNA, 846 bp, Homo sapiens
gactaacggtggacttctcagtgggaactttataagccagtaaaagattgggattctattttcaatgtgcttaaaggaaaaaaaaattgtcaaccacagattttgtattctgctaaaataagtttcataaataaaggagaaataaggtacttcccaaacactgatggaatttatcaccactagacgaaccctataaaaatattcaaaggagttctaaacatggaacaaaatggtcaatgtttgccatcataaaaaatacacaaaactataaaactcacaggtcttataaaaacagttagttacacaaaggaggaagagaaagaaatcaaattacaacaggacagaactccaccaaacaacaaagacaaacagaaagagggaaaaaaagatgcaaataatgtacaaagcaatttgataacaattaacattatgatagaaacaaacctcacatataactatgaacattgtacataagtagataaaatgcttaatttaaaaggtatagattggcagatgggttttttaaaatatgaaccatattttcataagaactataagaaactccccatattggtaaagattcttatagcctgaaggtaaaggactagaaacagatctcctgcacaaacagaaactaaaagtgagcaggagtatctacgcttatatcagataaaacagacttttaatcacaaaagtaaaaaaaagacaaagtcagtcattatataatgtaaagggatcaattctacaaaggacataaaaatcctgaatatatacacaccaaacactggagcagtcagagtcacaaaacaaatattactggacataaagagatagacagcaatataa

SEQ ID NO: 167314 - DNA, 272 bp, Homo sapiens
atggagagcatgaggcccaggaacagaatgcagaatacagtctatcctggattgccaagagtgttcctggtcatgcctcctctggtccgtttctgaaacctgcatgtggagcttgctggctgtgggagccaggtagactgtaaatcctgctcgcctgcccacggggctgtcaggaagctggccctccactgcctcctccagaaggccggcagctagcccttgcctctgcatgtttacctttcctgggaggcaaccgggccggacataggagg

SEQ ID NO: 167315 - DNA, 277 bp, Homo sapiens
catgcctctagtcccagctactcgggaggatgaggtaggagaatctaaagccaagaagttggaggctgcagtgtgccaggattatgctactgctctccatcctgggcaaaaaagcgagaccctgtctcacaaaaagaaaaacaaaatgcctttggcagcactgtggaggatagtatgaagaggacagagactggaagtaggaaaaataattgacaagctgtgcgttaaggcacaattgagaagctgtgtattaaggtgcaattaaggagaaaaattt

SEQ ID NO: 167316 - DNA, 180 bp, Homo sapiens
gctcccaggcactgccctctcggatttcttgccttgttatttaatcattaagatcgtgacctatgagcaggactgtttccagccagcacatacacatgtcctctcctggccagcatccatgctgattagacggtgcccctgccatactagctgcctaatatttcagataccccaccccgt

SEQ ID NO: 167317 - DNA, 226 bp, Homo sapiens
tggggatggtggcgcactccaggacagttatgacccaagagaagaagggattagtaaggaagttaaaaaggtacactgagataggttttaaaggatcttagacttacacaccataatagtatgaacattatcctgtagggtgtgaggagctaccaaagatttttatgcaaggaagcgaaacaataaagaaaaataattggcaatagtgcaggggctaaactggcag

SEQ ID NO: 167318 - DNA, 721 bp, Homo sapiens
ggcaaatggagtgttcaggttaagtgtgcctgcccttcttcccttctttctagaataactctgtttgggattgagatgcactaattatttggaaattagtttgctaatttcattggttatttcagtaagttgaggggagaattggaagtttagtttgtttgcttttcaatcccatctgctcgttgattactaatcattcctggacgtgcagtcacgtaatttattctgtctttgagtcttctccagagagattagtcatttgaagtggtttagaggatacctcatgtctgaattccacagggttagcagaatgtgtgagtgggttatttgttcttctctgggctgctcagtgttattttgggctagttgagaatgttgctttgtattacagaccccatcaggacaatgcaatttctgtttttatcaataaaacttctgaaaactcctcctaaaaagcattcacatatgagttattaaaaatgtttgaacattttgattctttaattcctctcaaaataagtatctcttaagatatatggggaagaaacctgccactgtgttaatcacatacttaattgtaccaaaaattaaagcaatgcagtaagttaaagtatatacacatggtagaatattatacccattaaaatgagcaggataaggaccataaagggtctcataattaaaaaattgacataaatgtttgtcgcataactttagataa

SEQ ID NO: 167319 - DNA, 614 bp, Homo sapiens
taataatcctcatagtaaaatgagtaaattcataaatcatataccagatggcccagggaagcagcccatgaatgtgttaggtggcacttataaaaaggctttttgggaaaggataatcttttatagttatgcaaggaaatgatgtgattcactagattatatgtgtttggggatgagaaagattagaaaattaaggcagttttttaaaaagttggcatgagatacagcaaaacaactggatggaaggcattaaaggcagagactggggggttttatttctattctggagaatgaaccagactccaggcctgtgtgcgcccccactgtaccccttgcttcctttccaaatagccaataaaaggctgcaatgaagtgtgtctgacaagcagtcccaatggcaaaagaatatcaagactgtttcaattatgtagaagaaatgtggaaaggctgcaaacagacactgacagtaaggtattaaggtgttataatagctttatgaaatattataggagaattcagagtttgataataggtatttgacagctttctacctcttagatagctttctgttctctgtagactcaagataacgttaataaataagtttaagactg

SEQ ID NO: 167320 - DNA, 292 bp, Homo sapiens
caacgcgagcagctcagacatccccacagaggctctgggagcttaaaaagcccacgtcaccctagaaaagaggctattaaggtgtggcgtgatttgcactttcaggcagaagctttttaagctgctgcagagcccaatcacagggagatgaagacttcagtttctcaagatatgcaactcttctgctgatgaaggagaatgttcccgggtgcaggtggagtgagaacgggttcctggcacacattcagcaacctggtgaggagagctcggaccatgtcgccgtcacctcttg

SEQ ID NO: 167321 - DNA, 121 bp, Homo sapiens
aaaaggaaagaaaaaagaaaaacagaaaaagaaaaaaaagtagtaaaataatagtattaaatgtttatttaactcttcttttgtgccaagcactgttctaagcactttacaaatgtaactc

SEQ ID NO: 167322 - DNA, 248 bp, Homo sapiens
atatgaagagtgcttatatttatcactgacattttgttgaacttgttcattcttattaatcactgctttaaagtaagcagctgagtactcttaggaagttgatattcccagctgacctatctgcaaaaatagtgaagcttgatactctcttgctgcagtctgtctctatagatgtatgtgttcgtgtggctatgtgtacatatgtgtgtatttttttttctgggattaaagaagcaaatacattttcg

SEQ ID NO: 167323 - DNA, 195 bp, Homo sapiens
accaagaaaagaagagagaagatcaaaataaacacaatcagaaatgaaaaaggagacattacaactgatcatggaaatataagatcatcagagactattattattaacaactatatgctcacaaactagaaaagctggaagaaatggataaactcctggggacacaacctcctgagattgaagaaatagaagccc

SEQ ID NO: 167324 - DNA, 587 bp, Homo sapiens
gtgatttataatcctcatttatttgatgagacagattgaattacagataggtaaataacttggctgcaattgaaaaaattggaggagctgggatcagtctcatatgcctctaactagaagttctggccatgatagctttattatatcacctccaaatgacctcctagtcactaagtcttcatcactatcagaacatgagataatattttgtattttcttttctaataactcactaccccatctttctcgttacagttcactttccccaaccctccaatgccagaatccatcctctctgtgtgaactggaacgaggtgcactcagtcacgtaggatggtgactaatcaactcattacactttagagtaaatgattttcaataaattgcctcatccaaacatttctatcttaaaccattcatctctgctgctcaaagtttaatctgtttctaaaggaacttagacatctgcaagtagttgaggaaaacatttctgaaaataagaataatgtgattcatccaacacattttattataaagtttactgtgacggaatgaaatttgcccccttgaaaattcatatgctgagg

SEQ ID NO: 167325 - DNA, 609 bp, Homo sapiens
tgaggtcaggagttcaagaccagcctggccaacaagtgaaacaccatctctactaaaaatacaaaaattagttgggtgtggtggcacacgcctgtagtcccagagtagctgggactacaggcgcacgccaccacgcccagctaaattttgtatttttagtagagatggggtttcaccatgttggccaggatgttctagatctcttgatcttgtgatccgcctgcctcagcctcccaaagtgctgggattacaggcatgagccaccgcgcctggccaatttttaaaatttaatcatgaggtaaggagctttcctttgtgatgatcctaatttgttacctttaacacttcaaatggtaaattgggatttaacaagtctttgcagttaatctagagatctgtggagtcagctcctccagaattaccctagctcattttttatgataacctaagctctccagcaccttcccaggaggttcttctgttctccagagagctccctccagtcaccaccactggactcatcagaaccataggaagactataacttaggtctaaacaagacagtcactaccaaccacagtcttacacaggattgtagtatagaatgtg

SEQ ID NO: 167326 - DNA, 559 bp, Homo sapiens
  misc_feature (418)..(418): n is a, c, g, or t
  misc_feature (461)..(461): n is a, c, g, or t
  misc_feature (519)..(519): n is a, c, g, or t
tgaagctcagtgcctgctcgcaatcctggctgtgcctacagtgttttactcaacaagttctggataatctctcctgagcttgtcaatgataccagaggtggaatggatggtggtacagagcaaggctatggaatctgaaggtggtggtcatcaccctcacttgttgtatggagtcttgctctgttgcccaggctggagcacaatctcagttcactgaaacctccgcctcctggattcaagcaattctcctgcctcagcctcctgagtagctgggattgcagctacaatgccaccaggtgatcggaatttttcagctccattaaaatcttatgagaccatcactgaatatgtggtccgtcattgaccaaaacatcatgatgcagctcatgactatagttctgtctcagaagatccaggnaatagtaggttcctccgaggccggtagcccattcagtatcttngccaatggatgtcttatagactaagattcagctctcttcagactaagatcacagcttnggtgtgatttgatcctgcttcaagctggcaaagctcagaa

SEQ ID NO: 167327 - DNA, 362 bp, Homo sapiens
tgcagcctcccacgtgattcagatggtcgctaaagtgggaagaccaggctcctgaaagagcggatggcatctgcgcagttgaagcatcgtttgtccattcactcattcagcaaatgtcactgagtctcttgaggtgccagcgctgtctctggtgctgaaccagggccccgcgctcacggcattcaccttccagtggaggagacagcttgtatctgagggagtcccccagcagtcagaagggacacgacgggttaactgaagagggcttaataaagggcaggggtcgggaccgaggctgtttatgccaagatggcaaaacccaagaggtctgtgggtggcgacgtctgagactctagcggccg

SEQ ID NO: 167328 - DNA, 122 bp, Homo sapiens
gggaagcccttgcccagcctatcagcaataaaatcaagccattcggttacctcctaaagtgagaaagttgttatttctcccagttaactagttttatatcctagttgttagcaagaatcgtg

SEQ ID NO: 167329 - DNA, 538 bp, Homo sapiens
tctgcttctaatgggaaagggcaccactctcctcagccacattattggggccccacagcaagactgcttgggtctcaaggaaatcgagcttaatgaatgagagcaaaccctcttcatttggccatgtcagcttgtcaggaagggtccatcaatcagccaccatgtcttacctgcctttaggtcctattgctgagtttgacttctaaggatacatttggtaaattcctttttttcttgatgaattacctcttattggtccctaattccttctttaacttttttcttttccattttaaaagcaatataggttcataaaagtaaattcaaagcagtagagaaaaatgtaagataggaagtactagcctgggcaacgtggcgaaaccctgtctctacaaaaaatacaaaaattagccgggcgtggtcctagctactcgggagactgaagtggaaggcttgcttgagcccaggaggtcaaggctgcagtgagccgtgatggcgccactgcacttcagccttggagacaggggagaccctatgt

SEQ ID NO: 167330 - DNA, 574 bp, Homo sapiens
gggagaaaataaatatcgagtcttcactgttaagtatgatgttagctgtaggattttttccagtcataaataggtatcacattttgttaaaagctttttatacatcttttgagatgatcatatgggcgttcttttttagtctattgtatgatcaattacactgaagaatttatatagaattagtattatttcttccctaaatgtttagtagaatttatcagtgaagccatctgtacctgaaattttatttgtggaaagatttaactagaaatacaatttatttaatagatatagggctattccagttatctatttcttcttgagtgagtgttggtagtttggtagctggtgtctttcaaataatttctccaatttgtctaaattttcacacttactggcatgaagttgtttataatattctcttattatctttttgatgtgtgtgaaagctgtagtgatgttccatctttcatgtcttgtattggtgatcttgtcttttctcttgattagtctggcatttttttaattttattcatcttttttagaaaagagcttttggttttattggatttct

SEQ ID NO: 167331 - DNA, 266 bp, Homo sapiens
cactgcattccagtttgggcaacagagtgagagcctatctcaaaatcaaaaacaaaataaccagtctaaaatccttcagagacaattaacatgccagtcatacccaaaatgttagctgggggaaatcctactcataataaagttttgagaggtagtttggaaaactagtttagaaagaaatcacataaccactaatgtgtccaaaagatctgtcatttggaggagttacacagactacaaagaagggaacaggtgttacagtaggg

SEQ ID NO: 167332 - DNA, 332 bp, Homo sapiens
cttatctagtcttacctactactacctactacttactatactgcagaaacaacacttaacctctcaaagtcagtgtgctcactgctaaaacaaagatagtaacagccaccttgcagagctattataaagaaaatagaatgtaaaaaatcagctataagcctaaagaggtgtacctagtacaagatactgcttctctacttccaccataaaatctagcttataattaagggcctccaaaacaatgaagagaacaacctctatcagtgtaatacaccccagtgtctaataaacctatgagaaagatgtgtcttcatttaattcctttctagcac

SEQ ID NO: 167333 - DNA, 121 bp, Homo sapiens
gggagacagatacctctttcagcaagacacaggaaagtgaaaggatgtcttatctttgatgtaggcaaaatatccagttatgaaagtctgagcgccttattgcatctcttgaatacctgag

SEQ ID NO: 167334 - DNA, 491 bp, Homo sapiens
caattgtaggttgtatgtgattatagatatatgaacatatgatatactctgaaaataattttcatgtcattttccattggcactgataatttaaataaaaggtattcttgacaaagagtaaaatgcaaaaaaaaataaaagtataaatcaataaaacatgttagaattattttaccattgaaaaatccaaattaactttggatttgtaaaaacccttccattattttcccataacactaatttttataatgaataaaccccaatagaaatgtattttatggagagaaaagttgtaaatagatatcatatcatatgtaatagtttgatacttatattagactttctgttggatcattttgtgctgaaacttacaatatgccatttactactcacaactgtgctgtgtttattttctcttttccctgaagatggctaaattgtggttgatctgtgttgcactaaatctcttttaaataaatctcacatttgac

SEQ ID NO: 167335 - DNA, 450 bp, Homo sapiens
gttgtgtatctaatttcgtttgcaaaaattactagataggtatagaaaattacaccaaactaaattcagttatatagaaatacttcataatgcatacatattcatctcatgacaatgagccatgccaagccacatctggtgtaaacatatttagtagatttttatcttaagtaattgtccttctcccacttcacaataactagctgtactcttttcaacagccaccctgttgacctttagcctcctctcaggcttttttgcactttcccttttcttctttgatatttttcttcctttacctctcttttctcttactcttttcctctctctctttctctgtctctctctctcattttgtttggttttctctttcttttacctcaggagccaggtgggcagatcagaaggaataaaacactcacttttgcaagaaaacttcacctctttttt

SEQ ID NO: 167336 - DNA, 98 bp, Homo sapiens
ggacagtccaagaatttggagagcatgatactctgccacaggacactttaaaaatcttctgttaaaaaagtaaagttctgttgtgtttaaagtctgtt

SEQ ID NO: 167337 - DNA, 704 bp, Homo sapiens
catgctcttctagaactttctcatccctcagtcaagaggtggagcctatttacccttgaccttgaaattgatcaggactttgtcactgccttgctcttaacatcaccatgctggagaaatagcatggcaaggccagctggtgatagagaaagatgcctaaggagctccagctgctattttccctggatttttgagtcttcccagtccagccagacatatgactgggcaaaaccctcaggtaactacagccttatccactgtctgactatcacaaaatgagagaccttgggtgaggaccacctacctgagcccagtcatcctgcagagatgcgagaaaaataagaatgtcattattgttattttaaaatcactgagtttgggttaatttgtatgcagcaatagataactgggacacaaagatagactgtaaaaaaataaagagggaatggttaagctaaaaacattgtgatcaaatcaatgtttagtaagtaagcaagaaagatggctatccagggaagagagattgcacaacaaaatgaaaatgaaacaagcaaagaaacaaagcatggattataacttgtaagagagaaaaccatattaaggggagttatttgaatattttgtatgaaaatacagaaatcagatataagtgagctgacactgactttggaggcaggaggaaaactgatggggaattctgggaa

SEQ ID NO: 167338 - DNA, 379 bp, Homo sapiens
gtggggtgaggttctgaaatcaaagactgatgtaaaagtggcaaatggtcaaaatacagccccttaaattgtccatgcaataaattatgatgtccgcccagaattggaacagctcattattttacggctaagcaccagataaaatagtaggggacttgcaggctaggtcattcttgcattgctataaagaaatacctgagactgggtaatttatttaaaaaaaaaaaggtttaattggcttacgtttctgcaggctgcacaggtatgacaccaacatctactgagcttctgcgggaagcctcaggaagcttacaagcatggcagaagttgaaaggagaagccaggctggacacggtggctcatgcctgtaatcccagca

SEQ ID NO: 167339 - DNA, 555 bp, Homo sapiens
gtttgagatgagccaatcctgactccatggtgccaccagggatcacgaatttaataagatcttcgtggatgcttggaacccaactgatctctgttttctactttagggaaagagccacagcttaaatggggtggttttggtgtcacataagctatcaataatacccacgttttggtgtcacatacgcgattaataatacccaccgctgcagaggaatcaccgtggactactgctcgtttcatcccatgctcttgcgatggatccctctcacctgtttactgatttcattcaaattcttcagcgaccacaggaccccgacttgccttctctatcctggttcccatcacgctgctttacaggcctggcctgctcgcggctcctcacaccagcactgtgcgtctccctccacgcctctgccctgtttcctccatcagacaggactagcttcctcctagcacggttcggaattctggcttgcggacacacgtgacaaaaccagcgagtcacattattccagatccggcggcaggtgggcctagacgtatcggaaggcgc

SEQ ID NO: 167340 - DNA, 666 bp, Homo sapiens
cagccccaggacaccccctgattcttcactggcgttggttccctctgaagcccatagcagcttggctttggatttgttcttccaccccacctcctcaggataacacaagaaactaccgggaggtgttatcatgatcttgtcagtccagtagtctattttcagcagaaatgccaagatgatcattgctataaattatgtatttagggatgtgttccccaacatatgccaatttttcatcacggctcagtattatgctttcatccaaaattttcttgtgacctttacaaaggcttcctatctattcctattctggaccatcttaccactcacctgtcatgtgaacttcccaaatagccttctgatcagaaactaaattagctaaatactgctatgcaaatgaaacccaactggtaaaaggtatctacatagtttaacatttttaagagttaaaaaatgtcttacaaagaggacatgtcagtatgaatagaattgcccactttctgaacaaagtgaggaaggagtacaatggtaagttgtttgggggggaaattgagatttttaggtctgagcaggtatgccatcggaaacggaaccagagtcactgtgatccaatgacctaaatggacatataactgcctagagtaaaatcatctaaatgtctaacag

SEQ ID NO: 167341 - DNA, 831 bp, Homo sapiens
caagtaatttatatttctatctgttgtgtatataatcgtctctttagagttccagacagctgctagtgtccaaatatgtttttctaaagaaatattttgtttgtgagtaccaacagtcttagtaactctcttatccctcttatgtgctgagtacagtcggaggaagaggaattggagttggtgagtgtgggtttctgcttgaaggaagttgaaaaagatgtagaaagtactaattctcttacgtgttgttatctaaccaatgttccctttgttacacaaatttttttaaacactattcaaacactttgaataaagcaatctactggtactacagactctagtttttctatttataattgtatgtgttgacccattttatttgttggagggaacattggaatagagccctttaaaaacagtagctgtccatgagcataggatacttgttaatttttttttaaggaaagatacaaaataccttatatagctctccaaattattgaaatatttttagaaaatgacttcaccctcgaagttcctcagattgtaacacacgatgttgtgttgtttctctttcaaaaagattacatcatttttggtgaggtcacctttttcagcgttggaattatttcatcctgcatgatacagcctgaaccacaagggggttccctgtttactaaaaggaatgtctgtaattgaatgtgtatataagtttacttttctatcagaaggcgctcttttcttaaaagcaactattgccctttttccaaaacaaacgttttctgttggcttttcctctagaaaataaacttgactaaaagcaacttgcag

SEQ ID NO: 167342 - DNA, 501 bp, Homo sapiens
gggagggaaggtgggccctgtggagtcactgtgatagcgaggctggcaggccacttaacaaggagctggagtgtgaggccaaagctgcagagagaaagcagcctagaaaacacctctcagggaccagctaacaggatgggatcagatgacacttccagcaaaagaagtgtgggcccaaaaataagaaaaagaaaaagtcctttgaggacatgtactatataagctaatggcttttgaacagctttctcaactctggctgacattttaaatacttgatcaaaagaccccacgccagactccaacactcctgggaatctctccaggcatctctttcagtcttctgataggagtcctcaaactctggtgcccatcaaactgaagatttagcttttctgtgcttccccttcagatattccactctgatggactgtctgctcagcgctccctgtcccctcagagaccaactgggctcatatctccaaagtcaacacatcaatcctc

SEQ ID NO: 167343 - DNA, 451 bp, Homo sapiens
aaatgagggatcattaacccactgaaaccattggtatatacaggaggcattgtggaagtgttaaaagaagaaaagaggaatggacatctgtgcccttgaacttgtattcacataagaaatgagacaaacctacaaacaaaagataaaggaagacatgggaaaaatgtgtaggacaagtataaattaataattaggtacacaaagatcaaaaggaagttgaaataaatggataaagtttttacagacataagatttttttatagtgatgaagctaataggtgttgaaaaaaggcatttaccagtaaagacctataattccagttaaggcttcctgttcctatggccatcccaaagactaattatattcactaaattaagattaagggctaagcaaaaaagaaatttcaaagttccagttgagattctcaaattaagggtccaacacctggga

SEQ ID NO: 167344 - DNA, 427 bp, Homo sapiens
tgattttctatatcagcactatatttttgtatatcatcctatcgataatgttaaaggctttggaatggtttgttaatccaaatttattctctggcaaggtgaattttttggattgttaaagaagtgagatagttgaaggcatagctactagtgtaacgcatatgcccaatgttgggatttagtccttacagggaaggaaatgaaagcaagagaaactgatagtaagcttttttccaatgtgattgcttttgaaggacctcgtagtcttgaagtgccttaaataaactttgctaaaacgtttgaaacaaaacaaagattagaaaggtcagcaacatttgggcagctcagagtttcttgttttattctttaaaaatctgtatttcgttgtttggctaactattcactttattgcttttatatcactaga

SEQ ID NO: 167345 - DNA, 461 bp, Homo sapiens
tctgaggctagttttctttattgagtactttgtttataggataaggaaaggcaacactttaaggatgggagaaaatccagctcaaaggctgcagttcactccttggtttaatttcatctgtgtttatttgtctgcatattgcctttgagaccaatttcctttccactgtaaatttcccttagacctgcactgtccagtaaggtggcctcatgtaactaatttcactaaaatgaagtatgtttaaaaattccattgctatattgcattagccatattttaagtactcagtagtcatgtaggtaatgtatgatacaccatagatactgaacattttcattatcatagaaagttgggctgggcgtggtggttcatgcctataatcccagagctttggcaggctgaggcaggaggatctcttgaagccaggagtttgagactggcctgggcaatatagtgagact

SEQ ID NO: 167346 - DNA, 280 bp, Homo sapiens
tgcaagatgtgctttgttaaacagatgcttgaaggcagcatgctcgttaagagtcatcaccactccctaatctcaagtacccagggacacaaacactgcagagggccgcagggtcctctgcctaggaaaaccagagacctttgttcacttatctgctgaccttcgctgccaccttctcactgtatcctcacatagtcatctctgtgtccaatttccccctcttatgagaacaccagtcatattggatgaggatccactctaaatacctcattttaacttt

SEQ ID NO: 167347 - DNA, 2209 bp, Homo sapiens
acagagctcaggacagggctgaggaaccatgtctccatccccgaccgccctcttctgtcttgggctgtgtctggggcgtgtgccagcgcagagtggaccgctccccaagccctccctccaggctctgcccagctccctggtgcccctggagaagccagtgaccctccggtgccagggacctccgggcgtggacctgtaccgcctggagaagctgagttccagcaggtaccaggatcaggcagtcctcttcatcccggccatgaagagaagtctggctggacgctaccgctgctcctaccagaacggaagcctctggtccctgcccagcgaccagctggagctcgttgccacgggagtttttgccaaaccctcgctctcagcccagcccggcccggcggtgtcgtcaggaggggacgtaaccctacagtgtcagactcggtatggctttgaccaatttgctctgtacaaggaaggggaccctgcgccctacaagaatcccgagagatggtaccgggctagtttccccatcatcacggtgaccgccgcccacagcggaacctaccgatgctacagcttctccagcagggacccatacctgtggtcggcccccagcgaccccctggagcttgtggtcacagaattctcagaagccaccgctgaactgaccgtctcattcacaaacaaagtcttcacaactgagacttctaggagtatcaccaccagtccaaaggagtcagactctccagctggtcctgcccgccagtactacaccaagggcaacctggtccggatatgcctcggggctgtgatcctaataatcctggcggggtttctggcagaggactggcacagccggaggaagcgcctgcggcacaggggcagggctgtgcagaggccgcttccgcccctgccgcccctcccgcagacccggaaatcacacgggggtcaggatggaggccgacaggatgttcacagccgcgggttatgttcatgaccgctgaaccccaggcacggtcgtatccaagggagggatcatggcatgggaggcgactcaaagactggcgtgtgtggagcgtggaagcaggagggcagaggctacagctgtggaaacgaggccatgctgcctcctcctggtgttccatcagggagccgttcggccagtgtctgtctgtctgtctgcctctctgtctgagggcaccctccatttgggatggaaggaatctgtggagaccccatcctcctccctgcacactgtggatgacatggtaccctggctggaccacatactggcctctttcttcaacctctctaatatgggctccagacggatctctaaggttcccagctctcagggttgactctgttccatcctctgtgcaaaatcctcctgtgcttccctttggccctctgtgctcttgtctggttttccccagaaactctcaccctcactccatctcccactgcggtctaacaaatctcctttcgtctctcagaacgggtcttgcaggcagtttgggtatgtcattcattttccttagtgtaaaactagcacgttgcccgcttcccttcacattagaaaacaagatcagcctgtgcaacatggtgaaacctcatctctaccaacaaaacaaaaaaacacaaaaattagccaggtgtggtggtgcatccctatactcccagcaactcggggggctgaggtgggagaatggcttgagcctgggaggcagaggttgcagtgagctgagatcacaccactgcactctagctcgggtgacgaagcctgaccttgtctcaaaaaatacagggatgaatatgtcaattaccctgatttgatcatagcacgttgtatacatgtactgcaatattgctgtccaccccataaatatgtacaattatgtatacatttttaaaatcataaaaataagataatgcaccgtctccacccctctcatatttactttctgaaggaaatgttaggtcttctcaaggtaaagttctatatttattatagcgtttaggcatttcttgaccatctaatgagtgtaaaactgtaccactgggccaagtgcagtggatcatgtctgtaatcctagcactgtgggaggccaaggcaggaggatcgcttgagcccaggagttcaagaccagcctgggcaacatagtgagaccccatctctacttaaaataaagaagtaaaaattgttttaaaa

SEQ ID NO: 167348 - DNA, 476 bp, Homo sapiens
ctcgaggatccactctggcatgcatgtgtcagagaaaggggtttcagggagcctagatatctcaaaaggggaatggagatatctagaggatatagggaaccacggggaagacctaacattgttttgctttcttagaattctcagaagccaccgctgaactgaccgtctcattcacaaacaaagtcttcacaactggtgagtaaccaggcatttcatgctcagcagaaaggagtgtgaggacggagctctctcttccattatctaagcctgtaggcttttaatcacttcaccgaactgtccgtctcttaccaagaaagtccttggtgtgaggctagagcatgggtgcagagtggagctctggggttcagaaggaggagcgttttgggtgatggggccatttcaaagatggcggagccaaggctgtggcgggacgaccgccatccctacgcactgctcccaggatgaagtcctaggct

SEQ ID NO: 167349 - DNA, 2529 bp, Homo sapiens
ccaccgtgtctaacacgaacaagtccacagagagcagtacgccaccatgccttgccctcctctcccaccacccccagccatggatctgctttcttctccatctcctatagatttacctattctggatatttcatgtaaatgacctcataaactatgtggctttttctgaccggtttctctcacttaaattacattcctgtgtgtcttttgaagaaattattaggacagagtaaagcatatgcatgcaaatgtcttatcaccgcgcccagcaggcaggaatgtccataaaagcgagtcctggcatctggtccctttcttctttcctcagggctgtgtctggggcgtgtgccagcgcagagtggaccgctccccaagccctccctccaggctctgcccagctccctggtgcccctggagaagccagtgaccctccggtgccagggacctccgggcgtggacctgtaccgcctggagaagctgagttccagcaggtaccaggatcaggcagtcctcttcatcccggccatgaagagaagtctggctggacgctaccgctgctcctaccagaacggaagcctctggtccctgcccagcgaccagctggagctcgttgccacgggagtttttgccaaaccctcgctctcagcccagcccggcccggcggtgtcgtcaggaggggacgtaaccctacagtgtcagactcggtatggctttgaccaatttgctctgtacaaggaaggggaccctgcgccctacaagaatcccgagagatggtaccgggctagtttccccatcatcacggtgaccgccgcccacagcggaacctaccgatgctacagcttctccagcagggacccatacctgtggtcggcccccagcgaccccctggagcttgtggtcacaggaacctctgtgacccccagccggttaccaacagaaccaccttcctcggtagcagaattctcagaagccaccgctgaactgaccgtctcattcacaaacaaagtcttcacaactgagacttctaggagtatcaccaccagtccaaaggagtcagactctccagctggtcctgcccgccagtactacaccaagggcaacctggtccggatatgcctcggggctgtgatcctaataatcctggcggggtttctggcagaggactggcacagccggaggaagcgcctgcggcacaggggcagggctgtgcagaggccgcttccgcccctgccgcccctcccgcagacccggaaatcacacgggggtcaggatggaggccgacaggatgttcacagccgcgggttatgttcatgaccgctgaaccccaggcacggtcgtatccaagggagggatcatggcatgggaggcgactcaaagactggcgtgtgtggagcgtggaagcaggagggcagaggctacagctgtggaaacgaggccatgctgcctcctcctggtgttccatcagggagccgttcggccagtgtctgtctgtctgtctgcctctctgtctgagggcaccctccatttgggatggaaggaatctgtggagaccccatcctcctccctgcacactgtggatgacatggtaccctggctggaccacatactggcctctttcttcaacctctctaatatgggctccagacggatctctaaggttcccagctctcagggttgactctgttccatcctctgtgcaaaatcctcctgtgcttccctttggccctctgtgctcttgtctggttttccccagaaactctcaccctcactccatctcccactgcggtctaacaaatctcctttcgtctctcagaacgggtcttgcaggcagtttgggtatgtcattcattttccttagtgtaaaactagcacgttgcccgcttcccttcacattagaaaacaagatcagcctgtgcaacatggtgaaacctcatctctaccaacaaaacaaaaaaacacaaaaattagccaggtgtggtggtgcatccctatactcccagcaactcggggggctgaggtgggagaatggcttgagcctgggaggcagaggttgcagtgagctgagatcacaccactgcactctagctcgggtgacgaagcctgaccttgtctcaaaaaatacagggatgaatatgtcaattaccctgatttgatcatagcacgttgtatacatgtactgcaatattgctgtccaccccataaatatgtacaattatgtatacatttttaaaatcataaaaataagataatgcaccgtctccacccctctcatatttactttctgaaggaaatgttaggtcttctcaaggtaaagttctatatttattatagcgtttaggcatttcttgaccatctaatgagtgtaaaactgtaccactgggccaagtgcagtggatcatgtctgtaatcctagcactgtgggaggccaaggcaggaggatcgcttgagcccaggagttcaagaccagcctgggcaacatagtgagaccccatctctacttaaaataaagaagtaaaaattgttttaaaa

SEQ ID NO: 167350 - DNA, 2263 bp, Homo sapiens
acagagctcaggacagggctgaggaaccatgtctccatccccgaccgccctcttctgtcttgggctgtgtctggggcgtgtgccagcgcagagtggaccgctccccaagccctccctccaggctctgcccagctccctggtgcccctggagaagccagtgaccctccggtgccagggacctccgggcgtggacctgtaccgcctggagaagctgagttccagcaggtaccaggatcaggcagtcctcttcatcccggccatgaagagaagtctggctggacgctaccgctgctcctaccagaacggaagcctctggtccctgcccagcgaccagctggagctcgttgccacgggagtttttgccaaaccctcgctctcagcccagcccggcccggcggtgtcgtcaggaggggacgtaaccctacagtgtcagactcggtatggctttgaccaatttgctctgtacaaggaaggggaccctgcgccctacaagaatcccgagagatggtaccgggctagtttccccatcatcacggtgaccgccgcccacagcggaacctaccgatgctacagcttctccagcagggacccatacctgtggtcggcccccagcgaccccctggagcttgtggtcacaggaacctctgtgacccccagccggttaccaacagaaccaccttcctcggtagcagaattctcagaagccaccgctgaactgaccgtctcattcacaaacaaagtcttcacaactgagacttctaggagtatcaccaccagtccaaaggagtcagactctccagctggtcctgcccgccagtactacaccaagggcaacctggtccggatatgcctcggggctgtgatcctaataatcctggcggggtttctggcagaggactggcacagccggaggaagcgcctgcggcacaggggcagggctgtgcagaggccgcttccgcccctgccgcccctcccgcagacccggaaatcacacgggggtcaggatggaggccgacaggatgttcacagccgcgggttatgttcatgaccgctgaaccccaggcacggtcgtatccaagggagggatcatggcatgggaggcgactcaaagactggcgtgtgtggagcgtggaagcaggagggcagaggctacagctgtggaaacgaggccatgctgcctcctcctggtgttccatcagggagccgttcggccagtgtctgtctgtctgtctgcctctctgtctgagggcaccctccatttgggatggaaggaatctgtggagaccccatcctcctccctgcacactgtggatgacatggtaccctggctggaccacatactggcctctttcttcaacctctctaatatgggctccagacggatctctaaggttcccagctctcagggttgactctgttccatcctctgtgcaaaatcctcctgtgcttccctttggccctctgtgctcttgtctggttttccccagaaactctcaccctcactccatctcccactgcggtctaacaaatctcctttcgtctctcagaacgggtcttgcaggcagtttgggtatgtcattcattttccttagtgtaaaactagcacgttgcccgcttcccttcacattagaaaacaagatcagcctgtgcaacatggtgaaacctcatctctaccaacaaaacaaaaaaacacaaaaattagccaggtgtggtggtgcatccctatactcccagcaactcggggggctgaggtgggagaatggcttgagcctgggaggcagaggttgcagtgagctgagatcacaccactgcactctagctcgggtgacgaagcctgaccttgtctcaaaaaatacagggatgaatatgtcaattaccctgatttgatcatagcacgttgtatacatgtactgcaatattgctgtccaccccataaatatgtacaattatgtatacatttttaaaatcataaaaataagataatgcaccgtctccacccctctcatatttactttctgaaggaaatgttaggtcttctcaaggtaaagttctatatttattatagcgtttaggcatttcttgaccatctaatgagtgtaaaactgtaccactgggccaagtgcagtggatcatgtctgtaatcctagcactgtgggaggccaaggcaggaggatcgcttgagcccaggagttcaagaccagcctgggcaacatagtgagaccccatctctacttaaaataaagaagtaaaaattgttttaaaa

SEQ ID NO: 167351 - DNA, 1657 bp, Homo sapiens
agggagaggtgctacttagagaattggggtcatctggccctgacccctactcgggaagggagggaccctccaggaaagtgagcggcatcccctagctagtagagaataataggatctctgagaagcccagatgtggcttggagggggtcctggaggtgggctctttcacctgctcctgcctctcctcattcctccaggtcctgcccgccagtactacaccaagggcaacctggtccggatatgcctcggggctgtgatcctaataatcctggcggggtttctggcagaggactggcacagccggaggaagcgcctgcggcacaggggcagggctgtgcagaggccgcttccgcccctgccgcccctcccgcagacccggaaatcacacgggggtcaggatggaggccgacaggatgttcacagccgcgggttatgttcatgaccgctgaaccccaggcacggtcgtatccaagggagggatcatggcatgggaggcgactcaaagactggcgtgtgtggagcgtggaagcaggagggcagaggctacagctgtggaaacgaggccatgctgcctcctcctggtgttccatcagggagccgttcggccagtgtctgtctgtctgtctgcctctctgtctgagggcaccctccatttgggatggaaggaatctgtggagaccccatcctcctccctgcacactgtggatgacatggtaccctggctggaccacatactggcctctttcttcaacctctctaatatgggctccagacggatctctaaggttcccagctctcagggttgactctgttccatcctctgtgcaaaatcctcctgtgcttccctttggccctctgtgctcttgtctggttttccccagaaactctcaccctcactccatctcccactgcggtctaacaaatctcctttcgtctctcagaacgggtcttgcaggcagtttgggtatgtcattcattttccttagtgtaaaactagcacgttgcccgcttcccttcacattagaaaacaagatcagcctgtgcaacatggtgaaacctcatctctaccaacaaaacaaaaaaacacaaaaattagccaggtgtggtggtgcatccctatactcccagcaactcggggggctgaggtgggagaatggcttgagcctgggaggcagaggttgcagtgagctgagatcacaccactgcactctagctcgggtgacgaagcctgaccttgtctcaaaaaatacagggatgaatatgtcaattaccctgatttgatcatagcacgttgtatacatgtactgcaatattgctgtccaccccataaatatgtacaattatgtatacatttttaaaatcataaaaataagataatgcaccgtctccacccctctcatatttactttctgaaggaaatgttaggtcttctcaaggtaaagttctatatttattatagcgtttaggcatttcttgaccatctaatgagtgtaaaactgtaccactgggccaagtgcagtggatcatgtctgtaatcctagcactgtgggaggccaaggcaggaggatcgcttgagcccaggagttcaagaccagcctgggcaacatagtgagaccccatctctacttaaaataaagaagtaaaaattgttttaaaa

SEQ ID NO: 167352 - DNA, 292 bp, Homo sapiens
tctcagctgagatgctggctcctgccttcaacatcagactttctttttctcccaggagtttttgccaaaccctcgctctcagcccagcccggcccggcggtgtcgtcaggaggggacgtaaccctacagtgtcagactcggtatggctttgaccaatttgctctgtacaaggaaggggaccctgcgccctacaagaatcccgagagatggtaccgggctagtttccccatcatcacggtgaccgccgcccacagcggaacctaccgatgctacagcttctccagcagggacc

SEQ ID NO: 167353 - DNA, 396 bp, Homo sapiens
cgatggctgtgaggagctagagtttccacttcctaatggattcaaggaggagtcttatatggagtgcagtgatttcctggggtaccctttgtggcctccatatccagtgaggatggtgaacaggcaactgcagcccctgccccctgacaagggcaagacaaccaaggccttagatattctgggtaagaaggttgaaggtcaaagttcccaaatccagaagctacccagatcagcccaagcactggctagtgtgggggactttcagacccagaggtggaggagaagtctgcaaacactggttattgccacacagtcagctgcactagtggagacgggagcttgtttcaccgatacttttaagttaaatgtttgcagaggttatagccagccactgcc

SEQ ID NO: 167354 - DNA, 590 bp, Homo sapiens
atgataggagagaggtaagctaaagaaataattgttaaatataaaggagccagaacttcttggacttgaaaataaagctttctcttttccagtttttcctgacggcagagaattctaaaattaagaagattctttatggaaggagagcaaatctagggtactgtcattaaaacatggtttatcatgaagccaagggagtgattgtaaaatcttagttctaatacctcaggaaatttaatgtcatgcctcacacagacagtagtctctctaattatcttaaggacatgacataccttacagatcctctttattaaagaaaaagtcctttgagaattttaagagcattgtccctcggcacccttataggaagctctaggacttatcttgaagagatttgtgggtacaggttttgtctaatggagtggattataaacaagaaatccacacagttttttgttgcaaattttttttagagcagttttagtttacacaaaattaagctgaaagtagaaagttcctatattctccccattcccctctctccctaaaatttcccacactatcaatatccctgaccagagtggtacttt

SEQ ID NO: 167355 - DNA, 303 bp, Homo sapiens
atactcaaatagcaacatttcccaaaatatgatctgtgggccactggggccactaggtgattctcaaacaaggcttctgtggtccagtgacctggaaaacactgcattccatatttccacttagagattcacaatgcacatcgccttatgaaggcagctgagaatgcctgtagcaagggaacctgtggagctctgtttaatcctgagtttccaaaacctcctgggtcacagaacccctttgatgtagacagcgttttactgagagtgtgggaaatgctgctctgtgatgatacagtgactttg

SEQ ID NO: 167356 - DNA, 397 bp, Homo sapiens
agaggagatatcaggtaacaggtgacttggcagcgtggcagaacctgctcttccagtttgtcatgtatgtactgctatctgtatttaaatagccatttagaaaccaaaaaaaaagctgataaaatagaccatatttcctcatattttgtctaacaaatggactcttaaaaagtacagtggatggcccagaattttttttcatcagctcaaatataaagttaccacagttcgggataagaaaaaacaaaaaatcacttccccccaacctcttaacctgtcccccaaaacaatcagcttgtcatgtcttttcctctctccttaatgagtattcttataatgctttaataacaaataaccaaaaagttttcaatatataggtttttttctgtatgtctta

SEQ ID NO: 167357 - DNA, 466 bp, Homo sapiens
gctggaaatcaggaatccccttcctcccaaaaagctagtcattaaaacatttaccatcactgcatcactgcatagagctctcagccttttaagagaataacaattcattgcattgatatgccataatttattgaaacattccacaggttatttcttaaattcatgctctgctcaccttgggaaaatacagataacaatttgattcgctatgaagtagagcagataagcagcagaggaagaagtttaaatccatagtcaattatgcattaatgacagcaggagttcaattataacaccagtgagtggagatctagagaaatgaacatacattggcatatttaaatgtgctgcaacgaggaaaaaatgttttctctaaaaagaattcatcctatacagatagccaccacagaatatggaactgtgaaattatagtcctatattttcaattcacttgccaattttagct

SEQ ID NO: 167358 - DNA, 277 bp, Homo sapiens
cccattctccaaattcctgaggtctttgtaatcctgacacccttttggtgtcatgtcctccagccctgagttatctgtcttaggactgtcacttctgggagagccccctcatcctccaagctagtccctttgtgcgattattgcttctttttcttcccaaatagcatcaccatctcaaatcccgatctgtttgtttacgcgattatcctctgtctcttcctcaccagaaatgtatgctctgtgatggcaaactcttccaacttcttgttccccatga

SEQ ID NO: 167359 - DNA, 308 bp, Homo sapiens
caaatcaaaactcctaatgccttcaaagtttttaacagtctggtcccaattacacagcttccagaggccctacctcagctatctgctcaaacatgccccagaagaccatgaattatcagccttcttaaatttgcatataatgttcccactgtgtgacccattcttctaccctgttctctgtcctccaacttttttcatcatcaaggcttagctcaaattctttctgctctgaatcttttcccaacccctctccaagcagaattcattgctgccttttttatgcttccattacactatcagaggtgagt

SEQ ID NO: 167360 - DNA, 593 bp, Homo sapiens
cacgctcaaagacgagagatagagaacgagcaacaacgcatatacgtgaacggtgactggacgcagcgtgggtgagtagtgtcaagggtgaaggtacgctcgagcgtggtcattgaggacaagtcgacgagagatcccgaggacgtctacagtcagccttacggagaaaatcagcttcctgtttggatacccactagacatttgaagttctacaatgcacccatcggagatgcaaagaaaagcacctccgcggagacggagacaccgcaatcgagcaccgttgactcacaagatgaacaaaatggtgacatcagaacagatgaagttgccatccaccaagaagtctgcaggtgtacccaacagctccgaagagacagcgaccatcgagaacgggccatgatgacgatggtggttttgtcgaaaagaaaagggggaaatgtggggaaaagcaagagagatcagattgttactgtgtctgtgtagaaagaagtagacataggagactccattttgttatgtactaagaaaaattcttctgccttgagattctgttaatctataaccttacccccaaccccgtgctctctgaaaca

SEQ ID NO: 167361 - DNA, 706 bp, Homo sapiens
gcccattctaaatgctgcaaaggcttcgatgctgcagaagtgttcgtcattattatgacagtaggagcagcatggaattattattatctttatccttattactgatataattattcccaataacctggggttatgatttgcatcctgtgcactgcgggaagaaagaggatttgtgtttaatgaaatgatatgcttgtaggccgagtgcagtggctcacaccttaatcccagcactttgggaagccaaggtgggaggatcacttgagcccaggagcttgagaccagcctcaccaacatgacgagatcctgtctctacaaaaaaaaaaaaaaaaaagtgtttagtatttttaaaatactgaaaaatcaaatataattctctcaattcttacgttaaggttttttaagtcctgtctgtttagaatgaggtgcactcgtgtgtagtacgtatgtgctctgtaagcaaaatcattcattcctccttttgccctttttgggaattctggtcaatttttcacctccctctcgttgagatgctaaaaccttcttgaattggagatcatttactcttgggattaagcagaatggaactgccctattgcttgtgtcatgggccaggctcacagccacacagctggggtctctgcccgtcgtcctgggcactggggctgggggcagcgggaagtgatggggagcttgatacttggta

SEQ ID NO: 167362 - DNA, 251 bp, Homo sapiens
tgtgtgtggtatttcctactttgatagagcagtgttgctaactagagcatacattgtgtagaaaaccctcctgactaccttttatggagctgaataaatatgtatacttgagtgctctcatgttagtcataacctttagtttagcactgttatatagaagtgacagtcacgtagcccactacacattatactagtttgaatttaaacaaagcaaaacaactttataattttaaggggaagaggaatggttc

SEQ ID NO: 167363 - DNA, 555 bp, Homo sapiens
tcaagtgacattaggtttatgagattgattctcctggctgtgtttttccatttttgctgtggaatgatagcattcttcagtcaccacaggtctgcagtcaggcacagaggaatctttgatctagtctcggctgactggtttactttttactcctcaaattttctgtggatcttcccgtgagatttgacatccagaaagctcttcctccttctttcctgctcgctgtgcagagcccagctcatcagcagcaggagtgcagggttcctcccgcagcaccctaaatgcaggctgttcaaaggcacatccgggctgtcagcaaaacggctgagtgatgcgactgtgggtgtctctgtcagctgcagagcaggatgacaggatggcccagaaggctgcctggcgtgtggcccttcctctggcacaggcaggtgaacctgctgacaccgtcacgctgacagctccgtggcacagattccacccgaataccggattcagtgagcaccggctcctgccaagtctctcacatgacccagaggccacgagggcctgggcggccgc

SEQ ID NO: 167364 - DNA, 115 bp, Homo sapiens
cataaagggagcttaaaagtaataagcttaaggaaagccagatactgaagagcacatactctatgactccatctgtgaaaagctgaaaacaagcaaaagtcatctacaggaacag

SEQ ID NO: 167365 - DNA, 514 bp, Homo sapiens
gacagaagataccatgaagagtctgataacaaatgacaaactgggagaaaatacttgcatcattcaaaagataaaaagtactacccctaccatacaagagttctcagattgataagaaaggtgaatagtagcacaaaaacaggtgaagaataaacatagacaaatcttagggaaaaatagaaaatatattccacttaactaattagtagataggaaggagcaaaataataaccaaataccccttttcaaccattggactggcaaaaattaaaatggtttataacatctagtgttcacagggtatataaggaaccaaacattcataacattgcagttggggatataaattataataaataatcttatgatttctcaatatcaaggtcttgccatttgaatccattatttcttctttggagaatttattgtacagaaataaatgtatcagttacataaatatatatctattaatgatgtttattgaagcattgttcagtgtcaaaaatcaggaaat

SEQ ID NO: 167366 - DNA, 187 bp, Homo sapiens
tggcctatgagcctggagaagctgctggagagatgtaagtagaggagtgacaggatcagactgtggtttgaaaggtccccttgctgctatgtggtgaggaccgtacggtggaaaaagtggagataggcttacaaggcccagtgccagagtgcctcgctctgcctctctggccttatctcctaccact

SEQ ID NO: 167367 - DNA, 247 bp, Homo sapiens
ctggaccacttcagagtacttccagagtaggagtagggaagaaagaaagcaggggatcatgataggattacagaaaggaatgggtccacatgtccaagccacaacttaactataagaactggcatttggccatcaccaaggcagtcagtgtattcctgaagcacgaccgtaggctagatgccaggatgtgttggtactgcctctgctatttgagaggttttgagtaacattttggaaaatgctgtca

SEQ ID NO: 167368 - DNA, 454 bp, Homo sapiens
  misc_feature (340)..(340): n is a, c, g, or t
acataattaggctatttacataaaaggcaaagtttgaatacaaaaaaaatggcatagctggaagaatgtaagtttagattatctcacttttacagttacacatttttaagttatttgacctcggtattaaaaatcctcgtgttccattttatgtgtagtccagaaatactttttaaataactggtacagtgatgtccttatatagagagtgttgaaagcaaaaggctctgaaatctatcattacttgtagtccagtttgccctcctttttcagcatgtctactctccatgttcaaaattttccatggctaattttttgtccttaaattcattttcccctngccaccctgtcaaccagccaatcagtcaacaaataacttgggtgggtactatacatagggtcaccaattcattcctgaactgtcccggttttaaagctgaacattgacaacctg

SEQ ID NO: 167369 - DNA, 1436 bp, Homo sapiens
  misc_feature (1352)..(1352): n is a, c, g, or t
gacctatgtagccgatttgcagctgtcatggagtcaattcagggagtttcaactgtgacagtgaaataagctcccacatgttcaaggcccattctggttcctggctgcctgcctcttgcacagaagttcgttgtcatagtgctcaccttgggaaaaggattaggtgggcacataagattccgatcagaccccaaccatgctgcatgtgtaaagaaggattgaaaataaaattgcactttttaggtacaaaatcataaaagctgtttcactagaaaaggcagaaagcagtgtattaaggtgttgaattacgccagaagacctgaaatgccttgtacctacaacaatgcttaggcttttctaagcctcttgccacttttaaaattatccttcaggcataaatatttttgacagcagaatagaagaatgattcatgagaacctgaaccagatgaacagctactagttattttatcaaatacagatgacatttaaaaattcttaactacaagagattagaaatataaaccttgcctggctcttgccaggagataacaaaatgggttgctgatgaactgcacccttttacatgtgggtagaatataagctcacatggcagtgagatgttgaaaagtcaaaagagacctgtctctctcctttcttttctatctttaaaccagaaaacctcatactcagtcctcagtgaaagaaagtaaagtattaaggactttagacagaagagcattgtgtaacttggactgaagatcatccattaatagttattaggcatttaggtaaaattttctaatacctaaaaaattgtcaaaaacagtcaatagggctactgctggcccaaagaccatttaggtccacctcctcttttttgctctttttttttttctgtgacagtttcactgtgtcgcccaggctggcgttcagtggtgcaatctcagctcactgcaaactctgtctcctgggctcaagtgattctcgtgcctcagcctcccgaatagctggaattacgggcatgcaccaccacacctggctaattttggtatttttaatagagatggggtttcaccatattggccaggctgatctctaactcctggcctcaagtgatctatctgcctccctcagcctcccaaagtctgggattgcagacaagtcatcgtacccggccttcttttttgcccttaaaagtaagggatgtgggtttgtacaaaaaaaaaaaaaaaaaaaaccagcatacatatgcaaaactatatatatatgtatatgtagagaaaaatacttcccattgatcatttttaaaaggcttctgattggatattgtgttttaaccaaattttaaanattaatggaatcatgaaagggaaaaaaattgatacaactatgcagattttataaatgtgcaataaaagtatttgttttaccttt

SEQ ID NO: 167370 - DNA, 995 bp, Homo sapiens
gacctatgtagccgatttgcagctgtcatggagtcaattcagggagtttcaactgtgacagtgaaataagctcccacatgttcaaggcccattctggttcctggctgcctgcctcttgcacagaagttcgttgtcatagtgctcaccttgggaaaaggattaggtgggcacataagattccgatcagaccccaaccatgctgcatgtgtaaagaaggattgaaaataaaattgcactttttaggtacaaaatcataaaagctgtttcactagaaaaggcagaaagcagtgtattaaggtgttgaattacgccagaagacctgaaatgccttgtacctacaacaatgcttaggcttttctaagcctcttgccacttttaaaattatccttcaggcataaatatttttgacagcagaatagaagaatgattcatgagaacctgaaccagatgaacagctactagttattttatcaaatacagatgacatttaaaaattcttaactacaagagattagaaatataaaccttgcctggctcttgccaggagataacaaaatgggttgctgatgaactgcacccttttacatgtgggtagaatataagctcacatggcagtgagatgttgaaaagtcaaaagagacctgtctctctcctttcttttctatctttaaaccagaaaacctcatactcagtcctcagtgaaagaaagtaaagtattaaggactttagacagaagagcattgtgtaacttggactgaagatcatccattaatagttattaggcatttaggtaaaattttctaatacctaaaaaattgtcaaaaacagtcaatagggctactgctggcccaaagaccatttaggtccacctcctcttttttgctctttttttttttctgtgacagtttcactgtgtcgcccaggctggcgttcagtgagccgagatcacgccactgcactcaagcctgggcgacagagcgagactccgtctcaaa

SEQ ID NO: 167371 - DNA, 579 bp, Homo sapiens
gaggcattgtcgaaggtttaaaagcctccagagcacccagcaggggaaagcccctcagtgagtcactgcagcatcagatccttggggcttccggctttcctgcttacttattttcctgttggggtgcaggagtgttaggcatgcagcctccttgggatgttttgaattaggtaagagtagagagcagtagtgggagtaataacaatttttgtttaaagactttgcctctcctgtccccaggctattgtcaaagaacacattgctcttaagggagaatcttgttagagcaaaacagacaatgccggcagagagagggaattttacaatctgcctctttcacatatttaaacataggcaatcgcctggcaaggtggctacaactccacctgccagccgccatgctttccatgaactccaccgtgttacttggtccagattaaggaataagcttttgtggagaggagaatattcacaaggcctgagccaataagggaagaggggccaggctcccaggctcctgtgggccaaggcctggggattcactggtcagacagcccatgtctaccttccaggggagga

SEQ ID NO: 167372 - DNA, 246 bp, Homo sapiens
attgttgcagtcaggatatgtcaaagtaaagctaagaaaacttgctaatgaattaacagtggggtatgatgacaagatcagaataaaggaaaactgttactttgtatgccttgagccactggataatgaatgtgccccttactgagataagtaagacacagaagaggaagtttggtggaaaagagaaggaaaggataaaggactcaatgtgggataagcaatcggcatgtacatttggaaaaagct

SEQ ID NO: 167373 - DNA, 302 bp, Homo sapiens
catttgtaaaccactgttctaatagatagtagatgttatcaccataagcaatttggattcccttctgaaaatccaccagtttttttttttaaaccaaaattaaacataaaagaatgaagtgtttttaaagaatttttttttcctttaaaagcatacaagagaaatgttaacatgtagatactcttaataacagtacatttactgaacacattttcaaaaaaatgagattaggatcagaaatataaaatatgctccacttaattttaaacaattggttatttgtcactcatagcttctaattt

SEQ ID NO: 167374 - DNA, 458 bp, Homo sapiens
tgtatgcagtgtccgaaggtcctacttaaagaccctgaaagcaaatttaaatacaactcttcaaaattattaatctatagggaaacaaaatttatgcttaatcaggcagaatccaccaattaacctctgattacataactagaaaatttctacctaagtcaggccaggaaagctggcttatacctgtaatcccaccacttcaggaggccaaggtgggcggaccacttgaggacaggagttggagaccagcctggctaacgtggtaaaaccccgtgtttactaaaaatacaaaaattagccatgtgcggtggcacatgcatgtaatcccagctacttgggaggctgaagcaggagaattacttgaacccaggaggcaaaggctgcagtgaactgagatgatgtcactgcactccaacctgggccacagagttgtctcaaaacaaacaaacaaacaaaaa

SEQ ID NO: 167375 - DNA, 325 bp, Homo sapiens
aggcggggtgcagctgggcagccatgccagtggggagcgcctgcggcactggcttgagtgcctgggccacagtgaccaccgcctgaagctgtggcacccgctggacagcaagcctgtccagctcagcgactagcccatgggccctgcctgccgcccctccactacagctgcctgaaacgtccccacaaaaatgatggcggctggggctgccttaccctcatgcccagccccaagtcagagaggtgtttcctctctccccgctttcacattcaccccaccccaaatcatggagccgaaataaacatctccttcaagccagatgaga

SEQ ID NO: 167376 - DNA, 580 bp, Homo sapiens
taactgaattcccagagaagaaataaaaacaatgagaaatatactttaagaactaatgatcaagttttccaactttaataaaaactataagccaaagatgaagaaccacaataatctctgaagatagcacttctaaataaaaccatgcaaagcacatcataatcaaactgctaaaaaacagtaataaaggataagtcttagtcttggtgcggtggctcacacctgtaatcccagcactttggagacaagagcaaaatttgtataataataaagatatccattctcaggaagatatagttatatgcatatgtgtacataacaagacagcttcaaaacacatgaagaaaaatctggcaaaactgaagggagacaaacagaaatgaacatgaagatgaacaaaatatgaccccccacaaaacaaaagagaggctcactacctgtgggacaattatcaagtggtctaatatatgtgtaactgaattcccagaagaagaaataaaaacaatgagaaatatactttaagaactaatgatcaagttttccaactttaataaaaactataagccaaagatgaagaacc

SEQ ID NO: 167377 - DNA, 524 bp, Homo sapiens
tcaggaggctgaggcaggagaattgctcgaacccaggaggtggaggttgtggtgagccgagatcccaccactgtactccagcctgggcaacagaagcgaaaactctatctcaaaaaaaaaaaaacaagcaggagtggctattctaatatcagataaaatagacccttacacaaaaataatcattagagacaagagcaaaatttgtataataataaagatatccattctcaggaagatatagttatatgcatatgtgtacataacaagacagcttcaaaacacatgaagaaaaatctggcaaaactgaagggagacaaacagaaatgaacatgaagatgaacaaaatatgaccccccacaaaacaaaagagaggctcactacctgtgggacaattatcaagtggtctaatatatgtgtaactgaattcccagaagaagaaataaaaacaatgagaaatatactttaagaactaatgatcaagttttccaactttaataaaaactataagccaaagatgaagaacc

SEQ ID NO: 167378 - DNA, 375 bp, Homo sapiens
gccctttctccaagcagggccgccattgcaaggcctcacgtgcaacacaaatgcccagttcctgagacttcttcagaatctccaggaaaagggtgaaaaggcatttaaacctctatgaagtagggccaggcacagtagctcacgcctataatcccagcactttgggagccgaggcaagcggatcacctgaggtcaggagttcgagaccagcctggccaacatggtgaaaccccatctctactaaaaatacaaacattagccgctgtggtgttgggcgtctataatcccagctactcgggaggctgaggcaggagaatctcttgaacccgggaggcagaggctgcactgagctgagaccacgccactgcactgcag

SEQ ID NO: 167379 - DNA, 422 bp, Homo sapiens
aggattcttgaggggacagtctaggcagccattccaggttctggggctctgtcgggggacacctgcttgagagggggcacaacccttcaacacactcaaatacattcatacatattcacactattaccttttccattaccacccctgaccctccctcctgcaccatccttgccaatgtggagcactcctctgctatttcagaaataccaccacaggtgtcctaaactggatccctaggagccaggagttcaggaagcatgtctgctggagtgtgcatgcacacacggtatgcacatcacataggagcacgtgcatgtgctcttgccactgggaggaccacatacccaagcgtacaccgtgcactctcctgggaaacagcacacagccacatgcctgatcatctgcacattctcccacacgca

SEQ ID NO: 167380 - DNA, 431 bp, Homo sapiens
ctggtttcaagtgagtcatgtagccctcactcagccagggcccttgaggcacgatccttaggctctcaccctggaagcagggtcaacagaggtagagtggcagagggattacacatgtgggctttgaaactatcagacctcctttccccctttttcctttttttttaattgtgtcaaaatacatgtaacatcaaacaccattttaaccattttcgtatgtgcaattcagtggcatcaaatgcatacacaatgtcatgtaacaatcactaatatttccaacactttttcatcatccagtacagaaatgctgtaaccattaagcaataaccccccatctgccaccacctcagcccgtgacaacctctattctgttgtctctatgaatttgcctgtttaattacctcatctaagtgcaatcatacaatatttgt

SEQ ID NO: 167381 - DNA, 217 bp, Homo sapiens
cccatcccccatcttagaatggagccccctgggaccacgcgggagcaccctggtcttgagacgctctccccgctcatggagggcaggcaagggatgttgtcaaagttttgcttaaaaataattcccggatacatcgcgacagtaaagcaatctagggctgttttttttttctttcctgaatactgttggggttttcttggggggagggagattgagg

SEQ ID NO: 167382 - DNA, 332 bp, Homo sapiens
gtccccttagtggagtcacagcctcagcggtatgttgaatcttggtctgagagtcatcaacccacatatagcccaaatccatgtatgagagtcaattttccagcttttggctacctccaaatatgagaatcagaacttcaacagtgagctgtattcatgtggaaagatgacaatctttactgtcggctgggtgtgcatgtgtcacaatgtcacctgtgttctgggcctcattataaaactctctgtaccatctgaggtctttatacagtattcatgaaagtcacaattttctctgaaactttcttcctggtatggattcataatcatacctg

SEQ ID NO: 167383 - DNA, 531 bp, Homo sapiens
gcgattttgcattcttttaacccatttttcattccattctttctcatttaatgtcttgttacataaattttaaacataattaaatgcgtgagtcaaaatgtttaagagtattctctggtatctgaactactttgcaggatcagatataatactgtggagagtaatatcagcacttttataattatgaaaatgcttttatgtcagaagatacttaagctgaagattcatgggttacaaaaaataaacatttcaaactttaaacttattttctggaatgatacttgctctgaaataatattcaaaacacttttccgaaatgcatctagccacacaggagaatgagcatgcaaggaggtagagggtcggtggtgaaaaaattatagatttcaaagttattgtttgaaataacccaaacaagcaaaacattagtatttttatcttgaaattcttggtgaattttatgttctagcccataatatattagtttattttaacacaaaagtttcttccaaaatggacatgtccaaaaga

SEQ ID NO: 167384 - DNA, 229 bp, Homo sapiens
tgagaccagatggaaaaccactactgggtcagagagtgaaaataaatcctagagaagatgccagaaagatttggctaagcactacttaatggaataaaattcgtgaccggggtactgactgtgttcctaatgttggattattttagccttgctctattagtagtcctcagctttgaacccagcctctctcccttcctgtctcttcccacatcccattgagtcccccctt

SEQ ID NO: 167385 - DNA, 513 bp, Homo sapiens
acaaagaacagaagagaatttggagagacaaaaatagttaagacagatttgatgagtaggtaaactgtaaaagaaaatagaattttagaccaatcataagagtttgctactaaatgaaagtcctgtgtgtttaaacctttctgcttatctgatcttctgacttatccttcttatctgcagatcatatctgggtgtccatcagcatgttacttcacatctctgtacctcagtttattcatctttcaaatggaagcaacatatagagctgccttatagagttgctctgggtattagatgtataatatatgtgaactgcttggtactgggcctggtatatggtatgtgctcaataaatgatagttgtttattattgtcatttatcatcatcatcatcatcatcataattaaatattattccaagcaacaatgtgttcctcatagtccaacaataatttaataaatgtaacctttccaaaactccgatctgcaaattttaaataaatattttcaatt

SEQ ID NO: 167386 - DNA, 468 bp, Homo sapiens
tgggggtgatttgttacacaacaataaacaactaagacaccagcccaatcccagttccccacgagcagcccttctcctactgctgaataggcagagctgctgccaaaggcccactgtgctgggcaaagaaccacattctcatcctccccttttccagctctccctgttcccttcgtgggcctggggcagactgggaggcctcttcatgggcctctgcacatgcatcagcctgcactccactgtcccatcatcttccctgagagcttgcaagccacgagtggtttcctgtgtcagctccaatttttgaaataccatccatgaattcacaacacagtaattaatcactctgtgaacttagctgatggattagctgagacaatcaatttttaaatgttctgtttcatctgaaacaggtttagtcaagaggcacaaatgcagtgaattctaaagattcttagcaggttatca

SEQ ID NO: 167387 - DNA, 127 bp, Homo sapiens
cttgatgccatcctatgaatccaccaaccatcatcttctctgaccctttaaaatgacttccctcacaccccctgccatgagatgatatgaagaactaacaacagataatttctatatcaccacattt

SEQ ID NO: 167388 - DNA, 356 bp, Homo sapiens
caggacacttgccactcaccctctggttctggcctaggaaattcttcctcattcgaggttatcatgaaattcagttgggaggttctttcaacctgtgactgcttcctgagttagctggcggacttccatgagatacactgtgaggcagaataatgaatggctccccttggtctactctgcagactgggaaagcacgcaaggctgctcccactgccgttcctacttttatatatgtcaccacttcctaaatcagttccagtgttgagtaggataaaggtcttcccctgtgggttggattgtcaggttcccctgtaggggtgtgtatcctggaggcagtctcttccactctcaccctc

SEQ ID NO: 167389 - DNA, 507 bp, Homo sapiens
aaaattgaacccttttaaacaacgcattagcgttatctttgccctaggagctccaactccaaagaactgccccagagttctgaattctgttacaggttcgagcagagggaaggtgcggggcggcgggtgttggcggggggagctcccaaagcgctgtttaagaaagtttttttcctgctctttctaggagctcccgttttaggagacggttttggaaaagtaccctggcatacactcttttttaaacgtctgatctctaatgctctgtaactagccaccacccattcaagagatttcatctcctaaactgccaacgtggtcgagtaaaagctgtctctcctgagggtctcaaatctttccatagcggttgctaacacaaagtaacaatttactgttgatttttaaagcataatattaatactcttgaattttatacctttttgtttaatggggaaaattctaggaaggaaccacgtggaagtcaagtaaccacgatgttttaacaaa

SEQ ID NO: 167390 - DNA, 179 bp, Homo sapiens
aatagcactaaaaacaaaagtagctgacaaaatctgtgcaggtttaaaaatgcatatagaaaaagcaaatctgttaccctagactttctaagtcacatctggactgtattataacaattttcagaagtgaccaactatcgttgcttcttgtggttacagaggggacccataattaagag

SEQ ID NO: 167391 - DNA, 515 bp, Homo sapiens
acgacagagcaagacacagtctccaaaaaaataaaaaataaaaaatcttttccattaccaaagaatacagtcttaactttataaactgaggtctgcagagaacatatttgattcaaatccaaactatcttcttcacttttcactgtatttccaacaaatccactatttttactttgatcaactttcatgtaaaatctagtccaaagctaatcttgctgaggttggaaaagctgatgagctcactgtcccaggtagttggaggagtttaattagattagctccactgttcctactctaaaaataaccataactcctgccaaactgaaggttaaagagtaacccactggagggtgaggaaaaaagacccaggtgccattttaatttcactaagaaattccagtgacctagatttttcttgtcttaataagaataaagccttaaatttttaaccaattacatgacaaaatattaactaaaaaccaggcagaaagactttactacgctggataagagta

SEQ ID NO: 167392 - DNA, 488 bp, Homo sapiens
ttcctgtatgaaattattttggaactttcccaagtctaattgcagtacaaacaagtatgtgaggctctactgtactatttcatcaaattgttatgagtactttgtgtgttttcaagttcatctctttagtgtccttgacctttataaatatggcatattgtgatactttaagctagaagaaaaatatgacagtagtaaattaacagctttctacccacttattgagtcacttatcacaggccaaacactgccttcagtgctttacatatgttaacctaagtaactgtcaccacgacaacttggtaagatgaatactattattctcgttttatggattttttttttttaagctgggcttaaggttgctgaacatctcacattggggtaagtgacagagttgagattcaagccgggctgggaaagcctagcagggcatggcggctcatacctgtaatcccagcactttggaagccaaggcaggaggatca

SEQ ID NO: 167393 - DNA, 454 bp, Homo sapiens
gacagcactgagatcaccagtgagcagttttagcggcataagcaggggacagagcccaggctaaagtgtctggggcgtgtgcatgcagtcaaaatgctaacaataaatggggacacgctttcaagaagctttaaagtatgtaatatgtaccacataagtattacatatatttatatggataacatgtaatacagaaatatcaaagtatacctgtataacacataacatataatgtgtaatacataaacattatacataaatattaacgcatatatagtaaaaggctgaaatacaggagaaataaagatttaagggttggaagaaatgagatccaaagcacagatggacaaaattagccacggacaggaatttgcacttttaccactgggacaaaaaggaggaatggctacaaatagaggtaataataggagagtaataacaaaagatgagaaaa

SEQ ID NO: 167394 - DNA, 343 bp, Homo sapiens
gattttcttcgttcgataaataaaacatattcattgcacaaaatttagaaatacagataactcccattccgccccccaaaagaaagaaaatagaaattgcctcagtcttattatccagagataccattgttaaaccctctgttcactatgttgcttcaaggactagaaaattataagaaaatactgtaagttgcaaagctctatataaataagcggtatttttattgagtcaacagaattcaaatttgaacctcttcacagccaagaagccctatattatttaacctcattttaaatttcattttgtttacattttttctgaatattaaaataacaatgctga

SEQ ID NO: 167395 - DNA, 337 bp, Homo sapiens
cgatgggaaaaagctgtgcccgccgggaaaagcaagtagctctgagaagattcacgagagatctggacccaaaagggggaaacatgcctggacccacagactgcgtgagagaaagcagctggtgatttatgaagagatcagcgaccctgaggaagatgacaagtaactccataagtgaaccttcggctcaccctccacatccctgcagatgtgctattctgttatgcctcagggatacgacacatgcccatgatgagaagcagaacgtggtgacctttcacgaacgtgggcatggctgcggacccctcgtcatcaggtgtatagcaagtgaaagcaa

SEQ ID NO: 167396 - DNA, 100 bp, Homo sapiens
actaagtcttcgccacttgggcatatgtcacaggtagggtacgtctcagttcagactctggcccctggcaaccacgctggacagcacaggtcaccggtag

SEQ ID NO: 167397 - DNA, 629 bp, Homo sapiens
gtaccctttctcgcccccgactcgtgttgaaatgcgaactgactatgtatttcgagagggagtcttgctctgttgcccagtctgaagttcttttttcattaacctatcatcaacccgtgaaaggttatcatcacctctgtgatcttatttacactgcgacttgatggcagtgaattctctgcctcacctgcattccaagttatctgtctattgcagcgtgactttcaaaggcaactgatgatttaaatcccaaacatattcacttccgtggccagacacttgggggttggcctggaatgcccggatggggcacaggagctaggcagatgggaaagaaactgaggaaggaattcagaaagatgaatctgattttaaaagcccagaccaaccaattcctgtgccaacaagagggtagtgtggcagccctctgaggggtgacaattggttggggacagtacaggaagtcatcagctcaaagttatgcctaaatgcagtgtgtggtttagtccatcacattgaaataaaatagttagctaataacttttcatatgttatgtcttctgtaacattttattcattacaactatgttggcatatcaccagagaaaagatcatatttgctaacttat

SEQ ID NO: 167398 - DNA, 457 bp, Homo sapiens
agtgtgtacatgaggcgccttcactgtccctgcatcaggaatctagctgttggcaccttataatgagaaaacagtctcaaccatgaagttaactctgctggaagatttccaaagggaaagtccctcccgttactcagaggggaaaaaaaaattacctacttggtctggaatccggggatattttatgcagatgtctctaacagaagttaataaagggaagtcagcttgcctctgattattcaaacaggctactgctattaaggattgcacaacttctgggcaaggcagaggtgggtttggctttttaaaaattttttcagcctgtcctcatggaactacatattcttttctaagaacttttcatcctaacctccctactcacatcttctaagtgtctctgctctggtgggaatgtgatggacaacacagagccatctcagaagcctctgtggccacc

SEQ ID NO: 167399 - DNA, 670 bp, Homo sapiens
  misc_feature (592)..(592): n is a, c, g, or t
aaagtatttcgtctctgagccaatggttctcaaatactagtgtgcattagaatcacctggaggccttgttaaacagactgctggatcccactccaggaactgctgattcagtgggctcgggacagggccaagaacttgcatttctgacaagttcctggtgatgctgctgctgcttgtctgggaaccacactttaagaaccactgttcagtcaatgaaactctggaaaaatttatgccattctctttgttttgagtttctctcatcaagctgtattcttatgactggtgcttttttttttttgagacatagtctcgctctgtcgccccgggaggccgaggttgcagtgatctgagatcgtgcactccagcctgggggacagagtgacactccgtctcaaaaaaaaaaaaaaaaaaaaaagaaatgcctgttttgggttcttcatttttttcctataactggaactatattgagcattctatatttatcatcagttctttgttatattagctccagaataacttacgaccatttagagtcctgaacaaactcagtggtttattgtacatactcatttattaagggggaatttgngttcctcttggcttgtggcttggggcaagcgccctgggccagaaacttttcttcggaattcgtttgggggaagggtta

SEQ ID NO: 167400 - DNA, 1387 bp, Homo sapiens
ccatttcacctgcatagatagatgatggagagatatatagatgataataggcagatagacgatagatcgatagatacatagatgatgcatagagagatcatggatagatagctatgtagatagatgatagagagttagttggatgggaggcaggtggggcagcctgtccagaggcgcagacctgtgtgtgtggggaaggggtgatgggagatgcagactcggcagtgcttgttaacagaggtgtgaatgccgcgccttgcttgcctgaagatttccacccaggatcctgacaaaagtcagatgtgcacttcagaaaggccaggcgggctgcagtgaagagaatgactcgagggggtgcgggtgtgggacaggccatcgaggcaaggaggccaaatggaaagctttggtcaggacacaggtggtgatggattcgggggagaaatgggggagggtgacgcaggcagagtggccagggttatcaagtggcatcattcaccacaaaatgcagtccaagaggaagcccagctgtgagggggggacaggtggggcccaggtgtgaggggggataggtggcattcagacatgtcagtacacagagtcaatggcagagacagagccagtgggcagttgcaccatgtggataaggacttgagtgagacctgtctccaaagcaggggatcactcttctaattttttatatggtgtttttcattctattctgactcatttgtaataaaacctcctttgttttttatcatatatatttcaggtgtcaacatgctggtttgatataacatgtacaaagcaaaataataacttacactccagctgtgagtgtaccatctcacagttacctttttgtgcatgtgtgttaagcccacctaaaatgcacttagaaatattcagtatcttcactgtggtcatgctgtactgcagatctctagatgtattcgtctgacatcattccagctttataccctttgacccacatctccccatccccccaaccacctctctctgtttctatggactgtatttgactattttagattccacatattacctctaatcctcaaagctctattagggttttgtgtatttccttccagcattttcctacatacacacaatttgcagaatcagcataattctgtataggtactttatttatttatttattttgagatggagtttcgctcttgttgcccaagctggagtgcagtggcacaatctcggctcaatgcaacctctgcctcctgggttcaagcaattctcctgcctcagcctcccaattagcttggattacaggcacgcgccaccacgcccaggtagttgtgtatttttagtacagacggggtttcaccctattggtcaggctggtctcgaa

SEQ ID NO: 167401 - DNA, 299 bp, Homo sapiens
aaatctactatttaagtttctctgatatataagcacattcttccctttattccaggatgaaaaatggtgtcagatcatgtgttaaataggtgatatcctacaaatgctctgtgatttgtcgtaatcagcatcaaaaatggttgtagggctcactgtgtacctcatgtcgcatattcaaatattattgatgcaggcagtgaagtacttacacataatatttcataacccaaatcccaagaaaagcatttccctgaagcaaaaacatggcaaatataattcgaaatttaggccacaaacct

SEQ ID NO: 167402 - DNA, 337 bp, Homo sapiens
tcactctattgcccaggctggagtacagtggcgctctcttggctcactgcagcctccacctcctggttccagcgattctcatgcctcagcctctcgagtagctgggaacacaggtgtgcactacaaggcctagctcatttttgtatttttagtggagatggggttttgccctgtcagccacgctggtctcgaactcttggcctcaagtgatccgcccacctcagcctcccgaagtgttgggattacaagcgtgaaccaccatgcccagccctttaaattacttttaaaaagatacatttctccacattaattctcttaggttgtattctctaggaag

SEQ ID NO: 167403 - DNA, 551 bp, Homo sapiens
gaggtgctttggggcgtggagaggaaggagccatgcctggggaggatgggaaacagccttatctaaatatgccaaatccaagcagtcaagacacctaggttctaaaatctttataagaacaatctcatttcctttgatgcagaagacacagcccagctgtgatctagtatctgggcattctgatcaaggagcaaaaggtcaggagtcattgcctgatcaccaaacagaacagaagggtggatctcaggacctggagagtggggatagatggtcagaattagagagaatggaccacagaaaatctatttgaaaagcaagccagccatctgtaagcctcttgagagagagtcaaaccacacagttttgaaaacaaattctcagctgcttgagcaggcaggtggatcagcctgggctaactctgggagatctaatcagttgcaggtgcattttgggtgttttaagagcatgttagtcataggggtaaactgtcactttgcacagttgaggttgaggcatagaactagtactttctctttactggagttgctgcc

SEQ ID NO: 167404 - DNA, 364 bp, Homo sapiens
aaaatgaaaccctcaaaccttaactcactggcttctaattcaccacagtcagattgccagggaaaaagaagggagtgaaataattttaattgtgttcttaaaatgaacaaggcaatgaaccaggtgcctcactaatgtcaactcttttcataaatttgccagcccctgggatagataccattagccctattttacaaaaagaaactgaaaaattaaattatctgcccaaggtcacggtcatatagccttacaaatctaggctgtttctgccctatcagagtttattgcagtcaactaacagacagaaatgactctgagtatttaaaacaaagggagtgtaacatagggaattggttacccaggt

SEQ ID NO: 167405 - DNA, 552 bp, Homo sapiens
aaccccaccacacaatctgcttggccaagtccaagtttgtagctccctacacaagagtgtgagactggcaggtatctcttcctgttgtctgtgcctccactgagctgccaagtactagattctagggtttgcatgagcagttttgtgtttgcataggcatttctcaaagccactgcatggcaggtatttgaagaggagccaggcaggtcacactagaaagaagcagctgagagggcatatggggcactgtatagaaaaagatcttgtgtgaagtgtgggcccagggactacactctgttaaaacagcaaaactatgtgcagtaaatggaatcccgcaggcctggctgcttttcttcccagacagctctgcccgcagagcgggcagcgtcaggaattcgttgttatgctttcttccctcactgacctttgctgggtggttgagctgtgctgggatgtttgaagcatttttttttttttttttttttttttttttggctgttggacagaaaagcaagaacaggtgcgtgcctttctgtaagggagcggcggccg

SEQ ID NO: 167406 - DNA, 170 bp, Homo sapiens
ggaatcatttcacattcactagctcagcaaaaactaaaacatatggcaaaaagagaattcttctgtttcactgacaggaacataaacagttataccgactttggagagcaaactgactgtatctagcaaagttggatataccttatgacccagcaaggcccaggcagagg

SEQ ID NO: 167407 - DNA, 403 bp, Homo sapiens
agtgcctgaagaatgtcctcacaggaaactgaagattggtgacagacgggcctgtcagtggctctagtttttactctcatggaagcaaaacccaccaggcacttttttggctaatgggttcaaggcaccaaaatgcatttagaggtgttggccgtggcaagggctgcagtggcgctgccaagttctgcagatgctgtcccaggtccccctggcctctcactgagcagctctcccattcctcagtcctcatgttcagccaggtttcctctcctgctcttatgctgtcgccctgaaggcccagcgctctcacttgcagtgtggtgagactggtttgcaaactccaaaaagccccatgtctgtcttactcccactcttagtttagccagaactgcagggagataga

SEQ ID NO: 167408 - DNA, 388 bp, Homo sapiens
aatgattgtttatattctctcatgtgacctataaagatgattaatagctaccatttattgaacatgtgctgtatgtcaagctgtggattgggcacttcacattatctttaatttgtaaataactctctaagtagggtattatttttcccatttcgtagatgaggaaactgagacccacagagttgacatgttttacccagtggtagtaaagcagagattgacagatctctctgattcctaaatccattgaattttacattaattcactttttttttgttttttaaatactaacaaaatattctgtacttggattctaaaattaccacctacagaggcttttatctgactccatttcactatctacctttcatatgtccctgagttgat

SEQ ID NO: 167409 - DNA, 444 bp, Homo sapiens
tctgaaaaccaaaaatccacaactttgagcaccaacatgatactcaaaggaaatgctcataggagcgtttcgaattttaaattttcaggtttgggatgctcaacccatacatataatgcaaacactccgaaatctaagacaacctaaaatgtgaaacacttctggccccaagcatttcagataagggatattcaaactacatacaaattaattccctcaactctcaaaaaagccaggtgagaacctgggtacctacctggctagaattaaataggttattctatgtaaagtatttagcagtgcttggcatatagaaagtacttaatattatttcccactcaaatttcaagtaatttcacaaatcttttttcttttttttttgttttgagatggagtttcacttttgtcacccaggtaggagtgcaatgacgtgatctcggctca

SEQ ID NO: 167410 - DNA, 494 bp, Homo sapiens
catcacatcacactaccttcccataactagtatattgcagcattgcttatatagttacataggattatacaggcagaaacttattatccatctttaaggaaaagttaagaatatttgccctaaagcatactgtgacttatgaaataaggaacaattgggggttaggttattgggcaaattgttctctcattaaaatatggtttctttaactggatatagaaataagttggggactgctttttttggatctctaatccaaaaatccaaaacactccaaaatttgaaactttattgagggccaacatgatgccacaagtggaaaattccacatctggtataatgtacaaaaacttttccatgcacaaaattatttaaaatattgtgtaaaatatttgtgctatctgtataagatgtatatgaaacacaaatgaattttgacttgggtcccatccccaagatatctcattatgtatatgcaaatatccccaaatctg

SEQ ID NO: 167411 - DNA, 255 bp, Homo sapiens
ttgagtgacaacatgatgctcaaaggaaatgttcattggagcatttcagatttcagagttttggattagatgctcagtcagtaaatatgaagcaagtattttaaggtctgaaaggtttctggtctcaagcatctcggataagggaagctgctcaacctgtattctcatcacttcgcactgctctgtaagatgtgcatagatatctgccaaaacagaagttcaaggttcaagtatgtttggaaaaggtagggtaaa

SEQ ID NO: 167412 - DNA, 231 bp, Homo sapiens
acacgagagaaagagaaagtgtgttatttgcctggataaaacacacataaatcaataaatgaaaatgaataggatggtgtgaggaggtgggacctttgggagatctttaggatatgaagatagagccctcatgaagggattagtgccttagaagaagagacaggagaagcatgtgcactcctgctgtgctctctctctctctgtcttctctctctctctctctctctccct

SEQ ID NO: 167413 - DNA, 428 bp, Homo sapiens
gatgttacggacaaggatgttaccgacaaggatgttacaaatttcccctcccccagtccccgaaaccagccctcccccccatcaaatcaggcacagcctgttgcacaaactcgaaggccttatgacacaatggatgcaggacacatgcccgtgtacacacagtcacagatcctccatctcacacctacaaagaccagcacatttggccaggcgccgtggctcacgcctgaaatcccagcactttaggaggcagaggcaggaggattacttgaagtcaggaggtcgagaccatcctgggcaacatagcaaaaccctttctctcaaaaacacaaaaaaacctagcacatttcacatggactcagacacacacagacacagggaggggggactggctaggagttcctggcaggatgtcaatatctgggctg

SEQ ID NO: 167414 - DNA, 463 bp, Homo sapiens
tgagatactaagaaatagatcatcccggtgactcgtcccatactcatgaacgtcattcttgtgctattcgggcttagataaaaacaggaaatgagtctacctgacgaggtgtaaccatagagggtgaaggaatttatctagagaccacgacacagtagaaaaattagttaatatatgtgtaaaaataacatgatttcagtgttaaatgattgtctgctattaactgtttattgagttaaagtgcattttggagtgagcaggattcagttaagaaaataaatatccaagatgtgttttgtgtgtggtggttgctgatactaagaaatagatcatactgtgactcgtcccatactcatgaaggtcattcttgttcttttcgggcttagataaaaacaggaaatgagtctacctgacaagttgttaccatagagggtgaaggaatttatctagagaccactgagca

SEQ ID NO: 167415 - DNA, 376 bp, Homo sapiens
aaagattgtaatagtctaagatgagaaatgataacacagtagctgctgaaatagacacatcaacaaaaaaaaaattttaagtagagtccatgaaatctgaagcttatataaaaatttggagatgggacagtgggtgaatgagaaagataatttgagaatgactcccaggttcctggcttgaaggactatctgaattatgagagacttttagaaggtatcaaatgaattaaaaagaagaattaaagagcagatatgtgaaggggacgcatgatgagaaatatatgcttgggaatcatcagtattattgtgagtgaagtgaaaggagtagttgatagaacaagtattggggaaacaagagagaactagaaggagtgac

SEQ ID NO: 167416 - DNA, 231 bp, Homo sapiens
  misc_feature (178)..(178): n is a, c, g, or t
aaagattgtaatagtctaagatgagaaatgataacacagtagctgctgaaatagacacatcaacaaaaaaaaaattttaagtagagtccatgaaatctgaagcttatataaaaatttggagatgggacagtgggtgaatgagaaagataatttgactatatgagagacttttagtcgncatcatggagtatgaccacatgtggggtgtgacacgtataacacttcgcttgt

SEQ ID NO: 167417 - DNA, 238 bp, Homo sapiens
acccaccatgggacatggatatggcccctggtgacttgtttaaagaaagacagaaggaacaggaggaattcatgtcatcccaggcatccatcccagccctgctgctgagctgatgagctcgaagggacaatgactgggtttttgacagttcagtacgtgaaagaattcaaatttacagctgttggaattttaaattattctgacccttgagaggaatgtggctaggtggcttgactca

SEQ ID NO: 167418 - DNA, 236 bp, Homo sapiens
actttaagcaaattacttaacctctctgagtgtctgttctcatttctttcattcatttaacaaatatttattagatacctactgtatgcaaggcactatggacacaacagtgttgtgttttttttttgttttttttttcctgagacactggagtgcagtggcatgatcttggctcactgcagccttgacttcctgagctcagatgatcttctcacctcagcctcccaagcagctgg

SEQ ID NO: 167419 - DNA, 346 bp, Homo sapiens
ataaaatattaaaatgatgtatacaagagtcaattaatattgttactgcttcatccaggactttttaggtgaaactggcttttattctttttctttctgcaagtagacagtggtgaagaatacaatgattactagttcattttgttgctgctgccttgatttgttttaaggcaccattagttatacccattgcttttgtaccatcatttcaaatgtaaacacaattgtttcaggataaatgatgagattcgaaaagttattgtacattttgaatgtttcagcattccttgtgtttgttgtcatgcattaaaataaaacacctttgatgactggccggtgctggaaa

SEQ ID NO: 167420 - DNA, 463 bp, Homo sapiens
gcctatagtaatcctcatagtaagtcctgacaaaatattaaagtgctcgatatctttagaaatacccttttggacaaagaccaaggttatcaagaaaaagagggagttgtcataatttgcctccagataattctctacccacagtatgctttatattgttaaacagtaggcagcatccactattttttactgtagtagcagaggaattaaaaccaaataataatatatttactgtaacatattgtgagctattactataatttttcaaaattgttatgagtttgatatctgtcaccctttctttaaaagtatcaggaaataattttatttttaaatcctaagtgtgagatgtaagacagatcttgtagcatttatagttgcctagtagagaaaacaatgagtatttacttatgttcatgaatctgatttttaaattgtgttgttacagggatatacatataac

SEQ ID NO: 167421 - DNA, 281 bp, Homo sapiens
tcctcccaatagagaatctgcaatgtccctctccctttcccatatgtgaatgattcagatcctttttggaaactaaaacaaaggaaaagaaaaagaggaaaaaatggaaagaataaaggaagggagggaaggagggaagaaagaagggagagaggaagggatggagggagggaggcaggcaggaaggaaacaaggaaggaaggaagaaaagaaggaaggaaggaaggaaagaaggaaggaaggaaagaaggaaggaaggaaggaaggaaggaaggaaggaa

SEQ ID NO: 167422 - DNA, 263 bp, Homo sapiens
tttgcttccctacctttagggtgttggggcgggcaacaacaggttactgtttgtccccatacctggttggaggaagtcatcctttctctcatagatctggccacatggcctggccctacatgggtcggtgactagccacttctgtaacttctaggtagttagccacaaggttaagccttgataaactgcccagctatcagtgcagattacgtgtcaccttcttggtgatcaccatttacattgccctgagttcagtttattag

SEQ ID NO: 167423 - DNA, 558 bp, Homo sapiens
ctgctacaacaacaagtttcacctaatttgtcatgatcatttaattaatttaatttatttaatttatttaactggttgcttttaaacctaagttcatggatcacaactaatatacaagctgagattgtcatattactattaattttactttgtatttttcttttaaaccttgtacctattacttgttaaatttctacagaacaaatcttcacagaataatactggcccaacacttttagataatagtaaatgcctacagaatagacaaaaacttaaacttaacacttgattttaggtagatgtagcctgagaaccactctctccaaacccctcttgttgctcaaatgtagctaaaagagtttagacactaactccaattacaccttccaatgtaggaccaaccaacaacgtgagacaggttgatcccagctgcctcacctagggataatcaaaacctaactacaaaatggttaaccagtgatttttttaaaaaatcttgatcaaaaaaggaaatgtgaaagttgtcagaataaaaataaagtcacctgtgttaaaaag

SEQ ID NO: 167424 - DNA, 612 bp, Homo sapiens
tccatcttgctcttaggagcacccttcccactgcggctgtgcaaggaggaagccctgagtctggggtgagaccctcatgcctgtatttaaaaaaagaaagaaaaagaaaaacgatgcctttgatgaatctgatgtttagccttcatcagactagaggcatttattattttattttagttttttatttctgtaggtttttggggaacaggtggtgtttggttacatgagtaagttcttcagtggtgatttgtaagattttgatacacccatcacctgagcagcatacactatacactctacggccataccaccctgaacacgccgggtctcatcagactagaggcttttgaaagacatttaccttccacgactgaagaattttattgatttatttgtttttccgtcttggctgcactggccctgtgctgtggtaaggtatacagcacagaggcccaagccttcgttcctcaccaccccccactttgtgtcctgtcaccgtgtgaattggtgaaatccctccacctcagcaagccatttgccaagtctacctcataggaacaagaatgtaagctttgtgaaagttcagtcgaactgtgaaggtcaaatggtgtc

SEQ ID NO: 167425 - DNA, 341 bp, Homo sapiens
caaggtttccaagtttgttcaatggggaaagaaaaatcttttcaacagatgatgctggaataactggatttccacaagcaaaagagtgaagctggacccctaactctcaccatatacaaaaatttactcaaaatggatcagtgacatatctaaacataagaactcaaaccatcagacttttagaagaaacataggagtgtacttcatgacctttaatttggcaaagggttcttagacaagacaccaaaagcataaataacaaaagataaaacataaattggacttcatcaaaattaaaaatatttgtgcatcaaaggacattatcaaaaaagtaaggcaac

SEQ ID NO: 167426 - DNA, 451 bp, Homo sapiens
cacatagaaagatctgggaccccaagcactcagcttaatgcagttcagaagtctgtctcctaggtggttctgttaccaaaaaaagattcccaggagaaaagcgtgacctgtagtccagtgacttcgactgctgaaggcactagaaagacaatttcagtgtcccttttcccttgtccttggaaatggaaatattttacttagttttaataacactacacaacacttgtaactttggcaacacttgtaacttgtaactgttcaagttacacaacacaacacttgtaactgttcagaatgcacagtaccaaactgaattctaataagcaatcttaacgcaggataggtattattataagcattttacagaagaggaaactgaggttcagagtgatttaagtaacttgcccaaggtcatatagatggcaggtgagagcggcagggagaacgactt

SEQ ID NO: 167427 - DNA, 307 bp, Homo sapiens
aatcctctacaatacaaatttgatcaggtaactaccatgctcaaaacccttccttgagaaaatgtatacacaaggctattcattgcagcacaatctgtaatagcaaaagagtggaaataaccaaaatgtatgttaaaagagaactaattgaatttctaatacatctactcaattgagtcccacaaaactataaagaggaaagtagagtatctctgtgtcctgtcaccgagtgactgctgtgacacagtgcggtgcagacagtatgttcagaatgtcccttttcataaaagaaatgagaattataaat

SEQ ID NO: 167428 - DNA, 392 bp, Homo sapiens
ccatcctggggccctttggggagctgctgacagaggatgacctggtctacctggagaagcagattgcagacctgcagcttcggcgccgctgtcaggagtatgagagtgagctgggccggttggcggctgagctgcaggccctgctgcccgagcccctggtcagcatcacggtcaacagccacttcctgccccgggcgcccggactggaggttgaggaggcctcaatcccagcggctgagcccgcagggtctgcggaggcctcagaggtggcccccggggtgcagcccctgcccttctggtgcagccacatctcccgcctggtacgcagcctgtccctgctgctgaagggcgtgcatgggctagtacagggggatgagaagccatccacccgg

SEQ ID NO: 167429 - DNA, 138 bp, Homo sapiens
gggatagagggaggtaccaagaggggtgcagccacctcaagcctgtctctgggtctcaaggtcttccctttggggtgtgttttctatccatctctgttcccctgtcccttaatggttactggctgtgtccttaatgtc

SEQ ID NO: 167430 - DNA, 309 bp, Homo sapiens
ggttaaaactacaaagctatggcaatttgagcacaggtattgataacagaaacaatctgttaggcagagagaccatgattaacatttgtaaccaattagaaatagctaaaaagacaatcaatgacaggatcaatactagtatcgaatgggaatgatataagggttagagcaaagacattgtttaagtgggtaagaaagaagcaggaagcacctcttctattcagaacttcttatttctctctcccgtttgagggtggagagaattaggggaatggagaacaggggtaaccaaggtatctcccttatctc

SEQ ID NO: 167431 - DNA, 352 bp, Homo sapiens
acccaagtacctggaaccacaggcacataccaccatgctggttaaattctgtaattttttttttggtagagatgggatttcaccatgttgcctaggctggtcttgagctcctgggctcaagtgatctgcccgcctcagtctcccaaagtgctgagattacaggcaagagccatggcaactggccaatgattcctatttttgtggacactgttgatcccttaatttatggactgtatagaaaagcatgcttcaaaatttatagatgacccaaagctagaagagatagcaatataatgctctagctgcatgctccaaagcaagaaaaatatcagctgaatagatgagggtataa

SEQ ID NO: 167432 - DNA, 315 bp, Homo sapiens
ggcacgttgacaagacaactcagaggctgccactcacctgctgtgcacctgtttcctaacaggccatggactgtactggtttgtgggggtgggtgacccctgctctaaagaatgtagtcccaaatatgtataagatagggtatgactggatttcagatatttcattaaaagtaacttttccatttggttcaagactaaaaaaccaaaatggattgctaatggttctcctgggcagccttttctgcatcccctctgcttctcaatcccatcttccctttggcattcccagcttggggcagtgggaagagattcttc

SEQ ID NO: 167433 - DNA, 116 bp, Homo sapiens
gtatagtgttatgagctacagaggaaggacacaggcagaccaaatagccttgagtcacacattcctccaggaaattatctttgggccctatgatttactgagcaggtgctcagtaa

SEQ ID NO: 167434 - DNA, 379 bp, Homo sapiens
acttttagggaaaaggggcaaatctctagtaaacgagttgacttcaggactcttcaaaaaaagagtctgtttattcagcaaaacccaagggcccaaaacaggtccccacccaagtagtcttacctgtaaggtcaccaagctggctgtggtggccaggtcaatcttcccaaatttgatgagatttccataagggttaaaaggaagagtgaacggtttcctttggcttaggggcttttctctaaaattccttgtcttcttcccatctggacttttccctctgaactattagcttactgccaaccaccgtctccacagaaatcacaagagtttaggcaaatgaaaagcaagttctgcccagccttttacatctaagcacaac

SEQ ID NO: 167435 - DNA, 214 bp, Homo sapiens
accacccctgcagagttggaagcatgtggttcccagaatctgctacgaggaaaattggggcttgaaagaagagatctttgagcaggggtggagggtgaagcttgagtcactctggtgacatccccgacgtatcatggagggtaaatatgacccagatcctgcctttgtggggaacaattccttattcctcagcaccttcagcattcctgctcag

SEQ ID NO: 167436 - DNA, 337 bp, Homo sapiens
gtctgcctctctctctgggcaacacctttgggaatactgctgtgtatggtccctggggaatctcacagcagctgggaagaagttctctgcctccgtggggccgtgctacctgggcagatgctgaggagtggtctctgcagggccgtccagtgcagactggttccacgaaggggctaagagcccagatgagacattatgcctctgggcgtctctcacattacccaggtgtttgggggcaagccaaaacataaatcaggaaggttagtcagaccaaacagtctccctgagccggagctggagagtgttagtttgccatttcactcatcccgtactggag

SEQ ID NO: 167437 - DNA, 370 bp, Homo sapiens
tgaagggaagagttccaaagaatctgtgaagatattttgaaatcaccacagagctaatattgtttccttatggtaatgcagagagcaaagctttgtaaaaggacttcctagtggccgggcgtggtggctcatgcctgtaatcccagcactttgggaggccgaggtgggcggatcacctgagttcaggagtttgagaccagcctggccaaaatggtgaagccctgtctccactaaaaatacaaaaattagccgtgcgtggtggcaggcacctgtaatcccagctactcaggaggctgagacaggagaattgcttgaaccctggaggcaaaggttgcagtgagctgagatagtgccactgcactccagcctg

SEQ ID NO: 167438 - DNA, 335 bp, Homo sapiens
cagcctcagcccactgtgccctgggcatgtgagggcttctgaaggccaagcctgagcatctcagggccgaccccagatgtctggggcagtggtgccctcaatgtctgtcctgccctgtgctggctcatggccttacctgaccctaggtcaggtcttcaggtccccagcagaccccagcatttcttcattaattcaacaaacatttattgagcaactatgatgtgcagccttctttctggaggctgacggcacagcagagatcaaaacaaggtccttgactttttgcaggggcagcctggcaatcaatggaaccaacgaggaagcaaaaaaaaaaa

SEQ ID NO: 167439 - DNA, 362 bp, Homo sapiens
gtcaaaaaacaacagatgttggcgtagttgcagagaaaagggaacccttttacaaggtggtgggaatgtaaattagtacaacctctatgaaaaacagtgtggagatttctcaaagaactaaaaatagaactaccatttgaactagcaatcccaccatgggggtatctagtcacaggaaaagaaatcattatatcagaaagacacctgcatttatatcttttttgcggcattagttacactaataaaatcatagaattaactaagatgcccatcagtggttgactggattaaacaatgtggtatatatacaccatgaaatactaatttcataataaaattgaatgaaataatgtcttttgcag

SEQ ID NO: 167440 - DNA, 469 bp, Homo sapiens
gaaaaaggaagataaaactacaatagctcatttagcaaacaagtttttaagaagtccctaacctttattttggttgactggttaatcattaatcacaagctatctattaaattcctactctattctagaaactatactggcatgaactgcatctgtttctgaagtccaaataaatattaacatttatacagtttaaagtctgtgaataacctgctactatttccaaatgaacatgatgaacagaccatttctccagagtcctaatttgtgtcaatatcaacactatactctgaggcatacaacttcaatttatgaaagtatctttgaaaactgcattagcccccacacatccacataagttgacaatgtcttgtcggttttacttccatagcatctctcacatcatccccccatgcttaaaaaattctttctaccacattctattttcctctaggttagatagttccaa

SEQ ID NO: 167441 - DNA, 665 bp, Homo sapiens
tcagaggttcccccttattccggtgtcctcatgaagcttatctttttgtgtgatgacacaaataataaataccaaatttcagtctatggaagatgatgagttacatggagaaaactaaaggtaagaggaatggcgagagaggagcaggggagggtgactcattagtgcagtcagagaaggcctcactgaaaaggaggcatctgggcagggacctacaggaagtgaggcagtgagccagggaggaagagccagtgtaaaactccccaagacagaagcatgcttggcacagtcaatggcaaggcaagaggctggcgtggcaggagcaaggtgagtgaggggaactggtgggggtggggtggagaggcagtggagtcagatcatgctggacctttgtggccatcagagacttctgaatagaggagtcagatgattatgtctgaaaaggttcactctaggtgtgatgagaacagagtcagggaacacaggtagacacagggcctccagttaaggagtaagtaataaatgtggtggtaacagcattggtgtggtgagatttgggtgtatttaaaggtatcaaccagtaggatctgctgatgaattcaatatggagtgtgtaagaaataggaagtaaaaaaatgactctgaggtttctgacctgatgacag

SEQ ID NO: 167442 - DNA, 452 bp, Homo sapiens
cccccaaaggatataatgtattatctatcaaccactctctcagaataacttgtttgttttatcatgtactgtgataggttagtcatgaatttgcagttaatgaagggctatttatttcatgcctaccctcacaggttttctttcttttttcttttttgtgacggagtctcactctttcaccaggctggagtgcagtggcacgatctcagctcactgcaatctccacctccccagttcaagtgattctcctgcctcagcctcctgagtagctgggactgcaagtatgaaccaccatgactggctaatggtggttttgtttttttgtttgtttgtttgtttttttgtttttttggcagcaggtcggtgggtgggcagtgtttgtagagacagggtctcacattgtgcccaggctagtctcaaactcctgatgtgaagcaatcctctccgctcag

SEQ ID NO: 167443 - DNA, 481 bp, Homo sapiens
gcctccccatcgaatccatttgcaaatcatgtcagttattccttaagaaattatccaggttctaattctgatttcctccacttctactgtctgggtccacatcaccatgaccatctctcacctggtctcctttctgctgccctcgaccactctctggtctaattagagcaactagagatccatttaaaatacaagtcactttaaatcctccaatggttttccactccactaaactctatcttgacccacagaccctgtatcattacacacacacacccccctctgacctcatgtatcactctcacactcactctgttccagttgttcaaagacttctctgatgttccctgaacatgctaagcaggccccagtctcagtgtctttgcatttgctcctgcctctgcttggatagctcctgtctctgattttataatcccttgctcccttactaaatctgcccaaatgtgatcttctcagtggg

SEQ ID NO: 167444 - DNA, 321 bp, Homo sapiens
atcttgctgttgtccaggctggtctcgaactcctgggctcagcaatcctcttgccttggcctctcaaaagtgctgggattacagatgtagtcacggcatccagcagcataccttactttacaaagcactctacagatccattatttcactggtttcaagtgcaagtgaaaaaagttgcataaagacttgcatcggccaggcacagtggctcatgcctgtaattctagcactttgggaggccaaggtaggcagattgcttaagcttaggggctcaagaccagccttggcaacatagtgagacccccgtatctaccaaaaaaa

SEQ ID NO: 167445 - DNA, 390 bp, Homo sapiens
tgcataggtagcatcagagcatcctgcactgagcccgactctgccactctgtgctatatgcccggttatgtcatgagacctctctggtctcagcaggttcatctgtgaaatggggctgccaggaggttctgatgagacagtgtgtgtgtagcttccaaaaagtggtagctatcagtgttgctcttactacaaatgcagagtccctggcttcagagtgttgaacaggaacccccactgcatgggccaagtgctttgctttgtatctggcaggatgctatggtgagggctgtgctgccagcagtgtccttggagctggagagtgaacccaaaggcctcagcctcagaggatgcacctagctttgggcagggggggcagttggcatggttctc

SEQ ID NO: 167446 - DNA, 292 bp, Homo sapiens
atcagattatttacaaataataaaatttgctaccactgcagatactcaaacgacagtttcaggggctgttatacagtctgttcagtttgcttcaagttacactgggaggatgtgttcacttatttcaaactatgtaactggagatattcaggctatagaaagttagctaatatagaaaacatactgctaaaacaatgctctaatggtacatccacaattttctgaagctagaatgaagatagataattatgtattattggcagggcacggtggctcacgcctgtaatcccag

SEQ ID NO: 167447 - DNA, 409 bp, Homo sapiens
tggtgacagagctagactccgtctcaaaaaaagaaaaaaaaagaaaaaaagggggcagagtctaaaaggattttggacatgaagcttgcatactacgctcctgcagagtcgggacacattaccttcttggcatagatgtataacaatatgcatgaagtatagtagccccctccacccacagtttcacattctgtggtttcagttactagtaggcaactgtggtttgaaaatattaagtggaagattccagaaataaacaattcataagttttaaaatgcatgctgttctgagaaacatgatgaaatctcactctgtcccattctaccttacccggaacgtgaattatccatttgtccagcgtctccatactgtatacaagacccacctgttagtcagttagtagccgtt

SEQ ID NO: 167448 - DNA, 277 bp, Homo sapiens
tgacccaacgtctcccatcttattagtggaaggaccaagactggacccacaactatgctcctgttttgagtcaccatgctgccctcaagatcagatctcaaaacaagcagacatggggggctcagaaagtccccagcctagaactttcctgtcacccaacgacactaagggctaagctggctgcttattattctggattcacactagaatgaccttggggtgtgtttcacacatgccaatgtctgcagtttcacccccagctaactgactatggatc

SEQ ID NO: 167449 - DNA, 433 bp, Homo sapiens
ccagtatctgttcttatttcttatccttagtagtcagaagtagcaaattaggatggagaatgatcataatagcaaatatgtgttacatgcttcctatgtgccagaaactgctaagtgttttatatgtgttgtttccttagaggcaagtatattaatagcagccagaagtgacacctgatggcaaggggagaaaacactgttaagaccagaacagtctgaacctttgtatgaggcaagcagatctacctactcagcccaatgtctgtccctgtattccagcactgcatacatgaggacattaataatcaagaaaaggttaaattacatttctcccttgttgttttatgtatagtacattgcagcattttaagaacaaatatgtagatatatgttcaacttctctcttcccccagctaaggacgttaattatagc

SEQ ID NO: 167450 - DNA, 380 bp, Homo sapiens
ttcaaaatcttcagtcaatttcatctttgtcaactaaagaagattataaagagacacagaagatccaaaagaggttccacaaatattatttgctaaagttttaagttttaaagtgtgggtccttttattctcttcaaaagttggcaaaatctttcctttagcttatttttcctattcttaataatttagtcagcaccaggcatggtggctcacatctgtaatcctagcactttaggaggccaaggtgggaagattgcttgagcccaggagtttaagaccagctaggcaacatagtgagaatccatctctacaaaaaataaaaagttagctgggcatggtggcatgcacctgtagtcccagctacttggaggctgaggtga

SEQ ID NO: 167451 - DNA, 348 bp, Homo sapiens
aaacattcttcacagcctctctcccagtttgccttcctttcaattcttctgttcctttttgtcttttcatctcatgatatttggcctcatagagttaggattgagtaagagggaaatggacagatatgtgtgtgcctctgtgtgtgtgtgtgtgtgtgtgtgtgtgtgtgtgtgtgtgtgtgtgtgtgtgagacagagagagaaataggaagaaaaataacataattatatgtactttccactcctaacttcgatgcttccttcacaccaacacaatcattctaatcatacaaactaaacttttttggagagactttctcccatttttaaatttattttttaaatttt

SEQ ID NO: 167452 - DNA, 412 bp, Homo sapiens
cgccaccggccccgctgcgggcctctaggggactgagacggtctcttgttcgcctggacggcgccggggagcggaggatctgcgctccgggtctccaggatgtgcccgtctgagatggggacgctgtggcaccactggtcgccggtactcatcagcctggccgccctgttttccaaagtgacggaaggtcgagggatccttgagagcatccagaggttttccttgctgcccacctacctccccgtgacctaccacatcaaaacgcggacgtctccttcttcgtgaaggaggccaaaccaggatatcatgaggaactccagcctgcagtcccgggtggagtcatttctgatttacaaatccaggaggctgcctgtcctcaatgccagctacgggcctttctccatcgagcaag

SEQ ID NO: 167453 - DNA, 207 bp, Homo sapiens
gataaaagtaccttctctggggcagacataggcaatggctggtgctctagtacgtgatgaccgctgtcacaggtaatagtatcttaagccacaaatacccatttgcatagtattacccagtttaaaaaaatccttccatgtgtgtattttcattatctctataaccatgatgttttgcctttttcttttaagtaatctacaaaaagc

SEQ ID NO: 167454 - DNA, 188 bp, Homo sapiens
ggaagaaacaatagactaatttttaaaatccgtggagatttgaagaatacaaataggacttccagaaataaaaaatagaataactgaaactgaagatcttcagcaattggcacacatttgtgtaagttatttttatgagcaacattaagatagcaattctcataaagatatatcaaagaaagtatttt

SEQ ID NO: 167455 - DNA, 298 bp, Homo sapiens
aatgagctcctattacattccagacactggatataaggcgatgaacaagatagacaaactaactgggtttatcaccctacagtagaggtgtgtgtgtgtatgtgtatgtatatacatatcttctagattacacctcctgaaatcggattcacttatctttcacataccctagccagagtaagtactcaaaagccattctttgggctgggcacagtggctcatgcctgtaatcccagcactttgagagggcaaggcgagaagatcacctgaggtcaggagtttaagaccagcctggcca

SEQ ID NO: 167456 - DNA, 425 bp, Homo sapiens
gatgcagtatgatcatatgatgagcttcttttctacgtaactttatattgctgttgtaaccttggttttaagaaaagttaaagctctctctttcctgattattattagatttttgtgttcatgaatgttttgaaaaattaataactaagacactgaattgagatgttttaaacaaattttattaaatgaaatatttacagtccatccaaatggatatttgtaattaaaaaaaaatgcaacatttaaggaacctcaacaagtcttcaaaaaatttagtttgggtttgggctgaatatattactggatggcttttggcttaaaaattgctgtatgcagaagttggggagggaggctgaacaaaaacatcataggcacatacctagattatttaatgaaaagaagaatttctcctccgctaaaaaaaa

SEQ ID NO: 167457 - DNA, 343 bp, Homo sapiens
agatcacctgaggtcaggagttcaagaccagcctgttcaacattgtgaaaccctgtctctactaaaaatacaaaaattagctgggtgtggtggaacgtgcctgtaatcccagctactcaggaggctgaggcatgagaatcacttgaacccaggaggcagaggttgcagtgagttgagattgtgcaactgcaccccagcctgggtgacagagcgagaccctgtctccaaaaaaaaccaaaaaaataaaatgcaaagattgtcagactgaataaaaaaatgaagttcaactatatgttgtttacaagagatacatctgacatatgtttacataaatattgaaagt

SEQ ID NO: 167458 - DNA, 233 bp, Homo sapiens
accttgcgtctgggaattctactcacagcatggtcactggttgggcaaactgcccctctggtctcacagacattcctcccttacaaggcagatccccaggggaaaggtggagctcaagctacctgctgtcatttacctttgggcgacccgtccgtatcagtgacagctggagaagggccatgtggttgcaactactgaatgtcccttcagggaggccaccataacgactaccc

SEQ ID NO: 167459 - DNA, 682 bp, Homo sapiens
attcccccatatctaattttatcctcaataacttatcaggtaccatcaattttatctcctgtataggtctcaaatctacctgcttctctctatcattctcccacctccctatttcactactatataactcactaattttctcacaggtctatcctgaccattctcccatctgtgttctccatagtgaagccagaatgatctttttagaatgagaatttttccccctccctgcctggtctcttctacaccacttaaagccacctcagtgatttttccattgctgttatattgaggtctatgagcctaaatatgttagcaagccctgcccaccctcttgtcttaaacctcccctctcttcctgtatctttgccctccagacacattgggcttattttgattttggaatgcttcttacctactccccctatcccccagtctttgcctaattaatgactaattattctttaagtcctaggtcaggcatctgtcactcagggaagtctctgacatcccagagtactccatgccacccctttattttaatcaacattaagtaaactgtgcttctttcttcagagaattatctcagtttatagccatgtagtcataattgcattcctttgattaatgtcagtcttctccccaaactggaaattccatgagagcaggcatttgttatttt

SEQ ID NO: 167460 - DNA, 139 bp, Homo sapiens
tttttgtttttgcttatttttttttaattatgccgtgtgttggcacacttcatgaaaagcacctatttctggccaggcacagtggctcacgcctgtaatcccagcactttgggaggccgaggtgggtggatcacctgag

SEQ ID NO: 167461 - DNA, 398 bp, Homo sapiens
ttgagattattcagctagccccagcagagagtaggggcctatataaaaactgcattccaaacgtattgctaggattcaaagaaaagtctgtccaacttggggacttcccagtttagctgagacagagataaacaatgttgcagaatccttatgcagccatcaacacagaagaactggtgaagaaaggagaaagtggccagtctggaataggatcagtgggaagggcatcccagaagactgctagaagagggaaaagaaagactaacatgctagggtaaggattccagggaacagcagaaggaagaaaaaggtgaacaggaaatagatctactttctcaacaatttcactgcctccctattttactctctccaattttttttttttttttttttggaaa

SEQ ID NO: 167462 - DNA, 450 bp, Homo sapiens
ggaagtatcccatttggacccagcagaacggccggaggctcggggtcatccctagggccggggggaaaggagttctgatgtctcccccaccggcactgccccttcattcaaggcatcctggggagcagggcctggggcaccacctggtaagaggccttcagcaggcaggtggctcaggcccagcggggtttgccatgggctcccagcacctctgccctgctcaagagtggtgagatgcctggtgtcatggcagtctcctgaagaggcacagagatgggcacctgtggccacacactttccacttagctcctctgggctgttctcctgagcctaaacatatgcttggggagaggaaccacgtccccaccccatcccaaccagaaccacagcctgagcactggagtgggaagagggaaatctgggctccaaaagccctcatggcactgggat

SEQ ID NO: 167463 - DNA, 537 bp, Homo sapiens
tgacctcctgggtctagcgcccacccggggcaggtcctccagctgtggccactcagccaatatctgcacaggtggcggttgcccggtcaagggcgggctcacaatctgcggggcggggagagggaaggagccagggagaaaagggagagaaagagggggcagtgtggcagaaaggaagaggaaggggcaagtgtcagagtcggcgagatgaggagggagggtgtaggagaaaggaaaatagaaagtgggtgagaccgtgggagagggagactgggggagaaaatgtgggcgtgtgcgcgctgagagagagagagagagagagagacttggagagggaaggaagggaaggagcgttgagagcaaggaggagcgagttgggggcggagacgaggaagtgggtgcgaggcgcggggcgcaggccgtgcgcgcgccgcccgctgcatccctgcccggagcgcagccggcgcgggcgcgggaccgaggcgaaccgggtgcggagccaatacccgcggcagcagcaccaggtaacgcggccgc

SEQ ID NO: 167464 - DNA, 281 bp, Homo sapiens
tctccaggcctgagaccctcaggggtgtggctcacccctccctatttttaagtacctatactagtatttacttatcattttctgtaaaccaacttgcttttatttactaaaatatattcatttatttttacagctttattgagatataattggcatacattgacagtgtaatgtgattatttttaaagaaaacgtaatattatcctggatatggggagcagagccacttgtcataaattaaaggtaactgtaaaattaaattccatgaaaacaaaacaaca

SEQ ID NO: 167465 - DNA, 329 bp, Homo sapiens
cttccagcaaaattaagaagtaaacatttagaaatgtacagtaccttgctgttaagtcttcgcataagtataccaatcaaacataaaggccaccttaaactttcatttgaaatgaaagacaatttttaagaggttaagggctagtaatttgttaaagtcctgaagttaaattagctcaagtaaatataaagactttcctttaattaaagccttttaaatgaacactttaaagcatgattatgaagctccctcaacttacaatgtgctatttgcaaccttagatgctatcattctggcttttctaccttttagcaacaataagcacaccc

SEQ ID NO: 167466 - DNA, 594 bp, Homo sapiens
cctcagctgcacaaaaggtatctgcaggaatgactgtggtttttcttaactaacctgagtatgatgattacaacaagcaaatttccaaacactcttaaattcaaactgttaaaattcttaagaattcttacattcctgagaaaattatttgcttgttatgactaacagcttatctgaggactcttctaaaaaatcattccaacatattcatttagcataatgtatttaatatggtaatttggcaaagccaagattcaagtcacaacactaaaaagtaaattatttatgaaaccccacctgaaaaatctaaattaatgtaagtgaaggtggagatattatatgatcaattaagttggccacaaaaccacagcttactgatgcttttcctcttatgtaaaaatcacaaataaccaatcttttaaaaactacatatagaccaggaacggcggctcatgcctgtaatcccagcactttaagaggccaaggcaggtggatcacctgaggcaggagaatcgcttgaacacaggaggtggaggtttcagtgagccaagatcccaagatcacgccactgcactccagcctgggcgacagagc

SEQ ID NO: 167467 - DNA, 274 bp, Homo sapiens
atagatatgagaaacccaatggaaagaattaatactgaacttctttttaaggcgataaacaaaatcaaccaatccgtatctagactaactagaaaaaggactattccaacaaataagatcagaaatgaaataggagaaattacaacttttaactctaaaatacaaaggattacaattgttcatataatgaacatttgtatgccaacaatttggataacatggaagaaataaaaacatttccacaaacatacaacttaccaagactgaatcaaga

SEQ ID NO: 167468 - DNA, 404 bp, Homo sapiens
atgatttgcaaatattttctccccttctctgggttgtcttttcattctgttcattgtttcatttgatgcactgaagtttataagtttgagtggtcctgttactgtttttgtttttttgcctacttttaaattgaggttttttgtttgtttgtttgtttgtttgtttggtaagctgagctttaagagttctttgtatattttgaatacaagttctttatcagataggtgttttgcaactgattgtggcatataattccttatacacattgctggatttgactgctaatattttgttgaggatttttacaactatattatatctaatttcttatttccttttgggattataataagttttttaataaataaacatttttaaatattgggatctcaaatccaagcaa

SEQ ID NO: 167469 - DNA, 405 bp, Homo sapiens
gggccattgtatttcttactgtttgggtggtcacgatcacaaaatttttgaaagaacactgacctagaagttaacaaaaagagccatggagttaaaaagttaaaaccattcttaaagtggaattggcaagtgtgaaaactggcgactgtgtattgcttttgggaaaaggagatagaaaataaattaggagtgtttaaaaatttgggaccattaaatagtgctccagggttagagaggtcgtctagggactctctttgtccagccagctgtggctcatcctaaatatggcttaaatatcacttcctcagacccaccttgtcgcttctctcctctgtcacctttttttttttaatagaacttatcacaatgtgtaactatacatttgtttgtgtgtttctctaatgt

SEQ ID NO: 167470 - DNA, 415 bp, Homo sapiens
ccacatctcctccatccccaccccaggcaatcatcattctactctctgcttctatagttttgtgctgacttattttacttagcataatgtcctccaggttcattgatgttgttgcaaataacaagagttgcttcttttgaagggctgaatagcattccattgtgtaaatataccacattttctatatttattcacctgttaattaactcttagtttgattccataccttaggagtaattgtgaggaatccacttcccctttttttcatttgcttttacctctttttatttttatttctagaagcattttaatttaatactataacttatgattgttacatagatcatctgagcttgatttgggtcatgagctatgagcccagatttacatccttggagctgcgtctgctgaggag

SEQ ID NO: 167471 - DNA, 577 bp, Homo sapiens
ggaacaagactgaaggaagggtgatccactgcgatgctatggcaacagccctgggaagaaactgcgttgccccagatcggggcagatgactgtaggcaaagagcaggtgaatttgagagaaattaagaaggcaaaattaacatacctccatgataaatgaatgataggctttatggaaaaatatcagagccaagcagagtggagccagccactcaggaggctaaggcagaaggatcacttgaggccaggagttcaaggctagcctgagcagtacagcgagatcccgtctcttaaaaataaaataatggtgcagtggttcatgcatgtagttccagctattcaggaggctgaggtgagaggatcacttgagcctgagtttgaagctacagtgagttatgatcacactactatgctacaaattccatcctgggtgacaaagcaagactccatctcttattaaaaaaagaaaaataggctgggtgcagtggctcacgcctgtaatgccagcactttgggaggccgaggagggtggatcacgaggtcaggagactgaaacatggtgaaatgctgtctctac

SEQ ID NO: 167472 - DNA, 358 bp, Homo sapiens
aaaaatgacaaggtccctgaaggagtattatcacaaagtgtaatggattctgttttgcttttgtttttgctcatctgacagattacaacatcactctggccatggaggagaaaatactggggttttctttccttgatatgatcaacatcgtcctagttaattagtactaaatttacttaggagggaggaaggctgtccaaggaataaagaaaaaaaaatcaaaggtttgttttatgggggaaagatggttatacacatccaaaagagctggcaatgtggcctgtgacacttcaaataaaaccagcaccgcttactgaccctccgtgataccgacttgcctcaaatcgcctgtgtaagg

SEQ ID NO: 167473 - DNA, 332 bp, Homo sapiens
cattctatgtctggtgattcccaaatctgtatctacagtctagatctctcagtcaactccagcctccaactgacttaccattccctcatagccatctaacaggtacctagaacttaacatgcctgaacctgaactcttgacaccccatcctgaccacaccccagcacgttccctaccccagtaacggtaccaccattcacctgccaggccacaaatcttcagagttattattgactcttctcttacaaattcccaatccaattcatgagcaaatcctatcagctctaccttcaaaatgagtctagaattcaacccttcctatcccttccacc

SEQ ID NO: 167474 - DNA, 417 bp, Homo sapiens
gaggagaagaaggagaagaaagaaggaaagagagagagagagtaagaacataactaaataaaaataagggaagaccttcatggatggataataggaaaccaggacctagctagggaagaggccttgaggcagtggaaaagggagaaaggcctagaagagccagggaatctttggtgccaaagccagaaggctttgcttcttgttgagaagcctagagctttttcttctcactggggtttttatgggaagtttaagcatgctagagctgggaaggctcagctgtacccctccctcctctctcacctggctgctggtttagacaggactgtcatgtttggaatttcacacctcttgaatctgtagactggtgtctttcatgtgctttggaaaactcagccattatctcttcaaatacgt

SEQ ID NO: 167475 - DNA, 351 bp, Homo sapiens
agcaatggcccacactgacacacaaaaatacaactgagttcaaaactgcaaacattactgagtatccaaaaccttcagagcaataccaaattgtctaacataggcatgttttgaacctcagaaagagaagaggaagagggcagaacaaaagaaatatttgaataaataatagccaataaatttccaaaatgacagacaccaaaccacagattcagaagatcaggcagggcgcagtggctcacacctgtaatcccagatctttgggaggcccaggcgggcaaatcacctgaggtctggagaaacaccatctctactaaaaatataaaaattagccgggctgtggtggcacat

SEQ ID NO: 167476 - DNA, 628 bp, Homo sapiens
gcatctcactgataacacctcaacccttaatgactaatggtggaattaagttcaggaatggattcattgccagcagcttatttcctttctagactcttctgccaggaagttcttcaaacgctcagtgtgagctgtgatctgagtgaaatactaagtgtgataaccttgtcactggttaatcttggtgcttggaacggtcagtctatttggagagtgtcctttgtggcagtggaaatagtaattacagtttctgacttaagtggccttggtagagttttccatccttttctttcctcaggagtttcttttttaagcaaaattcatcttatttgtgtttaccatgtcaagttagagtggggcataatatatagatgtatttattgtggcctttttttatataaggactagcccttggaaatcattgtcctgtgggccccactgtgcaataatcctactggataggttttagataattctttcctggcaaactgctcttttgggtacctagcaggaatctgaagtcttggttttattgaaaagaattttgagattcataatttctgattctagattatagtttgtaacatgtttgaaacagaagcttcgaaagagtgatttctcaacttag

SEQ ID NO: 167477 - DNA, 477 bp, Homo sapiens
cctatggcaaatcacatgtaaaagtgtttaagatattccctttaatatcagaaaagtggcaagaatgccttcttttatcttttcaatgctgtaatgcattaaagggcttaggcagtgcaataagaagaaaaaagaaataaaagagagattggaaagcaataatcaaagctgtcattatttgaggcagatagataattgaaagtacctctgattggttgcagcagacaatcagatgtttgcatagagtaagtttgtaacttcagcctctggttgctttccaaaacaattagactgattgccggccaccacttcatttacatggggtgaacaccaagtggccaatgggaaacctctaggggatatttggaccccggaagatactgtaaccgaggcccttgagctgctgctctggcccactcccaccctgtggcatgtactttcattttcaataaatttctacttttgctgcttcagtct

SEQ ID NO: 167478 - DNA, 296 bp, Homo sapiens
ggaggcagttactattccacagaggaggaaacctggacctactgtgtagtgctagtgtgaagattactcaaggaaaggcatgtgacgaactcagcacagtacctgggatagaataaatgctcaataaatattagtcactgttattatgatcatcattattatctaaaattaacaatagttctagctcttcctctcaacttgctataggatcttaagaatgtcgcttctcacctcccagcctcactgttccagtccatcaaatgagaggtttgatgagatgatctctaaagtctcct

SEQ ID NO: 167479 - DNA, 249 bp, Homo sapiens
cctgtcctccttacccaggacatggcctcgggagccatggctccggggtggctggaggggagtgagtgggtgatcagcaggtctcagcagctccttggctcctatactcctagaggagctggtgataccgtgggatgccctgccttcctgcagagacatgctgggccctggatcgagacaggtcccagacagggtatgtgtcatggtggatttgatgccagatcctttgagagccaggagaggaccgat

SEQ ID NO: 167480 - DNA, 437 bp, Homo sapiens
attcgaatccattcgatgatgagtccatccatttcaatttcatgataattccattcgtttcctttcgatggcgtttccattcgattccattcgatgttgattccatttgtttccattggatgatgattccgttcgtgtccattcgatgatgatcacattggatttcattccataattctattcgattccattcgatgatgattccattcgtttccatccggtgacgattccattcgattccgttcaatgtttattccactcgagtccattcgactattccattcgattccatttgatgatgattgcattcgagtccatggattattccattctatttcattagatgattccattcgagtccattcgatgattctcttcgattccattcgataattccggtcgacgcggccgcgaatttagtagtagtaggcggccgc

SEQ ID NO: 167481 - DNA, 388 bp, Homo sapiens
ctttgacatgcggcaggtctcaggctggcagcagaagccaggaatagtaatgtgaggtagcaaagaggcagaggttaggaaacggttctcaactcttaaaatgcacagcctgacattaagcaatctgggaaaattacactgagcatgtgggctcagctagtcctgagattctaccctactcatatgtagccaggcacgaaattgtagtccactgcaagtccaccctctcttagtcttccttgcacctccgactctcacgaatgcacccgccttgacgagtctgctctccaaatgccctgcaagtcttcccttcccattgccctcgagcgtcattcaatctcaattttgcttttgtttaacaggatatcctgcctccagatgcatgaca

SEQ ID NO: 167482 - DNA, 129 bp, Homo sapiens
gactcacacaattcgtttcacgcaaccaatgttttgtgaatactcactatatgcccggtactgtggcagttatccaatattctacaacataaaataaatacctcattccaaatatcccttatcatccgg

SEQ ID NO: 167483 - DNA, 501 bp, Homo sapiens
gacacctagtaatggtaatgatacctgtcttaaaatattaaaaactggccaggagcagtggctttcacctgtaatcccagcactttgggaggtcaaggtgggaggtctgcttgaacctaggagtttataactagcttgggcaacatagtgagaccccatctctactatttacgtataactggtttgagattcttgtaatttttcatataaccaaaatattttctattatgtggttcttttttgtctttagggtttgaatcataatgctgagaagtggcaaagtttttaaattttcaagtttatcaatctgtacaataatggaatttaaagttgaagttttaacctctcatttaacaaaatatgaagatagagttatatcttcatcctttctgaacatcccaaacaaacactttctttgactccataaaaagatcttgattgattaatatgtttttcttatctttcagggaaaaagccaaataaaccttaataagaataata

SEQ ID NO: 167484 - DNA, 361 bp, Homo sapiens
ttccagctttggccactcggagctctttcaggttggctcctgtgtcattcggacaggccccatgtcttgtcttttcttcttctttcttggcgtgtccttactttctggtgtaacaaggtgccccaggctcatcctgtacaggcctccctagaatcaaccatttctccatggagccctggttccttttattggagaatactatttagaaaccaagatctgagcaccggatatgctcattgttacagaggtgccaagtaggctgtaaaaggcaacagaatgggctgggcacagtggctcatgcctgtaatcccagcattttgggaggctgaggcgggtggatcacttgaggtcaggagtttga

SEQ ID NO: 167485 - DNA, 442 bp, Homo sapiens
ttccagctttggccactcggagctctttcaggttggctcctgtgtcattcggacaggccccatgtcttgtcttttcttcttctttcttggcgtgtccttactttctggtgtaacaaggtgccccaggctcatcctgtacaggcctccctagaatcaaccatttctccatggagccctggttccttttattggagaatactatttagaaaccaagatctgagcaccggatatgctcattgttacagaggtgccaagtaggctgtaaaaggcaacagaatgggctgggcacatgggaccgcagcaatttgaaaagttatcagtgtgacctggacagatgctcaagggtagtgagaggctgctttcttaagaggctgggttgggtgggtgaaatcttattttgggccatgtgtttagtataatagcttttttttttttttttaat

SEQ ID NO: 167486 - DNA, 239 bp, Homo sapiens
ctagtggtgtgtccgcatagtttatggggggtcagggaggtttgacatgagctaagggagccgctgtgctaggcgctcgcgaggaccgccgttgtgagcagttcgactttccgcccaaactgggggatgctagaccgcgggcacctctgaatcttatgccttcagtgatataatcctccgtgtccttcgagtccctcctgctgcagacaggtcccctatacttcggtacacacgagcct

SEQ ID NO: 167487 - DNA, 605 bp, Homo sapiens
acttaaccaggaatggagtgggcaggagctgagggttaaggctgcctctcaccaccccacacacccccagtagaagcactagatgaagggaagggtggagaggcaaggggctatatcagatttttccattttcagaatcctgttctggctgcaggtttgtgccaggagtaaaggctgctgggaggggcagccggaggagggaggtggagctgagtgactcacaagatgagtcacagatccagttataagcacagaaagaggccaaggtccttcccacccctactcctcttaactgctgccagccagcttccgttgctcttttgtactgccccttacccacttggccaatgcaagagatggcacagagaaagtctacatggggacatcgtaatattttgttacccaactgatgtatggtggcaaaataccctgtgatttgcagactggctgtctgcaaagtagaagagacagaatgcctgcatgactcatccagatctatagttgaaaggcctggagggaaagaaggaaattagaaaaatctggagtgcaggtgattccaggccgggaaggggcttctaattctgtcttctcacctgtggctatat

SEQ ID NO: 167488 - DNA, 399 bp, Homo sapiens
cacacaccaacaagacagaccaaagaatcagggaataaacccatacacacaatcaagcaatgtgacgaaggtaggaaggcgcttctggagaaaggacaatcttttccacacatgattttggaacaacaagacattcatatgcaaaaaaaataaacttcaaccaatactcacaccttatacaaatattaagtaaaactggaccacaaacaaatgtaatttaaaactataaaaggtttagaagaaaatgttggagaaaatcatacctaacctgagttagacaaagaagatttcttagatataatactaaaagcatcgtccagagtagaaaaaagagtttaactggatttgctatgtgaaagactttttcttttttttttttgaagatggagtttcactctt

SEQ ID NO: 167489 - DNA, 439 bp, Homo sapiens
gagaccaaagaaaagacttaatcttttaaaggcatgctctactggctgtaagaaaaaaggagagaaaattacttaaaatacacaaagaagctggaagcctgatgatagccaattaagttaatacaccctcctaattaaaccttctccacagaaaccaaattgtggaatttgagttccttgcgtctcttccaatagaatccctaatgagccgtggggagacccaaaggtgaaggagaggaaaaagacaaccgagagcctcgaaaattcagcctcagacccttcatgcctggggcacaaagggatgcccatcatccgccctctcctccgacggcccatggctacaggggggcatctgatctctcatccctgtggttccatatcaggatggggtgggggtgcacaggtccctcagctgtcccctcctgaagagggcgcgagg

SEQ ID NO: 167490 - DNA, 103 bp, Homo sapiens
gggctaaagaaacttcctttacaaagttctgatgccactgattcctgacatttaattcttccttaaaaaaaaatcacagtcacattcataaaatgcagaagtg

SEQ ID NO: 167491 - DNA, 374 bp, Homo sapiens
ttacgtagggctcacagctatcggttcaatcaggtgtgacatttacatattatgcaaatgaactttcattggccagagccatcttgtctactccttactgtacatgtggctggcagagaagggaaggtggagctgccatcttgaacagtcttgtccctagtacccatataagttcccagcttgcttgtctgtgtctgcagtttgactttacaggctgccgtctgttagaaaacgatttggggctgcttttcatttcgttaaaaagaaaagccttaccgaggactcccataaccttactctctgcctaagtgatttcttcttaactcctatatcactggtatgtttctgtagtagttcttggagcaaaagttcat

SEQ ID NO: 167492 - DNA, 352 bp, Homo sapiens
ttttaaaatagtcaatgggaagcacaaacaatttcacacaaactctacacacctcctaattaatacatttcttggccttcaaatctaactggttttaaataaaataagaaaggaaattgtcaaggctggcaaagaacactgaaaggataaactgcaagcccctacccgccatggaagtttcaggagggttgcaaagcttaaagcataaagcatactgcctcttttctttcaggtatgaaggatacatttaattgggcgcagtggtggtgggttggctggggcaagaaagtgttagtatttcgcttagctttcacatcattttgtgaatcctgcaaataaatactccctaaaa

SEQ ID NO: 167493 - DNA, 255 bp, Homo sapiens
aacatatgcattacttcacatatttatttgtgatgagaacatttaaaatctcttggcaactttatttcttttctttttccttccttccttcctttcttctttcctcctttctttcttgacagagtcttgctgtgttgcccaggctggaatgcagtggcatgctcttggctcactacaacttctgcctcccgggtttcaagcgattctcccgcctcggcctcccgagtagctgggattacaggcgcccgccaccac

SEQ ID NO: 167494 - DNA, 457 bp, Homo sapiens
tggcctcaagcaatcatccgcctcagtttctggagtagctgggactatacatgcacgccaccacgcccagttagagctatagtctaagaaaacaaaagacccaccaggcccaacttacgatgtggtcatttaatagttacatgattttggttattttaaaatattgtatacctcatttgtcaataatctaacaaaagaaacatgcacttactgtagaaaaattaagatactgcaaaaatagatgaaaaaattacaaatcactcaaccttaccatttggaagtaattatcattagttattatggagtaattaaaatgtaaaagtaattatcattagttaatactgtggtgtaaatgtatgtttacaaacatggaaccacaacatatgattctacagccttcacataacatttatatagggcaaactgacaaaacaatgtttaaggctgcacaacgttc

SEQ ID NO: 167495 - DNA, 259 bp, Homo sapiens
taaacattaactgcacaatcagaaaatccgctttatgtccttatgcaagtccttgaggatttatcgtttctccaaagtattaccagcatgtgtaattaaaatccacattttaaaatttatgcataatgtgccttatattatgctgaaaggggtttaaaacaggcaagtcataaacttgctcttggatgaacaaatgtacagaggtaaacaaaatttcattttctacaagttgtgataagctagccagaaaatcaagggc

SEQ ID NO: 167496 - DNA, 391 bp, Homo sapiens
tactcagttacagcaaacagtctctgtaaagatatggagaaaagcaagagagcagtatgtatttagtgaaatgtaattaaattgttatgattcaggcatagaaagtggcaagaaggttagatattgtcaaaagtgataaaatgacactacaggggaagccaagggctgaaacatgaaaagcaaagcatgttgtaccacatttagaacagagttggaaacacaataaatgttgggtaaataaatgagaattgggtggctgtgataaggactttggatttcatattgttggtagcaaacgattagtggtgagtcggagagaaagataacattttaagagataactaggagggaatgttgataagatttgcttgtgttgaagggatgataataa

SEQ ID NO: 167497 - DNA, 444 bp, Homo sapiens
ttaacaggatctcggggtgtgtagcatggtactgcctgagtgtcaagggattacgaggttgtagccgtctcgtggttctagtgatggtgtacatgctaggtgtggaggtagcacttgtgtgtttcacatcatgaaacacagggcagtggctaccagctgctaagtggggtgggaagatgatgaatttgagatgttctgagagtgacaggctaggctcggagatgtccagcagctggaaagtccgaaagggagggaggccgttcctcaccctggtctgatttcaaagtccctactccttccactcttttcacaatttcccgatcctcgcatgggccctgggcctggccttccattggctctcacatgccgctgccactggaggattttctgggagggtgcgtgtctgcattttatttggttggatggacgagctacacgtgcaag

SEQ ID NO: 167498 - DNA, 433 bp, Homo sapiens
tggacaggtatcgtgggggagctgggcacccctgctctaggaaatacaaggtgtggccatctctgatacaggatggtgtacatgctaggtgtggaggtagcacttgtgtgtttcacatcatgaaacacagggcagtggctaccagctgctaagtggggtgggaagatgatgaatttgagatgttctgagagtgacaggctaggctcggagatgtccagcagctggaaagtccgaaagggagggaggccgttcctcaccctggtctgatttcaaagtccctactccttccactcttttcacaatttcccgatcctcgcatgggccctgggcctggccttccattggctctcacatgccgctgccactggaggattttctgggagggtgcgtgtctgcattttatttggttggatggacgagctacacgtgcaag

SEQ ID NO: 167499 - DNA, 219 bp, Homo sapiens
gcaaaggctgctggataatagtaataacaaataatgtaaagtgctttcactcctgttctcattccttcgtcacaaagacactagaaggtaggagttactggcctaacttgactgatgaggaagttgagacttgacctaagtgactcagtaagttccacacctagttcctagtgttggagaaggatttttctcttttttttttttttttgaggccagatt

SEQ ID NO: 167500 - DNA, 215 bp, Homo sapiens
ctatggggttcatgtaaaacaaataggggccaggctaaggctggggagaaatggcattcaaggaagaaacttctgcctagagaagataagctgattataacttactggtggtctcaactcttcaattagttgcacacagaggcccttagcattttatattagaaagagaccattcggtcagccttttacctatatagaaattcaactcagtaaac

SEQ ID NO: 167501 - DNA, 202 bp, Homo sapiens
atggaggaggacaaggtaggcaaagggaatggcacgcacaaagctgagcagtagtcaggcaactctgggtaactttatggtgagagcaaagggcggggaccacagctggaataaagctaaagaagaatggcaagaggccaggtcacacacagccttataggccctgtcaaggattgcactgggggttggcaagacaagtaag

SEQ ID NO: 167502 - DNA, 354 bp, Homo sapiens
aacaccatgttcaggtataatggttgagtgaaggctattacaaactcaaaactaattcatctggaaatgccatggttcgtttttgcagatatatcccttataccttcccatttggaaaaagaaaaaaggaaacctaccacaggaacaacaaaaactggaatttgtttggctagcagtcagtaagccacattcatttctgaggacgtagaggccgttcagtcctctcagggacatccgccatgataaacagcagtgcttggtcccagcaccttgggaggccgaggcgagaggattgcctgagcccaagagtttgagaccagcctgagcaacatggcgagacccccgtctctattt

SEQ ID NO: 167503 - DNA, 557 bp, Homo sapiens
acacagcaagactctaatagacacacagacagataaattttaaagtttccattaaaaataagaactattggcagggcgcggtggctcacgcctataatgccagcactttgggaggccaaggtgggcggatcatgaggtcaggagatcgagaccatcctggctaacatggtgaaaccccatctctactgaaaatacaaaaaaattagctgggcgtggtggtgggtgcctgtagtcccagctactcgggaggctgaggcaggagaatggcgtgaacccaggaggtggagcttgcagtgagccgaggtcgtgccactgtgctccagcctgggcaacagagtgagactccgtctcaaaaaaaataaataaaaataagaactatcagttacttgagaatttctataagaaccttttaatgttggtattacctagtgaacctcactaaatccattaattttcactaatccaattccttatgaacacagaagtttctactgagcaaatattagcacttaacatgtgaactgtctatcaacggtgtttttaaaagatttacaggc

SEQ ID NO: 167504 - DNA, 361 bp, Homo sapiens
ggaatcttctaaatgtatgtcaacccactactgaatcatgacctgcagtctgaaaaataatgctcttacaaaagggtgattagattcacatgatgatgccgctagaggaatggttacaggcatcagcaaatacttaggcatgatgagaccctcccatcctcaccccacaaaaaaaagtcacaccttctctctgcatataagagatgtagagaggtggccaggcacactggctcatgcctgtaatcccagcactttgggaggccaaggcaggtggatcacctgaggtcaggagttcgagaccagcctggccaacatggtgaaaccccgattctactaaaaatacaaaaattagccgggcatg

SEQ ID NO: 167505 - DNA, 111 bp, Homo sapiens
tatttagtatacacaaagcattcagtatttagaatttctccactggatggacgggaaaagcattcactaaaatcgggaacatagaagaagaggcaggtccaggagcaggga

SEQ ID NO: 167506 - DNA, 200 bp, Homo sapiens
gtagagacaggggtgtcactatattgcccaggctggtcttgaactcttggtctcaagcaatcctcctaccttggcctcccaaagtgctgggattacaggcgtgagtcactgtgcccagcctacttcagtttttcatgctgttaaaccccatctattgagtttataatgtcagtgatttttcagttatagaatttcaactt

SEQ ID NO: 167507 - DNA, 580 bp, Homo sapiens
attcttatgttctactcactgatctcactcaacttcttatgctttccaaactcatggggatttttcaggctgtaagggtccccatccccttctctgccgcctcatcaaatgtatcatttctattttagagtcatttaatgccataccattatggtccagcacttaataatttatcctgaatctcaacaacttgctctttcttgctctgtgaatcttttaaaatcctccatttaactactaaatactgtttgagaagatcacacaatcatgtgagtttatgccatttctagtttgtgacttctcatatcagttgagcccttcatactggttaattcttttttcttgtacatggtcacatctttttccaactcctatcttatttttcccactgagtgctgcctccttgaaactctttcctccttacctttgttcacaccacaatttcctaatttttgttttatccctatgatcatcctaagctaaaacttgaaaatcatgtctgtttcttctctgtcaccactctacaaatcaaaatgtttgtagcttctgcaaatctttcagatatgtcttttcattatcg

SEQ ID NO: 167508 - DNA, 499 bp, Homo sapiens
  misc_feature (37)..(38): n is a, c, g, or t
ggcagagcagctgcgaaggcaggagggcggcgccgcnnaggcccagatgcgccaggaaattgagaggctgactgagcgactagaagaaaaagagagggagatgcagcagctgctgagccagccccaacacgagcgagagaaggaagtcgtcctgctacggaggagcatggcagaaggggagcgcgcccgggccgccagtgacgtcctgtgccgctccttggccaacgagacccatcagctgcggaggacgctgaccgccaccgcccacatgtgtcagcatctggccaagtgtctggatgaacgacagcatgcacaaaggaatgtgggggagagaagtcctgaccagtcggaacacacagatgggcacacctctgtccagagtgttattgagaagttgcaggaagaaaatcgactgttaaaacagaaggtgactcacgttgaagacctcaatgccaagtggcagcgctacaacgccagcagggacgaatacgtgaggggg

SEQ ID NO: 167509 - DNA, 303 bp, Homo sapiens
acttcagtgagccaagaggaacaagaagtttaaccctgaatagccaaagagtgaagataatgggacattaagggaacaggaaaacagagcagcccaagacagaaaagacttcttgatctccatccaaacggactcataatggacctaaaagtgatttgaggtgaaaagccaggaactgtattacgtcattctctagattttgtgtgtgcatttgatcaatccaggactttctagtaatggacttccaaaaattaaaaatacgtcaaagtggttacattatgtatcttggaatagatagtgaaa

SEQ ID NO: 167510 - DNA, 292 bp, Homo sapiens
gctagggcagagactactattggcaggtgattatattaacatagtgtgattgtgcagctactgtgaatagcaaacaagaggaagagaagtaggaaggttatgatgatgatgatgatggcgacagcaggatgtagttcgtgactgcatattacgtgtcatacaggggtcaaaatcagtcaggggttttcaacctcagcaccattgatattttgggccagataactctgttgctggggactgtcctgtgcattgtaattgttgctaagtgtccctggtctctacccattagaca

SEQ ID NO: 167511 - DNA, 323 bp, Homo sapiens
tattcagtaaggctgggtccttctaaacctgctgagagctttgtctcaggctctgcttcctagtcccggtgcacagggacagattgagtcagtggggagcggtcacctctagacggtgctgttttttaaaatattaaacctacaaacaggtttccttctgatgttgctagtaacagtgctgtcaacttcttaactcccacctacccaatgctctatagcatccctggtttagtatacatccacctgcatgccactcatttttgtggacattaagagtttggggttttgttgtttgcttttacaaaaacaagatcattcactta

SEQ ID NO: 167512 - DNA, 233 bp, Homo sapiens
ggttaagagcctttgttgtcactttagagtgaggtgtagtgagctaaaacccaagaaagtaatctgttcctaaccaattccaggaatgtaatttgatgtgttggaaagaatgttgactttgctgtcaatttttgacttgtactactcaccaactatgagttcaatggtgatagaacctttctaagctgcaaatgaaggaaatatttttgcttctcactagtcaggatgctact

SEQ ID NO: 167513 - DNA, 304 bp, Homo sapiens
gtcccttgaatcatacatccaaaccccaaattaactcctttcaacatttattaaagctgctttcttcttgatcaattcagaagagttatcatgttgaaaagtacaaagctgcactgagattcagacaatggcatgtatcacgcttgctctagcagatcactgatctttgtgggaccgcttgtaaactgcacatgctgaggaggcaacatcaagtatgaggggactcttgaaccgtttgtactagtgattatcttttccccatgtctttctgtctctttacttacactgttattggagctacacc

SEQ ID NO: 167514 - DNA, 310 bp, Homo sapiens
taagccctccctgccctaattcccagcacaccttttctaaatgtcaacctactttactattaaaaatcagcaaaagttaattgaaatttttaaattgactggttgcagattataaaaatattcctttttaaactatctgtggtgaaggactagtttttttttttccaattcatcatcaaccaagacgtggtcctacagtgcctgctttgggccacttgtgacctaccctgtgagtgaccaagctcatctatgtcctgttcagtgaggcaggattaattgagaacacacttggatgttgcagcacaaccac

SEQ ID NO: 167515 - DNA, 130 bp, Homo sapiens
tatcagctagttattctaaacatcccatgccaattacctaattcctttattaatgaacttaatttggtggaaagagtcttcttagagtctttcttactgctctctagctcctgcatgctgtatccaagtc

SEQ ID NO: 167516 - DNA, 191 bp, Homo sapiens
gagttgtatttgctgggttttcccatctgattaacagtgaatagcagaaatgtgctcttttacctcatcttcccttttctggcctgctttgaggctctcttggtaaaatgtctggcctaagacaggacgttttttgtgggctggtccagaccccatctttgcctcactttcctgcatggtgagttcagatc

SEQ ID NO: 167517 - DNA, 328 bp, Homo sapiens
cggtccccatgctctttgtcacagtacgaggggcagaactgaagtctcatgtagaagtcattacactgccttttcccattaggccaccagtaccatggccatgggtttccttacctcactctattcatgctacctttgaaaaaaattgttttcctgaccatcttgtttcatacatttatatgtccccaaatccctttgctctgctcagtccaaaataccttcagtctttccaactccctgggccttctttctctcctgcatataaatggctagcagctgttttcactgacctatgaccttatgatgcgtcccactttgttgttattct

SEQ ID NO: 167518 - DNA, 317 bp, Homo sapiens
gacacacagtggggacatgccaattaaccagacatgcacatcttggggatgtgagaggaagcaggagttcctggagaaaacccatgcaggcatggggagaacatgcggaccctacacagacggtagccctgtccaggaatcgatatttattctcatctacattatagcaaaacaacattgaacagaacaactttatctgaggacctgttttacttgtacatctttgggaaaatcttttaacttttattactcataatgttcttctcaataaaagtgtgttaagaatacatatttcaggaggttttttgagacaatca

SEQ ID NO: 167519 - DNA, 276 bp, Homo sapiens
tgaggtataagtgaaaggacagacattgtgtttgagtaaactcctagaagtccaaactttttttctgaatatctgagtcatcactttaaagttgggtacatatatgacttgtttactgaattaataaagtatatagctcctagtttttacaacttaaaggaaacaaaacattttcatccaaaaacactggctacatctagtgggttgtttcaaggtgttagggtaaggttttttaattaaatgattagactgtgcaggttttaaagtctgtgcttg

SEQ ID NO: 167520 - DNA, 815 bp, Homo sapiens
cacattcaatatccaacaaatagagtaataaacgtttgttgctagtgttattgatattgtggatcattttacaaggatatattaatgatattattgttatatgtgaaagtttacagttgacagatgttttctttatatattaatgtgatatgaattttcacatttctgtcaaatagaagatggctgttattatcctcacttttttataggggctatgcagttttattgtggagaaagagttaggaaacattcaaaacagaactcaaatttgtgtatattatacatataaacttaatgtactttttattatgtcctgttggaagaaagagaaaagaatgcaaattccaaacatgtaaagagcaattgatgtgttttgggtttggatttcctaaaattaaccctcaaattcttctcatttctttttactgtagttaaagtgaggttagtaaagaaatgttacttattttatggaattattgaaaaaaaagatgagattcttacagatttttatgtacaaactatgacagtttctcttgggggtattcaaaataatgctgaataggctattaaatattgcttaactaatgtatacataggtttcagttcatcttgtagatgtatactttacatgatgcctgatacacatggctaagaaaagcattcacaaaatcagtgtttcatctcctacttggaaaagaagtgaatccctatgctcccatttaaaattttttattaatttatggttttgtgacttgaattataagtgatattagatgaacatagtatctttaatgtttggtttggcaagattatta

SEQ ID NO: 167521 - DNA, 355 bp, Homo sapiens
catcaatccactttgtagtttgctggaatgagttaacatttgtgatatcgtaaactactacagctgcagcagaatcacggatgtacctgggaatgaggctacggagacgttcctgacccgccgtatcccacagccgaagcccgattgttccatcctccaagaacaccagcttgaatttcctcagcggattcccgaagtctccgcccgcggacatggtggaactagaggagctgtcgccgcctcagcccagagacctcccggaccgatgctgctccagccggctgacgaaaaaggcgagcggaagggcgggcgccgagctctctgcgcccctgcaagggccggtggaggagcccgg

SEQ ID NO: 167522 - DNA, 853 bp, Homo sapiens
tcacacctgtaatcccagcactttgggaggctgaggcaggcggatcatctgaagtcaggattcgagaccagcctgggcaacatggcgaaatcccatctctacaaaaaatacaaaaagtagtcggcattgtggcatgtgcctgtagtgccagctacttgggaggctgagatgggagaatcgcttgagcccaggagtttgaggctgcagtgagctgagatcatgccactgcactccatcctgggtgacagagcaagaccctgtctcaaaaaaaaaaacaaaaaacaaaaaaccctcaaaatttagcagcttaaaacaacaatcattatctcttacaattctgataattgaatgagctcagctgagcagttcttcatatgctatattatttaattaatctgagggattaattaaaaggtccaagatggctaacttgtatgaccattagctggtactatcaggtgggatctcagctggggtggccagttgcagcgccctgattctcctccatgtggcttgagctttctttagcttagtgggattctaagaatgaacatctcaagagtgttaccagggggaaggaagtagaaactgctagtcctcctaagtgctgggctcagaagtcccaaaacagctcctccatcacattctattggtcagagcaattgcagggccagtccagattcaaggggagaagatataagcatatagaatggggataaatgttggaaaccatctttggagactagctaccacacctgtctgcacaggttcttccctgctttgaaatgctcttttcctgtcaaacctttgttcatactgcaagatgcagcttataattcagtacccatgtaga

SEQ ID NO: 167523 - DNA, 434 bp, Homo sapiens
ttaagcctctgttgttgctcctcaggttgtcatgactgggtatgcccagtctccttgggatgacagtgtttttttctaggcccagcttactctattcacgaccatgtctagctgttgatctccagtaattgccagctctactgttttcaacaatgttctgagtcataaattgctctacaagctaattctatcatattgtgactcctttgaagaaaaggtttcacatttgttctaatcccaggagaggtcctgtgagctgtcttattccctggttctcctgcaaactagctggtctacagtttatacagatgttgaatctcttcagttgctttttaccacaacctctagtggtatgtcctgagatttgaaattatctgtgctgtgttacaaatgaagtccctttgttttggaagacattaggggttatttcatct

SEQ ID NO: 167524 - DNA, 429 bp, Homo sapiens
ctacacacacagtcccagtgttgcgctgttgctgtcacaggccaccctttgtagagcagtggcgggcttcccccaccagtcatttccagagatgcttttctccccacttcaaatctctgtgctgcagactgtgatatcctgtgttctaggaagacattaaatcacactctggcagggaatgggtggagaggtgggactgtccctccacctactaaatgcaggcggtggtggggaaggcgactgtcacctttcccgcggttttgctgatcctccagaccccgccccgggggtgggggcgggggtgggggtaatgcgggctgagtggaagctagccccgcccctggggttctctgggaaggcaaatcctcacccgcgctggccttccccttcgcagtgtcatggtgtttgatctcatcccctgctggcttt

SEQ ID NO: 167525 - DNA, 125 bp, Homo sapiens
cacttccctgctactttcctggaagcggttcttaactttgaagacttacctatctggacagttaaaagtattgctaaggatactcccttttccttgttaaacagtggggaagccttgaagcatgt

SEQ ID NO: 167526 - DNA, 152 bp, Homo sapiens
ttaatcctgaagctgtgttgcctctgcagtattcggttaagagttctgctgcctgagttggcatccctgctttgtgaagttattgtgtgtcggctgggcacggtgtctcatgcctgtaatcccagcactttgggaggccgaggagggtggat

SEQ ID NO: 167527 - DNA, 439 bp, Homo sapiens
tacctggggggcctcccccgactctcagcccggctcaggctgtttctggcttgacgatgatgtgagtgtccagccgtaaattctccagcacaaaagatatttcccttgggaaacctagaggaacgtgcttttgtttttgtaagacccgctggggcttgaaccacagacatttggagttgggtgccgagctctgcctgggcctcacgggtgcatccgacaccaaccctgggaggctgggctgctgctttcactctgatgtgaagctaaacctctctgtgcctcagtttcctcatccataaagggagggcaacagcagcgtccaccccaaggacggatgactgagtgcgcatgctggcctccacccaggcctgtgcagggggcgccccggaggagaggagcgtggcctggggtctggtgcagtcaagtccacactgagaag

SEQ ID NO: 167528 - DNA, 392 bp, Homo sapiens
caaaatatgtacaactatgaacataaataaaacaggccaggctcggtggctcacatctgtaatcccagcacttggagtggccaaggcggggggattgctggaggccaggagctcaagaccagcctgggcaacatgccgaccctaggcatggtgccacgcacctgtagtcccagctactcaggagggtgaagtgggaggatcgcctgagcccaggagttggaggctgcagtgagctgtgatcgcacaactgcactccagactgggcgacagagtgggagaccctgtctcaaaacaaaaaacaatggctcatatctataatcccagcactttggaagaccgaagcaggaggattgcttgagcccaggaattttgagaccagcctgggcaacatg

SEQ ID NO: 167529 - DNA, 347 bp, Homo sapiens
agcctggaggtgaacttggttcaactaagatcacatatgtgttgttacatttccaatccatttctgttttttctactgtgacccacaaaatttattcaatttgtacttaattaaactaaaaagtttcagcacagcaaaagaaacaatcagcagagtaaacagacaatgcacagagtgggagaaaatcttcacaatctatacatctgacaaaggactaagatccaaaatctacaacgaactcaaacaaattagcaagaaaaaaacaaacagtcccatcaaaaagtgggctaaggacatgaacagacaattctcaaaagaagctatacaaatgtctaacaaacatatga

SEQ ID NO: 167530 - DNA, 147 bp, Homo sapiens
ggagtaaccgtacattttaaaccaaaaaataccttatatataacatgaaatatattcaattccacaaagaaaagaaaaaaaattagaaaatgagcaaagaacatgaagaagcaattcaaaaaagctgaatagtgagtggatgacgag

SEQ ID NO: 167531 - DNA, 282 bp, Homo sapiens
gactggcatttgagaaaaccaccacactaaggctttttagaaccaaggaaataatagagttttcaccactgaactcatccagaagcaaagtcacaacctcaagaaaaaaaactcctgtcctagtgaaaataaatttaataatagcaagaagcagatgtgtctctggatgtgcagaaataagcataaagttacaggaagcatgaaaaagtaaggtattataacaccccctcaaaggaacataggaattccttagcaacagattctaaccaaaaatgataattg

SEQ ID NO: 167532 - DNA, 535 bp, Homo sapiens
aaggcctgatttacctgaccctcccaggtcaagggatggctgggttgagggtggactgtgcgaggcctggcggagctgtagcccacacaggtccaggtggtcgggaggccactcatggccagacgcttccggtgcaggaggccttgctcttgtgttgaggggacaccaggatgaggtcagagagtgcactggggttcagggaggagaagaatcctgagagatggcacatgtgcaacacaggtcaccgtcgccatcgcccgggcccaccgcaagcatcactaatccatccctgcactcctggaaagccgggtcagcctctgccggctgagctgagtggaccaccaggcgcttcctggttgtcctctgtgtgctgttttcctctgtgtgctcttgtcctgggctggaccacacctgaatattccagccaccaaagtgctcagcaggagctgctgtgtaggagtcccccatgaggcccaagcacctgagcttagtgacatacacggttgacctgggagaatgctgggagcctgctgtt

SEQ ID NO: 167533 - DNA, 476 bp, Homo sapiens
gacttagaaaagatcaccatagtcacaagtcattatcaatttaaaggaattggaagaaacatatatttgttctgagttcctatccctgaattctaagagattcagctccttgcatttgagcatctcctacactgggcctgccctgtttaggtgggcctaaaactttgtagaatcaccttacatgtgcttacctggattggtaaagatcctctatacccatctgaaccatactggcctctcgggatgggaggtgggatagggtgtcaggctaacagccattcacctcactgaatcttttccatgttgacccaggtgtcctacaacctaccagccatgggaattgctgccattttccaatctcctcacacaaaatgagcaccatggaaacctgaagcttcaggaggggagagaagtctcagttcaaggcaacaagggagttgtaggcatctaaaccagatctgtctaggaatgcttag

SEQ ID NO: 167534 - DNA, 484 bp, Homo sapiens
agccagcaaactcaattaattgaagctatacagagaaaagttaatgggagggctatctgggattcttatcctactatcaagcacttcaaagcactgagcttggggctaccaggcttgctttcctaggaactagtcctgtgatctttcaccatttaacctttttgtacttcatttctataatttggaaaatgatgatcatatccttctctaactgataaattgtttgaaattcaaatgaggtaacacatgtaaaaggatgctataaactttacaatgccatacaaatgtaaaatgtcactgttttctaccacttaactcatgattttcttaaaaggtcttaagagcagtttcttatttgattcataaattttgaacaaacatttgaataaagttaaaaagtatatacatatttaagcttgaatattttacatttaattttattagcagtatacaatatttaccatttattaggtaaaaggaatta

SEQ ID NO: 167535 - DNA, 272 bp, Homo sapiens
tcttttcaagtttttaatctgtgtgacttaaactgatgaactgtggtgttcacctcatgaagaatttatattttctccagaatgttttacttgtttattccaaatttgtacttgagctcataatcccacatgtgtaaacttcagtgtgcctaggatgcttaagacgcttcttgaaggattcacatgaaacttgacagtgattatgttgacagttttagagagattttaaaaatatcttttaaattatacttatgtatctattttgtgatatt

SEQ ID NO: 167536 - DNA, 479 bp, Homo sapiens
gcatgcagtcctggcttgactaaaaaggccagtaggggccttaagacatattcagaaagttccctgccccagagggccgccgccaaacctgaagggtagtgacaggtggccatactaccatgtgatggttgccccaggctgggcctggagagctgcagatcattgactctgaagatggaaggctccatgaggctgtgggaagggcccgcgcgtttctggggaagggaattgcagatggcaaggctggtgatgcttgtggggcgggccctgagtgccatcgaggcgcctggaccttctcccgggggcagccgcggcctgaacgtgtgggggcgggctcgcggaaaggctggcctcgactgggtggggctccggcgttggcgcatccgcctccggccgccagggggcgccgccgcccgtgctctgccctgcctggctggtcacagaggctgacgtcagcgggtcccgcggaggccgctgga

SEQ ID NO: 167537 - DNA, 519 bp, Homo sapiens
acccgcagcacatttcctcacacataggtaggtgctcaatgagtgcttattacactgagcagggactttgtgatgcaaatgactgtatccccaatacctagcacagagtggtacccagcaaatatttgacaaataaaaactataaggaatattaacatttaaggtgtagacaggataggaatccagccaagaaattaagaagcagtggctagagtggttggggggatggtgtagagaaaaagaacatggataagttcaaattggtttcgtgccttatttgactaaaggcgagtttcttgcattcattcattcattcattcattcattcattcattcattcattcagagacggggtctcgctctttccccaaggctggagtgcagtgacgcgatcgcggctgactgcaaccttcatctcccgagttcaagtgattctctcacctctgcgtccccagtggctgggatttacatgcaggcgcaagcacacccaggtaattttagtatagttggtagagacgg

SEQ ID NO: 167538 - DNA, 240 bp, Homo sapiens
acccgcagcacatttcctcacacataggtaggtgctcaatgagtgcttattacactgagcagggactttgtgatgcaaatgactgtatccccaatacctagcacagagtggtacccagcaaatatttgacaaataaatgtgtatttgaataaagtggaaaaatgttaactgccatgggaaatgtcggagacgggtgttccagatcatgatttctctcaagagcattcacccggtcaccat

SEQ ID NO: 167539 - DNA, 157 bp, Homo sapiens
ggtcaacacacagacacacacacacacacacatagatatatataaaaaaaatagcaacagttttccgaaacatgtttcagagagcttttggcttctgttgctctctgtccatcaccagtctccagcaggacccgcctgctctccaccctatcttcgt

SEQ ID NO: 167540 - DNA, 358 bp, Homo sapiens
cccctgagtctcagaggctacggttatattctgaaccagcagtgactaccccacagcctagtgcagcctgggcatgttaacaagcccaacaaaaggggtgtgggaatgattggaaggatgtccttcccactgacaaagtattcagcacatttttgagttggcttggcaattaggttagaggattcaacatgctcaataaagatactgaagaattaactaagggcccagaagaaacattgccccaggacaaattacaggttgtagccataaaaccttatgtatgtggcgagtgacttaagggatagccaggtttaaatcttgactgtgcctaacttctatcaggagctaacttgtcaat

SEQ ID NO: 167541 - DNA, 299 bp, Homo sapiens
tgtatgtatttctggcccactctaggaatagtcatctttatcattcagattaaaatgttttctcctgtatttaagtacccacagttactcaccaccctaagtcctgacaggcaggcacctgcctctcattcttgggatgttggagcattagacggggggacgatacaatttaatgtaatctttctggcataatcgccccacctaggctggaaggacagaagtgggactttatccaggtgcacagcagctacagcaaccagcacgtctgcttcatcactaactcagaagagagtgtggga

SEQ ID NO: 167542 - DNA, 244 bp, Homo sapiens
gggaagtaaatagcaaaacacatgtagatcttagactttgaaagactagcattgtttcaaaatcacctttatcagtgttaaaacctatagtgaatgtcaaatggttcactctagcaaaaatgttcaaaaatattttttggctgggcgtggtggctcacgcctataatcccagcactttgggaggccaaggagggaggatcacatgatccaggagtcctaggctagcctgggtaacaaagtgaaa

SEQ ID NO: 167543 - DNA, 548 bp, Homo sapiens
agactagctatagatcagtaaaggaggtaatagctgaaataaactgttgaagatttgtaggcaggtcgaagtgttattccaagtaaagagaagtctatgagcaagggacaaatcttcaatgatttagtgccttctgttatctacacatggttttatttggctgagtgtgatataataataaatatttggtctttttcccttgttcctggcatggagcccctaaagcctttggaatttactctctagtctgtgctaatcagatgagtggcgtgggtctgggtgttaggggaggagaggctgtgtagcttccacttcagggtgggtactctttaccactgtagttagagggtgagaactttcaaccccagtccagcatccggggagggaagaggggctgcagattgagcccaatcaccaatggccaatgatttaatcaattatactttaatgaaatctccagtgccgtgtgtgtgtgtgtgtgtgtgtgtgtgtatgttttttttttttttttttttttccttgagacagagtctcactctgttgcccag

SEQ ID NO: 167544 - DNA, 328 bp, Homo sapiens
caatgtttcttcatccccatgaaacattagcagagaaattatacccaaggtttcaacctggtcattgccgctccctgctatcactgtgcaaactatcattttcttctgaacgtttttccacacagaaaaaacatcattttttttctgaagttcttttcatgtagactgtggtctctgaaaatctaatgaaacctctgttttccttgttatattctcagtcctccattctttgcacatattttcaaaatttattcttgtcctctgtatctgtgaaaagtgaatagcccaataaactctgaggtttaggcattcttcttttttattgcat

SEQ ID NO: 167545 - DNA, 484 bp, Homo sapiens
tacctcccatacctccctcacaacctgcccacaaggaaattccttgtggacaaaggacagacaaaactcaaagtcatccctgtactcctgtgagacaaatgcatatctgatttcttcctctgccctattgtttcactaagccagactaaagcttaagtgactattcctctatcttcctctcacatgtaaattgtgtattcagtaaaaggctaatcagagactcaaaagaatgcaaccttttgtctcttatatacctatgacctggaagccccctcccctgctttgagctgtcccgtctttccagacccaaccaatgtacatcttatgcatattgactgatgtctcactgttacagcaggtagctagccagacatgagcagggaaggagaggatcccccacccccatgccaccaccaggaatgtcaggcaaccatcaggtgatggtcaggtgattattaaactgtctctctaaaataataattgg

SEQ ID NO: 167546 - DNA, 427 bp, Homo sapiens
catagcaagactcaatatttgctagtcgctattagtaatattattaccatcatcaccaccacctcctctccatcctgaaacactattaaagtgacagtaaaaacagtcaaaggaaatgagagcaaagacatcaatagacaagacatttccacaagacactggaagacaaacactggatgcaaagaaggtatcttgacttaacactgataacagaggcctgcaaggggtatacccatgacaagaactgattccccaccacaagctgcagaaaggctcagcacaaggaggcaccaggaggctactggaggatatactcaagcaaagtgagggagtaaagccagagagaggaagagaagggaatttgaaacagggaaagtagcaaagggaagtcccaagacaagcaaccaaaccagatcagaccaggagg

SEQ ID NO: 167547 - DNA, 420 bp, Homo sapiens
ctctgcctccatttaatttttaagagaaggtgaaggtaactattagaatataatatttgaagcagctctgccttcttagggctacccaaaacagttctaggtgctaaaattcagattttcagaggatgagaaatagctggtttccaactctccacaaaaactcttattactgttgggacttgggattctgacttaccccaaacccagaacatgaagaagacctttacagtttgtgctctactgttactaggctattaatttgagatcgtccactgtcaagtgttttactatctcactgctgtttttatgattcaggcttataacaaatattgtatcctttatttctgataagacatgaaaggttggccttactgttgaacaataagtaaatccacaggctcctgttgtaatctcatttct

SEQ ID NO: 167548 - DNA, 198 bp, Homo sapiens
tgggcatctaagtaggggaccaataatctcagcccaagaatgtaaggctgccaggaatcctttctctatgcttaactccatgattaattaaactcttttaaattatgccagaattaaccctgtcaatagaaatgttgcccacaggctttgttctcagccttttgaatttccctttgtccttttgtgtttgttttatga

SEQ ID NO: 167549 - DNA, 508 bp, Homo sapiens
tagaggatcccctcataatgtgtgcccagttttgagatcgaatgacttgaacttgctgagaataactagctagtttttctttttgttctcaaccatcttggatttaagtttcttcttagtaattgtatttaatcctcagattagaaggcataagacattagctaagaatggaaatcaaacaggagtagggttgtttctctttgttatttgttaatattacattaaccaccctatgggatgggggtgggcttcactcttcctttaacctataaaatgccatttattccacatctcttacttcgtcaagtcacagttcatcctgaggctttagccttattcactatattcttgtagctctatttcactcgttataatacttgttttatgtgcccaatttttaccatctgttgtaagtggttttttaacatctgaattccagaaagctctctgtgcagcgcatcagatttagatacgttccccttttcttcttcttatcagtgtattttgc

SEQ ID NO: 167550 - DNA, 131 bp, Homo sapiens
cctcagtcagtggcagagctggtacttgagcctgggtctgcttggttctaaagctcaagctcttgccattatatcagttccttcggggtactcgggtggggcctgtagacttttcagatgaagtcagcacc

SEQ ID NO: 167551 - DNA, 121 bp, Homo sapiens
gcggcaggcggaaaacttaggaagagctggatgcctcccacggagagcgtcccttccaagcggccccggagtggagtggagtggagtggataggggtagacttttcacacggggacaaatt

SEQ ID NO: 167552 - DNA, 383 bp, Homo sapiens
catttcatctttgggctcccagagtagagggtctgtcaccaaggacttagtcaattcataaagagatattgcaatctcaaaaaaaaaattgagattggttagtcttccagctagcaggacagactatttttttctgacaagatataccatgatgtaaataatgaacaatgtcttgggaaaaatgtgatttatcctttgaaactttgtgcccctttcctgcaaagtctgagagcaaaaataaaacaaaacttttcaaagagcttccttgttctctgagcaaagtaaaagagcaccacatgctgcaccataactgaacctcaagagaaatgtaattcctttaagtcttgatttaggactgagaaaaaataagaggggttatcaaa

SEQ ID NO: 167553 - DNA, 140 bp, Homo sapiens
ctgggattacaggggtgagccactgtgcccggccctaaagtccatcatttcattgctggccgacctctgcatacttttctcttgttactaagtaacttgccacccctaaaatcaccgttttgccccccggcctttgttcc

SEQ ID NO: 167554 - DNA, 530 bp, Homo sapiens
ttcagtagaaaggctgttggtatttttaagggaagctggaacagcaataaacatcaggccaaaggaccgaggagacaatgctaggagaggagtgcagtgcagggggatttcctgtcacacaagaatacttcagtcttccaggttcaatctcactcacttagctgtttaaggagaacctgccagatgccaggcgccattcaaggctctgggaataaagcaatgaacaaaatagacaaaaacccctctttcatggtgcttattcagtaggggaaggtatgttaaagattcttagtgtggcacagtagctcacgcctgtaatcctagcactttgggaggctgaggcaggcagatcacttgagctcaggagtttgaggctgcagtgagctatgattgcaccactgcactgctgcctgggctgagcaagaacctatctgaaaaaaggaaaaaaaaaaggaactcatttatggaaatcggaaagactctctcacattctcaagtaaattatcacctttattgaaccggatagcttg

SEQ ID NO: 167555 - DNA, 246 bp, Homo sapiens
ttcagtagaaaggctgttggtatttttaagggaagctggaacagcaataaacatcaggccaaaggaccgaggagacaatgctaggagaggagtgcagtgcagggggatttcctgtcacacaagaatacttcagtcttccaggttcaatctcactcacttgcttactgtgtgtcaggtactgttccaagcactttaactcatttagtcctcactacagtccttgaactgggtagtatcctcatccac

SEQ ID NO: 167556 - DNA, 416 bp, Homo sapiens
agccaagtaaagcagtgagagcagagagggaacagagcaatctgtaactggttgtgatcatttagttgtaaatacgaccacacttggactagccttttccagtttttaaaggctgccttcattccttggctcatggccccatcttccatctttcagactagtagtgtggcatcctccaatctctctccatctctgagctctgcttctgtccacatgtctccttcattctgactctcctgcctttgttttctaataaaatttttttattgagatgaagctcatataacataaattccatcattttaatgtatacaattcagtggtttttagtatgcgcacaatttgtgcaactatcatcattaattccagaacttcctccctcttataagaactttttttttaacttttcttctttc

SEQ ID NO: 167557 - DNA, 210 bp, Homo sapiens
ccagtggtgagtatggccgaggctccaccaccagcccccaggcaggtgcctgcagacagggtgctcacacagggcgtgaggcctggcttcccagtgagggcagcagcccagttactggggacgtcggccccgggcaggtcctgctggctggctcctcaggctacctggtgggctttaaattcctggaaagtcacggctctgacagcggct

SEQ ID NO: 167558 - DNA, 305 bp, Homo sapiens
ctcccagagaccattcctaatcttcaatttcagttatacttttgagacaaagtcattgctttttaatctctttctgaacttttgttcctgatgattgagcactaaaacacagagccttagggcatgactttgaagccatatggctgtgttctccattatctggcaacctggttttaggaatcatgtgacgtgaattatgtagagcatcagaacagtgcccaggacaaaggatgtccggcacgtggtggttcatatcatcattacacttggctgctgagctgatgtcttgcagaaaacctaaatga

SEQ ID NO: 167559 - DNA, 266 bp, Homo sapiens
cgctatatccccaacacttagagcaatgcttgttcacattggacgcccaatatgttgaatgattgaatggctgaatagacgagtgaatgaatgaatacacagagcgaatcagatgggaggtgagccaagcctattgtgtgtgtatggcgtgtgtgtagtgtgtgtgtagtgtgtgtattgtgtatgtagtgtgtagtgtgtgtagtgtgtatgtagtgtgtgtgttgtgtgtgtgtatagtgtgtgtgtattgtgtgtgttgtgtg

SEQ ID NO: 167560 - DNA, 132 bp, Homo sapiens
ccttccctccccagtggtcctcaccccaccaggcatctagagaaactcaatttccgaggctgtttgtccccatgcgggagtctggggctgagcccctgagagacccggagtggcgggacctgcctttctcac

SEQ ID NO: 167561 - DNA, 176 bp, Homo sapiens
ggaactggatgtgagaatggatgagggcagagggggaatttaacacagacaaacagaatgaaagacagagaggaattgcctgctaaagtatgcccgccctcagctcccacagcaatttacttactgctaactgaacacccaaggaccgtttgcatctttgcagattttcctaccag

SEQ ID NO: 167562 - DNA, 270 bp, Homo sapiens
aagagttaatcccttttagtactagccaataattgactgccatatttgtttgacatcattcagtctgaggaagaggaattagaagaaagtgagcacaatcgatgaacacagatcaactggtggatgtggtagaagatcatggagtatttccctaagccagtggtccccatgatttttggttatgcaccatcataaaaaaaattgcagacacaccccccaatgtgcctatattttaaaagatcatttaaaaatgcatatgctactgtacta

SEQ ID NO: 167563 - DNA, 393 bp, Homo sapiens
caagatgtcagcgtctgcctattccagttactagtcaagaaggtgtaattaggaaatccaaaaaaaccctgtttgaaatgctaggtattccaggacaacatcagaaaaatatcttccacaaagactttcatgtttcaaacataatacgccacaatattactttttaaatttcatattaacacatatcaagatacaaagacccaagctataaaaatagaatttccaagaaagctttaaattaaaaaccaggttttgcaatgaggtgctcttacattatatcactgaaatacccatcttgagcctgtgtctgacacaaggctcaaaatgggaggatggtctgagcccaggagttcaggaccagcctgggtgacatagtgagaccctgtctgtacc

SEQ ID NO: 167564 - DNA, 447 bp, Homo sapiens
tgttacgaagaggaactaactaactaaagaaagaaagaaagctgatttcaaactgaggctcctttatttattagcattatgtcttttgtcaagtttattaacatcttcagtataaatgagggcaataagtttatttcataggaatgtcatgaggatcaaactaagtaaagcagataatgtacttagcacagtgctgggtacatagttagccccatatctgtggttaatgactaaacctggaaatcaatgccgggcatggtcgctcatgcctgtaatcacacttttggaggccagggcagggtgatcgcttgagcccaggagttcaaggctgcagtgagccatgatcatgccattgcattccagcttgggtgacagaatgagactccaaatctaaaaaatttaaaataaaaatagaactgtaaatcagtgaggaactaaactaaaaag

SEQ ID NO: 167565 - DNA, 125 bp, Homo sapiens
tgctgggattacaggcataagccaccatgccaggcctctctttcaagtcttatattttctttcttgccgccacctacattctgtcctgcctccaccttctaaattgtcacctgttcttttatatt

SEQ ID NO: 167566 - DNA, 1008 bp, Homo sapiens
ctgcttcctcccttatttcgcatgtcctgcttctgccatttgacacgttttgcttctgcttaagctaacctatgtccaacggtccccttcgccccccgaatttctctgctattctcctgcctcaagatgtccgtgagtctggttcacgcctgtggtattgggggtggcctgaaggtgaaggtttcctgtcctgttctgctccaggtctcaggtacagagggaagggtccagggtcccttggcaagaggccgaagggagaagacccctgggtctctggaggatgggaagggaaggattggctctgagggccgggaaggggcccgccgccacgtggctggggtatgacctttgctaccttgatacacactttatcgtgtgtattcacatctggtagctcttatttcaaaatttgcattccacagtccaggggccaagagcaacatccgccggccagctctgtcccactcaggccggccagcaatgcacagggcggccgcctgcaggctgcggcctcgggactgtccaccagggggcgcccacccggccggtgctgggcggcccggctcaaggggtgcggcccgagaacttggggccctctcctgtctcctgtcattgagaacaatcaaccacagcagggagctggcttcatggggtctttgttgaggacctgcacttccaggtgctggaaggtcttccccagcctcctctcccctatcccagcccttgaaattctgtgtgtgttgggggtggatttagtcattcaacaaacatttattgagcaccttgctttactgagcagtggaggaggtgaagtcagagaagccgagggggcgcggggagcagacctgccgggctttgtgagccaggcaagggttgggctatgagggtaagcatgatggagaaccatagagggtttggggcagggtctaacccaaccttctttgcaggccttgctacagctggaatgtggagaccccaccctccaatccccctacaatctggatgggg

SEQ ID NO: 167567 - DNA, 390 bp, Homo sapiens
aagagacagggtctcctgtcgcccagactggtgcagagctcactgcagcctcaaaaactcctggattcaagtgatcctcccacctcagcctccagagcagctagagcctagctaaaaaattttttaaaaacattttatggccaggcacggtggctcatgcctataatcccagcattttgggaggctgaggcaggtgaatcacgaggtcaggagttcaagaccagcctggccaagatggtgaaaccccgtctctactaaaaatacaaaaaattggccaggcttagtggcagacggctgtgatcccagctactcgggagaccgaggcagagaattgcttgaacctgggaggtggaagttgtggtgagccgagattgagccactgcactccag

SEQ ID NO: 167568 - DNA, 455 bp, Homo sapiens
ttaggattttagttcatttttgagttaatttttctgtatggttttgaggtagggctctagaggctttttatctttggatccacaaaacaatcaaacttatttcctattggttatttttgtgattgttttttaaatttccaatattgagagtataaaattgtggatctgagcctatccttagctgctcatgagtagatttttattatttactttatgattgatttatgtatgagacagggtctctctctgtctcccaggctggggtgcagtggtgtgatcatggctcactgcaaccttgagctcctgggctcaagcagttcccccacctcagcctcctgagtagctgggactacaggtatacacgaccatgcctggctaaatttttaggcagagttgtatagatgcttgccgattacactaataactgcagtaaccagaatgtagcaagcaatctg

SEQ ID NO: 167569 - DNA, 375 bp, Homo sapiens
tgggcaacatgacgaaaccctgtctctacaaaaaatattaaaaagttagccaggcatgatggtgtgtgcctgtagtcccagttactcaggacggattgattgagcctgagaggttgaggctgcagtgagcagtgatctcatcactacacttcaacctgggtgacagaacaaaccccatctcaagaaaaaaaaattctattttgtgttcattcctctttctgtatttctactgcagctacccctttccaggcagatgtccacaacagtcatatgtttaacaaatattgtctatagactatatgccaaatcctgtttagacttcttgtagactcttttcgcttttagtatttgttgcatatcactgtgatataactt

SEQ ID NO: 167570 - DNA, 566 bp, Homo sapiens
gacagccaaaccaaatcattccagtgctggtccctctcaaatctcatgtcctttgcacatttcaaaaggcaatcatgccttcccaacagttccccaaagtcttaactcattctagcattaacacaaaagttcacatccaaaatctcatctaagacaaggcaagtcccttccacttaggaacctgtaaactcaaaaacaagttagttacttacaagatacaatggggatatacaggcattgggtaaatgttcccattacaaatgagagaaattggccaaaactaaggggacacaggtcccatgcaaatccgaaacccagtgaggcagtcattaaatcttaaagctccaaaatgatctccacctaataaataaataaacaccaaaataatacgccctgagcactgtttatagacgtatgtgcctctagttttcaatatatgttgaagctattataaataataaaatacatattactgttacagaatatagaatgcattagagatttcttcagtattgcatgtatatcaacatatattaactgtataatttatattacatgggtgttgg

SEQ ID NO: 167571 - DNA, 146 bp, Homo sapiens
gtcttaggacctcggtatcagcagagaagaaatacaggaagggttaatacatcccagttggccaaacctgcagaagcagtcaccccctcccagtgtaccttgtagtttgaccatggcacttcacacacttctctgctggatacctt

SEQ ID NO: 167572 - DNA, 325 bp, Homo sapiens
caatggaatattattcagccataaaaaagaatgaaatcatgtaatttacagcagcatgaatggaactggaggccattatattaagtgaaataagccaggcacagaaagacaaatgttgcatgttcacgttcatatatgtgagctaaaaaaatacatctcatgaagattgagaatagagtgatggttaccagaagccagaaatgatagaaggaggatggaaggaaaaaagaatatagctatacttattaccactgaactgtatgcttaagaataataaagacagtaaattttatatgcatattttgtctaaataaaaaaattaaaa

SEQ ID NO: 167573 - DNA, 212 bp, Homo sapiens
tgcaataatcgtcccaatcctgtggctcccaagggttttctggatccagtgcaaactcctgaatgtggccactaaacacttcaactggctcaccctgttttccttgccagctccatctggtttcctccatcttgtgtggcaagatactgtgtccccacccttgtttaagaggtagtgcctgtccctcatcaacctccttccactcatgccag

SEQ ID NO: 167574 - DNA, 615 bp, Homo sapiens
cccatgttgatttttctaattcaggaatttctaaatattaatggttagctgtgatgtaaatgtaaacagcagagagatattttaaggccgaagagcagtcttattcaatatagatgcctaccataggattttacctaatagagagcttcttcttctcccagctctaggttgaggagcatgaaacacacactgaaactccggcatggcaggacttaatccacagaacaaggatttcatcccatcacttatctctaagctccacaaggaggtttggtacaaagcaattaaatcatccttcaggccacccagctcccaatgtgggttttctcccaaacagctacgctcatttcagttattaaatgtgacagtggctttaagtacattgtcccagaagtcctaaacaggaagaatactgtaacctctcgtttaagagatcatgaaccctgtactgactgtgacgacaatcacgaaagtaagcaaagagaagttctgagcagtcaccatcccttcacaaatcaaagcactaaagctcacacccagaacctcaagaccatctaagaccatttccccacaatgctaactaggggacacttcaatagataagattagaagcat

SEQ ID NO: 167575 - DNA, 268 bp, Homo sapiens
attttttctaaggccagtctggtgacaatgaattctctcagttcttgcttgtctaaaaaggatagctttgctgggtttaatattctaatattcttggctgacgggttttttttttctttcagaactttcaataggtaattccattctatcctggcctgtaaggtttctgctgaaaaatccacagttagtccactagcaattcccttatatgtgacttgacactactctttgctgtttttagaattctctttgacttttgacaatttgg

SEQ ID NO: 167576 - DNA, 400 bp, Homo sapiens
caactacagtgggcacctcacaggtttttctacctctattcttgctcccatcctcaatatattatccatggagttgtcagagggaccttttaaaattacaaatcaaagcaagttcctgtcctgcttaaaattctccaatggcttaccatcacatttgcaatgaatccaaatgccttttcctgtatcaaaaagcccctacttttctgacctcatctcttgctactttccctattactttctatgttctggccacttgaacctccttcctggtcctacaatacagcaagatgttcctactttagggactccacattcattacttcttctgctcttccccaccacctttatgacaggcttagtcattcagatctcaactttaaagtcacctcctcacagaagc

SEQ ID NO: 167577 - DNA, 479 bp, Homo sapiens
ctgatggcccttaaagcaactgccttgtaaagtggcctctgtccagagccatgcttcatagatgctgaggttcagtgatggttgtccctgtcacaactgcccagttgtgcatactgaccctagctgagacagccgtttctgactcctctctctctcttctcccatttcctattccaagcttcaggtgaaccagtcattaacaatctcagcctattaacatgctctggtggccataatcgcactgtaaaggaagggaggtggtaatgacagcttccacatcacacatcacacatcacgaaatgcttttatacattagccccttggaaccgcaaatgactcccccaacaatagacagaagttattatttctattttattcatgcgatagataacgcagcaaaataggtgaatggctgaatggcttggtgtattactcaagactcattttgcaagtaacagaaacccaaatccttttagctc

SEQ ID NO: 167578 - DNA, 398 bp, Homo sapiens
ctgtctaatgaattcctgaaacagcataaaagccctgtgtcttgtagttacagggatggccttgtgggtggatgttgctggttgaagaaatattagttaatatcacacaagcctgttattaaatgttagaggcagctttgcaaatgtccccaggccctggtacccacaggggatgagcaggtaccaagggtgccacccttcatttacaggaactggaaggagggaagacagagccgatgtccactggcactagcatgaacatggcagctaaacattggcacaagtcttcatggctctatctcaagcacctaagaggaaattaaagccccctaaaataaaattaagggacctagaataagggtgacaccaaacataatgctatttgttgttttccccaa

SEQ ID NO: 167579 - DNA, 246 bp, Homo sapiens
ggctgcaccagactgatattcttcagaggtagagagaaatgctagacagatggggagaagccacagaaagccagtatgagtgggcagagaaaagacaaagataggtgacacattttgtgaaaaaattgccccaaattacatttatgattcatccatttaccagctttcctagaaccctgaacaccaaaaaagtgcaatgcatggtgttaggattccagtattggggagagaaggacaggtaagaag

SEQ ID NO: 167580 - DNA, 183 bp, Homo sapiens
cctaaaaggcagaaggcccagcaagagaagaaggctttctcacttcttgtgatctaaggctcacctccccagacttcattacctgtccaggatcaattgttccagggtgctggacaatgggagcatccaggcccttccaaggtgtgtttgacctccatgactaggtcagatccccattaggag

SEQ ID NO: 167581 - DNA, 441 bp, Homo sapiens
gcctcccaggttcaagcaattctcctgcctcagcctcccgagtagctgggattacaggcgcccaccaccacctctggctaagttttgtacttttagtagagacagggtttcaccatgttggccaggctggtctcaacctcctaacctcaggtgatccgcttgccttggcctcccaaggtgttgggattacaggtgtgagtcaccatgcttggccagctcagggatttttatggaggattcgttacgtatgcaggattgactaaatcactggtcattggtgataaactcaacttttagccctccaaacacattgttggttcccctggtaaccagccctcatcccgagggactgtccaggaacccactaagagtcacctcattagaacaaaaaatgctcctaccacccaggaaatcccaagggatttaggagccctgtctcag

SEQ ID NO: 167582 - DNA, 284 bp, Homo sapiens
aatattttccccagcttctgggaaactcaaggctaaattctatgctcattgcttggcccttcctttatggttggtttcctttcacttgcaccttatttctctttctcattttgatgacttcattgcacctgatactttattctaagggagctggaacctattctggaagtaagaatgatatataaatcaagcatgaatacaactttcatttggctgaaaagaaaagcctttttatactttggaaagtcaatgtcttaagctagtgctcagtctctggaggaatc

SEQ ID NO: 167583 - DNA, 298 bp, Homo sapiens
gtgaggccccgcccctggaacgcgccctttggaagccccgcctccttaggactcagaaaatccgctaacccttcaactcttacgatttggtcctctaggagactctcccagatggataggccctggtctctcataatatatccactgggaggctgcgccgcccaacttttcgttactgtatctgagagtcccttgtcccttccccacccctctagttctacatcacttgttctcttagtaggcatctccttgaatttctacccagttagaattgcatcctgcagcgggctttgccacg

SEQ ID NO: 167584 - DNA, 476 bp, Homo sapiens
tggaagcatctgtgaaactttgtattaacaaaccattatatgttaataatacctatctcagagaactcctgtaaagataaagtaagctaatgtttgcaaatttcttggcacagacagcctggcacacagtaagtgcttaatatgtattgactattataatagggatggagcagttaaaaacatgagtgttttgcactttaggagtttccagaaggaagccaaattttcctgtgtaatttggaaagcataaaatagaggtcaggtgtgaaactggttcccaggagatgatggagaaagacatggaggactctacccactgttaaactgggtcagatcaggatagaccccaaaaaagctgtgctgtgaaatcatctatgtctcacagagggacattgggatccatctgcaaggtgaaccaccatcaccatgaagtcaagggtgaggacaccagtgtagccctcccccaggggcaagga

SEQ ID NO: 167585 - DNA, 352 bp, Homo sapiens
actaacagacatttaggagatttgtaaaaatgtaaaacagtgccactattcttaccaaatttttgttttgaagagttatttttcaaagaaagtcatgttattaacatgtaacattttaaactatttaaaattattttagttttaatttcagtatggcaaatactgacagatataacttggatacacagaggctttttggggggcttcagtaacgtaacagtgtaaaggatcctgacatcatagtttctttgctcttacataacaccagcatctccgtttgttcacaagatcccactcattatttacttaataatagaactcctttagttctttatgcaacaatactcttctt

SEQ ID NO: 167586 - DNA, 324 bp, Homo sapiens
atgataatagctattgaaaatgaggtaagatgatatctcattgtgatttcttatttgcactttctttataataaataatgagagcactttttgtataccagttggccactggtatgtcttcctttgagaaatgtccgttcagatcatttgcccatttgtaaattggattgttttcgtttttgctaaggggttgtttgagtaccttatatattctggttactaatcccttgtcagatgaatagttggccgatattttcacccactctgcaggttgtctctttattgatccctttgctgtatagaaacttttttgcttaatataat

SEQ ID NO: 167587 - DNA, 574 bp, Homo sapiens
tgctatcaaacacgcaaacccgaaaattcgtttaaaatgctgtttgaatcacatttgttttgtccctaggttagtctatactgattgcaatttagtgtttacagaaacgtatcagtttggtcttgttacttggtctaaggcagactaattaccacagattttaattcaaaggacagtgtaaaacagaaaacggtacaagtcaaattgaaggcaataattgaaattttctggctgatgctggaactgtttttcacagcttttctcaattaccttctcaaataaggtaaggcttacaaagttcagactccttaattgggtggcctcctaagttgtttctggggaatgaagaaaaaaattaaagtattccttaccaatactaccctaggtatttcttgagactaacaggcattttctaaggttcaaccttaagatctgttttgttagttcttaattatacagcaaaagtttaataagagatcatgctctcaactacaaaattataacaagctcctcactgagacagatttggagaaagagaccaaaataacaacaacaacaaagcattgtacttaca

SEQ ID NO: 167588 - DNA, 234 bp, Homo sapiens
tctctctgagcctcactttcttcatctgcaaaccataacacctctgaatctatttgttactctaatgctagctatctagtgtttgctctctaaatgttagttcctccacctgggggctgggcgggcggtggctgacctcaccccatgaagctgtctcctggctttcccagctagagcctgtgggtatgaagattgcagccccgtcctcctgggggagtattcagtgtaacaagc

SEQ ID NO: 167589 - DNA, 283 bp, Homo sapiens
actttgcacatgacaacatatatatatattagagacaggttcttgctctgtcacctagaccccaggctgaagttcaaggcacaattctagcccactgcagcctcaaactcctgggctcgaatgatcttcccacctcagcctcccaagtagctagtactacaggtgtgtccactgcacccagcctatcaaatacatttcaatgagggcctcctgtgggccctggtttcctcttctgtgaaggagagtggtttgtctagtagtctctaaggttccttgaagccct

SEQ ID NO: 167590 - DNA, 342 bp, Homo sapiens
atactacactgccagggctaaacttgaaattaatcagtttactactctattattgctttatcatacacaatggactatacatgatcttcaagttatcagtaagtctagatcttaactgattctaactttaggggaataacgttatgacagaggaatttccttgaggggctgcctttttcaataccagtcgatatccttcatgggggtataaaaataatgcagcattgtagataattaagttatttcaaattgcatttctgcccttatatgaagaacactaactgtcgggaaatcaatcttgcaagaaaaatacctctgtgacatattctatcaaattatatg

SEQ ID NO: 167591 - DNA, 274 bp, Homo sapiens
caaggcggcctcccgggccggcactgctttcccacctcgcgctgcccgcccggcctctctcctgacccggccttgccggtgtcaggtcttgctttcgggctctctgtctgtgcctgtttctctgcctgtttctgtctctgctgtttttctgcctctctctcttttgtctctgtcactctcatctttgtcactctctcgtctctgtctctcatctctgtctcttcttcttttgtctctgtctctcatctctctccctcttctttctgtctcttgt

SEQ ID NO: 167592 - DNA, 271 bp, Homo sapiens
caggaaagcactgtatatacaattacagttttataaaagatataaatcaggaccagccaaataaagagatgacagggcaaggtctgggagggtcctgaatgcaaagcttccatgtcctattcctgtagaaccagcatgcaccaccctctggcacattgatgggctcaaaaaccaggaagtttccccactcagctcaatgtccagagtttttgttggggtctcactctgtagacatgattgattgaatccttgaccatggatggactcaatc

SEQ ID NO: 167593 - DNA, 128 bp, Homo sapiens
gttaggagcacggtcttgagatacgaagaataatcaaagaacttattttcgtagttaagtttatattatctgccctaggcaagcaggcatcataaaacttggtggggccttgctaaggaattactttg

SEQ ID NO: 167594 - DNA, 408 bp, Homo sapiens
caagtagctggtactacaggcgtatgccaccatgcccggctatgttttttttgtatttttagtagagacgcggtttcaccatgttagccaggatggtctcaatctcctgacctcgtgatccaaccaccttggcctcccaaggtgctgggattacaggcatgagccacgcgcctggccttaattttgtatttttagtagagacagggtttctccatgtaggtcaggctggtctcaaacacccgacctcaagtgatctgtccacctcggcctcccaaagtgctgggattacaggcatgagccactgcacccggccaaaaaggtgtttctacatcaaactcttccattcactgaagaaaatagcttatcatcaatccttcagaaagcatgcttacatttgccttttataca

SEQ ID NO: 167595 - DNA, 383 bp, Homo sapiens
accacccccatactccaagtcttatagatgagccatttcctgacagctaaggagcaatcaactccactgtcctcctacataataatgaataatcttttcttgcagtcaataaaacaggctcccacgatcatatccttttatgacttggggatgctggtgaaaaatcttgaccagatattatttgatttgggagaatagagcaatgtaaatatggcattcaatatgctttaaaataattatctggaaggtgtaactttcatgctaaacatgatttacactacaaagaaagtagtctaggagaaataaaccacggaacttgtgggcattttgtaattgtctaatctagctcctttattttatagttgtggatgctggggccaagt

SEQ ID NO: 167596 - DNA, 241 bp, Homo sapiens
tgccaaagcgtagtacccaagtgatggagccagaccctgtctctactaaaaattaggaaaagaaatagcctgtctactctattggtccataacctctatcgagacagtgaccttgtctgctttattcaatgcctggatcttttcctagcacagtgcccagcacatggagacactgaatttggattctcctttttgaagtccccatatccacttcagtattgggttgtactacgctttggat

SEQ ID NO: 167597 - DNA, 225 bp, Homo sapiens
tttaggtctctattaacaatttattttctctacccccatcacaaaaaagcagaggaagtagtgtagcagccccagccacagccacagccacaccccactacttgcttcctaggtgtgtgtggtgtgtgactgcctgcaagcaactccagctctctgaacttgtttcctcatctgcaaactggaaatatttatttatttgacaaggacattatgagaatttactct

SEQ ID NO: 167598 - DNA, 210 bp, Homo sapiens
taccagactgtttcagtgtggctaacccctagcctagaaacccttatttttctttaattttaattttttattttaagttccagggtacatgtgcaggatgtgcaggtttgttacgtaggtaaatgtgtgccatggtgatttgctgcacctatcaacccatcacctaggtattaaggcaaacatatttcattttcatcaacccatcaccta

SEQ ID NO: 167599 - DNA, 509 bp, Homo sapiens
ctggaacccactgacagtagaccactgactgccaaaggtccaggtgaatgcagtcattgaggaccttgcttcccaccctcctggtcctttctggacaatattccctcccaccactataattattggatcatggtggaaatgagagcattgggtagcatttgacacatgggctgaaggagggattacaagagcacagcaagaccccaggaggccaatgggctatggccctctcagctcaggcattgtgcggcaagctgctaaggggctgtgcttggcgcttgggcaattcttctggccaagcttggaacctgcatgtttccagtgaccccaagtgagaggaaggcaaaaacactgggtaacacaacagtccagatggggagcctcaggattaacttgtgtatgctgcctcgcctctgtcccacagcaacctacaagataggaattgctgtccctaaattacagaggatgaagcaagcaagttcagaaagatttgtcagcttgtctaaagt

SEQ ID NO: 167600 - DNA, 183 bp, Homo sapiens
aggcatgagccactgcgcctggcctattttaagtttttaatacttggaaatatcttcttttggttttctaccagaagttctagtatcccaccagttttctgtaggcactaattttttgttctaatcactgaagattcaaggatattttacttaggtaaaatgccactcttcccacctcaatcc

SEQ ID NO: 167601 - DNA, 539 bp, Homo sapiens
agttccacctaaagatttctccatacataatgaactctaacttaccggcatgtaaacagacctgacctactcttgtgccaatctctgagtttcagccaatcacaggcagccaactgtttaatccctgttcaaataaggtaaatgccaagctgtaaccaacccagctgtttctgtacctcacttccattttctgtacatcattttcctttttatgtccataaatcttgtctatgtggcagctccagagaatctctggacctattttgattcaggggctgctcaacttatgaatcactgttcaattaaactccatcgatttaatttgtctaaagttgttcttttaacaccagaataatgtatatcataatctccctcactctaatcatgtggagattcagattttttcagctaatgaggctccaaccctgtctttgtttaaaaaaaatgaaaaaacaaaacaaaaccatgtcctagttttactgctaacagtatttctctgacttttctggatttcagttttgtacaatttctataataag

SEQ ID NO: 167602 - DNA, 439 bp, Homo sapiens
taaacagactcaggaggagcctgagattaacaatttgtttaaaaccctgtcagcaggaagcagttaagagcagtcatcgcccactttccccaacagcggcctgagtctccacttctgatggggggaatgaaaggagttagccagcctgctttaggcagacagtaagggaagagtccccagagaacctccaacccatattttgagcagataaaggaacttgtacagggggcttgcctaaacatgcccacatgcgcactgggggaatgggatggagccaacaggaatttgtgtcttatacaaataaggaatccagttccatcagcttgtatgtaaaagctcttatattcaactgtgaagggggcaactgggaacctgttttcaggatccctctttttgctgagagctttcctttcgcttaataaattgcattccactcact

SEQ ID NO: 167603 - DNA, 279 bp, Homo sapiens
agaacagaaaacagccagacagcagggtcacactcacagcgtcagtacccatgggaaacgtcagccactaaatgccctcaccaacagagaatggggaaaaaagagggggaaagaaaacttagagaagaggtcctggtgtgttctccccaggacggggccagacccctcacgcgttctccccaggacggggccgggtcccaggtggaacttgcttttccctctggcagtgaccatgcagccgcctgggctgggtcattcaccctcccgtctcctcccaca

SEQ ID NO: 167604 - DNA, 250 bp, Homo sapiens
gacttattcaccatcaggagaacagcacgggaaagtccggcccccatgattcagttacctccccctgggtcccgcccacaacacttaggaattctgggagatacaattgaagttgagatttgggtggacacacagccaaaccctatcaccatgcacagaggaggagctcaataaataaatctctgacagctggtgccaaaggcctgctgtgtggcagtgatatgaagaacaggactgccagagctggggc

SEQ ID NO: 167605 - DNA, 491 bp, Homo sapiens
tctcccttttagaggattcagtcagtacactttacattgttatttactgttttggtgtacttgatgtgtttctatttaccatccaacagctttacagtatatatttcagtataacaattacgttgtgatggaagagttagtaatttttacatatattcactagactatgtatatgaaaaaatcacttttgctatagcacttatttttttttggtgcagataacactcatatataacttttccactctgatctagcacaaattataatttacaattatttctaaatacttaagtggatttaaattttggcaagcatttttcatgggtgttatgcttttgacattttatgctacattgtgatgtttattttgcttcttgtttcataggacactttatagaataaaataataagaaaacatcgtacaggcaaacagtggtctaaaaacctacagagacacaatcttagttgatatataaaagtgtaaatattac

SEQ ID NO: 167606 - DNA, 159 bp, Homo sapiens
accaaaatctgagcagtgattaattctgaaagtggaaatacaggtgattgctactttcttctttgaacttttctgattttttaacattaaaaacacttattcacacagtggtaccattatactattaaattttaaaatgattgtatacctttcccataa

SEQ ID NO: 167607 - DNA, 584 bp, Homo sapiens
ctggaagcgggagttgactgcactctccctgccccactgcagggcccgccacagtgttgctcatgcctgcaaattatattttttaaaaagtaataatggatcatcgaatacaaaaaaagcatgtgggggatcagtctcctgcagaccccctagctagaagcatggatgttccgacatcacaaggcagccttgtcttttcctatgtaggcacgtacgtgtgtgtcttacacaattaggatgtattttgagtgtattttcatgtaagaacgtattctttaaaaagatgatctctggccaggcgcggtggctcacgcctgtaatcccagcactttgggaggccaaggtgggaggatcacctgaggtcaggagtttgagaccagcctggccaacatggtgaaaccccatctctactaaaaatataggaattaattaggcgtggtggcgggcacctgtaatccctgctactggggaggataaggcaggagaatcacttgaacctgcgaggcagagattgcagtgagccaagatggtgccactgcactccagcctgggtgacaagagtgaaactcttgtctcaaaaaaaa

SEQ ID NO: 167608 - DNA, 225 bp, Homo sapiens
atcccggcacgtcgagtccagatcgtcactgggcgcgtgtggctcacagtctgtgatcccagcacttggggaggctgaggcaggcgggatcacctgaagccaggagttcgagaccagcctggtaatatagcaagaccctgtctcaaataaatgaatgaatggtcagaatgggattcactttagagtgattttttttttctacttttctacagtaaatgactctca

SEQ ID NO: 167609 - DNA, 276 bp, Homo sapiens
catgccctgcctatccccaacaccaggttcagctgcctgtgaagtcatttgtttcgtgcacatttcctagttactggtatttttttaatcattaaaaatgtttttaaattattgatagtaattgtacgtatttgtagggtgcatgtgtgcagtgggtgatgatcagatcggggtgcatgtgtgcagtgggtgatgatcagattggggttaatggcagagccacctcacagttactgttttgtgttgggcgatacgtccggggtcccaagagtcggg

SEQ ID NO: 167610 - DNA, 707 bp, Homo sapiens
cctgaggagacagccacgataaaaaaaaaactcgcaaacagccacgcagagctgagtctcagaggctgtaaaaagaggtcttgatgataaggaccactcaggctccaagcctggcctgttactgatttaggatttatcttttacctacttccccaaaagatcagaggcagattatagttaagagtcacatactcagtagactcatttaaataagaatataagaatcagaggaatgtaatgagggtgaggtaataggtgagatctgcttcaattgaaaataaaatttagttctgggtatccagagttaaggcaaaaaagcaaacctatagactatcattaggcagtggaagaatcaggatcaatcagaggaggcaaattttcctagaactaaactcaaacttttataatcagaaactgatctaaggggccaggcgcagtggcttacaactgtaatcccagcactttgggtggccgaagtgggcagatcacttgaggtcaagagttcgagaccagcctggctaacatggtgaaatcccgtctctactaaaaatacaaaaattagccagacgtggtggcgggcgcctgtaatcccagctacctgggaggctgaggcaggagaattgcttgaacctgggaggcgcaggctgcagtgagctgggatcgcaccactgcactccagcctgggctacacagtaagactccatctc

SEQ ID NO: 167611 - DNA, 347 bp, Homo sapiens
gcgtttatgttttccacattgtattataaatttattaattatagcccttaatagccaacttaaaattttgaaacatctctatgtttttcttttcattgctaacattgttgatttgtgtattcctttgtaatgtattgaaattttatcattacttaccttttcatctgtagtaattccttggccttaaagtctatttgggacattaatatagttacttcaaggggctgggcatagtggctcatttctgtagtcccagtgctttgggaggctgaagtggggggatcacttaaggctaggtgtttgagataagcttgggcaacataccaggaccttgtctctccaaaaaa

SEQ ID NO: 167612 - DNA, 351 bp, Homo sapiens
tagaaaagtggcagtctgccaaagagagtgcccagaccaacccctaaacaaaaaaatcttttgtcaacgactctaataatttgtacaattcaggaaaggggggttgcacagtctttgcagatgtgcatttatgatgctatttttaagcagagcagcatgaaagaatagattcatacgaattgtaagttgatcattcattttaagcatttggcttctgctcctgctaaaatttcattctgtggaacgaaaacacagccagccctgaaacgaggtaaggcagggtgtgacaagatgaaattcttcattttcagacctgtgatgcctgctgaaaaacagaaagctttggggtct

SEQ ID NO: 167613 - DNA, 272 bp, Homo sapiens
tgtacaatggatgtgtggatgaatggatgttccaattccagtatcactaggtatctgttccactggaatacaccaatggattcagcctccttctgttcgcatgcacagccaagaatatgactttgctgtctccctcatgacacgacagtgatagaaaaaaagaagatcttgaaaggctattttgtgagcaatggatattaaataaatgcaagtgacttaacaattgctgctgattgaacagaaatataagcacaataccacaaaccatcata

SEQ ID NO: 167614 - DNA, 360 bp, Homo sapiens
ataatatgattattgagtagcattaagggccccctaagggtttgtgttcatgaatttaaagttaaatcagtcagcatgattatggtttttctccagccatattagctttataggtgcagaataggcagagttttggatttaatcagacttgtagatttgctaagggagttttacagattaacagaggagcaaataaactgagagtgtatgggaaggcagttataattattgaccatggaatttaaggtggaacacagaaggaggagaatataataaaagaatgacgtaaaaagtgatagaaccgaaagattggcagttcctataaagtcaaaggacttttgaagtctggataagtattca

SEQ ID NO: 167615 - DNA, 220 bp, Homo sapiens
agcaagaaattagaaaggtctcaaattaacaatgtacctttgcaactagaggaactagaaaaaaacaagccaaccccaaagcaagcagaagataataaatatctaaaattagagaagaactgaatgaaatttagacacaaaaatccatagaaaagatcaatgaaacaaagtgttttttcttcaaaagaataaacaagatcagtaaaccactagctatatt

SEQ ID NO: 167616 - DNA, 242 bp, Homo sapiens
accagcctgggcaacatagtgacacctcgtctctacaaaaaatacaaaaaaatttagccaggcattgtggcatgcacctgtagtcccagttactggggaggctgtggtgagaggctcccttgagcctgggaatgccgctgcactccagcctatcttaaaaaaaaacgcacaaaaaaattagccgggcgtggtggcgggcgcctgtagtcccagctacgcggcaggctgaggcaggagaatgg

SEQ ID NO: 167617 - DNA, 366 bp, Homo sapiens
cccagctattcgggaggctgagatgggaggattgcttcggtccagaagtttgagaccagcctgggcaacgtggcgagacctcatctccgaaacaagtaaatacaactaaaaatccagttcctcagttccatgagtcatgcctaaaatgctcaacggccctatgtggccagcagctactgaagtggacagcaccaaatacaacatttccatcatcccagaacgttctgtcagaaaggctgctccaaagagacagtccttgaccttccggaactgcacagtttggtgagatgtgtgcagagacagaggaaagccggcttccctttatccacacacacagatggccagcatctccgggtgtgccgagaa

SEQ ID NO: 167618 - DNA, 448 bp, Homo sapiens
ggtgggcccggttcgggggggcgcacggcctggggcgtcgggaagaggctgcgggcagcggggcctgcgggcgcggcgtggcggggcgggaaaacggctctgtcccgtggggcgcaggcaggaacgtgttcccataaaagacacagggaagaccaaccctgggcgttagccatccaaaccttccctcccgtgcgaaacccgctgccctgcggccaggactgtgagggaagcgatgggaggaacccgggagcccgcgaaggccgggccccagagtccgggcgcccctgagcggggcggaggggacaaatagaacctttttaaggacagctgaaagagattataagcgcggtgtgctgggactttggaaagggcgcgagtcattagtgggggcgaatcagaggggagtatgttgacgggataataacaaaaataaagaggcttgataaga

SEQ ID NO: 167619 - DNA, 341 bp, Homo sapiens
tggattctgaaagaagaggaggagttagcaaatagtggaggcacgagtggtgaaaatttcattttcagtagagccgactgcacattcagattcctagcacccatgaaaatgagtatgctgaacccaggaattattattttgttatagtttgagttcagcatttgaggcagcaagatatataatgctgaagagaaaacagccctgtgaagaattttgtgtgatttcgaagggtttggaagttttttctgaaaaccacgaataagcattaaagaatgtaaagcaggggagtggcataatcctctttgcttttattaagatcatttttgcagtggtatagacag

SEQ ID NO: 167620 - DNA, 603 bp, Homo sapiens
tcgagaccaccctggccaaggtgaaaccccgtctctacaaaaaatacaagccggatgtggtggcaggtgcctgtaatcccagctacttgggagactgaggaaggagaattgcttgaacctgggaggtggaggttggagtgagccgagatcgtgccactgcactccagtctgggcgacacagagagactcccatctcagggaaaaaaaaaaaaaaattatgctctatacttcccattaatttaattatgtagatttttttttggtgttttttattgcccaataggtacttttttggtgtatgttatatttggtgtttattttaccaaatatactattaaacccacacgtgtgcacacacatacacacttgagtataatgcctttcccactcgttagtacattaatattattggctaacactgttatatttttttctttgtaatgactgcataatattccatggtaaagatttaccacacttcatgtagctgttgttcccttttcgatgtcagatttttttttccacttgttttaaacagtgctaagataaatattctagtacatttatattgacatttttattcctgtgagaattggaagagaa

SEQ ID NO: 167621 - DNA, 208 bp, Homo sapiens
ggacacagcccaacacagccaaagacaatagagtccacaaggcagtaaacagtagatatctagttgatgctagaatgtgagctatagacagaaggactggaggggttgaaagcagccctgtgtacaagatgaaacatgagctctggagtgatgcagacctgatgccaatcccagctctgctccttcacatgaggtgatgggcaaattg

SEQ ID NO: 167622 - DNA, 748 bp, Homo sapiens
ttgagaaagaggaggagggaaacagaatccctatagatgttcattgtttcaccatttacaaaacacttgttaaagtactttgtgttgtatccaaatggaggccccaaacaaccttgagagaggggaacagacatcacaatccccatcgtgcagtgggagaagtacaggtgtagggaggtgaaatgccccctctgcacctcacagcaggtgaggggcagctccacgcactcaaccccaagtcttctcatttctttttccctgctctttccctgttcccaactgtgagggccttgctggaggtacatgtggataaaacttcacgttcagaccactctgaaatcctggatggattttacgggaaaggtatcctagggtctgggatctccctaggggtgaccttctcggtgctgtccccaatcagcattttagactcagcttctggcctttggccattgcctggaggctcccccgtttgatgctggttattgcatccaaacctccctttcccttccttcctccctggttcttggatatcctatacaacctgcctcagtcattcacattggtctccaaggccctctgccctcaggaggtttctctggtctcaagggggcacaactgtgtccactcaccagcaggactgcgtgctccctccgtttccctccaccagccttattcccctttctatttcctctgtcaatttgcttgatttactgtagagcagaaggtcgacgcaagatcctctaga

SEQ ID NO: 167623 - DNA, 383 bp, Homo sapiens
ttgagaaagaggaggagggaaacagaatccctatagatgttcattgtttcaccatttacaaaacacttgttaaagtactttgtgttgtatccaaatggaggccccaaacaaccttgagagaggggaacagacatcacaatccccatcgtgcagtgggagaagtacaggtgtagggaggtgaaatgccccctctgcacctcacagcaggtgaggggcagctccacgcactcaaccccaagtcttctcatttctttttccctgctctttccctgttcccaactgtgagggccttgctggaggtacatgtggataaaacttcacgttcagaccactctgaaatcctggatggattttttttttttaagacacaatggcacgtgatc

SEQ ID NO: 167624 - DNA, 256 bp, Homo sapiens
tctgcctgtgctcatgcccttccttttacctggattgctcttcagtttccactctgccctgtcaaagcttagcttacctcccccagacccttggcccaagtccagtcttctcctcaaagtcttccctagccaatttagcccaagtgaaactcccttcagtgaactcctataacttactgtttggaacactccgctcagcaattaatcctatatcaagtgttcattttgatcatttcatgcatgtgccactttttgt

SEQ ID NO: 167625 - DNA, 476 bp, Homo sapiens
tttctgactcttcttagtccttatgtggaattcagttatttccaataattagctccttttccttttgaagaaaacaattgtcttttctcagagtaatgacatcagcctcctcctttaatcaggtctttttttcactttccccctttttttcactttccccaacctctaagcatttcctggtactaggagacttttattgctcaagctggcccattttactatggacagttccaatggttgcacactcctgggacattcctgtgacttcatgcttggtatgatttctaccttgttgaatgactaccataattaacctacttctctaaaaatatttgaaagctgctgtctaatttctcttgagccttgcttttttctcctttaggctaaccatctctacctccctcaactactttcataggtcatagtttccagttcctttactagcctgattgcttttctccaaatctccaacttta

SEQ ID NO: 167626 - DNA, 361 bp, Homo sapiens
tttctgactcttcttagtccttatgtggaattcagttatttccaataattagctccttttccttttgaagaaaacaattgtcttttctcagagtaatgacatcagcctcctcctttaatcaggtctttttttcactttccccctttttttcactttccccaacctctaagcatttcctggtactaggagacttttattgctcaagctggcccattttactatggacagttccaatggttgcacactcctgggacattcctgtgacttcatgcttggtatgatttctaccttgttgaatgactaccataattaacctacttctctcagcatctgggatcctctagatcacctcagcatcacg

SEQ ID NO: 167627 - DNA, 365 bp, Homo sapiens
ggaggagtggagactgaggagccaggtggcggcgacgccttaagagtgagaactctgagggggtagtgaaggttaagggctgcatttgtggggctgctccaggttccattgcctgagccaccgaactcaggagagagggaagatttggaattaagaaaataaaagatgcagttatgacagtgcgatctcgtagactgtccccactagaacctgacactctttacatcaaatgacacacaatgaacataatgaaggcctgttggccctgggcgctggtcaccctggacagaacctccagaatccacaccatagtcggtcctccttctgcacacgaattccatcgtccaaggtcacggagtaaaaga

SEQ ID NO: 167628 - DNA, 210 bp, Homo sapiens
agaatgatataagcaaatcatagactggaattaaaatatgtatatacacatgcacacacatacacatgcatatatatacacacacatacacacacacacacatatacacacacatacatatatacacatacatacacatacacacatatatacacacgtatatatacacatacatacacatacacacattttacaaagcactctattcag

SEQ ID NO: 167629 - DNA, 357 bp, Homo sapiens
atttaagacatctactcttccaaaaacactgctaagaaaattaaaaggcaagtcaaagactgaaaaaaaaaacaatttgcaaaacatataactgagaaatgactataatatagaacatttaaaaaggagaaaattaaagcaaagttatgtaatttcgtgttaagaagaaaaaagcaattaaaaattgaaaaaagatttggaccagctgggcgtggtggtgcgtgcctgtaatccgagctactcaagaggccgaggcatgagaatcagttgaacttgggagacagaggtttcagtgagctaagattgcaccattgcactctagcctgggagatagagcaagattctgtctcaaaaaaa

SEQ ID NO: 167630 - DNA, 538 bp, Homo sapiens
aaataaagcctacctgattgtggtaaattaaatatttcatgtgcttctggtttaatagtattctgttgaggattttcacatctatgtgcatcagggagactggcctatagttttctttttttgctgtgtctttgccaggttttggtatcagggtgatgctgactttgcagaatgagttagggagaagttccttctccttggtttttttggaatagtttcagtatggtaccagctcttctctgtatgtctggcagaattcggctgtgaatccatctggtgcagggatttttttggttggtaggttttttatgattgattcaattttggaacttgatattgctctgatcagagtttcaatttcttccctgattccattttgggaggttgtacatttccaggaatttgtccaacatcaactgaagagaaaaaagctggacgcattccccttaaaaataggaacaagcaaggatgcccattctctcatcagtcctattcaacatggtactagaagccctagccagagcaatcaggcaaaaaa

SEQ ID NO: 167631 - DNA, 190 bp, Homo sapiens
cccaagttccaggtatgagaagtgccatagtaactggtctttatgtggacaatgtatttattggggctaaattatcttttcttctcatcaggctgttttaaaacattttctccaactcagcccacaaagagaaaatagaaattaacactgactcatctactaaaagccaggtgctgtgctaaacattcat

SEQ ID NO: 167632 - DNA, 532 bp, Homo sapiens
ggcaggaggctgtgaacatgtgggatgcgtgttttatctttttataacaccttgacattcaggatctctctttttaaaagtcttaaacagaatcattttttggtaggggaaaagttagctttaagatatatgcaggtggctcaggggtgttagtgtgacttcctacatgaaaaatcaccaccaaaagcatcatcatttcaggctgtaaatatagcactgtcaagtgggacaatgctgtgtgtcagcagatcgtttagaagtttaggagtatgttttaagcctgagagtagtttttttctgtatctcagaatttttaataacagctcaaattggatcttttacataatccaatcaaaatcatcctgggctcaaatacaaaatcaggcaaagagtagatcaagatttatttttgccgagcgggcacagtggctcacacctgtaatcccagcactttcagaggctgaggtgggaagattacttgaggccaggagtttgagaccagcctgggcaacatagcgagctcttatctctt

SEQ ID NO: 167633 - DNA, 452 bp, Homo sapiens
ttaagaaaatccctgtcgcaagcactctgggatttggactcaaatgctaattatacagaaccacttgggtgcccagctgctgtccattctctacacttatcccacctgatggaaggctgttaagaaaaacatcactgcaatgcctaataaacagacatgggtcccagacccaataagagtgaaaccatccccctatttaaatgaaattatggctgatgagaaagacaaattaatttctctgtccctagtattacacaaaactttggatgctgccattgttacaattttattttccccaggagctcagagtcccaccttcattctttttgtttaatgcttaagcttgcctgtccacctatggaagactagaatgagcaaagaccatgtattcaatgatctgtaaatctaacaggaaacaatataataaatatattgtgtttgctaaccaaatc

SEQ ID NO: 167634 - DNA, 237 bp, Homo sapiens
ggcttcctctccaactgatctgttcctcacaggccccagggtgcttggcaggaggcagatacagactgtgtcagtgtgaccataggacaccaatacctgcatggggagtttagcagcccacaagctattaagagttattcaggggtgggaaggatacttcttggctcttctaggagacaggatctctaaaccctaaagaccgggctcaaaggggcagttcactgaaggacatgaatt

SEQ ID NO: 167635 - DNA, 394 bp, Homo sapiens
ccaagggctcatgaagcgatgtgattgagacaagtagggtctatgcaagcagagtggagaggacaagaaagaaaggtcttttaaagttgaaggaacaatgtgacccccaggcacagatgtaaacattgtaggctgtgtttgggaaaaagttggtgtcagggggtcaatggctggttgactagattctagcacaccttcttgaaatataggagaagtcaaggagtatgaaggcagtgtgataggttgaggcacagagagtctggaatgccgtgcctagaagtcagagagctaatgagagtaagacagggagcttaggatctatgtttcctgaacttggctttgtatcctgcaaccaagagaagccagtagaaggtcttgggccagaaagggatat

SEQ ID NO: 167636 - DNA, 313 bp, Homo sapiens
gttctctgtactgtcactgcttgaccctcaaatgggggtgtaatcacaggaagtgaacagcagagtacggtgattaaacctcagctttctgactggagggccatgaaagggagggactaggaaactagaaagtactcaggagattgtgtggagggaggagctgaggacagcgacctcataaagtcgcccatggaatcccaggctcgcccctgagcgtcacacatgtgaggatgagatcttaaacagcataccaaagactaagaacagaactgtgggagagaccaccgcttggctttcagactgaccacaggcg

SEQ ID NO: 167637 - DNA, 294 bp, Homo sapiens
aatcatggctcactgcagtgagtagccgggaccacaagcataccccaccacacctggctaattaaaaaagaattttttttgtagaaatgggggtctcactatgttgcccaaactggtctcaaattcctgggctcaagcagtcctcctgcctcggcctcccagagtgctaggattacagacctagcactgtgcctggccccatacatctgttgatgaacacttaggttgattacatatatttgctattgtgaatagtgctacagtaaacatgcaagtgcaggtatccctttgata

SEQ ID NO: 167638 - DNA, 209 bp, Homo sapiens
acagccaagcctggttgtataattttgtattttatgtagagatggggttttaccatgttgcccaggctggtctcaaactcctggactcaagcgatcctcctgcctcagtctcccaaagtgctgggattacaggcgtgggccactgcgcctagcctagttgttttaatgtattagtttttctctttggctaaaggtattgactagagtgg

SEQ ID NO: 167639 - DNA, 210 bp, Homo sapiens
cccagctcccttttgaagatgtaggaagttgcctgtgatcaggtttggatgttgacctgctataattgcaggtgtctggcaatttgcctaggcacatttcctaggtagtagtcactgtctcagtggccattatattcccaagcttatatccagttcagattggaagtcactgcagtagcaccgattgctgttgccaccacatccacatcc

SEQ ID NO: 167640 - DNA, 547 bp, Homo sapiens
taccatgccgcctccttactccaccaattttccaggcacagacatggccgcttcaaggactttgcgtctgtttgccaggcagattggaagttgtgcctccacattttgttttctttggtagtggagtctttgtgggagacactgtgccctcctgataatcagaaggcagctcgagtggtcagtgtatttgctttgtttataaggtctgcccatgaattctggaggaggaaatcatgaaagacttttcctttcagactgggcatctcatttgccaaatgacaattatgtgtgctacatacatgtacttccagcaagttccaggttcccaggtcttaggaaagttaatgacaggaagactgtcctacagaacttcctcactgtggaagagattgacagcagctcatctaattagggccgttatgaaaagttggattaatagcgatttttgtttttcgcttgcgtctaaagaagcatatgttctttggcatcatgtgatggttattagatctcagcttttgcccgttttgctcagagaagctaaatgcac

SEQ ID NO: 167641 - DNA, 386 bp, Homo sapiens
tacaataaatatttcttacatgaatgaatgaatatcattcattttataggaaatgcacacatggtctacttatgtagtgtatatgtgtacatatgtttatatgtatttaaaatctaattttgtgaagttagattacagttctgttcattgagcacacttaatatacaaaagccataatgtcctagaaataatcattttaatgtaaaaatgtacaaatcagactcatttccttaagacatgtacagagctcagaagactttatgaagttgtatgtgaagatcccacttttagactctttaatggataaacatcctcaatctgccagcatgttcagatttttctcttaggctctcacactacatggttttctttctttcttttttttt

SEQ ID NO: 167642 - DNA, 462 bp, Homo sapiens
ccagaagccctgactctagcaaccatctctgcctctggaagggaaatgtcctctctctggcacgtggggatatggtctcagcagtctgggtcccattcacaggcatacctcactgtctgctcccccgtacgtgtacacatatgctcatacgggactggaaaaagtaagaaatttggagcaagataaacctgagtttgaatctcaactttttcacattctctgtgacttttgcaagtcaactaacctctctgagtttctgccattataaaatgggaggaaaataattcctgccttttctgctatcccgtgtgcaatgcggaacaagctagacaattagaaagtgctaaatccggctgggcgcggtggcttaagcctgtaatcccagcactttgggaagccaaggagggcagattacttgagatcaggagttcgagaccagcctgaaaaacatggtgaaacccc

SEQ ID NO: 167643 - DNA, 631 bp, Homo sapiens
atctggctgagatcagtgatgaaggtggctgaactaaacaatagattttcagtgcagatgaaacagccttctattggaagaagatgccatctatgactttgataactagagaggagaaaccagtgcctggcttcagagcttcaaaggacaggttgactcttgtttgggttaatgcgctggtgacttcaagttgaagccagtgctcatttaccattctgaaaatcctaggaccctgaagaattatgctcaatctgctgtgcctgtgctttagaaatagaacaacaaagcctggatgacagcacatctgtttatggcatggtttactaaatattttaagcctattgatcagaaaaaaaaaaaagatatcctttcaaaatattgtaatcatccaacagttgttttttctttttttcccaccatacaaatagagctgattcactgagacagtgatattatagtagagaaagagtgtaataattgcagagttagtcaagtgggaggactggagttattatttaaatcaccttcccctaaaatgtggaagctatggttttttaaggatagtttggcagagagggagctgggaacggggaatggagattggttgggttggggataaaattataggggt

SEQ ID NO: 167644 - DNA, 183 bp, Homo sapiens
tggttttaaatgttactatgtgctaatgactcccaaatacacacacacacacacacacacgcacacacacacacacacacactgatctgaacttcagactcatatatccaattgcatacctcacatttccagttgggcttttctttgcaaacttaatgtacattaaaaataattcctaggtgg

SEQ ID NO: 167645 - DNA, 121 bp, Homo sapiens
tgactaacaaaaccctcttcttctttgattttcctctatcctcagtgctcattcctcctgattctgctccatcgttcctctatctcttttttaagtgctgaggtttcttttacctccatat

SEQ ID NO: 167646 - DNA, 642 bp, Homo sapiens
ggaggaaaataccaccactaatgggtaggggaatttatttagaggatggcaaaaatgttctggaatcagatgatgctgatggttgtacaaccttgtgaatatactaaaaaccactgaacttcaaaaaggaagattttatggcatattatttatatctcaattttttaaaaactgtgataaggccagacgtggtggctcccgcctgtaatcccaagactttgggatgggtggtggatcacttgaggtcaggagctcgagaccaacctggccaacatggtgaaaccgcatctctactaaaaatacaaaaattagctatgcatggtgacatgcacctgtaatcccagctacttaggaggctgacacaggagaatcgcttgaacccaggaggcagaggttgcagtagccgagacgtgccattgcactgcagcctaggtgacagaagaagactctatctcaaacaaacaaacaaacagtgataaaaagacactgtgccaaacagactggtagaaaatatttacaaaatatattatgtggcaatgtatttatatatttagaacatataaagaacacttacaacaaaaagacaaacaacccaattaaaaattaggcaaaaagacacccacacttttacaaagataaata

SEQ ID NO: 167647 - DNA, 453 bp, Homo sapiens
gaccaaagggtgggcccgcgttttacagaaggcgtttgtcaggttgggtctgagaaagcagcgcctttctcccttctgttctgggccactggaaaccctcccagagatcgctgctggtctgctgcctgcggaacccttcatttctgcctacgggttgctctgaagaggcaactcccaatacgtgtcccttgctcccctgtctgctgtggcttgtgggaggatgtccctgtcctctctcaagctcagtgttcccacagcactgagacccggggtgtatggagcccccaaagtccctcctgcctggtctcggcaggcctacgggctggtgcttacagccacgaggtgttcaccagtcacactctctctctggccacaggcaggagtagtggaaggcgtgggtgggacacccgggagcctaccaggggccaaagttcttctgcacccccatcggcc

SEQ ID NO: 167648 - DNA, 598 bp, Homo sapiens
cctcacatgcacagttcacagtaggattcgtgcccctgtgagaatctaatgcgaccactgatgtgacaggagatggagctcaggcagtaatgttcactcgacagtcgctcacctcctgctgtgcagcccggtttctaacaggccacaggccagtaccagtccacagtccaggggttggggactcctgatttaaactgttccttccacatagtgttctctgatctctaaaataaaacacatattgggccagatagtcactatctgaatatactcttctagaaattcttctatagtaccaattacccctttaataacaaaattttcaaactgagtaaacccattagtggatcatgaaatctacttaatgggcccaatcagtactttttcaaaaagtgaactggaatacaatatgatttatgaaagagtgttacatgtatgtgttgtttcccgaacctctttcaaggagaatacgttttatgcatgtttgtaggtttgtgaagaaagcttgaaaactctactgccttaatagatcatttgtaaaaactaacatttcaaattttttacactctaaaagtacagcatgcctgttaaatacttt

SEQ ID NO: 167649 - DNA, 279 bp, Homo sapiens
agtgattctgtcttctgagctctgacatcatttcaaatgtatgaacattggcctgaagcttaataaatttcagccatcgtatattcttagcttttgcttgggctggcgttcctctgcttaacaaaaaacagtcatgagccagatgaaagcaattttcccacatggcaccttcatcttattttccagtctctgagtaaaagaccgcacctctcaccttgcagctatcacagaacatgggaacattgccgtctgcatgcctctcacaggaaatcatgcaca

SEQ ID NO: 167650 - DNA, 110 bp, Homo sapiens
gcaacctgtgctcagtctgaagacaatggacccaagttaggtgtgacacgttcacataactgtgcagcacatgccgggagtgatcagtcagacattttaatttgaaccac

SEQ ID NO: 167651 - DNA, 636 bp, Homo sapiens
caggggatgttcagaacaccaggaagcactcaggacaccagagagcgatcagaacaccagggggcactcagatcctccagggggcactcaggacaacagggagctctcaggacaccagggtgagctcagtaaaccagtgttcgctcagaaccaccagggagcactgaggacaccaccgctcccttaggaggcagctccacatcaggtccctggatccgggcagggagggcggttccttttggatcttgccactaaccttttgggagttttcctgcttcctttgtggtttcaagaatcatttgcagattcttctcatgtacaaagctctgctttcttggattatgtaatgtttttggctttggatgctaccagaattacgttgtactgtgagaggattcattcgtggtgtgtgcaatagtgaatgaaagctccaatgttaggggtggctttgaaagctacgttaggggtggctgagggcagttagcagaaaatgatcatcactatagaaggctactcatttctttgcacatttgcataaacaattgtagtttatgccctaaaaactgcatgttttcttggccctttttcttaaatggctccactctaagtccagtaatctaattaagctgtgtttca

SEQ ID NO: 167652 - DNA, 292 bp, Homo sapiens
actgccagagcaagaattttttttaagtcccagaaatgaagacaaatggaagaattcagtttaaaggggccttgtgagttctgaagagaatgcaaataaacagattcacgtgcagacacattgtggtgacgtttcagaactccgagaataaacacacatttcttaaaatcatctagacacatgtttcttaaaatcttttagagaaacagaaaggactaatcacattacattagatttaaggatgccagatataatacaggatgttcagttaatatataagttccagataaac

SEQ ID NO: 167653 - DNA, 385 bp, Homo sapiens
cgggcatgatggtgcgcacctgtaatcccagctactcaggaggctgaggcaggagaatcgcatgaacccaggaggcagatgttgcagtgagccaagatcacgccattgcactccagcctgggcaacagagtgagactccacctcaaaaaaaaaaaaacaaaaaaaaaccaccagccatttgggaagccaaggcaggattgcttgagaccaaccagaagttcaaggttgcctgggcaacagagcaagactgtctcgagacaaaacaaaaagtcagcatcttctgcccacttttactttaacatacatttatggatctattgtctctttccctgttctaaaactttaaatttcacaagaatgaagattttgctgtcttgtttcctgc

SEQ ID NO: 167654 - DNA, 285 bp, Homo sapiens
aggtagaggttctgaggtaggaacatgcttttggtgtattcaagaaacacccaggagtctgagtaaagcaggacaaatctgggatgtgagatgagagttctgctgtggttatgttctatttcaggtacctacaagacatccaagtggaattatcaagtaagcagttagatttatgagtttggagtaaggtggcaagaattagggcttgaacaaccagaaaaacaaactgagtggggtggtcatggggataggagaaagagggtggtgtcctagaggctaaatgag

SEQ ID NO: 167655 - DNA, 521 bp, Homo sapiens
aaaagcctggggccatacttcagcctggggctgagtccaggtgctgaaagatgtcatcgggactcagtttccttctctctgtctcccggctccgggtctctctatgcctgcttcattctccatggatgccctagctgctcaccagtgtagtgccgccccctgccccaatgtagccatctcaaccaagaaagagccttgtttttccccaatatttttggcaaaagtcctagtcatcactgtttttgaccaggctggtcaagtgcctatctttgagccaatcaagacagccccctctgattggctagggctggctcacgtgcccacctaggaggaggaggtggggtcagtccatctagaccccttgggctgagagcaggcctatgtgggtctcctcctggaacaggtttaagctgtccccagaaggggcatgggtgccagcaggctagacatatggactttagtgctattcttttttttttctttttttttaagagacagggtctcactctgtcaccctggct

SEQ ID NO: 167656 - DNA, 238 bp, Homo sapiens
tgtctctcagtcagttgggtgtgagatgggaaatcctgttctgagtcaaaaaggaaccctcctcccttgccttcctgattcacttcctcattctgccgacattttacagcctggcacaggtgctggagccatgcaggcctggccttgcttctgacttggtgcctcagtcactgtctgacgtgggcaggagagccagcttcagtttccccatctgtcaggcagcacgatgacccctgat

SEQ ID NO: 167657 - DNA, 437 bp, Homo sapiens
tttttcatatgtttgctggtcatttgtatgtcttcctttaagaattatgtatttgtgtcctttgcccacattttaatgggattatttgtttcctttcttgctgatttgagtttcttgtagattgtggatattagtcctttgtcggatgcacagtttgtgaatattttctcccactctgtggggtgtctgtttactctgctgattacttcttttgctgtgcagaagctttttagttgacttaggtcccatctatttctctttatgttgcatttgctattcggttcttggtcatgacctttttgcctaagccaatgtctagaagagtttttccgaagttatcttctagaatttctcatggttgcaggtcttaggtttgtctttgttccaccttgagttgatttttgtataaggtgagaaatgaggatccagcttcattc

SEQ ID NO: 167658 - DNA, 471 bp, Homo sapiens
catatgggtggtgtcgcatgggagaagccccagctctgtctgcagtggtagattaagggggaaaagaagtctctgctctgtgcccaggctagagtgtagtggcgtgatcttggctcactgcatcctctgcctcctgggttcaagcaattctcctgcctcagcctcccgagtagctgagattacaggtgcccgctaccatgcccagctaatttttatattttcagtagagacggggtttcatcatattagccaggctggtctcgaattcctgacctcatgatctgcccaactcagcctcccaaagaggtgggattacaggcataagccactgcgcccggctagaagtctctttctttaagacccttcatgagcatgagggctgcctgacaaagtagagctacagactttctacgctaagccagcaccaccaatacagccagcaccaccaatacagggagcaccaccaataca

SEQ ID NO: 167659 - DNA, 251 bp, Homo sapiens
cagttacttgggaggctgaggtaggaggatctcctgagcctggggaggtcgaagcttcagtgagctgtgattgtgccactgtactccagcctgggtgacagggtgagactctgtctcaagaaaaaaaatatttattacatgcctaagcatgcctagcagtgtatagacacccaaggtgcagtataaactacacagatacggctttttatgttcaaatggaatctacattttaacagaaggtattagcagag

SEQ ID NO: 167660 - DNA, 835 bp, Homo sapiens
tgttttcctgcgcaggagccgcagggccgtaggcagccatggcgcccagccggaatggcatggtcttgaagccccacttccacaaggactggcagcggcgcgtggccacgtggttcaaccagccggcccggaagatccgcagacgtaaggcccggcaagccaaggcgcgccgcatcgccccgcgcccctgcgtcggggcccatccggcccatcgtgtgctgccccacggttcggtaccacacgaaggtgcgcgccggccgcggcttcaggcccttgggaaggagctcaggggggcggggggattgtgcctgggcatttatttttccccaaacaacagaaacccgcggttttggtggggtggccacctcgtgaatccccctaaaagttcccaggtcggccgaacgctgtttctacatcccctttccgggtttcggggcaggcaaacgtttcccccccagtgcgaacaaccggggcgcggcacactggcgggcccctggcatgagcacaaacctaaaacgtgggatttcccacccaagcggcgtgggcaaagtatttccacctttgaccccaacgtgtacgcgtgacccccgaaagccgagcgttgtgcccaaatcgtgccccggcgcgggcccacccttttggtgcaaaccaccgcgccgggaccaacgccgcggcccattttaagatcaccctcacccccatgagcgggcgccctcccgcgtaatattcaccccgccgccaccgcaccacttcgcggaaccaccacccaaacacccccgcgtcttttttccccacgccaaaaactcttttttcccccccccccatattcccgctt

SEQ ID NO: 167661 - DNA, 981 bp, Homo sapiens
  misc_feature (860)..(860): n is a, c, g, or t
  misc_feature (904)..(904): n is a, c, g, or t
  misc_feature (943)..(943): n is a, c, g, or t
tgttttcctgcgcaggagccgcagggccgtaggcagccatggcgcccagccggaatggcatggtcttgaagccccacttccacaaggactggcagcggcgcgtggccacgtggttcaaccagccggcccggaagatccgcagacgtaaggcgccggccgcggcttcagcctggaggagctcagggtggccggcattcacaagaaggtggcccggaccatcggcatttctgtggatccgaggaggcggaacaagtccacggagtccctgcaggccaacgtgcagcggctgaaggagtaccgctccaaactcatcctcttccccaggaagccctcggcccccaagaagggagacagttctgctgaagaactgaaactggccacccagctgaccggaccggtcatgcccgtccggaacgtctataagaaggagaaagctcgagtcatcactgaggaagagaagaatttcaaagccttcgctagtctccgtatggcccgtgccaacgcccggcttttcggcatacgggcaaaaagagccaaggaagccgcagaacaggatgttgaaaagaaaaaataaagccctcctggggacttggaatcagtcggcagtcatgctgggtctccacgtggtgtgtttcgtgggaacaactgggcctgggatggggcttcactgctgtgacttcctcctgccaggggatttggggctttcttgaaagacagtccaagccctggataatgctttactttctgtgttgaagcactgttggttgtttggttagtgactgatgtaaaacggttttcttgtggggaggttacagaggctgacttcagagtggacttgtgttttttctttttaaagaggnaaggttgggctggtgctcacagctgtaatcccagcactttgagnttggctgggagttcaagaccagcctggccaacatgtcanaactactaaaaataaagaaatcagccatgaaaaaaaaa

SEQ ID NO: 167662 - DNA, 596 bp, Homo sapiens
tgttttcctgcgcaggagccgcagggccgtaggcagccatggcgcccagccggaatggcatggtcttgaagccccacttccacaaggactggcagcggcgcgtggccacgtggttcaaccagccggcccggaagatccgcagacgtaaggcgccggccgcggcttcagcctggaggagctcagggtggccggcattcacaagaaggtggcccggaccatcggcatttctgtggatccgaggaggcggaacaagtccacggagtccctgcaggccaacgtgcagcggctgaaggagtaccgctccaaactcatcctcttccccaggaagccctcggcccccaagaagggagacagttctgctgaagaactgaaactggccacccagctgaccggaccggtcatgcccgtccggaacgtctataagaaggagaaagctcgagtcatcactgaggaagagaagaatttcaaagccttcgctagtctccgtatggcccgtgccaacgcccggcttttcggcatacgggcaaaaagagccaaggaagccgcagaacaggatgttgaaaagaaaaaataaagccctcctggggacttggaat

SEQ ID NO: 167663 - DNA, 916 bp, Homo sapiens
tgttttcctgcgcaggagccgcagggccgtaggcagccatggcgcccagccggaatggcatggtcttgaagccccacttccacaaggactggcagcggcgcgtggccacgtggttcaaccagccggcccggaagatccgcagacgtaagccctgcgctcaggggcttgccccatggtggctcgtgccctgctgtgacttgccgccttgtgcctttgctgggttggcctgatttgccacgtggcgggggtgtgctgcttgtcttgcaacctgtcgctgggacgccgtgcttggctctgggcgtggccttacgggccaatggtgttgacctgcctgcttgcgcttctcgtcacacacagggactgtacatgtgccctgtgctaattgctcaattggcttgcagcctgctctttctgcttccctgatagccccctgctgttcggagtgttccacaattcccctgggcccaagttccgttagctggcttgctcccccagcactggtttcttgggtacttcccatgcatctggaggtgggttgcctgctgtactggtgttctggtattgctgctttacaaggcccttggtgtactggcgaactgcttcctagagttggttggttgctacagggacgaatttccacgcaacactgaacagggttggtgcgcccgagaaaaaccaactccgcgacaattattacgttggtggcggatgtccccggaatggtgcaatgcgtcatgtgcccactcccaaagcttccccacaggtgctagtataccctcctatttcaaattgtaacacaataccaggctgtcgcagccggcacgcgttgaagaggggctacgcaatcccgaaatctccaaatcccgtccacttacccttacttagcccacccagtcgtcaaatcgcgcactttcgg

SEQ ID NO: 167664 - DNA, 1127 bp, Homo sapiens
  misc_feature (414)..(414): n is a, c, g, or t
  misc_feature (1006)..(1006): n is a, c, g, or t
  misc_feature (1050)..(1050): n is a, c, g, or t
  misc_feature (1089)..(1089): n is a, c, g, or t
tgttttcctgcgcaggagccgcagggccgtaggcagccatggcgcccagccggaatggcatggtcttgaagccccacttccacaaggactggcagcggcgcgtggccacgtggttcaaccagccggcccggaagatccgcagacgtaaggcccggcaagccaaggcgcgccgcatcgccccgcgcccctgcgtcggggcccatccggcccatcgtgtgctgccccacggttcggtaccacacgaaggtgcgcgccggccgcggcttcagcctggaggagctcagggtggccggcattcacaagaaggtggcccggaccatcggcatttctgtggatccgaggaggcggaacaagtccacggagtccctgcaggccaacgtgcagcggctgaaggagagtacgcgcatccaaaancgtctagtcacgtcttgtctcgccaagagtagagccccgtcgagagctcgctcgataggaatgtggagacctagattcgtgttgatatgaagcgtgaaatcgtggacattccgagaactgaccggaccggtcatgcccgtccggaacgtctataagaaggagaaagctcgagtcatcactgaggaagagaagaatttcaaagccttcgctagtctccgtatggcccgtgccaacgcccggcttttcggcatacgggcaaaaagagccaaggaagccgcagaacaggatgttgaaaagaaaaaataaagccctcctggggacttggaatcagtcggcagtcatgctgggtctccacgtggtgtgtttcgtgggaacaactgggcctgggatggggcttcactgctgtgacttcctcctgccaggggatttggggctttcttgaaagacagtccaagccctggataatgctttactttctgtgttgaagcactgttggttgtttggttagtgactgatgtaaaacggttttcttgtggggaggttacagaggctgacttcagagtggacttgtgttttttctttttaaagaggnaaggttgggctggtgctcacagctgtaatcccagcactttgagnttggctgggagttcaagaccagcctggccaacatgtcanaactactaaaaataaagaaatcagccatgaaaaaaaaa

SEQ ID NO: 167665 - DNA, 746 bp, Homo sapiens
gcctccccggtagctgggattacaggcatgcaccaccatgcctcgctaatatcttgtgtttttaatagagacagggaccatgttgccaagactgatcttgaactcctgagctcaggcaatctgcctgccttggcctcccagagtgctaggattacaggtgtgagccaccgcgcctggcctatttgcttcttttttatgatattttccctcattgggaggtaagctccctgtcggctgctatttcaccagagcccagaatggtgcctggcacatagctgacgctcactaatttttgttcagtggatagtgagtacccattgtgtatggactccacacctcttaagggagacaggtgcatttttacaagcttgaggagcacagccagagtgcaggctgtgaccgtgttcatcctcatgcagctcagtgcagagggccatcagcagtgagtggctctgtcaagtttatctggaggcggggagttgtaaagggcagaggcatcacagcctggaggctgaggtcagcgggctggccaggagaggggctggagtcttccccagtgcgggcattaccccttccaatactgccatggtccaagtgaagcagaggctgtgggacccgaggctgtgggaccctcaacactgatctttgagagtccactggatgttggctgtgaggtttcctttgactcgctggagaggagggacaggagctacagtgcaggcaggcaggtgcacggctatgcacag

SEQ ID NO: 167666 - DNA, 230 bp, Homo sapiens
attcttctcctataatttctttcacttctgggcagagggcagcctgtgggcaagtgttctttttgctgacagtccaagagtgttgggttcaaccaactgctaactcctgagacaattttaaggcagggcaataaggagaaccttacagatctataaggccagctggagctatccccagggccatgttgtagcagacccaaatcttcaaatcttccagtgtctgtgtggag

SEQ ID NO: 167667 - DNA, 494 bp, Homo sapiens
aaaatgagagtgtcaagctcatatatgtttcctgcatgtgtacacagaagctagcagtaatgcatcatggggcaaaaggagctcgttgagagctccattcttgtatccaggattttcttccaagatgatggcaggcacccactctttggatactgataccagcacttccttgacctaaccaggtctcaacggaaggttttcaaaccaccaccagcattcatatttcttccttaagtggtctgtggactgaaatactgaggagctacagttgtccaaagagtaaaagagaagtaacctcatgtccgtttcatgactgctgcctggtggatagcaactataagatacatatccatttcactaatgttcaaaggtggaaggaaaaatattatgtcttacaaagagaaaaaggtaaggcataatgtcgttaggatactagaagatgtgaaagattctattttcatctctgtcacaaccttatttagtgatgtagaaac

SEQ ID NO: 167668 - DNA, 511 bp, Homo sapiens
gggagaagtggagtgtcttacaggtggcaatgaactgacagcagtgtgtaatgtaaaagcgctttgtcattcacataatgtctggggtaatgaaatgaattcactttctggcttcctctagtctgcgatgccaaagaacactgtgttatcagcacagatggagcatgcatggttctggaggagagcctggtgtgaactacaaacaagccactgtgaataccaatgaatccctgagaatcagacccttgctgtcaaatgacagttttggaagctccataaaaatgagcgagtcccagtggtcttgtccaaccaaatgtactgtcacaattctggacaggctatttggaagccacgcaaatcatagaggcctgactgccacttccctgtgagaagcaagcacaggaagatagtcaaccagcgggtgcattcttttttcatttcttaataagaggtaatagacaatctatgctgatgcaaatactaatctacttctgtgggtcaattgtctctg

SEQ ID NO: 167669 - DNA, 372 bp, Homo sapiens
tgacaaagactcctccctgaccaaagcgcagctcacgcctctgaccctccaactaggcttgactaggccccatcatgtcttcagcctaagccagttgtagaaagaattcccagcctttgtatctgaccatattcctcatctcccacctttgaggttgaacaaagcctctcacccacccccagcaaggatcctgttacgagggtttctccagaatccctgaccttgatgtctcctcttagctattttccagccacccatcaccacactgctcctctgctaccaatcccctgtggtctctgctgcatttggagttaaactcattctctctcgcttattgccacagtcctgaataaagtcttcccgaccactgta

SEQ ID NO: 167670 - DNA, 174 bp, Homo sapiens
tctagaggcttttgtgccacaaggccagggcaagaaggggctaattcccctgcaccctggtcccttcacattcccattgggtttttctacctgaacctaccatacatttccttctctcccaccttccactccctgctaactccccatctacactgggatcttcctgcacctaaa

SEQ ID NO: 167671 - DNA, 497 bp, Homo sapiens
agaaagcccagtctatccacatgttgaaatcctggagtctgccttcaatgtggatccctcggccaagaatacgcttctcatttttattttcttccagagtccagaaaaccttggaaagctgccttaaggggtgatggaatgaaaaaccagaccaaaccaggcagacatgggttcttccctaaatgaacattccataagcccaacacagagcatcttccatttcagtgctcagcccccaaatgcctcctggttataattaagtacttcaaagttttccaaacacccttttagaaatccggtcccaaataaaaaataatgttcaatcagatgtaaatcatcgcacagcagggcaggagaggcatgggaagtggtcatctgcacttggactaatcagcaagtctagtcccttgatgaggattttcattttctcatttgtcattctagccactgaattctcaagtggccaatttgttccctattggtaatcagctagttat

SEQ ID NO: 167672 - DNA, 557 bp, Homo sapiens
ctctctgagggttcttggggaagttatgtagaaggtgcctctgctgaagtcctggagctgaccactcccaccggcttggctctgggctcagctctgtcatggttgaactgtatgaccctgggcaagtcatgggctcttctgggcctcagtttactgtctataaatagggacatttggacttgatgtacctgaagttcccttcttgcttttaaacagcttctcagctccttttgttttaccactagctttgcagagacttgttaggaatttacagcttgtgattgcttcacttttttggaaatggctctatggtttcaaacaacattaactttaaaaaaattaacaatgctgagcgtggtggttcacacctgtaatcccagcactttgggaagctgaggcaggtggatcaccggaggctggtcttgaattccggacctcaggtgatccactagcctcggcctccaaagtgctgggattacaggcgtgagccaccgcgccagccggtttttcaagtataaaacataacattgggtcaagccagtgggctggaccatcca

SEQ ID NO: 167673 - DNA, 510 bp, Homo sapiens
tatcaactaatgaagggataaataaatgtggtatattggaataatgtactaataattccgctggtacaatggaatattaatctggcaacaaaaggaaatactacaacatgaatgacccttgaaacagatttagtgaaaggatccagtcacaaaagacaaagcattgcatgattccatttaggtgaaatatctagaatagacaaatccacagagatggaaatcagtggttgcctagggctgggagagttggggaaaatggggagtggctgctaatgggtatggagtttcttttaggggatgctagttctacaactatgtgaatatactcaaaaccattaaattgtacactttacactggtgaattgtatggtatgtgtattatatcacaataaagctattatgagaaagaaaaagaaaccactggtgtctggctcactgttaaattcctagtggtgaacacatagcctagcacatgttatacccaataaatacttgttgaatttaaaagtg

SEQ ID NO: 167674 - DNA, 177 bp, Homo sapiens
agatataatgtgctgggctgctttttatacagatggagccatgctgaatgtgctgttctatgctttgctttttcccacctaaaaatgtattgcatacattttcctataatgatgggcataaatcagcctttgaaaaacttgactggagagtatttctttggcttttttttttttttt

SEQ ID NO: 167675 - DNA, 424 bp, Homo sapiens
gtccctagtaactctgagtatgagctcatgtgcatgtgtgtatatgtttatatatggatgccttcattgtatgcacagatacccatgattatccatgtgtgtgcataggaatggcaccctctgtctgattggaaatgagactccagagttaccccagcatgatgttcactgccttttttttttttttttttttttttttttgagacagtgtctccctatgttgcctaggctgaagtgcaaccacccaggctcaattgatcctcccacctcagcctcctgagtagctgggtcttcaggtgcaggccaccacacctagctaatttttgtatttttaatagagacaggattttgccatgttggccaggctggtatcgaactcctgggcttaagcaatcctcctgccttggcctcccaaagtgctatg

SEQ ID NO: 167676 - DNA, 588 bp, Homo sapiens
tggatgtagttctcaagtaatgggctactatataattttattacataaaactaagtgtaattccagaatcattatcatccagtatttcaaattatttataactttccaattaatttatagagaaaaagtgagtcacaaatatacacaataaattgtcatctaaaagcaaaacacggccttgaataaaagactgcactattaaacataaaaatcacctttttgaagaaaagataaaacagatataacttggataaactatcatagtatcatatttgacaagtgtgtactcacatttttatagatatgttgtactttagagtttataaaacatagtaattatgccacttaattcttacatcaatcctgacagaatgtcatcattatctctttatagataagacaataagtcaacattaaatgacttgcttaactacgaagtggcagagcaagactcaaactcagggttcctgatttcaggttcagtgtcctgtacatcatattacagatatcttataccacatatactttcataaatcatagattataaatatgattttaactgtgcagtaagttactttgtccaaaata

SEQ ID NO: 167677 - DNA, 347 bp, Homo sapiens
aggccactcacatcttcccgcaaggtcagtctgtttagcttggagttgttctgctgctttatttgctactcttcaccctgggtttcagtacctgagctctgtttccatcactgcgagggtaaagctttctcctaccctcctggtaccttttcactcctcgccctggtgtacctttgcctcaactgatctggaatcagacttcaggaatttagtcatgttgggcactttttaaaaaatgataccatcctgtatttctttttgtgttcagttttttggggttctgtgtttatggtgctaatgatgttaaactaatgctcagaggaattctgaagcacagttattcacaa

SEQ ID NO: 167678 - DNA, 356 bp, Homo sapiens
gcctaataatattgtggtgggccttgagcctagggatacagtgaagaacaagatagagaacctggccaggagcagtggctcacacccataatcccagtactttgagaggccaaggcaggaggatggcttgagcccaggagtttgagaccagactgggcaacatattgagacccctatccccacagaaaattaaaaaaagacttagccaggtgtggtggtacacgcctgtggtcccagctactccagaggctgagatgggaggatcacctgagcccagaagttagaggctgcaatgagccatgatagtgccattgcactctagtctgggtgacagagcaagaccttgtctaaggaaa

SEQ ID NO: 167679 - DNA, 275 bp, Homo sapiens
ttcccccatcatccatctcataaatctcaggaaagactgcctggctctgttagggtcacacatccaccagggatgctattttggctaataaaagatattgatgttagaccagaatgggaaggatgaggagacaagccagggtatttctgtcccaacctgctctctgcctcagatcgtgccactggcagcggctgcctcccctccagggcccccttcctctaaggtcccagctcctgctcaatgaccctgccacaggtctagttctcacagaagct

SEQ ID NO: 167680 - DNA, 246 bp, Homo sapiens
gtgaaatatttttgataggacatgtatctaaatgtgaataaattcagcccttttgaaaaggaaagtggactgcactctgatattggtaaaatttccaaaaataaaggtgtttgcccattggcaatatgattatagggctctaggcacgtattttagactgggcaatgtcttctttctcacaagactgttttgctttaactccctccttcggccttctttctagaaagttttgaaggataaagccct

SEQ ID NO: 167681 - DNA, 2371 bp, Homo sapiens
ggccgtccaggccccgccccgcagcccagccggaagggccggcggacgctcgctaggtcggctcgctggccggggctccgcggctcccgtggttgccatggcggcggttgtcgcggcgacgaggtggtggcagctgttgctggtgctcagcgccgcggggatgggggcctcgggcgccccgcagccccccaacatcctgctcctgctcatggacgacatgggatggggtgacctcggggtgtatggagagccctccagagagaccccgaatttggaccggatggctgcagaagggctgcttttcccaaacttctattctgccaaccctctgtgctcgccatcgagggcggcactgctcacaggacggctacccatccgcaatggcttctacaccaccaacgcccatgccagaaacgcctacacaccgcaggagattgtgggcggcatcccagactcggagcagctcctgccggagcttctgaagaaggccggctacgtcagcaagattgtcggcaagtggcatctgggtcacaggccccagttccaccccctgaagcacggatttgatgagtggtttggatcccccaactgccactttggaccttatgacaacaaggccaggcccaacatccctgtgtacagggactgggagatggttggcagatattatgaagaatttcctattaatctgaagacgggggaagccaacctcacccagatctacctgcaggaagccctggacttcattaagagacaggcacggcaccacccctttttcctctactgggctgtcgacgccacgcacgcacccgtctatgcctccaaacccttcttgggcaccagtcagcgagggcggtatggagacgccgtccgggagattgatgacagcattgggaagatactggagctcctccaagacctgcacgtcgcggacaacaccttcgtcttcttcacgtcggacaacggcgctgccctcatttccgcccccgaacaaggtggcagcaacggcccctttctgtgtgggaagcagaccacgtttgaaggagggatgagggagcctgccctcgcatggtggccagggcacgtcactgcaggccaggtgagccaccagctgggcagcatcatggacctcttcaccaccagcctggcccttgcgggcctgacgccgcccagcgacagggccattgatggcctcaacctcctccccaccctcctgcagggccggctgatggacaggcctatcttctattaccgtggcgacacgctgatggcggccaccctcgggcagcacaaggctcacttctggacctggaccaactcctgggagaacttcagacagggcattgatttctgccctgggcagaacgtttcaggggtcacaactcacaatctggaagaccacacgaagctgcccctgatcttccacctgggacgggacccaggggagaggttccccctcagctttgccagcgccgagtaccaggaggccctcagcaggatcacctcggtcgtccagcagcaccaggaggccttggtccccgcgcagccccagctcaacgtgtgcaactgggcggtcatgaactgggcacctccgggctgtgaaaagttagggaagtgtctgacacctccagaatccattcccaagaagtgcctctggtcccactagcacctgcgcagactcaggccaggcctagaatctccggttggccctgcaagtgcctggaggaaggatggctctggcctcggtcctcccccaaccctgcccaagccagacagacagcacctgcagacgcagggggactgcacaattccacctgcccaggacctgaccctggcgtgtgcttggccctcctcctcgcccacggcgcctcagatttcaggaccctcctcctcgcccacggcgcctcagacctcaggaccctgccgtctcacgcctttgtgaaccccaaatatctgagaccagtctcagtttattttgccaaggttaaggatgcacctgtgacagcctcaggaggtcctgacaacaggtgcctgaggtggctggggatacagtttgcctttatacatcttagggagacacaagatcagtatgtgtatggcgtacattggttcagtcagccttccactgaatacacgattgagtctggcccagtgaatccgcatttttatgtaaacagtaagggaacggggcaatcatataagcgtttgtctcaggggagccccagagggatgacttccagttccgtctgtcctttgtccacaaggaatttccctggacgctaattatgagggaggcgtgtagcttcttatcattgtaactatgttatttagaaataaaacgggaggcaggtttgcctaattcccagcttga

SEQ ID NO: 167682 - DNA, 707 bp, Homo sapiens
ggccgtccaggccccgccccgcagcccagccggaagggccggcggacgctcgctaggtcggctcgctggccggggctccgcggctcccgtggttgccatggcggcggttgtcgcggcgacgaggtggtggcagctgttgctggtgctcagcgccgcggggatgggggcctcgggcgccccgcagccccccaacatcctgctcctgctcatggacgacgaatcactcccgccacctcgggccgccgggtccccccgctgggctccagtcttacctgacggctgtctctgtcctctggagaatgctgagcgaagtgactgctttccagagcacgctctccagcgcccaggggtccgtgtcctgacagcagtagccgggcctttctctgcactgagtggcatctccctcctaaagatactttgcttcagaatttcatcctttcacttttgaagttcctctgggccagtgtagatactttgtttcagaatttcttcttttcattgtgtaactccttctgggccagcatagcttcgctggatgagctgggctctgcaggtgaagcctccctgttaagtttctgcttttcctgactttctcagaggacagaggggtgaggcggggcagctcatgaataattttttatgttgaagacttgtcgaaataatattttggttatgttgggttaaataaaatataaagttagtctgta

SEQ ID NO: 167683 - DNA, 258 bp, Homo sapiens
  misc_feature (212)..(212): n is a, c, g, or t
ggtctcctcggggctcacccagcgctgctcttccagcctacacaccgcaggagattgtgggcggcatcccagactcggagcagctcctgccggagcttctgaagaaggccggctacgtcagcaagattgtcggcaagtggcatcatagggtcacaatggcccccaagttccaggcaccgcatggcaaagcaacgggacttctgactggacgntgtggtatttggaattcccgcacgaagcttggacccacatatttgg

SEQ ID NO: 167684 - DNA, 2283 bp, Homo sapiens
atattttctgccctggaaaacccagaggagacacacttgggttcgaggcatgacccgcaaaactctcctgggagttcagaaaacgtggaaggaaggagccggggccacgaggggcatgtcaggcgggttccaggcggctgggaggctcctcacgatgcaccacccttcaccgtgcagggaaccccggccgccgccatgcctgccgccctcggttgtgcccagacgctctgcagggtaggcgggcagtgccagcaccctcctcgggtgaggccttggtcttttgtccctgccgtgcccaggcatagcccatactcagtgctggagggtgctcgtcttaccaagaattttgtgaaggtggtatctgttgctgctcagaacttccgagtgtccccacgtggggtccctgaagtgtcctgggttcctgtttccaggcatctgggtcacaggccccagttccaccccctgaagcacggatttgatgagtggtttggatcccccaactgccactttggaccttatgacaacaaggccaggcccaacatccctgtgtacagggactgggagatggttggcagatattatgaagaatttcctattaatctgaagacgggggaagccaacctcacccagatctacctgcaggaagccctggacttcattaagagacaggcacggcaccacccctttttcctctactgggctgtcgacgccacgcacgcacccgtctatgcctccaaacccttcttgggcaccagtcagcgagggcggtatggagacgccgtccgggagattgatgacagcattgggaagatactggagctcctccaagacctgcacgtcgcggacaacaccttcgtcttcttcacgtcggacaacggcgctgccctcatttccgcccccgaacaaggtggcagcaacggcccctttctgtgtgggaagcagaccacgtttgaaggagggatgagggagcctgccctcgcatggtggccagggcacgtcactgcaggccaggtgagccaccagctgggcagcatcatggacctcttcaccaccagcctggcccttgcgggcctgacgccgcccagcgacagggccattgatggcctcaacctcctccccaccctcctgcagggccggctgatggacaggcctatcttctattaccgtggcgacacgctgatggcggccaccctcgggcagcacaaggctcacttctggacctggaccaactcctgggagaacttcagacagggcattgatttctgccctgggcagaacgtttcaggggtcacaactcacaatctggaagaccacacgaagctgcccctgatcttccacctgggacgggacccaggggagaggttccccctcagctttgccagcgccgagtaccaggaggccctcagcaggatcacctcggtcgtccagcagcaccaggaggccttggtccccgcgcagccccagctcaacgtgtgcaactgggcggtcatgaactgggcacctccgggctgtgaaaagttagggaagtgtctgacacctccagaatccattcccaagaagtgcctctggtcccactagcacctgcgcagactcaggccaggcctagaatctccggttggccctgcaagtgcctggaggaaggatggctctggcctcggtcctcccccaaccctgcccaagccagacagacagcacctgcagacgcagggggactgcacaattccacctgcccaggacctgaccctggcgtgtgcttggccctcctcctcgcccacggcgcctcagatttcaggaccctcctcctcgcccacggcgcctcagacctcaggaccctgccgtctcacgcctttgtgaaccccaaatatctgagaccagtctcagtttattttgccaaggttaaggatgcacctgtgacagcctcaggaggtcctgacaacaggtgcctgaggtggctggggatacagtttgcctttatacatcttagggagacacaagatcagtatgtgtatggcgtacattggttcagtcagccttccactgaatacacgattgagtctggcccagtgaatccgcatttttatgtaaacagtaagggaacggggcaatcatataagcgtttgtctcaggggagccccagagggatgacttccagttccgtctgtcctttgtccacaaggaatttccctggacgctaattatgagggaggcgtgtagcttcttatcattgtaactatgttatttagaaataaaacgggaggcaggtttgcctaattcccagcttga

SEQ ID NO: 167685 - DNA, 2317 bp, Homo sapiens
ggccgtccaggccccgccccgcagcccagccggaagggccggcggacgctcgctaggtcggctcgctggccggggctccgcggctcccgtggttgccatggcggcggttgtcgcggcgacgaggtggtggcagctgttgctggtgctcagcgccgcggggatgggggcctcgggcgccccgcagccccccaacatcctgctcctgctcatggacgacatgggatggggtgacctcggggtgtatggagagccctccagagagaccccgaatttggaccggatggctgcagaagggctgcttttcccaaacttctattctgccaaccctctgtgctcgccatcgagggcggcactgctcacaggacggctacccatccgcaatggcttctacaccaccaacgcccatgccagaaacgcctacacaccgcaggagattgtgggcggcatcccagactcggagcagctcctgccggagcttctgaagaaggccggctacgtcagcaagattgtcggcaagtggcatctgggtcacaggccccagttccaccccctgaagcacggatttgatgagtggtttggatcccccaactgccactttggaccttatgacaacaaggccaggcccaacatccctgtgtacagggactgggagatggttggcagatattatgaagaatttcctattaatctgaagacgggggaagccaacctcacccagatctacctgcaggaagccctggacttcattaagagacaggcacggcaccacccctttttcctctactgggctgtcgacgccacgcacgcacccgtctatgcctccaaacccttcttgggcaccagtcagcgagggcggtatggagacgccgtccgggagattgatgacagcattgggaagatactggagctcctccaagacctgcacgtcgcggacaacaccttcgtcttcttcacgtcggacaacggcgctgccctcatttccgcccccgaacaaggtggcagcaacggcccctttctgtgtgggaagcagaccacgtttgaaggagggatgagggagcctgccctcgcatggtggccagggcacgtcactgcaggccaggtgagccaccagctgggcagcatcatggacctcttcaccaccagcctggcccttgcgggcctgacgccgcccagcgacagggccattgatggcctcaacctcctccccaccctcctgcagggccggctgatggacaggcctatcttctattaccgtggcgacacgctgatggcggccaccctcgggcagcacaaggctcacttctggacctggaccaactcctgggagaacttcagacagggcattgatttctgccctgggcagaacgtttcaggggtcacaactcacaatctggaagaccacacgaagctgcccctgatcttccacctgggacgggacccaggggagaggttccccctcagctttgccagcgccgagtaccaggaggccctcagcaggatcacctcggtcgtccagcagcaccaggaggccttggtccccgcgcagccccagctcaacgtgtgcaactgggcggtcatgaactgggcacctccgggctgtgggtcccactagcacctgcgcagactcaggccaggcctagaatctccggttggccctgcaagtgcctggaggaaggatggctctggcctcggtcctcccccaaccctgcccaagccagacagacagcacctgcagacgcagggggactgcacaattccacctgcccaggacctgaccctggcgtgtgcttggccctcctcctcgcccacggcgcctcagatttcaggaccctcctcctcgcccacggcgcctcagacctcaggaccctgccgtctcacgcctttgtgaaccccaaatatctgagaccagtctcagtttattttgccaaggttaaggatgcacctgtgacagcctcaggaggtcctgacaacaggtgcctgaggtggctggggatacagtttgcctttatacatcttagggagacacaagatcagtatgtgtatggcgtacattggttcagtcagccttccactgaatacacgattgagtctggcccagtgaatccgcatttttatgtaaacagtaagggaacggggcaatcatataagcgtttgtctcaggggagccccagagggatgacttccagttccgtctgtcctttgtccacaaggaatttccctggacgctaattatgagggaggcgtgtagcttcttatcattgtaactatgttatttagaaataaaacgggaggcaggtttgcctaattcccagcttga

SEQ ID NO: 167686 - DNA, 879 bp, Homo sapiens
ggccgtccaggccccgccccgcagcccagccggaagggccggcggacgctcgctaggtcggctcgctggccggggctccgcggctcccgtggttgccatggcggcggttgtcgcggcgacgaggtggtggcagctgttgctggtgctcagcgccgcggggatgggggcctcgggcgccccgcagccccccaacatcctgctcctgctcatggacgacatgggatggggtgacctcggggtgtatggagagccctccagagagaccccgaatttggaccggatggctgcagaagggctgcttttcccaaacttctattctgccaaccctctgtgctcgccatcgagggcggcactgctcacaggacggctacccatccgcaatggcttctacaccaccaacgcccatgccagaaacgcctacacaccgcaggagattgtgggcggcatcccagactcggagcagctcctgccggagcttctgaagaaggccggctacgtcagcaagattgtcggcaagtggcatctgggtcacaggccccagttccaccccctgaagcacggatttgatgagtggtttggatcccccaactgccactttggaccttatgacaacaaggccaggcccaacatccctgtgtacagggactgggagatggttggcagatattatgaagaatttcctattaatctgaagacgggggaagccaacctcacccagatctacctgcaggaagccctggacttcattaagagacaggcacggcaccacccctttttcctctactgggctgtcgacgccacgcatgggccatggccatcgggccggggctggccatcgagacggggggtccgagctcgattcgtatctggctacgtgcc

SEQ ID NO: 167687 - DNA, 899 bp, Homo sapiens
ggccgtccaggccccgccccgcagcccagccggaagggccggcggacgctcgctaggtcggctcgctggccggggctccgcggctcccgtggttgccatggcggcggttgtcgcggcgacgaggtggtggcagctgttgctggtgctcagcgccgcggggatgggggcctcgggcgccccgcagccccccaacatcctgctcctgctcatggacgaccgagggcggcactgctcacaggacggctacccatccgcaatggcttctacaccaccaacgcccatgccagaaacgcctacacaccgcaggagattgtgggcggcatcccagactcggagcagctcctgccggagcttctgaagaaggccggctacgtcagcaagattgtcggcaagtggcatctgggtcacaggccccagttccaccccctgaagcacggatttgatgagtggtttggatcccccaactgccactttggaccttatgacaacaaggccaggcccaacatccctgtgtacagggactgggagatggttggcagatattatgaagaatttcctattaatctgaagacgggggaagccaacctcacccagatctacctgcaggaagccctggacttcattaagagacaggcacggcaccacccctttttcctctactgggctgtcgacgccacgcacgcacccgtctatgcctccaaacccttcttgggcaccagtcagcgagggcggtatggagacgccgtccgggagattgatgacttccagttccgtctgtcctttgtccacaaggaatttccctggacgctaattatgagggaggcgtgtagcttcttatcattgtaactatgttatttagaaataaaacgggaggcaggtttgcctaattcccagcttga

SEQ ID NO: 167688 - DNA, 435 bp, Homo sapiens
gatgggggcgtgtggacctgcacgcccagtgggtgtcccaggagcctgcgaaaggaggcggggtcttggggacaacgctgagctgcagggcccaagggccacgcgtctttcagtggaatgggtgccgtgccccacccaggtggtggagacgctaacggggattgacaggcgtggcagccccttgtaaacctgcgcgtgcctcgtctgtcacgcgtctgtctactcgttggggctcttgttgacgcccggggtctgagccacacccttcttatccagtttctgtttctgtcacctccacatagcgagggcggcactgctcacaggacggctacccatccgcaatggcttctacaccaccaacgcccatgccagaaacggtaggctgcccaccgcctccagggacacccttggggtgcagggttgggcaggtgggct

SEQ ID NO: 167689 - DNA, 443 bp, Homo sapiens
cagcctgggtgacagagtgagactgtctcagaacagcaacaacaaaatgcccgctgctgctgggtccagaagagcttgaataactgcatgttctttttctcaattttcatttcccagaactgggcacctccgggctgtgaaaagttagggaagtgtctgacacctccagaatccattcccaagaagtgcctctggtcccactagcacctgcgcagactcaggccaggcctagaatctccggttggccctgcaagtgcctggaggaaggatggctctggcctcggtcctcccccaaccctgcccaagccagacagacagcacctgcagacgcagggggactgcacaattccacctgcccaggacctgaccctggcgtgtgcttggccctcctcctcgcccacggcgcctcagatttcaggaccctcctcctcgcccacggcgcc

SEQ ID NO: 167690 - DNA, 551 bp, Homo sapiens
  misc_feature (500)..(500): n is a, c, g, or t
  misc_feature (502)..(502): n is a, c, g, or t
  misc_feature (536)..(536): n is a, c, g, or t
atattttctgccctggaaaacccagaggagacacacttgggttcgaggcatgacccgcaaaactctcctgggagttcagaaaacgtggaaggaaggagccggggccacgaggggcatgtcaggcgggttccaggcggctgggaggctcctcacgatgcaccacccttcaccgtgcagggaaccccggccgccgccatgcctgccgccctcggttgtgcccagacgctctgcagggtaggcgggcagtgccagcaccctcctcgggtgaggccttggtcttttgtccctgccgtgcccaggcatagcccatactcagtgctggagggtgctcgtcttaccaagaattttgtgaaggtggtatctgttgctgctcagaacttccgagtgtccccacgtggggtccctgaagtgtcctgggttcctgtttccaggcatctgggtcacaggccccagttccaccccctgaagcacggatttgatgagtggtttggatccggccntnagggcctgatccgtttagggggcccccgaaaccngcttttgttcccttt

SEQ ID NO: 167691 - DNA, 2156 bp, Homo sapiens
cgtgcggggagggggaggccccctcggggagtggccgcggtgtccaggcgtggggtctcggcggtcaccgatcaccacacgcgctgccactgtgctgcatgaccgggacagcgtcctccctggcagcgagggcggcactgctcacaggacggctacccatccgcaatggcttctacaccaccaacgcccatgccagaaacgcctacacaccgcaggagattgtgggcggcatcccagactcggagcagctcctgccggagcttctgaagaaggccggctacgtcagcaagattgtcggcaagtggcatctgggtcacaggccccagttccaccccctgaagcacggatttgatgagtggtttggatcccccaactgccactttggaccttatgacaacaaggccaggcccaacatccctgtgtacagggactgggagatggttggcagatattatgaagaatttcctattaatctgaagacgggggaagccaacctcacccagatctacctgcaggaagccctggacttcattaagagacaggcacggcaccacccctttttcctctactgggctgtcgacgccacgcacgcacccgtctatgcctccaaacccttcttgggcaccagtcagcgagggcggtatggagacgccgtccgggagattgatgacagcattgggaagatactggagctcctccaagacctgcacgtcgcggacaacaccttcgtcttcttcacgtcggacaacggcgctgccctcatttccgcccccgaacaaggtggcagcaacggcccctttctgtgtgggaagcagaccacgtttgaaggagggatgagggagcctgccctcgcatggtggccagggcacgtcactgcaggccaggtgagccaccagctgggcagcatcatggacctcttcaccaccagcctggcccttgcgggcctgacgccgcccagcgacagggccattgatggcctcaacctcctccccaccctcctgcagggccggctgatggacaggcctatcttctattaccgtggcgacacgctgatggcggccaccctcgggcagcacaaggctcacttctggacctggaccaactcctgggagaacttcagacagggcattgatttctgccctgggcagaacgtttcaggggtcacaactcacaatctggaagaccacacgaagctgcccctgatcttccacctgggacgggacccaggggagaggttccccctcagctttgccagcgccgagtaccaggaggccctcagcaggatcacctcggtcgtccagcagcaccaggaggccttggtccccgcgcagccccagctcaacgtgtgcaactgggcggtcatgaactgggcacctccgggctgtgaaaagttagggaagtgtctgacacctccagaatccattcccaagaagtgcctctggtcccactagcacctgcgcagactcaggccaggcctagaatctccggttggccctgcaagtgcctggaggaaggatggctctggcctcggtcctcccccaaccctgcccaagccagacagacagcacctgcagacgcagggggactgcacaattccacctgcccaggacctgaccctggcgtgtgcttggccctcctcctcgcccacggcgcctcagatttcaggaccctcctcctcgcccacggcgcctcagacctcaggaccctgccgtctcacgcctttgtgaaccccaaatatctgagaccagtctcagtttattttgccaaggttaaggatgcacctgtgacagcctcaggaggtcctgacaacaggtgcctgaggtggctggggatacagtttgcctttatacatcttagggagacacaagatcagtatgtgtatggcgtacattggttcagtcagccttccactgaatacacgattgagtctggcccagtgaatccgcatttttatgtaaacagtaagggaacggggcaatcatataagcgtttgtctcaggggagccccagagggatgacttccagttccgtctgtcctttgtccacaaggaatttccctggacgctaattatgagggaggcgtgtagcttcttatcattgtaactatgttatttagaaataaaacgggaggcaggtttgcctaattcccagcttga

SEQ ID NO: 167692 - DNA, 2660 bp, Homo sapiens
ggccgtccaggccccgccccgcagcccagccggaagggccggcggacgctcgctaggtcggctcgctggccggggctccgcggctcccgtggttgccatggcggcggttgtcgcggcgacgaggtggtggcagctgttgctggtgctcagcgccgcggggatgggggcctcgggcgccccgcagccccccaacatcctgctcctgctcatggacgacatgggatggggtgacctcggggtgtatggagagccctccagagagaccccgaatttggaccggatggctgcagaagggctgcttttcccaaacttctattctgccaaccctctgtgctcgccatcgagggcggcactgctcacaggacggctacccatccgcaatggcttctacaccaccaacgcccatgccagaaacgcctacacaccgcaggagattgtgggcggcatcccagactcggagcagctcctgccggagcttctgaagaaggccggctacgtcagcaagattgtcggcaagtggcatctgggtcacaggccccagttccaccccctgaagcacggatttgatgagtggtttggatcccccaactgccactttggaccttatgacaacaaggccaggcccaacatccctgtgtacagggactgggagatggttggcagatattatgaagaatttcctattaatctgaagacgggggaagccaacctcacccagatctacctgcaggaagccctggacttcattaagagacaggcacggcaccacccctttttcctctactgggctgtcgacgccacgcacgcacccgtctatgcctccaaacccttcttgggcaccagtcagcgagggcggtatggagacgccgtccgggagattgatgacagcattgggaagatactggagctcctccaagacctgcacgtcgcggacaacaccttcgtcttcttcacgtcggacaacggcgctgccctcatttccgcccccgaacaaggtggcagcaacggcccctttctgtgtgggaagcagaccacgtttgaaggagggatgagggagcctgccctcgcatggtggccagggcacgtcactgcaggccaggtgagccaccagctgggcagcatcatggacctcttcaccaccagcctggcccttgcgggcctgacgccgcccagcgacagggccattgatggcctcaacctcctccccaccctcctgcagggccggctgatggacaggcctatcttctattaccgtggcgacacgctgatggcggccaccctcgggcagcacaaggctcacttctggacctggaccaactcctgggagaacttcagacagggcattgatttctgccctgggcagaacgtttcaggggtcacaactcacaatctggaagaccacacgaagctgcccctgatcttccacctgggacgggacccaggggagaggttccccctcagctttgccagcgccgagtaccaggaggccctcagcaggatcacctcggtcgtccagcagcaccaggaggccttggtccccgcgcagccccagctcaacgtgtgcaactgggcggtcatgaactgggcacctccgggctgtgaaaagttagggaagtgtctgacacctccagaatccattcccaagaagtgcctctggtcccactagcacctgcgcagactcaggccaggcctagaatctccggttggccctgcaagtgcctggaggaaggatggctctggcctcggtcctcccccaaccctgcccaagccagacagacagcacctgcagacgcagggggactgcacaattccacctgcccaggacctgaccctggcgtgtgcttggccctcctcctcgcccacggcgcctcagatttcaggaccctcctcctcgcccacggcgcctcagacctcaggaccctgccgtctcacgcctttgtgaaccccaaatatctgagaccagtctcagtttattttgccaaggttaaggatgcacctgtgacagcctcaggaggtcctgacaacaggtgcctgaggtggctggggatacagtttgcctttatacatcttagggagacacaagatcagtatgtgtatggcgtacattggttcagtcagccttccactgaatacacgattgagtctggcccagtgaatccgcatttttatgtaaacagtaagggaacggggcaatcatataagcgtttgtctcaggggagccccagagggatgacttccagttccgtctgtcctttgtccacaaggaatttccctggacgctaattatgagggaggcgtgtagcttcttatcattgtaactatgttatttagaaataaaacgggaggcaggtttgcctaattcccagcttgaaaaaaccaaaacacacacaaacaaaccacacccaagacacaaagagcacacagcgagagagcaagaaccgacacacgcggcagcgcaagccgcgcagcacaccgggccccactggacccacaccaaggaaaccacacgaagaccaccgccaacacggaacacgaacgcgaccaagcaccccacggcacacaccaacagaccaacagcccacaacacaccgcccacacggaggacacaacgacacacaacagcggcggccacgcaagacgacacaaccgcgccaacacac

SEQ ID NO: 167693 - DNA, 1023 bp, Homo sapiens
ggccgtccaggccccgccccgcagcccagccggaagggccggcggacgctcgctaggtcggctcgctggccggggctccgcggctcccgtggttgccatggcggcggttgtcgcggcgacgaggtggtggcagctgttgctggtgctcagcgccgcggggatgggggcctcgggcgccccgcagccccccaacatcctgctcctgctcatggacgacatgggatggggtgacctcggggtgtatggagagccctccagagagaccccgaatttggaccggatggctgcagaagggctgcttttcccaaacttctattctgccaaccctctgtgctcgccatcgagggcggcactgctcacaggacggctacccatccgcaatggcttctacaccaccaacgcccatgccagaaacgcctacacaccgcaggagattgtgggcggcatcccagactcggagcagctcctgccggagcttctgaagaaggccggctacgtcagcaagattgtcggcaagtggcatctgggtcacaggccccagttccaccccctgaagcacggatttgatgagtggtttggatcccccaactgccactttggaccttatgacaacaaggccaggcccaacatccctgtgtacagggactgggagatggttggcagatattatgaagaatttcctattaatctgaagacgggggaagccaacctcacccagatctacctgcaggaagccctggacttcattaagagacaggcacggcaccacccctttttcctctactgggctgtcgacgccacgcacgcacccgtctatgcctccaaacccttcttgggcaccagtcagcgagggcggtatggagacgccgtccgggagattgatgacttccagttccgtctgtcctttgtccacaaggaatttccctggacgctaattatgagggaggcgtgtagcttcttatcattgtaactatgttatttagaaataaaacgggaggcaggtttgcctaattcccagcttga

SEQ ID NO: 167694 - DNA, 757 bp, Homo sapiens
caaacatctctttagcaagagtgattgcagatattgaactgaagtccaatatttcaataggccttttatttttgcctactggttaatatgagggatgtctgggactagacacgaatgggaggaagaggaatattgatgtaagaaaggaaaacaataagcaatgccctggtcagtagcagaaagtccgtgtgtacttaaatgctaactcctgagaaattgagagattacagtctgtacaagtctggaaaacatcttcctgaagttagaatgtatgtcaaataactgcattccaaggtactctcatgctgtctcctcaaactctgaagggtgaaaaaacatatcacatcccttatctcatatttaaattttaattggaattaagttcttatcaataatacctggaacaaactgaggttaaaaattttcacagtggaaaacaaccattcaaacatattctctaatgaaaaaaaaggtattatctttagagatctttccagcacctgacacactgctgggcccatagtttgttgaatgcaaataactctggcttggatagggagtataatactagagaattgacgagagactataattcagaccatatttttggttgggtacagttggaaccaagaaaagtctttcactcacttttttttttcttttttttcccactcactttgatcatgcatttcccggtcccttccttttttatataatgctgcagcactaaaacgcattgatgtcttctgaaggattt

SEQ ID NO: 167695 - DNA, 236 bp, Homo sapiens
cagcacgccctggcctcgcggcttcccgctggcgggggtcgccgcgtctgtgaatggggaccacagttctcttgcctcgggcgggtctcgtgggcgtaaattgacttcaggcccgggctgtccgcgagggcaggtgtctttattctctctgggcacgctcggacgggaggtctggggcgccggggcagcaccgtggctgagcggaggccaggactgccgggaggatgccccactgc

SEQ ID NO: 167696 - DNA, 670 bp, Homo sapiens
gctgaggcaggagaactgcgtgaacccgggaggcggagcttgcagtgagccgagattgcgccactgcactccagactgggcaacagagcgagaccccatctcaaaaaaaaaaaggctgtctcctaaaggaagggcagcatgactttttgcaggtgcagcttatcacagtgaagcagacacggtcggccatgttagttgtgttaaccggcatgtgatgtgaagtgccctggctaccttgtctgtctggggaactctgttctcaaaggcttttgcttttcacaccaggcctactttgacagatctccggctgaatccatcttttcatcttttggccaatgtattttcctcactttccgttttgtgacgagcagtttagttgctggtttgacataatctttgacattcaagttcagaaaatgatgaaagctagaaaatggggaagctgagagagaatgcctgattccttttagtatgtccttctaccaaaataatttctgttttaaaacatgtaggcttaatatttccttatgatattaaagacttttttcatgctgagtttatttctttgaaatagaaatcagtaagtgttcattttagctgtttaaatgagcctatctttttttttttttcggggggtggtaagttagagtctcactctgtcacccaggct

SEQ ID NO: 167697 - DNA, 678 bp, Homo sapiens
  misc_feature (103)..(103): n is a, c, g, or t
  misc_feature (117)..(117): n is a, c, g, or t
tgttgcatgacatcgaggtttagggcacagatggtcctgtcacccaggcagtgagcatagtacatgataggtagtgtttcagcccttcctcttccctctctcnccatctagtagtcnccatctttatgtctgtgtgtacccagtgtttagctcctgcttatagacgacaacatgcggtatttggttttctgtattaattcacttaggataatggcctccagctgcatccatgttgctgcagagaacatgatttcattcttttttatggctacatagtattctatggtatataagtaccatattttctttatccagtcctcctaggttgataccgtgtctttgctattgtgaatagtgctgtgatgaacatatgagtgcatgtgtctttatggtagaataatttattttcctttgggtgatatacctagtcagtatgaattgctattccacatgaggctggctcaaaaatcccactttgaggccttatcaaaataaataggtcatttagacatctgtgtcacttagacacagagcctgtgggagaaatgaaatagaaaaaggtcccaggttcagcagggagcctcacgtggccatggcaaggctgtgcccagagaatgtgccacttcactctccacgcttttcatatttaaaagtcagctatttcttccaagccttttc

SEQ ID NO: 167698 - DNA, 454 bp, Homo sapiens
tcggagcagggcagagggcgttgcgtataaactgcctctcatttatcctcaagcctgattacctaagtgaactgttatgttttcttctttctacctggaatcctcttaaaccagaggcagatttgacctaagaagtatgcaatttagttgcgtctacatgacccaatatggaaggaagttttggcaaacacccagttaatctagtcagtatgaattgctattccacatgaggctggctcaaaaatcccactttgaggccttatcaaaataaataggtcatttagacatctgtgtcacttagacacagagcctgtgggagaaatgaaatagaaaaaggtcccaggttcagcagggagcctcacgtggccatggcaaggctgtgcccagagaatgtgccacttcactctccacgcttttcatatttaaaagtcagctatttcttccaagccttttc

SEQ ID NO: 167699 - DNA, 226 bp, Homo sapiens
atctaattggttggcatacaattcttctcaatattatgttataaccctctctcgtttctgtgagtttggcagtaacatctcttttattcctgatttcagtaatttgagccttctctcttttttttccccttggtcagcctttattgtattcatctcaaagtaattttctaatttctcttttgattcctctttgactgattatttaggaatgtgctatttaattttc

SEQ ID NO: 167700 - DNA, 350 bp, Homo sapiens
cttgatctttctagtgaccagcctctatcctgaagttatcaaggggcccacaaagagtcacatcattagaacaaaagatgctcctctacctaggaaattccaagggatttagcagctgtgtgccaggaacctgggacaaagatcaaatatatatcacaataggactgttgttgttttcattttgtcttcagcatccattagattgtgtgggacataataagtgcatttaatgtttgttgaataaatgaatcgagctggccttgatacttattcttctgaatgttaaatgctgcatctatggagatttgaaggaaagggttctgactcaagacttctggacctttattagt

SEQ ID NO: 167701 - DNA, 293 bp, Homo sapiens
aagatgtcaaaagtttctagaaggatcccacagtgttatctctgtgaaatggaaatgggggtgggagatgaaagggaagtgttttataacattttaaacaacaaatatatattatgttcattagtttgaaaaactaattttaaacatgtttaagaatagaacctgacaaatatctaagaatcacaggtattgtaacccacccaggagactccaaatagggctgctttacacatctaacagggcagcatcaatttggtctctgaggaattcagcatctgaattgtcttatttaa

SEQ ID NO: 167702 - DNA, 368 bp, Homo sapiens
gtgcaatgagtgtggcaagaccttcagtcatatgtcatcctttgtatgccatcatagacttcatactggagaaaatccttataagtgcaatgagtgtggcaaagcctttagtgggcagtcatcacttattcatcatcaagcaatccatggtatagggaaactttacaaatgtaatgattctcacaaagtcctcagtaatgctacaagcattgcaaatcattagagaatccataatgaagagagatcttacaagtgtagtaaatgtggcagatatttcagacattgttcatagcttgcagttcatcagtgaactcatactggaaagaaacgttacaaatgtcatgattgcagcaaggtcttcagtcaag

SEQ ID NO: 167703 - DNA, 102 bp, Homo sapiens
catgaactactgtgcccagtctagaatttttatttcatcatttaacttcaggggtgacactgttcagtaagacacacacacatacacacacacacacacaca

SEQ ID NO: 167704 - DNA, 327 bp, Homo sapiens
ctgaaagccccgccaacactgatgacaaatgaaatggatgttgaatgtactggtatttgaccagtatgagttgctgagccccagtttggctggttatgcctgctataaaatactgaattgcagtgtgtcaatcacattagttgtaggagaattagatgtgtacaccatatagaagtagcttagagctataagaaaaatcaggcgtttgttgagataaggcattttaaaaagatttccgacgcttttcaagataaggttgtgtagaggtgaaattgagtttagagtgttgggaggaaaagtgaggagattctgtggggctttgttatt

SEQ ID NO: 167705 - DNA, 480 bp, Homo sapiens
acatatcttttttggggtacccagttcaacccataacagactctgaatagcccctcaaaaattgaaaaataaagaataaagttagaggaatcacatttctcaatttaaaaatttacatcaatccagacggtgtggcgcttggatatagattcatggagtatgatcattagtttaaaaataagcccctacctttatggtcaattggttttgacaaggataccaagataattaaatggtgaaataattttttatcccccacaaatggtctcagacagctggatatttgcatgcaaatgaatgaagtttaactcctacctcataccatctacaaaaattatgtcaaaatggattaaagacctaaatgctagagctaaaacaagtaggagctaaaactcctaggagaaaacataggagtaagtttttctgaccttgggtaggcagtggcttcttagatgtggtaccaagcacacaagcaacaaa

SEQ ID NO: 167706 - DNA, 156 bp, Homo sapiens
gggattagaggctacagtgaggtaggattgtgccactgcactccagcctgagtgacagagcaaaacctcatctctaaggaactcttgagttctgctctaaagaattgattttctcccagtctaagtaaataactctatcatacacccagtttctta

SEQ ID NO: 167707 - DNA, 150 bp, Homo sapiens
ccaagttgtttatgagctgggtgcagaatagaattagccaagaacgattctggatcgcttaatacgaagaagccaggggaaagaaacacacaggtcggggagcgaatagggtgagatgaggtggcctgaggagatgagagctgggagccc

SEQ ID NO: 167708 - DNA, 315 bp, Homo sapiens
ctatttcacattatatggatactgtcttagaagatgtggacattatagttgatttaggtaagctatcaatattagattgctaagaggacaatctgattcctttttaaaaattaattacttaattatttttaaatagagatgaggtgtcgccgtgttgccaagactgttctcaaactcctggggtcaagcaatcctccctcctcagcctccctaagtgctgggattacaggcatgagccacaacgtctagcctttgttcttttttaaagctttattttcacaactattttatgaaagagaatagagacactactcc

SEQ ID NO: 167709 - DNA, 367 bp, Homo sapiens
agagcactgatcaacagtcatttattctgtgctgcaaaatattgctgaaacctgcttaattataggagagtggtgaaatctttgcatctccacatggtgggatactatccagtcttaaaattcatattttaaaagaaaagctgggtgtggtggcacacgtctctagtcccagctactcgggggctaagatgggaggattgcttgagcctaggggtttgagaccagccggcaacatagtgaggccctgtctctttagaattaaaaaatgtttaataatttaaaaaaaaagtacacgggaaaatgctcctaatattaaatgataaaatcaagttatgcaactacatattcaatatgctgtcaattttgt

SEQ ID NO: 167710 - DNA, 659 bp, Homo sapiens
aggattcccctcacccatcagtgtgaagggttggatggcttatttatgtccaaattcctgcggcaggtgttcagtgtcgtctggggtgaggttggagggaacctgcctggtgtgggagctggggtcatgatgggagagggggctgactacaggggccacacacagacagcacatttgtcctggcaggttggctggtctgccaaatgcatgtaccatctccaaaggaggtctcagggggacaaaatcttctcagaggacactactgggggtctgtgaggtggtctggggaatagcatcctttttttgagatggggtcttgctctgtggcccagactggagtgcagtggcacgatcatagatcactgcaacctcaacatccagggcccaagtgatcctcctgccttggcctcccaaagtgttgagataacaggtggcacctggcctgagaggagtatttttatgtccccaaaccacaaatttgcccacatggatgcatccgtcccacgtgctccatttccacattgcctgtagggcagctcatgtctgcagattgagtagcagtcctgggtccagacaagccaagcacccactccagggaccgactcgggtagcacatgaggtatactgacctcctgacaagccctgagcaattctgtgac

SEQ ID NO: 167711 - DNA, 615 bp, Homo sapiens
cttggaatgggtaccttattcatggcctccttacatagagggagcagattcaggacagaggctctgcacgctcctgggtccctcctaagcgagcactcccctccactgctcctcctgttcggcatgctagattttctgtgcacttgcagtcatacggaaactggcttccttcttagctgtgcgtgtgaaagtcaccccagtgtttcacctgcagtgtgagtgtaatttggggtcccatgacatgatcatcttccttttgatttctaaagctagggtcagggaaggggactcgttttgagccaaagggcattttaagggcatcatttcatatgttcactgtctgcagccaacactgcactctagacaaatgggtacctttatgtcccatttattaagacatcctgcaaaaggggctcctggcccctgtgggaagcttgaaaggaacagaccatatcctgtttctttttgctcatacctctgtggtgagatcttattctgaccccatagtctggtgccatacctgtgggtccctgtatctcctagaattccccctatgctagtgtttagcccgtgtaatgacagttatctgtccacagggctgtatcccccgccagc

SEQ ID NO: 167712 - DNA, 604 bp, Homo sapiens
cactcccgccctctgacatcagattgtgggcactagatcccgcttggtggtgaaccgggtgcgtcagaacccagggattaaatagctttcgaaatccatcggcttgtccttgaccagccagagggccagggcacgtgcccagacctcctgccagctcagggataggggaaaacaccatccatgcacacattcgaggcagctgcagagagccgcccacagtgggtcacagcccaggcccaagactgatggtcctggcccaaagtgctctggagacctgagctcccgagacgggggttggttggaggctgggggctgtcagaacctctctccaggcacccagctaggggctgaggaatctgctctgccagctgttttcacagtgggaagcaggtggcttgcacaggcctttgggggaccccatatgttgaggtaggaaacgctgtggtgtggcgggggagggagcaaggggtatccttcctctgcacccaggggccatctgctttcaaatccagccacttgtcctccttcctggtagcaatatggagccacccagactctgctagacatatgagtgctaaagataaaaatactcaaaggacatatg

SEQ ID NO: 167713 - DNA, 1028 bp, Homo sapiens
taacccacatttatggaaatagaagtttgtcttgcagaaacatcagctcattttgtaaggtgtatgtgatatttaaatttgtgatgcttgtgaataagggaatggggctttaggtctgaggaaaggggagcattcattcaaactggagggtattttgcatttttaaggctgctataaggtcacgaccttggtgagacttaacctgttttcgtatgtattgtgtactttctgttctaagccattgtgtgtgtctgtaactttctccaagattctctccaaatcttgcttctcttaatttctccagattgtgccaacctatttcccactcctgatctttagtgttatatcaccactaggagactggggaatgtggtttgtgttcttagactcaacagatacctaccatatgccaagcattcttctaacagctagtgagagatctatcagtgaacaaaacagacaaaactccatcttttttcctctgctgctcatattctagtgttaaccatttgcatatttctcagactcttcaatacatttattatttctttttaatcagtttattctgaccctcagtagatgacatatttcatgggtgtagggacagtgccatctatctcccttggggtgttcttacattcaagaaatgggttttcacacaagtcctgtcaaatacttaattccttacacaatataaagggattgagtttttcaaagataggctgactacttggaatgaaaagcatttaaatactgaagagagaaaaaggattctcttttcaacccttcatattctcggaaggaaaactgaaataccgagttagtatgtcctcaaccctggttaatttcccttgcaaacaaagagggacaggccttggtgtcagaagctttgccataagatgttacctagctaggatttttaaactggttttcattgtattttattaccttcaattaagaatagtttaaaacaagtagttttccatttatagcagtaaaataaatttgttcaagtatagcactgaatg

SEQ ID NO: 167714 - DNA, 245 bp, Homo sapiens
aatatacttaaccctccatttgcagatattatgtaatttgcctgataccacaggactaactaatgatagatccagaatataaactcaggcttttctaatccaaaggtcacaatttaagcactaattgcatatagtttttcttgacttggcattcaagggatgggaaaactcaatagaagactcttgcaatagcccagataacgtgtagatagttagcagagggaatgaacagtagtgaacaaaac

SEQ ID NO: 167715 - DNA, 181 bp, Homo sapiens
tgacccagcttgggttacatgcctgcttctgggactaatcattgtggctagagggattggcacttgactggccaagctggggtcatgtgtgcaccctagtttggcagttggacaagaaccatgtgtgatggggaaggaacatttctccaacagagaggtgctgggtatacgagaatgttgg

SEQ ID NO: 167716 - DNA, 640 bp, Homo sapiens
tctacagaggtgtaatttgacataaattgcacccatttaaaatgtataatttggtacattttgatgtttgtacctgtgaacctttaccacagtcaaggtgagtatactgattacccccaaaaggttcctcgtgcccttccctgcccctgggcaaccattcattggtgttgtcactgtagattagtttgcatcttgtggaatttaatataaatagaatcatgtggtatgtcttctgtctgcttctctcatgaaggggtgggttgcccctccacacctgtgggtgtttctcgttaggtagaacgagagacttggaaaagaaaaagacacagagacaaagtatagagaaagaaatcaggggacccagggaactagcgttcagcatatggaggatcccgccagcctctgagttcccttagtatttattgatcattcgtgggtgtttctccgagagggggatgtgtcagggtcacaagacaatagtggggagagggtcagcagacaaacatgtgaacaaaggtctttgcatcatagacaaggtaaagaatcaagtgctgtgcttttagatatgcatacacataaacatctcaatgctttacaaagcagtattgctgcccgcatgtcccacctccagcccaaggcg

SEQ ID NO: 167717 - DNA, 521 bp, Homo sapiens
tgacaagataaagaaaatatggatgacagtaataagtaggtgggtagtaaataggatttaacatattccccagctttcctttaaagggaaggtaaactaagaacaatgtgatttcctgtctggacagaagtggcatctcaggttaatacatcttaatacaaagacaagattgagctgttttaaatagaatcccttggcttcctgaaatcctcctattagtagagcagggttgggaataatctttcactgacagaccagctcatggctggaggcacttaagaaatggtttccatctctaggagatgatcagggtagtggatgtttttgctggctaaaagccagcatcggaaaaacaatgtaagttgctaattctatacaataagagctaaatttcttttcaactgctggtacattacagctatgtggctgtggttttctgggtatctattctgccctttgaagttttgagttacccaagacaagaagccaattgcttcttggccttctggctaagatcaaat

SEQ ID NO: 167718 - DNA, 343 bp, Homo sapiens
tattgtggcacatgcctgaaatcccagctactcgtgaggctgaggcatgagaattgcttgaatccaggaggcagaggttacagtgaggctgagatcacaccactgcactccagcctgggctaccgagtgagtctgtcttaaaaaatatatacaaactaaaagtcattagtccttgattttggtctcaactctgccaaccccaagctatgggacaatttaaagccactcaaattcacttacttcagtgtactcatctgatctacagaattactaagccttttctcctctaaaagtctaggattccattccagcctaccaagtgttctatggcactcatttgctg

SEQ ID NO: 167719 - DNA, 227 bp, Homo sapiens
ctgacaacacgtgtccaaggtggtcagggtacagcttgcttgtatatattttaaggagacatgagagttgtctgtattttggcaactaccaagtatattcctctcccttgagcctcaaactgataagcccagatgtataatccaaatgttcacttggatgtctcataggtgctgtgaacctcaaacacacaaaatagagctcctggtctccactttcctcaaaacct

SEQ ID NO: 167720 - DNA, 173 bp, Homo sapiens
gccaacatcagacatgagtggttcctctggtgtttctttcataataaaaacccatacctggattcaacgtctaaagacatgggtactaaatctcacctctgtaacatagagctgatcatttaacctttgaagttccctatggacgctgaagtacccaacctcatgaaataata

SEQ ID NO: 167721 - DNA, 231 bp, Homo sapiens
tggttaaccttgtattgctttggctttcttctttatttttatgttgattattgattatgaaatattttagaaagtaggaagaaaaagtgtgttgcatattctgtttattaaagagatgatcattgcttatatgttgaacatttatctctaattaattatggattttcattattaaaacacaaaaagtgaaatttttttacaaataatttcaatttgcttgagaaaaagagg

SEQ ID NO: 167722 - DNA, 266 bp, Homo sapiens
tcttgatggtcatgtgccaatcaaaagacctgacaaactcaaaaattagagattaatgttcttaaacaacaaactaaaataggttttggaaaaataaatggaaaaatttctagcctctgcaggtggactgttgtcaattgcaaacaagcttaaatttagaaatttgacatagttttggagaaatgtgatgaagtagattaaacagaaaattcagaatagcctgaatttggatctccattttacatagctgattggttaatattctt

SEQ ID NO: 167723 - DNA, 386 bp, Homo sapiens
  misc_feature (28)..(28): n is a, c, g, or t
  misc_feature (95)..(95): n is a, c, g, or t
gggtctgtgggtcctttcaggtttcctnatttattcctgaagtcattctggagaataaataatgatgtgagcttccacatgctgctttgtctgtngagtcaaagttgcagtctagtcctgcctctcatcctccatgatctgatgcccaaatttttggaaatgggagagggagatcatccgcccctgaacacatgcccccactggggaaactgaaggtctagattatgggagaagattccaaccttacctggagctgactctatttagagctgagcaaaatataggcgtagaggaaacaggggaaaagccctgtgagctcattgggccttctagcaaaccatttctgcctggcctcacaggggtcctttggcagggcagctagaggc

SEQ ID NO: 167724 - DNA, 423 bp, Homo sapiens
ttttgtgaaatagaatatagaataaggccatttaacatgagctgtcattgtacagccagagatggaattcatgggtgcatcgtatcactgtgcaaattttctgattggcagtctcaggtctcccctgaaagtgttggcctctccttccgcctcggggctcctactgcctccccgacctttgcctagagcgtcctccccctccaaatgtctctgttttgggaaaatatagcctcttttggctgcaaccctcatctggcattggattgtcctttttagctttctgcaagcatcttccctctccagctagattttaatctttcagaggaaaaaagaaaaacttctgtgggatccccaaagctcccggcatttgactcacaaggtggagctcagcaaatagaaagtgaccagaggaacaaaagcctt

SEQ ID NO: 167725 - DNA, 282 bp, Homo sapiens
ggagcaggggcagcagagcaggatgagcaggaatgcaataatcaagatgatccagaatgagaaggaagcggaagacaaggctcagtgtgagaccagggtcagagctcagcaaacttccacgactggctttgaatcagaatcattttgcttctcagccacggcccctgggttacacagccttaaatggccctgccaatgctggtcacagcattcccgagtcctgaacactccggaactaaaacaatcaattcccctgagcaataaaattatggacagtgaaca

SEQ ID NO: 167726 - DNA, 318 bp, Homo sapiens
tcaagatgttatccctttcccaaggtttcctcattcatgccttttatagctggaagatggttaaggaaaagcaccccccatggcagagacactgcacatgattgtgcatacagcagaatgcatgtttggattttagtagtgcagatttcaatatgtaattgttgtcccctagcgggatggtgagcgggacaattttcttttaggagaccgaggctttttaggagatcttgtgccactcctgcttcttcctcactcactcctctttgctcatttttctgccaacgattcgtcatgtatttctaggactatctgctcact

SEQ ID NO: 167727 - DNA, 755 bp, Homo sapiens
tctcagaacagaaacaaaaacaaaaaaccactactgataaagtatatacctgtgaatttaaataactgttgaagagaaatagtaatttataacacgaacatataaggcaatagagtagttgatgccaatagataaatgaaaccacagggtaggaaatctagtaggtagggaagtaagtagaaataaaagaatggaatccaattgaattcaggaaggaataacatgaaagaagaaatggtgaccatttaagtaaatctgactgtataagacaacgatagtaataattcaaaatgaagttaaaaagactggagaaaataatatgttaagatgagaagggcttgattgaagttaaaacattctaagatttttatattgtttaggagaaggatatagataacaattaactttatgttttgttaagtcaggtatgattgttaaaaattatacgggtaactaaaacagtgaatagaatgtgtaacttcaaaacaaatagatggaataaagggagaataattcagtataatagaggaagagaagtcgataggtgtaaagtaaatgaattaggtggtagaaataaatccaaatatatcaataattacaaaaaatataagtagagtaatattagcagctaataggttaggttgcattttttaaaatacagttatgtgctattttagactgtattgggagaaaatttaaaataccaagacacagcaaaattgaaaggaaaagggtaggggaagatacctggcaaa

SEQ ID NO: 167728 - DNA, 496 bp, Homo sapiens
cgcaagcctgtagtcccagcaactcagaaggctgaggtaggaggatcacttgagcctaggaggtcaaggctgcagtgaaccatgattgtgccactgcactccagcagcctaggcaacaagtgagaccctgtttcaaaaaaaaaaaatccccaagtcccttttccagacagtctgtagtcttagctatgtagtcatagctctggagtcttcagcctgtgtgaatcctgcttctgttcatcttactcccccacccagtgttgactttccgtagtccttcaagaccagttcagagtgcttctatagcaaccccaatttcagttatattgttcccttttctcctgatcccaattttagaaacctggtctaaagtggctagtaaagacaagacctctgttgggagaaaatccattgcagttggtcataacactttgaaattctgcactaatcagaccagtcttgatcccgttgagtgtagttggtatgcgcacatgtatta

SEQ ID NO: 167729 - DNA, 363 bp, Homo sapiens
aaaggaatttctagtctttcattcttctgctccagtgatggacacaaacttaccaaagaatacatttaagtagctcagcacagtttataatacattctctgtgccctggaaattgtccagtggctcccatctattttccagatagcttcagaattgattaggatttgagcaggagcggcacatcacccatctgctcctgtatcagcttggtttcctgtttcttgacattagcattgccacccatactccaaccctgaagcttctcatggtctcatactagttcagtttcatgcctacttggatggttcttgtggaagtaagacagagtacacataaaacattaatgtaatgcccaccacataa

SEQ ID NO: 167730 - DNA, 250 bp, Homo sapiens
cactgtttataacattgtgcagggtccagctcatcccctgttattggccatttatgttgttccaactgattctctgttgttggcccctgaagtcccaccgtctaattccttttgaacattcaagtagcttttcatgattaaggctcagagtatagaaagaacagctgaataggaattgaacattttaaaatagggagaaaggactcataattctaaaagccagactaaagggctgcaaaacagcccttcg

SEQ ID NO: 167731 - DNA, 420 bp, Homo sapiens
cacgaatgcgatatggcacagcagccgctcatagacctcaggcttgttgccatgcatagaagatgcacaccgcagagtggaggccgcaggcagggaagtaactggcatgaattattgactgtgtgtgaggccctgtgcggggagattcacttgttccttcctttattcattcattcactcactcattcctttcatgcagctcatgttcagtgagtgcctgctgtgtctcagatacatttaaccctcactaactctgtagaaactgaggctcagaaggtgaatgcagggcgaggtagcttgcccaccatctcagcttggacatggcagggcaaggggcttccgatcacgcctctcagacccagagtctgcttgtctccattctgcctgctctggagcccccagttcttccagctgcatctc

SEQ ID NO: 167732 - DNA, 415 bp, Homo sapiens
cagaatcaaatgtgattttatcatggcaatggaaagctggttcaatatttgaaaatcaaccactgtaatccaacatattgacagcctaaaaaagaaaaatcatagatcctgtcaattaatacagaaaaagcatctaacaaaactcaacacccattcatgataaaatttctcagtgaattaggagtagaagggactgtcctcaacctggaaaggacatttacaaaaacctacagctcatgtcatacttaatggtgacagatcaaacactttctcaataagatgaagaaaaagaggccagacgaggtggctcacacctgtaatcccagcactttgagaggccaacacaggaagattgcttaagcccaggagttcaagatcagcttggacaacatagcaaggcaccaattctacaaaa

SEQ ID NO: 167733 - DNA, 295 bp, Homo sapiens
caccccgcacccgccaggaactgatcaggaaggaacaagaaggacatggttctgtcctcagggaacttggggataaataacatatgcaattaagatgtaagacaaaatatattcgtataaagtgcaaaaacacaggcacatcactctctgccttcagaagtgagggtgccagagcttggtgcctgggagtggcccgcagagggttcagggctgctgtgtgttcaggttgttcatctggctctgctgatgaggctgagtgcaggctgtgaaaattcatcaagctgatactttaagt

SEQ ID NO: 167734 - DNA, 107 bp, Homo sapiens
gatctttgctggtgcctttatatctttcaagtctcagtttaaatatcacctcttccaagagacatcctttgactaccatatatcaaatatcccctaagctcattatt

SEQ ID NO: 167735 - DNA, 269 bp, Homo sapiens
cttcccccttttaaggagaagtataaataccaggcctcctgaaaacctcttcaaagacaacacaagccacagatggtttctatgacttatgtttttccagggtgcaccctcaagctctggctcagtaaacctcaatggactgacacttgcttgcctcagtcaatcattttggttaacattttggtgaccatgaagggatcctctgagtggagcttagccccttaggcctgcagcgattctcctgtttatgctcagtaccaactatcgag

SEQ ID NO: 167736 - DNA, 380 bp, Homo sapiens
gaacacaggacagggaaccattcaggacaagaggccaagaggccagggttggggcagagtaagacggggcaatagcttcctggattagtttttagagttttctgctggcttagggttggagagctggggcagcagcttaaagaggggaccctccaatggcataggggactctgcaagaacctccggcagcagcactctgggtcagagggcgaggaattgggggaaatttaagaaggagatattaggaaaacttcttaataaaggcaccaaactgatagggcaacaggggaaagccaaatggggaccttgggccgtgtcggagagcagacagggctaggggagcagcttatcgtgcttatctcaccgtagagatgatacat

SEQ ID NO: 167737 - DNA, 588 bp, Homo sapiens
agagtaggaacaaaatcaacacacagaaattagtagtatttctatgcactgttaacaatgaactatgcaaaaaaagaagccaagagaacaatcccatttacaatagctacaaaaaaccaatcaaatttaaccaaggaagtaaaagacctacatactgaaaaacatacaatgttgaaagaaattgaagatacaattaaatggaaagctattctgtgctcatggattggaagaattaatattgtttaaatggccatactactcaaagcaatctccagattcagtgcaatccctatcaaaattccaatgttatttttcatagaaaaaaatactaaaattcatatgaccacataaatccctgaatagccaaggcaattatgagcagaaagaacaaaaaagaagctaccacactagcttatttcaaactatactaccaagctatagtaattaaaacagcatggtattggaaatagacatcagccaatgaaacggaatagagaacttagaaatgaacccgttatgcctgtcgtggggtggggggagtggggaggaatagcattaggagatatacctaatgtaaatgatgagtta

SEQ ID NO: 167738 - DNA, 224 bp, Homo sapiens
tttgagcaaatgagaaactggtaatgccatttcttagagtagtcattatttatccaaaagtatctctgagaaaagctacaattcttgcaagtttagtgtattccagggagctcaagaaaggggtaagttttagatttttcgatattctgtacaatggttaattgaagcatataaaaatgatttgagagaccatataggataatgctaaaaaatacacacaattc

SEQ ID NO: 167739 - DNA, 323 bp, Homo sapiens
ctgtagcctgaattgcaattgtaccctgctcattggggcctaaacctctggaaaacctcttccttcccagagccatgccattgctgcaccctaacacccaggatgagtcagcaacatgcctgatcctgggcctgagatactgggaagtgcctcagaatcacagtacttggccttgtgggagagctgcatcacccatacctaaaagaataaacctggacctacaccacaggtgtcctggcagttcaacaagacactgagccccagaccccagctccacagccactctgagcacctgttccctgtaacacagcactgcttggctg

SEQ ID NO: 167740 - DNA, 231 bp, Homo sapiens
tctgctggctcccttccccagcaattaggggtgggtctaggggtaagaatttgccctagactgagctgctactggttgggaatggtggagctttgagagggaaggactttggccagactggcataggaaggggctccctgcaggaggagagcagtactgtgtgcctggcatgctggcccagaacctgcgtaactatagcttagtaaaatctggagctatcaaacacacaca

SEQ ID NO: 167741 - DNA, 533 bp, Homo sapiens
ccggtcaggagagtaatggactttctgtgagtcacaatgagcacaactgttgcattagggtgacagtatctcctactgcagccaacttccctgaatagaaaaccactggatcctgtctttcaggaagcctctggatccagtcttatctcttagagtggtctatcttcccaggcacaaatagcaaactcgtcggtttataatctatagcaaaaaattcatattctcacattttaaatgtagtgttacctgtactataaacaatgttgtattagccagacttcagctattttggggtgcagtatgttaaacaaaagaaacaagtctcacttgaaaggatttcatttgaggaggggggactttggtctctagaggaaactggtgtaatatttctatattaatacaaggactgtagctcaagaaaataataatggctacagataaagatctggaaatatatacaattaattggagccataggaaagatggaataaagtggggctggaagaaaagggggctgatagtataattctaag

SEQ ID NO: 167742 - DNA, 328 bp, Homo sapiens
gaaaaactacgttgatacagccaggctttctctgaggctctctcttgtccatatctaggaaaaactgagagtctgatacctttaaaggtctgaaagaaacatttactatctattctgtctgagagcggctacctctgagatttctcctatgtaacaagaacgcctttgccagccaggcctcctcttctccccatgccataatctctttgccaagatccaagcctccagtctttctgtaacctcaaggcttctgtaccccactgcggggattggtaatcactctatggttctcctccatgtgcacaataaatttgtatgctttttctcc

SEQ ID NO: 167743 - DNA, 363 bp, Homo sapiens
taatgatgctctagggggaaaggcaaacatttgttgtcctggcatatatcctgttatatatatgaccacaaaggtggggagggggaggtgaacaatcctacaacctaggttcacaacctagtgatatttgcagtgaaacatttgtagtgatatttcccctttcattgccaaggggaagaaaacactaccattttggcaacaactttctatttagaaccttacactactcaggtcctcacttctacttctgcaccattgtttcttcccatcccatacaaaaatccctcattaccaaaatgtatggatccaactattttaacttttatcatttgtggccatggttatagttaatgtcccagattc

SEQ ID NO: 167744 - DNA, 386 bp, Homo sapiens
ggccagcggagcgcagggcgcaggggctggacccggcgcggagctggctgagtcggagcgcagcgtcctttgtgcccggcggccgccccgggatgcgtccgagctaggagccaggtgggggatccgtgagggggccgtgttgcgggagaagacttcgggattagagacagagctcaggattagggagaggacctgagaccagggagaagtccccagaatggggagggggctgaagcgggggaggggagccctaggttgaggagggagcgcgaactgggagggggcttgggaatgctaggtgaacagacatttggggaggaaggttgtccgcggaatccggagactaccccccggtggggagggggccgggctgggggtgggtctca

SEQ ID NO: 167745 - DNA, 117 bp, Homo sapiens
atcactgactgcacatggttatggcaacttctaaaaagaaatttagagaacaagatttttaaaattcttctcaaaggtctaacccaaacctagatggctgaaatcaactccaatttc

SEQ ID NO: 167746 - DNA, 218 bp, Homo sapiens
taaccacacccaactgatgtactcctagttgctttgctactatatttaaaatgatcaaacacctaagtcaattactttaatattctttggagaccagcttactgaaagaacctcaacacagttaatatatttgaagcaaaactccagcacagtgaagtaacagtaataacagctgaaattcctaaatgggccaaagaggaaagtaaagtaatgcagca

SEQ ID NO: 167747 - DNA, 295 bp, Homo sapiens
gcagtaagccaagaacatgccactgcattccagcctggatgacagaatgagactgtttcataaaaagcacggcaaagaaaaatacccctgaattagagacaatgttagaagcaatcacatcctcaaggaatgacctggaagcattttcctacataaaggggagttttttctcttaggatgacctgaaataattgccaaacacagcccatcacaactattcactgaacaaaagaaccagtgggttacattaaggaattgtttcccatttatgatttggattgccaattgatccaaa

SEQ ID NO: 167748 - DNA, 315 bp, Homo sapiens
cctctgtgggtaggtgcttctgtggtagctggggttcaggctgagtcattcccagccccagctgcctgctgcccttgactgcctatatagcccagagtgagcagaaatggaaaacaggcttcttcactcaaacctgattagtctcagggaccctctcacctccttaaaaaggcaggtggagcctcgtgtctggaaagggaacatgggaaatttagcttcttgggcttagctgcttcgtgccttcctagagacctgggagaactggttcagggagctccagagcgtgtggaaaggggagaattgggctgaggcaga

SEQ ID NO: 167749 - DNA, 484 bp, Homo sapiens
ggtaattatgaaggaaagaggtttaacggactcacagtttcacatagctgagaggtctcacaatcatggtggaagacgaagaaagagcaaagggacttcttacatggcggtgggcaggaggacacatgcagggaaactcccgtttatgaaaccaccagatctcatgagacttattcactatcacgagaacagcatgggagaaacctgcccccacaattctattaccttccaccaggtccctcccatgacacatgggaattctgagagctacaattcaagatgagatttgagtggggacatagccaaaccatatcagttactttgaatgctatgaaccagtgataagatcttactgagtccctcacaaattaaacaagctgttcggcaggtattcattttatatttgtgtgtgagctgtgactgtactgtcttttaagacatcatttcacataacaactcaccaattctcccaaagttgatccaa

SEQ ID NO: 167750 - DNA, 408 bp, Homo sapiens
agtgactatcctagaatgtatcactgatttaagagaatctaccttaaattagcacctttaccattttccagataatgcaaggacctcacaactctttgaccctttccaacattttgtgctattattgtcatgtcctttatttcgatatttatttgagctctcacaagatattattattattattgtcactgaaaatatatttatgcaatttacccacattctccttgtgttcaagccattcattctatcctgccttagcttgctgccatctgagatcatttctcttcctcccgataagctccttttagtatttcttttggtagaattctgccacaatgaaaaagtttcatatcttgacgcaggtgatatatgggcaaagtcactctttaaatatccatggagatatac

SEQ ID NO: 167751 - DNA, 220 bp, Homo sapiens
tgtaagatgaacaagtgggtgtttttagtgaaacacactgagattttggggcagcatctcatatgaactagaagttcttgtctgatccatcaacagctttgaaaatggatgttagaactgatttttttaaaaagtcacccagcatacgtttttgttaatatttaaatcaggtgctatctcctagtctttggaagcccagtatgttaaggcttagggatct

SEQ ID NO: 167752 - DNA, 369 bp, Homo sapiens
gaactgggttccaggacctcacatctccatttcccatagttggggggcagggaggagacccctggttctggagcgtcagatctgcaaggcctcggacctctggctcaacacccccttgagaggcttctggcctcctggctctgctggagaaggcatggcctgtggacctcctgcattcccgaggcaggctgcgtggctagcatttggaggctggcagagactggctgattcctaaccaaagatgctgttggtgtcttctgatggaatgtgactttctttgcctagtaggtgttattcacagggatcctttagttaagcaaatttgcctaggccccctgttgggtcgtatttttcttttttctttttttt

SEQ ID NO: 167753 - DNA, 547 bp, Homo sapiens
gcctactactactaaattcgcggccgcgtcgacaattctagcgctgcctctcccggctcttcactgcacgcagcctgagggcgtcgttgtctgtgctgcaccctggtgctcagtgggtctccagctggcacagtcaccaccactcccagatgggctctgccagggacagggatggagcagactgcatgggcctggcgtgcaggtgaccaggtagaggcagctcagctgtgtctgaacagcttttcccatcgctttcccggtcgacattcatggcagccgctgcgtccaatgacaggcacagtcaattctttgagacagaaagggaaggacaacactaatgtccccatgaaccccagaaacatgaaggaggggcacacgcccacagtagaacatgtggaagctgagtgtggcagtgtaaagggcgatggagcccccgggcccagcatgtttcgcgctgcctgcttgtgttctgatgggcggtaactgaaggtccaccaggaagtgcctggcaccccccctctcgctcgtgaaagatgcagatcagagc

SEQ ID NO: 167754 - DNA, 494 bp, Homo sapiens
cttaggggaaggggtgagacgggggtgagggataaatgactacacgttgggtacacattggtaagtgtacactgcttgggtgatggacacaccaacatctcagaaatcaccactaaagaacttattcttgtaaccaaacaccacctgtcctcccaaaacctattgaaataaaaaataaattaaaaataaaaacaaaaacacgtgtctaggtagcatacatgataggtgtactcaccctaagtaagttaatgtgttttacttgtgtcattgcaaaaatgaagcaaggtagagctataaaggctgtctgaacttttctcaagacccggtggtggggtgaggagtcagttacaactggttatttcctctttgcagggaacgtatatgtggcctgaatagttgagcagacagacttgggcttgctgctattaaatatgtggaatgtgtgttaatattcaggacatattttttctatttgatttcactactatacttca

SEQ ID NO: 167755 - DNA, 467 bp, Homo sapiens
ttagcgcgggctacagaattagtagtgtgttttcagttctggaaggataaactgaatcagaatgttttcacaaggaggtgaccagaatgtggaagaagcctggaattaaaacacgagaggaagctctgaatggaacagacaaaatttcatctggagaagagaaaagttaagattaccacagttgcaaatattggaaaagccatcatgtaaaagtgccattctagagtagcagaactagctttaataatggaatatccacaatagagctttcaatttcatgaacagaaaaagcttctaacaattaacactggatataagtggaattcactgactcacagtgtagtgaactcctcgtagttggaagtggcaagcagagggctgaatgaccatctgtcagggatgctgtacccgaaattaattcctacacagggtgagaggggaggacctatccacagctcagatttcaa

SEQ ID NO: 167756 - DNA, 224 bp, Homo sapiens
ctatccctgtaacacccgcccccagcgatgccccttggagaggacacagtgtctatccctctaacaccacccgccagcaatgccccttgaagaggacacaggatctgtccctctaacacccccccagcagtgccccttggagaggacacagcatctatccctgtaacacccccccagcagtgccccttggagaggacacgttgatgcggccgcgaatttagtag

SEQ ID NO: 167757 - DNA, 194 bp, Homo sapiens
agcccatcagccgctcatccccacactgggagtaagcattcactgtgctccaggcaccgtgttggacgtgggcgtgagtataatagaatagtctttctcttctgagcactcacattgtagggaaaaccataaaacattagactctctcatgaaggaggcccgatttggtggctaagacaaggctgactaatggc

SEQ ID NO: 167758 - DNA, 347 bp, Homo sapiens
attgcaccttttgccatttttaaggtgggcagtgaaatgatccagaaaatattaccttcaacaacattttcatagagtgactttgctaacagagtcttcagaccacgaggaaaatttttagaccataaagcagaagttgagggaaaggtagtggtgagaaatggggaaagaggatactggggagaataataatagtggtttaaaatagtggtagttcactcagtttctatttggtgactgaaatattgaaaaatttacttagatttcagtcacagaacaggtggtattatgatactggcaacagaatgtagtgattaaaagcacatgcttttgagtcacgcatactg

SEQ ID NO: 167759 - DNA, 177 bp, Homo sapiens
ccaaagtgctgggattacagatgtgtgaaccaccgcaccgagtcccatctctgtcttcgttttatggaattgacattcttgtattgtgctatatattttgttaccagtatttagtgacatacctcccccatattctcttcactgctgacactacagttgcctactggtcagtgtgtt

SEQ ID NO: 167760 - DNA, 219 bp, Homo sapiens
gtgccctgggataccagagtggtgtgttctggaggacaggtgcaagtgttggctttcaggagtggcctgggggctgttgatccagagtcacctgtgtggtccttgaaactggatgtggtcacacaggaagaggatgaggagtgagcagaagcggcactggtctcctgagtggggacgctgctgggcaggggcagggggagcccaggaaggaaggaaacc

SEQ ID NO: 167761 - DNA, 256 bp, Homo sapiens
cccacctcggcctcccaaagtgctggttttgtttgtaggtggttacatcattgcacagaagagtttgattcgggaattttaccaagagtggtggcctgcttcattgtgacattttcagttatacattgttaggttctcaaagactgttgggcaaggtgtcctggggaaatcaaaacctattaatgtcgttatgaaattctgaaattaagaccaagaccaccttacaaaacagttcaattataaacacgatgtgttg

SEQ ID NO: 167762 - DNA, 642 bp, Homo sapiens
ccaggagatagtatttcaccttcacaactcaagagaaagatgccaaaagcatgtgctccagggattttggttttcaatgaaaaaagaatcattttctgtttttccccttcagagagaaagcattataaaatgcaggagaaaggaaaagcgagggcaaacaagcctccctcatccaaatagtgccaatggaaggtcctggattaggtgttccatgaaactgaagtacagtagcaaagctgtcatgaaatacttttggccagtcccttaaaaatgagtctccaaaagaatagtgggtaagagtgcttcctcagggcagatttcttgaaatgattatatttcttctaaacaaaacattttaaacatttgaggagaatacttaacagaaatttgggaacagaaaaataaagttatttcatcccagtgttaaactcttaattccttatgcaagtaaaggccagtggtaaagacaattcaaatatttgaaatctgatttcagaatgtaatctatatgattcggcccttcaagtgtatcatatacttttctgggatcattaaaatgagtctgtatcccctgagcaaatagttgcccaaaacagaggggaccagaattcatctgtcacccgaatcccccttggggtacca

SEQ ID NO: 167763 - DNA, 393 bp, Homo sapiens
caaagactccatggcattatcccaaacactttactgttctgttgtgtctacaacttagtttattctggactaggaaagggaaaacttccttatttgtcaagcttagtttttttctggactgggaaaagaaacacacttgactgtgatcaaatctgttacaatatttccaccactcttcctaccccgttgatcatttatttccctcattttcaggaaaacatgtcgtttttctaattctacaagataaatggcatgtgtattgtgagcttgggtatatgcacatacacacacattatcataagccaaatcctaccacttacagtaattttcttgaccctcgatgtggccattcccctgtaaaagcccagtatcttggggctgggcacggtggct

SEQ ID NO: 167764 - DNA, 485 bp, Homo sapiens
gggacacagtctctgacttggaacagtgtaattcctgtgtctcagttttttcatctgtcacatgggattggtacttagttcacatgactgtgaggattaaataagtttaataagaggcacttagaatggtgcctgggtcaaagtgagagctcagtaaagattagccattagtcttattactacaatctagatgagcccagacaagagtagcagagtcttgagggctatgaaaggtaagaaaagagtggaatcatttctatcaagaggatccagaaagccttcagagtagaggtgaggtctgcagtgtgttgagaagaatcctgatggccttactaggagaacctatgctgtgattgactggtgatgtctgctgtgggtgaggaatgcacagtggtggtgtgtgtgcctctgtagcctatattctgtttgttttaggatccagacatgtcacggcacatttggaattttggcaacacaggcttgat

SEQ ID NO: 167765 - DNA, 442 bp, Homo sapiens
atgaccctgctaccttccgttagagttgagcacaaagttggaaaattagtttctcaaagtatgacttggttttacattagaaatccaaagtaataagagataccaaaacaatctatccattgcctattcaaagattctaccttttccataggaagggactggcaagaaaagatattttattttcaatatcagtcaattttgcctgatgtgttattccttggttttataaacagcatcaataggatatcatttaaagctaccctgaaatgttccttctctgaggcatcagggccctgtgtctggacagtgaatacctgtcaagtgaagagtcccatgcattgaaggaaattggcagtcctcatgaatgaacgctgaaaggaagtctgatgtgtgccaatctatcataaccactggcctccaggtggctcacctcctactcagg

SEQ ID NO: 167766 - DNA, 223 bp, Homo sapiens
ttcccgtccccatttcatagacggggaaactgaggtccggtgcgggtggaggctttggtccaggctggctcttcctgccactctagcggctgaaagaagcttgctcctcgcgcccagcaggggctggcggcgcgcggcagagctgggtctcccgccaggtggccgggggtgtgccctcagggtaccctacccgctacccccgcgcctccagtcccggcggccg

SEQ ID NO: 167767 - DNA, 304 bp, Homo sapiens
tccaagtccatatttctcacagtccacgttatatactcagcagacgctgttgacaggctctctgaatccaggaggcagctctgagcctcaggaagtaagttgctagaatcccagttagggtcctaatattctaagagatacagacctaacagagaagtgtgctgtgcctgtggctttgtggcagggtttgtctacaataaataaacacatgttgtgttcacagggcttaactcagtgctgtaacaggagcttcagaactgacagggcaaacagtcctcttcagttaagtatcactggccatgtc

SEQ ID NO: 167768 - DNA, 233 bp, Homo sapiens
ccagaacaagcactatgaatcagcaatgtcccttggagtgtgggagaaagactcccaagacagcagcttaaggctggccaaggtctcaggaaatctatttatgccctgggtcagccaaggcagggttggaatgagaaaactgggatagctaagcccttcgggggcaagttattttagtaagaaacccattttgtagaatttaataaattctaggttttgtcacatgctttttt

SEQ ID NO: 167769 - DNA, 492 bp, Homo sapiens
tgctaggattacaggtgtgagccaccatgcccagccacgtcacttggttttatagtaaattggtttaagtggctatttgagctgcttgttaattttaataagctaaacatttcaactaaatattatatttatttacttttcatcaaatctgatttactttacagatgaggaaactgaaatttaaagatgctcagtagtaacttcccaagttcagacagctggttacaaggcagagctgagggtcagcctcattctctctgaccccagtgctctgtgctatgtacatattccctagttgccctcagaaatactgtgatgatgattatttataacagaatagttttgtccattgcttcacatccttgcacaaactgggtgtcttttggggttgaccattttaactgaaagaaaatattctttcatttttaacatctacatttatttcatgcttttaaacatttaaaaatctgtgctagctgtttgtatttctta

SEQ ID NO: 167770 - DNA, 367 bp, Homo sapiens
aaaaaaaaaaaacgatattgaaagaagccagcgatgagaaaaaaacccttacttatagagaagcaaagataaaaagtacatctaccggccaggcgcggtggctcatgcctgtaatcccagcactttgggaggctgaggcgggtggattgcctgagatcaggagttcaagaccagcctgaccaatatggtgaaaccccatctctactaaaaatacaaaaattagccatgcttggtggcgtgcgcctgtagtcccagctactcgggaggctgaggcgggagaatcgtttgaacccgagaagcggaggttgcagtgaacagagatcgtgccactgcactctagcctgggcaacagagagacgatccgttt

SEQ ID NO: 167771 - DNA, 157 bp, Homo sapiens
caacactggcaatgaaacaaaatacaattgcatatgacataatttttataaaattatttttaatgctaggtcaaatgaattgttcattcatcctctctctgaccaaccaatatttatagaccatttcctttgtgcaaaaagctgtactgagaatcca

SEQ ID NO: 167772 - DNA, 488 bp, Homo sapiens
aaaacataaaaaaaaatgttttcagtagttttatgggtgtgtgtgcacaggtgcatctacggggggctccttgatctcctctgtacactttcacatcttccaaagtttctacaataagcatgatttttaaacattgtaaatgaccttaatgaattgtaatattcttttataatcctcaagtaaacttcattttgtgtagtcacactcaagagttttcatcttgggattattggcaccccctatttccagttctctctccatagatgccctggagagcctctggcctcgcgtccagcttgctcacccggccaccctgggctgcatccatagtaccaggatcctcactgttgaaacgctctcttatttccctgcgccgctgcagacagctccagggtaaagttgtcaagcgttcaaaggccacaggaacggagtcttcggaccctcccaggtttcggccccatatggcctcgcagattcctagcggccgc

SEQ ID NO: 167773 - DNA, 468 bp, Homo sapiens
gcagtatcttttaatatgaaaaatgtatttatccttgactaagtaattcccattctagaaatgtatattatgaaaatacttgcacagtatgcaaatgtatacaagtataagggtgtccattgcagtattatttgtgttaatgaaaaatgggactaaggcaaatgtctattataagagataggataaaaaatttagtgcatattcatatattgaaataatattgtcaattaaaaaataaaactgatccacatgtgtggaaataaaattatttcccaatttaatttgttgaaatttttaaaagactcacaatggtgtgcaggtgaatgcccttttttaataaggaaagatgcatatatgtacatatgtttgtatgtgcagaagtagactggcttttttatatccttttgtactctgaagctttctgtatgaattgcatgtattactttttcaataaaaaacctaatctat

SEQ ID NO: 167774 - DNA, 441 bp, Homo sapiens
gctggttgttgtagcgcacacctatagtcctagctacatgggaggctgaggtgggaagatgaggatcacttgagcccaagagttcaaggctgcagtgagctatgatagcgccgctgcactacagcctgggtgacagagcgaaatcttaaccccccaaaaaaaagaaaagaaaagaaatttaagaatcacattttaaataatagtttatctgaagaaaaaataataaagtttaaaaagccttcccattaaaagtatttccccaaggaaaaataaacatggaaaatgactttctagtcaactaagtcctaacaattgcaaaatagaagtaattttaataagtgattttttaacagcaaaaaaataagatccattttattatttccattatcttgaattttcaccttctcatccttaagtttatatttcagcctgaacttcaga

SEQ ID NO: 167775 - DNA, 535 bp, Homo sapiens
agtagagacggggtttcaccttgttagccaggatggtctcgatctcctgacctcatgatccacccgcctcggcctcccaaagtgctgggattacaggcgtgagccaccgcgcccggccccatctttgctttaaatattgtcaggatatgttattagatacatgaaatttgaattgttttgttttctagccaaagtgtttgttatgtgaaatttgcctctctatctctagcactgtatcttgtctcaaaaatctatttttactttatgtttaaaatgcgttttgtgggcttcatataacttttaatttttgtatttttatcccatgaaagtctttatcttttatctggaattgtctgttcggatttatcatctttactatatttggtagtttacacttgatcttagccaaaagaccgagaagagatatattttgtagtttaaatctgccaactagtcatgttctatttatccagtttctctatatttctgtgtttctatttctttttgcctcctttcaaattaagtacttttcact

SEQ ID NO: 167776 - DNA, 646 bp, Homo sapiens
aaagaaagaagattactttcaaatttctaatgctgtggtctaggaaaatctaattcctgtgtcctgaggtgtacctggatcttgaacatttttctaccagagttaataagagaatttggtgaggttattaggtatgagatagttatgcaaaaaattaatagcttttctttgacagtcagtaaccagctaagaatggaaatcagaaatacagtgtattcataaatatgacaaaaacaatgttttgggccaaattctgcaagaaaagtacacatgctctttggaatgaagctacaaaattttattaaagcaaataagataaaatataaactaattccatgctggatagtctgtcttggggtcttgaggtgtgtgtgtgtgtgtgtgagagagagagagagagagagagacagaatcagtcttttgttttgaaataatttgaggctttcaggaaagttgtaagaataaagcaggaactcctattcactgttctcccagatcttgtgattgttaaatttttacgacatttattctctttctctttatgctttgtttttctgaattttgagagtaagttaaagtcaggattcccttctacctcaaaatacttcagtggaaatttcctaagcacattctctgtcttaatctg

SEQ ID NO: 167777 - DNA, 461 bp, Homo sapiens
ccgatgcttatagaagagtgtgccagtgtattcataaatatgacaaaaacaatgttttgggccaaattctgcaagaaaagtacacatgctctttggaatgaagctacaaaattttattaaagcaaataagataaaatataaactaattccatgctggatagtctgtcttggggtcttgaggtgtgtgtgtgtgtgtgtgagagagagagagagagagagagacagaatcagtcttttgttttgaaataatttgaggctttcaggaaagttgtaagaataaagcaggaactcctattcactgttctcccagatcttgtgattgttaaatttttacgacatttattctctttctctttatgctttgtttttctgaattttgagagtaagttaaagtcaggattcccttctacctcaaaatacttcagtggaaatttcctaagcacattctctgtcttaatctg

SEQ ID NO: 167778 - DNA, 498 bp, Homo sapiens
gtctaacccaacctttcctccactgccacatttccactggggaaaccaatgcatataccacacacacacccagacttgctggggtcatcatttgtgtcatttccaggtctcttccctccgggctcctggcaagcacacaggccaatgcaacgagctgatgtcatgctgaagtgacccgtggcccgcgcgtgggagcccctgagaacccgtgcaccgcttggcacactcccttcccccactggcccatggtggacacacagcacaagttagaaacaatgccgtgccgcttccagccacctagaatgcgtggtcgctggtgactgtggcagcacctggcctgccctgctctcagactggcttccatgcagcgtgtactcccccaccaggaacattctgctgtcacccccttctctccgctgcccgctggactcctacttacacttcaggtccctcctgaaatgccacttctccagaatgactgtctttgatggtggcttc

SEQ ID NO: 167779 - DNA, 461 bp, Homo sapiens
acagaaaccttcttttttttcccttcttgtaaattcctggttgctgctgctgctgatttcttcttacccatacctggtttcctccataatggagagaggtgagattcagggtataaaacagagacccctggagcctaattaattgggaaaatacacacagggagaaatgaaatgatagagactaacagcagttcatgtcaaaaaagaaacccaggagttttagtgagccaactacaacacttgatttggtcaacaaatggtcagtaattgtctaccctgtgacaaaaaattgtcccagaaaatgaagtacaaaattgatgatatttggccctgctcttgaggaggtcacaatcacattagggaacaggtttatatcagatgaccaaagtgtactgtgatacctggagtggggtgagagaagacactcaggcatccaatccagtctggggcaagcccaggaa

SEQ ID NO: 167780 - DNA, 210 bp, Homo sapiens
agaatggattcagagaccctcctatgtgcacttccatgggaagagacccagtctgctcaataaacaggcacccgctctgtctcgatgagaaccaacccaatgatagacacagtcctacgtcctttcagggacacaaaacccgtcatacgtcataaaatcccaggatcggagagctagaagtgcacttattcttatcaatgtgaggttgct

SEQ ID NO: 167781 - DNA, 356 bp, Homo sapiens
tttgaaaagaaatcctcaatatgagcatttctccctgactgaaactcaagttaacagtcaaagggttaaggctttaagtgggaagggagttcttgctaaccatggctcctgaggtgtgcactgtttctcaagatgtccataccaagtacagcttttgttacaggacacggaagggctctaattgtttcactcttcccttgctcttctggaaagccaacccagccccccaccttaatgtccactcagggcaggtagccactggggccagtgtgcatctggagatcatgtcctgactctcctcctaagagttcaaagcactctcatcaaatcattctttcttcattcacacgatccca

SEQ ID NO: 167782 - DNA, 352 bp, Homo sapiens
aatgagcatagatctgttgacggtggatttgttatacaaaagtccttgttggtacataagttgaaaaaacagacatttatgaaatagaatatactgcagcattgagaagcactatgtatatgtccaccattacaaaggatgtgtaagtcaccatagttccatttctcctttttttctagtattaattatggcaacttatggactgggattaaaataacattttttaaagtttttattaaaaattaaaaagaaatttcccctagcttcccaagcttatgataaaataacattgtacacacgagaaatatgcgagactaaatgagcctataggttatgtttacacatttgactc

SEQ ID NO: 167783 - DNA, 409 bp, Homo sapiens
tttgcacattctctcctctccccattgacctaaatcatattctttctctgaggcccagttaaagctgcatctccttcatgaagcttccatgaaccctgtctgccttctttcctgggttcttcaagccttgctcttcactcaataactgttttccattgccagctgtttaagatttttctgggtcaaagtgcgagattgttctggctcaacttggtcaaactggggagctgcaccattccttgaatccccttccccaggttagacttggctaacagagatctatgtgaaatttggaaggcagggctaaagtggtgaccattactctcagaaatccattgtgaccatgtctggtgagagatgcagagctgcccgggcctcccaggtatgctagctttcattcccttcttcc

SEQ ID NO: 167784 - DNA, 463 bp, Homo sapiens
agctactgaggaggctaaggcaggaggatggcttgagcccacggggttgaggctgcagtgagcagattgccccactgcactccagcctgggtgacagcgcaagactctgtctcaaaaaataaaattatatatatagagagagggagagagagagagagaaagagagcaccaaaaggactgggaaacaccggcagatgcacagacaatgcatccctgattttaccaatagacttgactcccaacaatgcatactcttgaaggcaatccacaggttgaataaaccaagtccatgagcgctgggtctggaatctttctacaatcagggtcagaaggagggtgactgaaattaaaatattagcttggatctttgaaatcagagtcaggctgaaaaagtcccaatcttagttcaaaacctgtcctgcatgactgaagccctcctagggctgcacaaagtataatggaa

SEQ ID NO: 167785 - DNA, 160 bp, Homo sapiens
acccgccttggcctcccaaagtgctgggattacaggtgtgaggcaccgtgcccggcctatttcttaagttacttaaaaagttcagggtcattcgtatgtcgttacaaaacagtcagtgtaagattttgtctagatttgtctcagctgtccacctctatta

SEQ ID NO: 167786 - DNA, 358 bp, Homo sapiens
cagatcacctgaggtcaggagttcgagaccagcctacccaacatggtgaaaccccatctctaccaaaaatacaaaaaattagccgggcgtggtggtgagcgcctatgagcccagctacttgggaggctgaggcattagaattgcttgaacccaggaggtagaggttgcagtgagccaagactgtgccactgcactccagcctgggtgacaagagcgaaactccatctcaaaccaacaacagcaacaaaaacagaggcatggtggtgcacgtctgtggtcccatctactttgggaagttggggtgggaggattgcttaaccctgaggttgcggaggttgcagtgagctgagatcgcacc

SEQ ID NO: 167787 - DNA, 285 bp, Homo sapiens
atgcctgttccgtgcagtaaactaagtgctcctcctaaatcacaagttagagcatgacattcctctgcccaaaaagaccctatatattttgttgtttgttacttttccgacctcttcccttcctattatcacctttgtttgctctgctctagtccactggcccccttggtctttctaggacgtgccacatacatgtcacaggaccttagcctttgttgttcctccagcatgggtagccacaaggataacactcccccttcaccattcaggtgcccacatgacacc

SEQ ID NO: 167788 - DNA, 404 bp, Homo sapiens
taaaaactaagtttccaaggcagtatgctgtggtccttgaaaagtcctttagaagaattttctggaataaatttagagaaaacctaagtgtttcctaggggatgcttaccaactcctcgcccctcccccgcccgccctcttttattttaattgtgactcagggttaaatacaaactactagcagctgttggtggaaaagagcccaatcccaaactctggggttttcctttgttcccaagggaggccttgggaggaatgaatgatcctaaaggaatgagcagacctggggaatcctccaagtgccacctctgactaatattggctgttgccaggaaaacccaacttggatttcagctattactttccgtgcaaccctggtgctgactattcaaggggacagctct

SEQ ID NO: 167789 - DNA, 129 bp, Homo sapiens
tcagggataccttccttgttctcttcactgcacctactccccccattttatgccatggtagcatcaagtatctctccctgtggcacttcacatggcaagattttgtatttacttatgtattttttgatg

SEQ ID NO: 167790 - DNA, 277 bp, Homo sapiens
atagcggtccgactttcagagtagcacttttctgagtagctgggaccacagacatgcaccaccacacctggctaattatttttattgtcttgtacagacgaggtttcactgtgttgcccagtctggacttgaactcctgagctcatgtgacttttctgccttggtctcccagggtgttggaattataaatgtgagccactgtgcctggtttaaagtgtttttttttttttttaaattaatttctgactctttattaacattctctactcgtgaaggg

SEQ ID NO: 167791 - DNA, 441 bp, Homo sapiens
taagaataaagaagcagtattactgagaacacacatggagaactgacaagataaactgctgagttgaacaaaggaagctgtataattatgtgtagaggtggaccctgtttatatatcaacacacgtgcaggaacacacgcataaagcaatactatattttctccttccgtgtacatctatgtcaagcctaagaaaatgcccgataagtatttcctctgaggaaggtagagggagttaggtgagtatctcaaaggagattttagccttatctatattatattgcttttaaacagaatatatagatatgtcatttgtatattcaccctccaaaacaaatgtatttatggtgcaaaaagatacagaatgggctaactgaaaagtcaatgatataattcctttcacacttcagggaagtgatcattgttaacactaataacttgg

SEQ ID NO: 167792 - DNA, 182 bp, Homo sapiens
ttggattggtttattacgaagcaatagtaattcaaacagaggtggggagtttggttaacataaaaggattgaagtaaaaggagcaaggaaggcaaatagttggtagagaagaaacaggctggtacacaaagcattttgctttgctgctgatgaggggctttttgatcccagagacttcagag

SEQ ID NO: 167793 - DNA, 189 bp, Homo sapiens
ctaacttgatcatcaagtggggatgggggtggtgggagaattgtctttaaaggaaaggcagtgtggctcactgagtgaatgagaagggtgaggtgtgagtaatgagagaggtcgggactcatgtgtttgccaactgtccttcaagaacagttttgtctgctctgtgaaaagttttagactttttcctag

SEQ ID NO: 167794 - DNA, 225 bp, Homo sapiens
cctaggcaccatctgtggaagactattagttctcccattgattgtcttgacattctttttgaaaatatcaattaaccataaatgtaagggcttatttgtggattctcaagtctatttcattgatctataagtctatccttatgccataccacattgccttgattattgaagctttacaataagttttgctatggaaaagtgtgagtcctccaacttttttctttt

SEQ ID NO: 167795 - DNA, 477 bp, Homo sapiens
cccgggctcaggtgatcctcccatctcggcctcccaaagtgctgggatcacaggcgtgaaccactgtgcccgaccctattcttattttcagtggatcagagctctcctgtacattgctgctcattatggaaacaagaaagagaaaacagaaaaacattttcccaagtgaagttagtgttctacctaaaaatgaattaacaagttcataacgttgtgtgtgtgtgtgtgggtgtgtgtgcactaaattcatggtcgtcttttctctcacatgttttaacagttaacttcaaacatctggcacttcagaaagttaattcttttagtaataagtacactttctgtctgtttacttcaatagagcatattttttgttgctttaaaaattatagccctggaggctctactctgtccaaaaaatacattacattctggaggagggagggaaggaggcacaccatatgtctatggcaagagaag

SEQ ID NO: 167796 - DNA, 395 bp, Homo sapiens
cgcctgccaccacacctggctaattttttgtatttttagtagagacagggtttcaccgtgttagccaggatggtctcaatctcctgaccttgtgatctgcccgcctcggccttgcaaagtgctgggattacaggcgtgagcccacgtgtccggcaggtactgtttttatccctattgtgtcgataaggaaactgaggcttaaagagagacattgagtcatttgcccaaggtcgcacctctagcaggtgtggggctgggattcattccattgtcccttacaacaaataattattgaacatctactgggccacacactgcactagaaacagagaaggcaacaatgagtaaataggtaggacaagctttctgtcctaatggcacttacattccagtgg

SEQ ID NO: 167797 - DNA, 298 bp, Homo sapiens
ataagttgccattttaaagacataggggagaaaatgggtttgatgttttaatggagcaattgggcttcactgagctcggtatcacaagagatgaggggttgagaaaatacctggatttgtctctttaccatttagcacagcccagagatgggttcaaggattattgactttcccgcaggcactcgggctgaacttgcctcatgggaatgcttggagctatggatgatgtaggtttgtctgggtcttctggagctgcccagatccacaaggaacaacctcccagaaccaggccagagag

SEQ ID NO: 167798 - DNA, 646 bp, Homo sapiens
tgtgtgtgtgtgtgtgtgtgtttgggatgaggtggggggaggtgaagggaaagcagtggacaaaggcattgcattgattgttaggttaacaaagcaccaggcaacaagcttcctaacagagcactctgtaaacaaaaaatataaagttagttatgtgcagtctaagctcacacagctaatcaatggaagagccaggattaaatatgcatccaaagacccccagccagggaggagatagctttcttcttatcatttacttaagcagacattccattacccagtcagacttgacaacatattgctttttacagggagtacctcataggaccagtgttccaaatggtaaaatacacccagtgaatggagaggtgtgtagcaaggataccctctcccttcacaggcagatagctttgtatctacacttagcatcagcaggcttctctccaccctgccaagcttgctgaggacagggatgggttttattgctcttcgttctccctccacaccagaataattcctggtgttctataggtgctcaggaaaacacacatttcattaacctgaattagtccctgaagccagctgtgcagaatccatatctgtgggagccctgtggctgagcaccccatctcttcgctccccttct

SEQ ID NO: 167799 - DNA, 203 bp, Homo sapiens
aagggtgatgggatcggtggtccaagccctccctccaggactccagctctcttgtaagtaagcagttgcccaagtcttgaagccattaccaaagccacttttccattatcagctgtgtggggttgggcatgtgttttgttgaagacattgttttacctatatagtgcatgaaccagagacagcatagagcaaatgtgcactaa

SEQ ID NO: 167800 - DNA, 598 bp, Homo sapiens
tatgttccaatcatatctgcccctgtccaagtccataaagttgaatacttccttttttgttcaaatatatatatatgcatctatcattacattttaccaaatggtactgcaaatatttaaatttgtcgcttataatacactgagagttctatgaggatagaaaatcatgttttccatgccttggatgtggcctccactctgtaaacactcaatgtattttatagatgagtgaatgagggaatgcatgaataaatgaatgaatcaataaagtaacatttagaggctaaaagcataaagaatttgatgggcatgggggcaaactactgaaagtaaagcaaaaaaatgtagaaagaagccttgaaatcccaattaacatttcctgattgcttcagaatagaatgctgtaaaatgagaggctttcagcctgtctgcatttcagttctgtgcagcttacaaaggaacctgggaaaaagctgacattgccactgtagctttgaggctttcaagataagcatcagtttgggttcagaagaaatgaacagtgatgaatattgtcttcagcttcacaatggtccttttaattcctgtcattctcaaa

SEQ ID NO: 167801 - DNA, 435 bp, Homo sapiens
aagccaaaccagggagtgaaacaagatcaaagattctccaaattagtggagacatacttccactccccagtgtgactcatggcaagtttatctgataagagtccagcttcacaaaacaaggagcgcaaaacaaggcacactgtggcgaacatggcaataaacaaacaaagatgcggaatgtgccaatgggaaagaactacatcaattctgagctggccctaacacattaggaaatatcctctacactggaataaaagtgaaaaaaaaccaagcaagtagagggcaaagggtaactaatactctttttagatataaaggtcagataaactctgaaggacactatcacatctgaaaggtggtggttatattgaacctgttaaggtaaagcaggtagggctctgagtcatgagaacaaatctatctccttcattgcct

SEQ ID NO: 167802 - DNA, 339 bp, Homo sapiens
caacagggagcaggcttgataacagaggctagtagcacagagctgacttcacccagagtgatgggcaggcacctctgtggactggggcactcccctccagccaccagtcaccatcactgcagagactcatgcggtggcaaaggctgcttccccctccttcttactgacccccaccatccttcctttatgtgtctttaaaaaaatcccaacagcacacaatgcttcttattcctttttcttctctccatccctccatcactgccctagttcaagctcctccccttcctgcctgggctgttgcagggctttctctcccagtctttctgcttctggccctat

SEQ ID NO: 167803 - DNA, 395 bp, Homo sapiens
accttgagtaagtcacctaaccatttttagtcccaatttcatcttttgaaaaactgtcaagatttaatgagataacaagtgtaatgaaaattattggcacaaaactggctccgactaaatgacatccagtctagcctctattcctttgctattctctccaatcctgaagaattgcagctttttcaggtactttgcctttgagagatacattttctcctaatggctcatagcactcagaaaggacagatagcatcctaatcctttactgctgtggctgctaccactgctactacttctcctaataccgtgttcccacagccaccattggggctattatcagctactgttaataagtgcttactaggtccaggtatttcatgaaacattttatatac

SEQ ID NO: 167804 - DNA, 397 bp, Homo sapiens
ggcaggagaatctcttgaacccgggaggcagaggttgcagtgaggcaagattgcgccattgcactccagcctgggcaacgagcaaaaccctgtctcaaaaaaaaaaaaaaaaaaaaaaaaaaaaaaaaaaacctctggtcaagagaattctttgtttctttctctattatttatttatttttaagagaactctttataaggtcaaagagcagatgatttagaagcagaaatgattaacctggaagttcaaaacattgtagcaagaatataaaattttagattggagccaggtggtggctcatgcctgtaatcccagcactttgggaggggaagatggcttgtgcccaggagttcgagaccaccctgggcaacaaaatgagacccccatctctacaaa

SEQ ID NO: 167805 - DNA, 569 bp, Homo sapiens
catgtccttcccattgatcaaaccagaagccttgcagacccctcaccttttccactcttccctcctatcccacatgcaaaccatcattaagccctggcagctcaacttcagaatatatcccaaatctgccactcctcacggtctcctctccaaatacccaacccaagcaccatcagttcaagcctgggttattagagtagccttcaaactgatcgttctgcttccactttcaccctatcctatttcccaccccgattgatctacttaaaatataaatcagatcatgacacccgcccaaaaccttcctgtggtagacaaatagattgacaaaacaggatagagtccagaaatagatctacatacacagagttcattgatttttgccaaagacccccaaggcggttcaatcaggaaagagaagttctcttaaaaaatgaccctgaaacaaatgaataggcataaggaaaaattaaacctggacccctgcctcgcacacacacaaaaattaatttgaaatgaatcatagatttaaaagtagaagtcagcatcatgaagcctctagaacaaaa

SEQ ID NO: 167806 - DNA, 267 bp, Homo sapiens
cagcacaactcactttaggtaacacaggtatgtttgaaaagtccataacttctccagattggaatggaccttgggaatcacccacttctgcctcctatcccagctgaacttccgcaaaatgactgaggatcaccctagcctcagcttcatcactcttagtgtcaggataatggtgacatttggagtgaagcatccaaaaccctcatgggatgccaacatctgctttcccataactgtccctggtcttggtccctctgagaaacacat

SEQ ID NO: 167807 - DNA, 268 bp, Homo sapiens
gtctctgtgactgtatcccatttcgtgccccctatttgtggtaacaggggtcatgcgatggcatgactatcttatgtgtctgtatgtatctctgtgccaccacaatcaccatggaagaagtgtggctgtgtgacaaaacaagccctggtgtgcaaaactgtgtccctccctgttcctgttttttttttttcttttgagacggggtctcctgtgtcgcccaggctggagtgcagtggcacaatcgctgctcagtgcagccttgaattcc

SEQ ID NO: 167808 - DNA, 686 bp, Homo sapiens
cacgctgatttcctagaacgatcttcatatttattttggaacaatcagttaaaaaaaaataaaaaagaatctgtttgggccacatatgccagaggctaaaggaattgctgtcctctgttctgttcctgtccacctcagcacttttgatctctggggcatgctgttggtcttaaccataaattgaaaatgagaggcagaataattaaagagcaaactgtaattatgaccaagatctaaagagagaaaaactaacattgagtatcggccttcaatttcctattagtgcatttaagattagctataaacagccttgttaaactcaattaaatagttcatcagaaggatttttcttattagtacaggctgagtgatgtgacttttagaaccatgttgctggttatgcatgagcatttttcaacattgattttgtactctaagattttattattgttattgttattattattattttatttattacagtgccatttaagaggctttcttgaaagatactgtttggcatgcaaaagctttgatgctcttcttagaaatgtcctctgctccaatgataagcagacataatttaaaaacattttaaaacatgggaaagaggagtttcccaaatatcatcatatagtttggttgaaagtgtaacaaaatacagagatgctcaacagaaatataat

SEQ ID NO: 167809 - DNA, 173 bp, Homo sapiens
ccgagatcgtgccactgcactccagcctgggcgactccgtctcaaaacaaacaaacaaacaaaaaaaacaaacttgacaccacatgctctttcactggtcactccattctttttcctttaaagacttgtatcatatatacttgtcttttaattcttccagtctctcttgtatt

SEQ ID NO: 167810 - DNA, 505 bp, Homo sapiens
ccaaaaaatcttgactgcaacctcatgagagaccccaagccagaaccactcagttagagcactcctgaatttctgacctgtttattcttattttaagcaactaagttttagggtaatgtgttatgcagcaatagacaactaatataatattttaattcgtatcaataaatgtttcataattttgtgcacagaaaacttgtacttttaaaattaattagatttttattagatttatttctaggtatttgatgttctttgatgcatctataaattgtatactttaaattttattaatattttgtgtcttgtatacagtaaaacaattgatttttatataatgacttttatccaacaacattaacgaattcttataacttttattaatttatgtgtagataaaagagttgttttaagacactagataagtttgttaattttagtaatttatctgtagattttcttgggttttctatgaatgcaataatgtcatctgcaaataatgaca

SEQ ID NO: 167811 - DNA, 586 bp, Homo sapiens
acgctagggaaatgttctaattataattcagtgaagacagggttgctattttaatatacattttttgagacttctttaaactttagcttcctattttgttattggtgtctttttcctcatagtagtagctgatgattttttcacaatgattggcacatttaaagcccttaaaatcaaaataatgaagttgggggaacattaaaacttaggaaacttcttattgcaaaggttgttctgaaatgaaggaaacccaaggtatgaggcaggaatcttagtggcaggaaatgaattttgtcttacataaacaaaaatatatttttggaaaaatactagatcagatcttggaatggatagaaggaaaaggaaaaagctaagtaaacaaacttcagaaaggcaaaacaagggcagctctggagggcctttctactagtgcattaccatgctattaaagtgaccaagctccagtgaattttgagcttctgtctttccttgaatttaaatttcccagaagtagactaccagagtgaatgtaatagtgtgaggcaaaattttcccctctaatactgtttttttataaaagcaacaa

SEQ ID NO: 167812 - DNA, 311 bp, Homo sapiens
cttctcaccctgtttaaattgttacgaagttcgactagagaattcttctccctgtggagttttatcccttgctcctctggccaccctcccgatggatccctgtggtgccaggcaggaatgggccttctggggacccagcgagctcccacggcctttctgctgcttcctctacccctgtagttcgctctgctgagtctgacttagctccaggtaaagttggaaatttctcctgcaaacagaccttcagcctctccagtgggggggtgtgtgttcgggagaggaggatctccctttcccacttccacagttgg

SEQ ID NO: 167813 - DNA, 191 bp, Homo sapiens
ttgtcctctacaccccagttcctcctttctgggttttctttcctcttggtggatctcacttcatcccctttctggagctcaatcctcctctcagaaagatctaatgtaaaacatgtacacttctgtgtgagtttataatcattcttccctttcttccttcctttcttttcatttttttttttttttttttt

SEQ ID NO: 167814 - DNA, 372 bp, Homo sapiens
cgtggcaaattgtagtgttcaataaatgtttgtagaatgagaaatttaacaccttattagtaagtctaaaaatataaattgcttttctgatatttgttctgaatttgctcaacttagaggagtttagactgtggcagtaacattatttgtagctacttctatagttgactgtgacggccttgggagagcagtttatgccacattaacaagggtaaacacaggtcatgaatcattgcatgggaagatggtggctatactgaacatagatacgtactcaggtgactttcatattcccacacacaagatagcatatcctaggggttaaaaccgcagccttgacatcatgttcccttgattcgaattatgtctcca

SEQ ID NO: 167815 - DNA, 225 bp, Homo sapiens
ttttggctgccatgaggagggctctcctgaaaagattttccttaaatagaaaaattcctgtggaaaaccacagatagaggcactaactagttttcaagttcttattgtctagattgagtttacagtgccaatgaaggtgacctgctagatcaggagtcagcaaacatttttgaaagggcaataaagtaaatattttaggtttttagactaatagcttcccttaca

SEQ ID NO: 167816 - DNA, 511 bp, Homo sapiens
aacaaatgtactggttaagattaatttaactttaataaacagagtcatattcctattctctcatttattctcaaataaattgtcagctgtggcaataatctaatattattctttcaaatagaaaatgctttagtagttgaggaccataagaagtgaaattaggctgggcacagtggctcatgcctataatcccaacactttaggagccggaggtgggcagatcacttaaggtcaggagttcaagaccagcctggccaacatgacaaaaccctatctctactaaaaatataaaaattagcccggcatagtggcggcgcctgtagtcccagctacttaggaggctaaggtaggagaactgattgaacacaggggggcggaggttacagtaagccgagatcggaacaagactccatctcaaaaaacaaacaaacaaacaaacaaaaaacagaaaatgttttcttctatggagactcatcctctaagttgtaattactcagtatcttaacagcca

SEQ ID NO: 167817 - DNA, 517 bp, Homo sapiens
aagagacgccctgcaaagactgaagaaacgatgtgaatttcctcatggctctaaactgggaattgtggagtctgaggaaagctggaaaagatgggagatggaacaggccttcctttggtggtgactgagcaacgggtctcctgttagccaagtgcaccgaggctaatttcccatccgtacgctctccaacgcctttgctccaatctcagccaaaactgcagcgtgaacggggcccagagcaggactcttggggctgactgttgcctcttgagggagggtcttcctgagttgtcttcccatcagaaccagcctttcaagagtggactatgaatggaagtcttgaggggaggatcttgcagaaatgggcgattacagggcttccagggtctatgctcgtgccaggggggatgaagcttgtttgtggctggggctgcaaatccctttcttccccccatcctagtccaaccagctctacagttaaagctcacggtgtggcatttgctaaaccctcaggcaa

SEQ ID NO: 167818 - DNA, 449 bp, Homo sapiens
agtttatctactactataggtggtgtatgaactatgggataccgagtcatcgaattcagtgattcatcgtcagtattcttgttaccatgttgttaaatgttctggaggccccagggcctggctttgtttagggacaaagggaactggtaaccagaagccgagagtttaaacacccactgcccttcttccctgctcctgctgctgcaacccagcttaaccagccaggagtgctaggaacccaagcagggcccccgagcacacagcaggcagctcacgaattctcttttcctgttctcccttgggagctgggaggatcttaatcaggcaataagagatggcactgagcagccagctaattttttaaatcactttattgtttaaccatatgactcacccacttaaaaaagggtacagttcagtgggttttagtgtattcacagatgtgtgca

SEQ ID NO: 167819 - DNA, 459 bp, Homo sapiens
ccgtgcctggcctggggtattgtcttcttatggcacctgactgtggtgggccctgggaaggaagtagcagaagagggttcttcttggtttcctggacagtaactgagtgttctggaggccccagggcctggctttgtttagggacaaagggaactggtaaccagaagccgagagtttaaacacccactgcccttcttccctgctcctgctgctgcaacccagcttaaccagccaggagtgctaggaacccaagcagggcccccgagcacacagcaggcagctcacgaattctcttttcctgttctcccttgggagctgggaggatcttaatcaggcaataagagatggcactgagcagccagctaattttttaaatcactttattgtttaaccatatgactcacccacttaaaaaagggtacagttcagtgggttttagtgtattcacagatgtgtgca

SEQ ID NO: 167820 - DNA, 198 bp, Homo sapiens
gtctagccatgctggaagctcagtgtactgagagaccgggttgcactggcaccgtagatgatgttggctacagatgtcaattatgtttagttgattgaggatgctgttgagttcaactatgtctttaatgattttctgtctgcagtctttgtcctgtctgcaggatctgtccatttctgacacagtggtcttgaagtc

SEQ ID NO: 167821 - DNA, 188 bp, Homo sapiens
ttgagaaaggaactggggcctcagaactacctctccagaccccattccccaacccaaccttggaggacagcagttcagtcctccaagcggagtgcttggctcattgcaacctccgctttctggactcaagtgatcctccacctcggccccccaggtagctgggactacaggcgcgcaccaccacaccc

SEQ ID NO: 167822 - DNA, 349 bp, Homo sapiens
gaagggggaaagcccttataaaaccatcacatcttgtgagtactcactcactatcatgagaacagtctggtggaaactgcctttatgattcaattatctcccaccaggttcctctcatgacacatggggattatgggaactacaattcaagatgagatttgggtgcggacacagagccaaaccatatcaaagtggtttttttattttattttctgtgggagacaacatatttaaaagccaactagaaggaatcagttcagaagttgttaaatatacaagagaggaggaggaagaaataacaaagttttctgagaaggtgaaggagataagatccaaagtacacatagag

SEQ ID NO: 167823 - DNA, 456 bp, Homo sapiens
ccatttgctttttatgaaggaatatcgctagcatgttgacactggttccatcaacttaagctggagaatttgtaactgttgcctaaatcaggctagtttgttccatttctattgaatgaggtaggtattcagccctgatagtgcattttccagtctatcatgattgtaacacacataaaattagactattggtgtgaagcatcacaaacccccaaagtcagtgtgttgtgttccttagaaatactcaaaaaatatatacagttgccaagaattctcaagataaggattgtgatcaatatctgcttattgttataagatcttatctttctcttcttcctttccctagccccattataagagactctctccaataaaaatgatacgtgaacaaagggaaaacatttaacatctactaactgaatcatgatcttcaaacacttgctcatgtaaccccta

SEQ ID NO: 167824 - DNA, 341 bp, Homo sapiens
  misc_feature (27)..(27): n is a, c, g, or t
ggtgtgcatgaggagatgatccaaggncagtgggcctcccagtgagaaccaaacaggagtggccaggctccactcctggggccagagtgaaaccggggtttaatcactgggctatgtggtctctgtgtctctggcctgaatgagatctcttcaatgtcgggggacagggatccctggatgagaattcacaagcgactcattgacttgcacagtccttctgagattgttaagcagattacttccatcagtattgagccaggagttgaggtggaagttaccattgcagatgcttaagtcaactattttaataaattgattaccagttgttaaaaaaaaaacaa

SEQ ID NO: 167825 - DNA, 224 bp, Homo sapiens
tacctgtaattaccactcccgacccggggaggtagtgacgaaaaataacaatacatccagatgagaattcacaagcgactcattgacttgcacagtccttctgagattgttaagcagattacttccatcagtattgagccaggagttgaggtggaagttaccattgcagatgcttaagtcaactattttaataaattgattaccagttgttaaaaaaaaaacaa

SEQ ID NO: 167826 - DNA, 193 bp, Homo sapiens
aagattctaagacctgggatcatttccagatgagaattcacaagcgactcattgacttgcacagtccttctgagattgttaagcagattacttccatcagtattgagccaggagttgaggtggaagttaccattgcagatgcttaagtcaactattttaataaattgattaccagttgttaaaaaaaaaacaa

SEQ ID NO: 167827 - DNA, 355 bp, Homo sapiens
cctcttacagtgaaggctttagcaatttcgttcagtgttccttcttgcatctgattctccatctgagatcattttccttccacctcaaggacatccttttgtaagtggaaactctgcttttgtcggaaaatgtttttagtagctttttaaaaagtgtcacctcaggtaagctttcataataagttcctttttctcttaacatgatgaagataaatttcactgtttcctggctttcattgttgacacagaagtcaccatctggctggttttctacaggtagtctgtattttctctccagatgcccacaatcttttctttggttttctgcatctcaccctgatgtacaggaaggttg

SEQ ID NO: 167828 - DNA, 355 bp, Homo sapiens
cttttctaccttcaccaccatatatcgttagcgcgccttccttcttgcatctgattctccatctgagatcattttccttccacctcaaggacatccttttgtaagtggaaactctgcttttgtcggaaaatgtttttagtagctttttaaaaagtgtcacctcaggtaagctttcataataagttcctttttctcttaacatgatgaagataaatttcactgtttcctggctttcattgttgacacagaagtcaccatctggctggttttctacaggtagtctgtattttctctccagatgcccacaatcttttctttggttttctgcatctcaccctgatgtacaggaaggttg

SEQ ID NO: 167829 - DNA, 351 bp, Homo sapiens
tcttttgggcaaatacagacagctttaataaacaacaattattaaatttctcatgagactgagtgagatgattcctgctgagcttaggaattgattcctatgtgtacttgagacattgaagtctagattgagttggaccatgttctgtatgtttatgctgtgatgttctttacttcaagaaactctcacactatccaacatcagtctcgtaagaggctaaattctcactatttgcagggcactgatcctttctgctaggaaggacaaggtagaatgaggagaggtggaacttcttcagggcaacaggagtgaccatttgcctaatagagctttatgtccatagttgttcat

SEQ ID NO: 167830 - DNA, 317 bp, Homo sapiens
gggcagaaggaagagaaaggagggagagctgtgtatattctatacatagctgcatatacttctccccaccacccccagatatctgtgacattataatgctgagaagttaggttacacagcacgtattaatgcacagacttaaccattccgtattttttaaagttagccacaaagtattgtacaagccaaaatggtacatgatttttcatctacagactatatagtacaggttgttgtacagttggtatgaagttatttatcagcaggtttttcaaacttggcagctctttcttatccctctcttggttaagacaagt

SEQ ID NO: 167831 - DNA, 354 bp, Homo sapiens
caggctaacatgaagtaaccaactagttcttgacaatgtgacaatacaattcaatggggaaagaataatccttttaaaaaacggtgctgaaagaaccagacaactgtaggaaaatttttcaaaaaagaattaacccttcctggcaccatatataaaaattagcccaaagtataccccacacctaaaggtaaagatcttaaactatacaacttctagaagaaaacaaagtgtcaaatcttggtggtcggcaaacattacttaaatacaacacagaaaccatgaattatcaaggaaccaactgttcttcattaaaatttaaaatgtttcatttccaaaaggaaaactagtaagagg

SEQ ID NO: 167832 - DNA, 260 bp, Homo sapiens
tatagatctaaaatgtaagactttattatatgaaatttattattcataatagatctaagcccaggaggtcaaggctgaagtgagtgctactatattccagcctgggtgaaagagagagactctgccaaaaaataaaaaataaaaaataaaaaataaaaaaaaatttaaaaaaaatttttttttccttttggccaaccccggaaaattggggtttggaaaaaattttaaaaaaaaaaccttattttttagagaaaaagcct

SEQ ID NO: 167833 - DNA, 696 bp, Homo sapiens
caaaatgaaaattgatgagctgattccagaatggaaatggaaatgcacagcaggacctaaaacagccaagaccctcgtcaagaacatggtggaggatctcaaggctcacagccgtgcagacagcgtcacatgggaggaaagggaagaaaaacaggtccacggaacagaagagtccagacggacccactcacatgtggccaactgcctttccacagaggagccaagccaaccggaaggagggctcctcggcgcatcgtgccgcagcgacctgccatcccgggaaagggtgggccaccaccccagcctcacaccacgtgtgagtggcagcccaggagaccctggacctagaggtagaagcttccagaagaaaacacagagaacctgttacccggatgaccctggggtaaacagattcctcaggacacaaaaggtattcacctaaaaaacgggtgatacgctgggcttcataaaaactgaaaacgtgttctcgtcacagagagaggtcaagaaagtgaaaagtcaagccacggcctgagatattcgtaaacaagaaaaaacaaaaattttgaaattatgaaaatatccacaatgcatgtcgatctgacaagaacctgacgcagaccacgtgagggcttcgtaaccaacacgaaaaagacggccggaggtgctccgagtggccaagggcacaaagaggtg

SEQ ID NO: 167834 - DNA, 444 bp, Homo sapiens
agaagagtcagaaccagcaagaccagacgcaggttgctcacacctggaatcccagcactttgggaggccgaggcggaaggatcctttgagcccaggagtttgagaccagcctgggcaacacagtgagccctcatcttacaaaaataaattcaaaaaatcaggcaggcatccctgagtgaaggaagtggggcaccctctaaacttctaaagccaagaaaacggattcttagctgctgacatcttgaatttagctgtgagacctgttttggacttccgacctccaaaactgtaagataataaatgtgtgctgtttaaagccactacatttgtagtacatttttacagcagcaatgggaaactggtatagtgcctacaacatacatattggtagctaaataaacattttatttcttaacacaacctgctaaccttaacccttgtctg

SEQ ID NO: 167835 - DNA, 902 bp, Homo sapiens
gtatactttattatttgggtgacatcatagctaaaaaaactgtgatgaattcagtaattcttttaaattaatatatattttagggatgacactatttgttcccaagtttaggaatcaaagaatgagtctagaatgtatatacattttaaaaataaacaaaggtaaatgggcaaacactgattccatctacaggtgggactggtggtagtaatgagtcccagactcttaccacaactaccacttaaatagcagtctggcttccagactgagaaccactagcctagaatgaacattttaaataagggtttttttgtttttgtttttgtttttgtttttgtttgaaacagagtctgcactccagcctgggcaacagagcaagaccctatatgaagaaccaacaaaaacaaagagatctttccgaaatttctaaggaccccaccttcctttttcccatttggcaaagtttgcgccacgtgattgtgtgtgtcacccagcgctgtggcacccatcaaagccctttggagtgacgggtgggaggtccaacaccctccacgagaacgaagcagaaccaatattcgtgtcgcggcgacgcccttacttaaaggccttcacagaaaaggccttcgggaagtgtgggtaagaaggcaacacagggggggcacacaccggagaaaaggagcggattgggacgcacaggggcgggcacagaaatcacggggaccattatttagaggccagtcagaaacggacactgggcacccaagcacggggatccacattacgttcacaataagggccgcaaatcgagaagggcaggaacgcaataactagcggtaccaggtcacaggcccgggtccaatccagaggggcaaacccggcaagcgtggcggaggacgaaggaa

SEQ ID NO: 167836 - DNA, 110 bp, Homo sapiens
agatagctcaaatcataaatcagcggggcttcagaatctgagagagaattgagcagtaatccccagttgtgagacagcaatggacacagtgggcaggcgagtactgaact

SEQ ID NO: 167837 - DNA, 575 bp, Homo sapiens
agtcccagcagagtcccagagactcaacgtttctttcctcagttaacaaggtttgtccagagcagtgtgttttctacagaaactcagatgttgctctaaatggagtttcctggagttccatgctggccataagcctcctgtgaataatgcagagaaaaaggagatcgcagttcgagccgattccctctgcccgccgactctggaaacaacctcttccctccttctcacgaatcaagattccacgccacaggttagcattgcatatggccaagtcagcagcctctgaactaaatttttgatgaattcaactgtaaaatattcacaacctggaaattcataacgtgattcatgtttttatcattttttttctatgtgatctcataaatgcaacagaaaatattagtcatgaggcaacatgaggttgggacccacatgaagaaacagctcccccgaggaaaataaaatgaacctcctcccaggacccagacctccctagaggagccacggtgttttcgttttaaaagatagtcaaaataaataaagatatgtggatgcagagccagcagtggcggccg

SEQ ID NO: 167838 - DNA, 393 bp, Homo sapiens
aacccttaggaactgtgcatacaatttattaagtagtcaagtaactttaacccatttacgcaggaggttgcaattttttgaatttgtgcatgagtgaaaaatcagaccctggtgatgatcttgagcagtagaatataaataactcctacacgcttagtgttccaataatggaacaccaggcataagtgcaacatatgtttgaactgcatggccacttatatgcagattttttttcaataaacatcacactgagtgtgcctgcctctcctgcctccccttttacctcctctacctcttttacctctaccactcttgaaagaacaagaccaacccttcctcttcctcctcagcctactcaatgtgaaggtgaggatgaagacctttacaatgatc

SEQ ID NO: 167839 - DNA, 190 bp, Homo sapiens
ctgggatgtggacattttggtctaggaaaactactcaaagatgtggatgttgctaaggagagatgtcacccctgaaaatgggaaatacgtttagggttaagcaaataatgtaggatataataagcaaagagaaaaaggaaattagaattgagctaatttgagaacaacaaaatgtctgtgacaggaattt

SEQ ID NO: 167840 - DNA, 176 bp, Homo sapiens
acaatgcctcccaaatgatcactgagggggtctaaccaggtagaacactgcataacaatagatattggggattatcagttgagacaactgcctggttacaatgggaaaaatctagctgcctcctgtataaactgccatagcatggcctgcccaaataaccaccagccccgtgcttg

SEQ ID NO: 167841 - DNA, 434 bp, Homo sapiens
ttttttttttaatctatcaaagagctcatccagcatgcaagtgtcctgctttctgatccagcagcctttctagcaccccggccttgattgtcagaatagcatctgcttataaggtttttaaattattaatacagtatactaaatcccaggagtagaataagccttgttattacggctagtaagtcagcccagagcaatctgatattcctgtaaaactgaatggattttgaagtaaagcatccttgggctcactggcctcagaggaggccatcatctcatttacctatttaagaaaaaccccataaaagagtgttctatatggacattcattatgtcttaagctttattgattctgttatgttgccgttaattataggaaccacgaaagccttcaattagattaaagccataataaataagattagtaacactta

SEQ ID NO: 167842 - DNA, 311 bp, Homo sapiens
agaactatgtcattgcaggattatgtgtgtgtgcccgtgtgtgtgctcacaggctttgaagagttttatgagtatccattatccaaaatgcttggaaacagaagtgttttggattttagattttgaaatatttgcattatacttaacaagttcagttcagcatccaaaacccaaaatgctccagtgagcatttcctttgagcatgtcagtacgcaaaaagtttcagattttggagcacttaagatttaggatttgggatattcagcctgcataatcaaacctccttcattcaggaatgtaaaaggaggtat

SEQ ID NO: 167843 - DNA, 515 bp, Homo sapiens
ttgaacttctgacctcgtgatccacctgcctcggcctcccaaagtgctgggcagattcatgtgtttctcctgcctcagcctcccgtgtagccgggattacaggaatgcaccaccacacccagctaattttgtatttttaatagagacagggtctctccatgttggtcaggctggtcttgaactcctgaccttgggtgatctgcccacctcagcctcccaaagtgccgggtttacaggcgtgagccactgcacctgccccccttttttttttaatttactttttatttcaaaataattttatacttagaaaaaaatgtggcaaaaatagtatgcagagttctcctgtgttcttcacccagctcctaatgttaatggtttacgtaactataatgatcagaatcagcaagttaatgttgatatcatatagttaattaatctgttgtcacaatgacgtcttttttctgatctgtgatccagttcaggttcctaaattgcatctaattgttaagtcttct

SEQ ID NO: 167844 - DNA, 258 bp, Homo sapiens
gaattgaaacaagacaaagatgcccactctcaccactcctcttcaacatcgtactgaaagtcctagccagagcaatcagacaagagaaagaaataaagggcatccaaatcagtaaagaggaagtcaaactgtcactgtttgctgatcatataattgtttacctataaaaccctaaagactcctccagaaagttcctagaactgatgaaagaattcagcaaagtctccagatacaaaattaatgtacacaaatcagtag

SEQ ID NO: 167845 - DNA, 802 bp, Homo sapiens
  misc_feature (444)..(444): n is a, c, g, or t
  misc_feature (575)..(575): n is a, c, g, or t
  misc_feature (626)..(626): n is a, c, g, or t
  misc_feature (690)..(691): n is a, c, g, or t
  misc_feature (702)..(702): n is a, c, g, or t
tctactcatccctgagctctcacagcccctttaggggcaggacccctgaggatgaaccctcattccgccggtctctcggatccccctttctcttttgcttgattgcccctccaaacaggaaggcgccaacaaccctaccttgagtcagacctgcggcaactaggcaagctgcagccgcgaggtagaagctctctctgacccttttaccttaatggttcgtacccgcgggaaataaagttggaaaactgcaagcgatttccgatctacggcttcttccagctcctcagatttatcttaccgtcccccccgcgaatcctctcaagatcccaccgagagatggattcgaagactctcccctccttccgctgctggattctggcccgtgccccgtctctctccaccccagcggcttcccgagtgattctccaagggcaaatgaatttngaccaggaagacagtgaagaaatttcataaaagtgaaatactaattggaagctcctatcggcattggttgatctgacaagttgtgtgtatagaaactagcctatatggagacacgaatgtcaaaagaagtnttaccgatgatagaaatatgagaggatcattatgtattcttcaagaaaaangaaatatggccaaaggatagtaaaggtaatactggcaaaaatatccagatgtattgacggaaanntgtgacaaaanggccagagtcaaattatataacataggatgtgattccaataaataaccagggaccctgatggatcataaataaatacttggaatcttacattggaaaagc

SEQ ID NO: 167846 - DNA, 446 bp, Homo sapiens
ggcagtctcactttgttgcccaggctggaatgcactggcatgatcttggctcactgcaacctctgcctcccgggttcaagcggttttcctgcctcagcctcctgagtagcggaggttacaatgagccgagatcacaccactgcactccagtctaaaaaacttatagaatgtgtaacaccaagagtacaccctaaagtatggactttggatgataatgtgttggtgtaggttcatcaactctaacaaatgcaccattctcctgagggatgttatcacagaagtgtggggacaggagtatatgggaactctcctccatattttttgctcaattttgctgggaacttttttaaaaatggtgaaaatgcaaactttatgttatgtattttcccacaattttaaaagatttggtcgacgcggccgcgaatttagtagtagtaggcggccgc

SEQ ID NO: 167847 - DNA, 352 bp, Homo sapiens
ggcagtctcactttgttgcccaggctggaatgcactggcatgatcttggctcactgcactccagtctaaaaaacttatagaatgtgtaacaccaagagtacaccctaaagtatggactttggatgataatgtgttggtgtaggttcatcaactctaacaaatgcaccattctcctgagggatgttatcacagaagtgtggggacaggagtatatgggaactctcctccatattttttgctcaattttgctgggaacttttttaaaaatggtgaaaatgcaaactttatgttatgtattttcccacaattttaaaagatttgctaaataattggtcatttatagaatttaaaa

SEQ ID NO: 167848 - DNA, 326 bp, Homo sapiens
ggaaaagcttaggacttcctgggattaaaaaaaaaatgcgctgaaattcatgatagctgaagtatccatggaatatagaagatgcacattgacatgcaccttataaagtctataatcccatgttttgttcctaatattcatgtttatttactctcactggtggaaaatacaccatatccaattcattgtctcttaattgatgaactatctttgcaaataatataatatataatacaatgtaatgtataatagagtgtaatgtgatgcaaactcagtgcttgcagatatgctcaataataaaggacattataggtatgaaaatacta

SEQ ID NO: 167849 - DNA, 176 bp, Homo sapiens
aaagaccttgctaataataaatgagagcccgcctccctttgatatgtccaagctgaggaagacttcctgatgactgtcatgtaaaacagcagaagacacccacagacacacagagagaaacagacacacacgagtaatacaaccccagggatcaccacccaggattaataaaatag

SEQ ID NO: 167850 - DNA, 178 bp, Homo sapiens
ccaaggcttctgtttgtctcaagttccgtttccctcctttagttcacatttgttcatgctacgaattgtcgtcactgatgtggtcattatgtacatgaaccacagcctattcttgcaataccctacttcaaaattctttttgtagtatttcatcaggcacaataacacctgtcatccc

SEQ ID NO: 167851 - DNA, 165 bp, Homo sapiens
gcctcagtgtctgcatctgtaaaatgagcagcagcatgacaccactcagctcccggttaccagggaaacacatgagagcgcaaataaaagagtaaagaaaaccgcctgctggaacccagtcaaaggtaaccactgtcatccgggtgtgtgttggggcggtggtgg

SEQ ID NO: 167852 - DNA, 504 bp, Homo sapiens
  misc_feature (413)..(413): n is a, c, g, or t
  misc_feature (417)..(417): n is a, c, g, or t
  misc_feature (421)..(421): n is a, c, g, or t
  misc_feature (462)..(464): n is a, c, g, or t
aaattcaatttatacacaacactgagaatggttggttttttttaaagaaagacagagagcaagaggagagaatgagagagatacacatacacacaaatcaacaaagtcttcacaataaccaacaaaagaaagagctaatgtgacacagtttaggcagctcattaaagatttactaagcagtgcatcaacaaaattaacaacagaattaaaaatgcacaacttccgggccaagtgtggtggctcacacctgtaatcccagcactttgggaggccgaggcgggtggatcgcctgaggtcaggagttcgcgaccagcctgaccaacatggtgaaaccctgtctctaccaaaaatacaaaaaatcagccgggcatggtggtaggcgcctgtaatcccagcactttgggaggccaagncggntggntcatgaggtcaggagatcgagaccacagtgaaaccccatcnnnactaaaaatacaaaaaaattagtcgtcatggtgttgtgcg

SEQ ID NO: 167853 - DNA, 398 bp, Homo sapiens
aggatccagccatggcagcaagaacagaaggtggggtgcctgatgtgctgcaggctgtggggcacagcggggtcagaagaggcagaagccagtaggcagagcaagccgagcctgttcgtccattctaaatgcagtgggaagccactggatgcttttaagcaagatggtgtacagagtggtaagatctgatttataaaatccttctggctgctgagtaaaggttgacaagaaaggctgagagtagcagcagagagaccagctgggagatattgctgtaaccccaatgagagatgctagtgacttggaccaggtgggagcaggggagttggagggaaggggacagattcagtatgtgtatttgaagtagggtcaatgctccctgacgatggatagtgcat

SEQ ID NO: 167854 - DNA, 206 bp, Homo sapiens
caaaagcccaggttttctggtgcgtccctcccccgtacaaggctgcttgcactctgccacaggtccctggcctggcaccatagtgacagtcctggtggaagcagcgttcgtggagctgcaaggtcagcagccataggagctgtgaacttttcgtttttcctcatgctgactgacacatggggataccgtggcgcctgtggtgggga

SEQ ID NO: 167855 - DNA, 329 bp, Homo sapiens
agagagaggagaaagtgagctcagcgagttggccgggtgacacactgatgaaggggtcaaaggacactctgagttagtgccctcgggacacacagcgaacagtgatcatgaaaagagtgggctcaataattttccataaacttgctcaagattccatgcagttgccatacagcctttgaggtatggtcaacctatagtaagttagtaaatgataaggggaggaagaaatggaaacctaaacatctactgcaatgaaaaccaacagcaatgacagtaggagtaattcagccttcgttgaaaacatgacatcaaacacactctggtttccc

SEQ ID NO: 167856 - DNA, 269 bp, Homo sapiens
gtctgtcctagcatcctcccccaaaaggaatgtttcctatttacccacacatcctgaccctcccctctcccactatagtcagggcgtcttcccagttcttggttcacatcccttgtgctaaggtttgggccagggctggcatacctgttccacatggtacatgaaacatacatggtatcacctgtgattgattggtgtggtctgcctggagcactgtgtggaaaaggatttaaagaacatgccaggtgccatgatcagttaacactgtt

SEQ ID NO: 167857 - DNA, 137 bp, Homo sapiens
atgggtaaattgtatgatatacaaattatatctgaataaagctgttaaaacattaggcaaacatgaaagaatcctaaactctataaatgtttaagaaacagaaattttgtttcataatttacatttttaacttaata

SEQ ID NO: 167858 - DNA, 462 bp, Homo sapiens
gaacccagaactctagctccacagctggcattcctaactactcttttgctctcttggtatggtggctacaaaagtcaactaaaacttagggtcctagggaagaagcacgcagagaaagccatggaaataagcaattcggtcttcatttaacaaatatgtattgagtgttcaccctgtttcagttgctgtgctaagtgctcagctacatattacaaatataacttatttgtaaggattcatagcttccatatttattttatgaaactaatatcttcttgaaagaaaaattaacacagggcataaatgaatatggctgcaaaaataccaaagaaaacaccagctaacaaaattcaatagaattgaaaggaattgcatgtcacagccaagcacagttgctctcacaagcataaggatggtttaataattgtgacaattattgccggccacagtggctcacgcctg

SEQ ID NO: 167859 - DNA, 334 bp, Homo sapiens
tctgtcgcccatgctggagtgcaatggcgccatcttggctcactgcaacttcgacctcctgggttcaacccattctcctacctcagcctcccaaatagctgggactacaggcgcatgccgtcacgcccagctaaatttttgtattttttagtagagacagggtttcatggtgttccccaggctggtctcaaactcctgagctcaggcaatccgcccacctcggccagagccatcttttatagtcctctgcccaatccatggccccttccacctttgttcattctgctcccactatttggaaagtcctcattctcttccctcggcctatttaaat

SEQ ID NO: 167860 - DNA, 247 bp, Homo sapiens
tctgttatagtaactaacccggactctctgtggatggtccttagtctaaactacctgcatggattattttatagtaactagcccggactcttctgatgagggctctttcaatcaaatttagtataaacctaataagcaatttcagtcaactaagttgaacatttcagttaaacttgggcaataatacaatttattcagaattgttttgtattgcatttgtcaatgcttattcttctaagccaaaaaa

SEQ ID NO: 167861 - DNA, 158 bp, Homo sapiens
atactgcaggcaaaagtaaaaattataagaattgcacaaagaaggatatggggtaaatggaatcagttatacactcttggttttctcctcactgagactgaagaggaaattaatgaattttacaatatgtgaagccagaaaattaactttcccctcag

SEQ ID NO: 167862 - DNA, 579 bp, Homo sapiens
tatatttggtcttcaaccccatttcctgacatacaactcctaaaatccttagaaacaccaaagtgtgatgtcgttttgtttattaatgagttgactgatgtctggcagcccctaggtagcttcaggatgggggctggtgaccagaaagaacaaggggaggattagagagttgggactttcagcccacctccaacttccggggaggggagaggggctgaaggttaagccgatcaccaatggccaatggtttaatcagtgattcttatgcaatggagcctccatacaaagacccaaaaggacagggcttggagagcttctggatagctgaacatgtagaggttcctgaagggcggcgcacccagtggaggtgcatggaagctccatgctccttcccccatactttaccttatgcatcttttcatctgtattttttgttataaaccagtaaacccaagtgtttctctgagtttcatgaactgctctagcaaattaatacaatgcaaaggaggaagccatgggaaccccagcttggaaatggttggtcagaagttctggaggcccagacttggaactggcatt

SEQ ID NO: 167863 - DNA, 299 bp, Homo sapiens
cacaggcctccccagtacctggtgcctgcaggacgtaggtgggaggaaacgcattctcgtccctctggaagtatcgtgccaccagctccaggtcacttggcctggcagtcagatggtccctcaatacctcccactccttctcatcgatccgcgagggaatcagacaggggccgtactgatcaccgatgagggcctggcagagaggaagtcacagattcaaatctcactttttttcttcagacaaggtcttgctctgtcgcccaggctgctctcgaactcctgacctcgggtgatccacc

SEQ ID NO: 167864 - DNA, 865 bp, Homo sapiens
tcagcctcccaaagtgcggggattacaggcatgagccactatccactgcatgtacacctccaggagaagcagggctgcactgaagtggagacaagggatggaggtgaagggagaagcattctagatggaagcacttagcatctggtgaatgagcagaagtgatgctttcagagagagttcagatttcattgtagaagcccaagcagcagccgggcacggtggctcacgcctgtaatcccaacactttgggaggctgaagcgagcggatcatctgaggtcaggagttcaacaccagcccagccaacatggtgaaaccccatctctactaaaaatacaaaaattagccggacctggtggcacgctcccgtaatcgcagctactcgggaggctgaggcaggagaatcacttgaacccaggagggggaggttgcagtgagctgagattgtaccactgcactccagcctgggagacagaggctccaactccatctcaaaaaaaagcaaagaaaaaagcacaaacagcactaagatgaccccaaggggaataaaatcacttccaacatcacttccatgggttgcctgcactgaccccacagacaagtctcccttagtccctgtgcttcttcagagcatctactacaactgtaattaattattgcttaagaattaaattcatgtctaaacctgctagacaggcagcaccatgaattgttcaccatcttgctcaccactatttggtccatatttgttgaatgaatggatggatgaacactacatacaactgttaccaaagatgacaccaaaagaaattaattcctccgatgaagtgaattaatgaaaaaaataagtgaatgaaaaagtgcgtg

SEQ ID NO: 167865 - DNA, 357 bp, Homo sapiens
ctgaggcacttgctggcagagtctggttgtgattggctaaaatatcatcccccacttccccagaacactgatgctgccctgaagtcagcactgaaagcaaatacaccgggcgccagctgcagctgcacacggcccctggcacacatcgctgcccagcagcacatggctgcacctgacaagccctccggggcaacagagacgccgtgagccaatggcccaaacgttgccaggtgggcagcagctgtcagtctactggccacacaactcactcaacgctgcccaaggctggtgggcaaaaccacagggcccaggcctgcccagcagcctgagacccagctcctgtctgtccctgcagtg

SEQ ID NO: 167866 - DNA, 514 bp, Homo sapiens
cttctttgtctcttttttgttattcttcctctttctcctcccttttatttttctcttcgccttcctcctttttgcatttcgataaagttcaaaatggattcctatagtccattctgcattgctctaaaggaatactaaaggccgggtaatttataaagaagtttatttggctcacagttttgcaggctgtacaagaggcacggtgccagcatctgcttctggtcagggcctcaggaaacttccactcatggtggaaggtggaggggggccggcatgtcacatggtgagagagaaagcaggagagtgaggggaggaagtgccagtctcttcaaataaccagctctcacatgaattaatagagtgagaactcactcatgaccatgggcagggcattaagccattcatgagagatccatgtctgtgacacaaacacctcccactggctcaatctccagcattggggtcacatttcaacatgggatttgggggggacaaacatccaaactgtatcact

SEQ ID NO: 167867 - DNA, 493 bp, Homo sapiens
acgaaccaacaaaccaacaaacaaacaaacaaaagagctatgttgtttgttcaaggacaggtataccttttatatttttttcagacaaatttgtggagtggactctaacctttgagtctgtattaaatatttacttgtgtctcctgcataacttcttcaaatttagaggcagattaagataaataacttaagcactatcattgtacatgctagcttgacactgttgattctgaagtattttattgatattgaaagaaccagttttctatttcattgatttttctcttttctgttttgttgttttcctgtctgatctttactatttcctttcttttactttgggtttaatatgctctttttctagattaatgtggaaaccaaggtcattgatttgagccctttcttaggtaggtagtcctataaatttacctccaaatactgctttagttttattctatcaattttgatatgttgtgttgtggttgtcattcaa

SEQ ID NO: 167868 - DNA, 594 bp, Homo sapiens
gttggggaaagggtcacagggctgacttctttggaaggccttggactgagagctccatgaagacagggcattcttcatctgtcttgtttccatatttctggaattttccacagagcctggtgcagagtgggtgctcagtgtaaattaggtgaacaaatgaatattgaggtggtggccagggtcggaggtaagaggtgcggctgtgttcctaggagcaggctttttctttaattttctctcaaccgtctcacggagaggccgcacattcagtggaaagtgtcgttttggagtcagcaaattgggtttaagttctggctccatggctgtgtggccttgagcaggttgcttggcctctctgtacctcagtttgctctcctgttaaatgaaagagctctggagagccaggtcagaaagcgtgtggcacattgtaggtgctcattgaatgctagtgtctccagctccaccagagcagccccctcacatggaagatagaaaaaccaaggctctggccgggcacagtggcatcgataaacaccggtgtttatcgatgccacagcatgacagctacttcctgtctggagagaactgcgtggt

SEQ ID NO: 167869 - DNA, 1201 bp, Homo sapiens
aagaagaggcgagaacgacccccggaccgaccaaagcccgcgcgccgctgcatcccgcgtccagcacctacgtccgctgccgtcgccgccgccaccatgcccaagagaaaggctgaaggggatgctaagggagataaagcaaaggtgaaggacgaaccacagagaagatccgcgaggttgtctgctaaacctgctcctccaaagccagagcccaagcctaaaaaggcccctgcaaagaagggagagaaggtacccaaagggaaaaagggaaaagctgatgctggcaaggaggggaataaccctgcagaaaatggagatgccaaaacagaccaggcacagaaagctgaaggtgctggagatgccaagtgaagtgtgtgcatttttgataactgtgtacttctggtgactgtacagtttgaaatactattttttatcaagttttataaaaatgcagaattttgtttacttttttttttttttttttaagctatgttgttcgcacacagaacacttcattgttgtttttgggggaaggggcatatgtcactaatagaatgtctccaaaactggattgatgtggagaaaacacctttcccttccagttttgagagacttcctcttggctcccaggaggagggattccttgactttgacacacatggccaccttggcacaaaagccttgtgctatggaaaaacaaatttgtttttatgtcctcttctccctttccacgtttcagcatagacttaactcccttaagcccagacatctgttgagacctgacccctagtcattggttaccagtgtgtcaggcaatctggactttccagtgatgccactgagatggcacctgtcaaaagagcagtggttccatttctagattgtggatcttcagataaattctgccattttcgtttcacttcctgaaagtcagggttggcttgtgaaaagttgttaaacaacatgctaaatgtgaaatgtcaaccctcactctcaactttccctgttcagagcatcagatgaagacttcattgggttttatagtggctttctgatttttggtagtccattgaagaagggagtttgaaagttgttgtatactgttaacgattgtctgcccatgtcctgcctgaaataccatgattgtttatggaaagtatctttaataaagctggatacagtttggcttggaaaaaaaaaa

SEQ ID NO: 167870 - DNA, 801 bp, Homo sapiens
aagaagaggcgagaacgacccccggaccgaccaaagcccgcgcgccgctgcatcccgcgtccagcacctacgtccgctgccgtcgccgccgccaccatgcccaagagaaaggctgaaggggatgctaagggagataaagcaaaggtgaaggacgaaccacagagaagatccgcgaggttgtctgctaaacctgctcctccaaagccagagcccaagcctaaaaaggcccctgcaaagaagggagagaagtctcacagaaagttctcctgctcccagacatgggtccctcggcttcctgcctcggaagctgcagcagcaggccatcgtgggaacgtgtgaagagcttccctaaggatgacccgtccaagcctggtccaccctcacagccttcctggtgatacaatgtgcttggcaatgactcacactcgtgctggtgaccgtctgccacggcctggcgtatccacaggtgaacccgaagtgacggtggttggagcgctcgtgcacctatgtgtaccagacacccacccatggcgcgcattgtgcggcatcagtagaggcacatacgatggcaaaaccccctccgcacgagacctaccgcgagacttccaagcactcgacataatgcctgcacaccaccaatcagatcgatgaactgcaaacgaaggcaggtaccttattcaccaccacggcataccacgactaagacacaaaggccatataccaagtactgccagaccatggcacgcaatcaggcatgccacaacgcagctcgcccccggcccaccacataagaccactgca

SEQ ID NO: 167871 - DNA, 173 bp, Homo sapiens
cagatcagtacacacagtgaaggtgtaaaacagcaatcattttgcagtggagttgccggcaatttttcattctcctttgctcacgtgtacttcctcatttctgtgcactaaacgcgtgttactcgtatttaaataagtaatcaaagtttgtgagattccatggcagctccctg

SEQ ID NO: 167872 - DNA, 524 bp, Homo sapiens
ggtgttcttcttttcaggaacattcaatggcctcccattccattgctattaagcacaaactactgacacatcaccttatggttgtgtgagatatactgagccgtccttctttgtcccctctgctcactctgttggtctccacaacactctttcttcaaacatgctcagcacactctcacccagagcctttacatcggcttcctcactgtctgggatgctcttctctcaggtaatcaagtggctcactcactcacctctttaaaatctgtgctcaaatactgctttctgttcatatggaccctaaacacccatctgtacttccaattcctttttttttttttggagacagagtcttgctctgtcacccacgctggagtgcagtggtgcaatctcagctcactgtaacctccgcctcccaggttcaagcaattctcctgccttggcctcccgagtagctgggattacaggtgcatgccactgagcccggctaatttttgtatttttagcagagaatgggtttcacc

SEQ ID NO: 167873 - DNA, 593 bp, Homo sapiens
ggtgttcttcttttcaggaacattcaatggcctcccattccattgctattaagcacaaactactgacacatcaccttatggttgtgtgagatatactgagccgtccttcttgtcctcacatctctaatcttctcaccttctgactgtcccctctgctcactctgttggtctccacaacactctttcttcaaacatgctcagcacactctcacccagagcctttacatcggcttcctcactgtctgggatgctcttctctcaggtaatcaagtggctcactcactcacctctttaaaatctgtgctcaaatactgctttctgttcatatggaccctaaacacccatctgtacttccaattcctttttttttttttggagacagagtcttgctctgtcacccacgctggagtgcagtggtgcaatctcagctcactgtaacctccgcctcccaggttcaagcaattctcctgccttggcctcccgagtagctgggattacaggcgtgagccaccatgcccggctgtgtgtctttagtttcttttgtcaatagtgtttatacgtgtttagtatataaagcagtgacttccttcatt

SEQ ID NO: 167874 - DNA, 435 bp, Homo sapiens
agtcagcccagcaacagaagaaagtgaaagtgactatagctcaattttcttgatcaaaaacacaagcgtacaccaagaattatatacaaggcaggctggcacttaattgaactacacctacaaacaaataggataacagaattaacaaattgtttgagcaaaataattgtaatgaacaatgtaatacttctgacccttcatggtactctaggctttatttggcagaagaattcatcaccagatggaagcagcaagtcctctgagtcctcctgtgaccctaccttctttagatccacctatgggtagagctggggtcacagtaacagcagtgtctcatgtgtgaggtcctcagcacttctcggagtcccagggcatgtctactgtatgctgatgaacaagctccctcctgcggggcacagtacatgcttcgcccag

SEQ ID NO: 167875 - DNA, 128 bp, Homo sapiens
taaagttgcaggtgttgtgccttagatccaccacagtcagctgaaactggcagctcaagacaagtagacaagccagcaggacccagatcatccaactcatcctgagatgagatcaacctgctgctaaa

SEQ ID NO: 167876 - DNA, 141 bp, Homo sapiens
tcaattctaacccttatgcatcatcataataaaagtttgcctacttcttccccggtgggaagtcccagtgtgttccccaaggcaagggctgtatttactcctcatcttggtgtctctaggctttagagtacttaggacaga

SEQ ID NO: 167877 - DNA, 129 bp, Homo sapiens
tcaggtgggctgtctggttgggggagggcactacgtggagtgtttgccatccttctgccttaaatgtctcatttgaaatgttagaaccaaccaggtgcggtagctcacatctgtaatctcagcactttg

SEQ ID NO: 167878 - DNA, 228 bp, Homo sapiens
tatgtctttatcagcagtgtgaaaatggactaatgtagcagttgtattaattttgaggggattttgtcaagaaatgagataggagaataaggggattgggaaattggcaagcgtgatagaaatattgttctctggaatcttaactggcttaaaaaaaacccacaaataaaagacaagaggaggctgctagctaacaagaaaggagatggttcccaagccagaaagtgt

SEQ ID NO: 167879 - DNA, 228 bp, Homo sapiens
tgctgggattacaggcatgagccaccgcgcctggctgccactactcagttttaaggtcttataagagggaacgttctggggatgcggctctaagcaagtcctcctgtgctcactgctcacctgcccctttagtgtccctcttatcctgcctcggcatggtccctgatggtgagctaacatgggagggcctgctcagagcccagcctgggctgcaggagcatagcaatg

SEQ ID NO: 167880 - DNA, 230 bp, Homo sapiens
acttcatctgctgctgtcatcttgcagatatcttcccttggccttttagcctcatctctcttctctttagtcactttggaggctttctccagctccttcccactgtgccccacctctttatttagttcctagaactggacacagtggttggcaggacttgaccaacacagggcacaagacagcagttaccttatattctttcttgtggctaatttctccattgccatttc

SEQ ID NO: 167881 - DNA, 570 bp, Homo sapiens
ctttttccctcagggtgtttccataatagttattgtaaaagagtttttagagtaattttatactaatcctagttttgttattgagttagagatatatatttaaatcagttcattctcatttgaggataccaaattccatgataacttttcttaaataaaagtgtattcggtaaaagcaaaaaacagagtctgaaagattagattcccgactaaggtaaccaccttgatttaatgcttaatagcatctgaagtggcctcagtcatgactacctggtaacagtattcacatttctcaaaatgacaactgggcctatctctaaatgagattgtgtaaatcctccaagaaatgggaagccccgtgttagtgtttgccttctccttttgccccaggatgatttggaaagaggaaccctaacctcctctcccgtcaaggcccagcccagaaatgagcatcaggctctcacctttcctccatccttccagttggtccctgtggtcacctctgactgtaaacacactgcaaaacaccggcaaaaatcaaaaagctgggccggtgatccacctagataa

SEQ ID NO: 167882 - DNA, 354 bp, Homo sapiens
tatgggagatagatacatacgcacatagattcatggataaaaaatatgggatagtatttttacttggtgaactttcaaaaccagagtaaaacaaaattaaactttgacttttaagaaaatgcaaagattatgaaaaaataaatttcacatatgataaaacggacatgaaaggcttattgaaagaaaactagtgaatattttaaagctggcatcgttgtaattagagctcaccccttgaggactctaaaataaagcttcactcaatgacccttggtaaattatgcacatccctttaaatgtaccatctggactacttcgtaagggagtatccacaatgactgcaatttcagaaaa

SEQ ID NO: 167883 - DNA, 405 bp, Homo sapiens
tgacagaatgtaattggcatgttattgaaggataatgtgctttaaaaagaattccctagtggatctccaaaatacaaaagttaggactgtagtggttacataaaataggagtatctatgttatcaggattgataaaattatttttcttgtgaaatttttgttaatggtcaaaataatgaacataccaaagcctttatgcctggtatattttaccagccattttctcatatagtcttttaaatttgattttcatagctactgtgagaatcatcatttcaagtacactgaatagttaaatgaattgggtggagttcaatagttggacttttaaaaataaataaaatactacaaaatgactccagtcatatgaatttttaaattttctttcccaaggtcacagacagt

SEQ ID NO: 167884 - DNA, 622 bp, Homo sapiens
agcaccttgactggctaatttttgtatttttagtagagatggggttttgccatattggccaggttggtctcagaactcctggccttgtgatccgcccaccttggcctcccgagtagctgggattacaggtgcctgccaccacacccgtctgttgccttttatttttaacatctatttcatcttattatcagcaattaaaatagtgccttaaaaatgaaaaattgtccttgcagacaataacaaagtagtgacctttagcaagtactactagatggtgatagtaaactaggaaggttaatgtagaaatggaactcaaatgtttaaattacagatttttttcaaaattagaattcaagccaggcggtggctctggctcacgcttgcaatcccaaagtgctaggattacaggcgtgagccaccgagcccagccaaaatcagcatattgaaagccaaactaatcatcgtccctcctctgtgttcacattctgtctcctctttatgatactgcctccacccggtcccccaaacaagcttcacacctgggaattatcatgactcttccctcagttttggccttttccaccagtcaccacattctgcgaatgtaactcttagggatgtt

SEQ ID NO: 167885 - DNA, 310 bp, Homo sapiens
cagttttctcacatggatcactgccagccacctaagtaattgttacaataggtattcagtagtggtagttggagtaatagtaatagctaaaacttacagaaaccttaccatgtactgctagctgttagagttggtttataaaaataatcttgtttaataattacagcaaattaggatagtatggtgtgaattatatacaaaccccacatttactctatagagtcaaacacataccgaggagacacgtgtctctctttccagccccccaaatggtggtattaaatttctctatcatctaccagagctctac

SEQ ID NO: 167886 - DNA, 249 bp, Homo sapiens
gtgtttatagcatccattaagctacaagtggcattaatgaaacccaaatatatgtcattttaggcaaagtacatgcaaactgacttttattctttttgatgcttttttacacatctagattgtcagtaatcctttggaatcacctgatggtgttggaaacaacccagtggaagtcatgtgtttttactttgggggtcagtaagggtctgagcacaagatgatagtcttttagtcttatggtggtatagg

SEQ ID NO: 167887 - DNA, 269 bp, Homo sapiens
ggtggcaggcgcctgtaatcccagctactcaggaggctgaggcaggagaatggtgtgaacccaggaggcggagcttgcagtgagccgagattgcaccactgcactccagcctgggcgacagagcaagactccgtctcaaaaaaaaaaaaaaaacccaacaaaaaaacactacttgtcgggtactatgttcacaacttggggggcaggaagcccaaacctcagcatcatgcagtgtacctgtgtaacaaacctgcatacccctgaatcta

SEQ ID NO: 167888 - DNA, 441 bp, Homo sapiens
tagtcacactggtctatcaatccttcattatttcagtaccctttcttggcactgatactttataatagctgttctattcttccttctctcctctttccctatttaactctttttaaactcttattcatcctttggctattagcctatcatttttgaaatgaatttttgtctgacctacatagctggattaaattttctacttttaacactataaactccttactttggaaaactttacaccaatgccatgtcttttcataattcccattgtgaaccatgcatctatcaataaggaaaactatagtcaatggtcaattaccagtcctcaccttattcaaattctttgtactatttgacactatcttcttgaaataataaccttgtaattcaagacatcacattctcctgaattcctgtctcaagagtttcttctcagactca

SEQ ID NO: 167889 - DNA, 585 bp, Homo sapiens
ggtgtgagtgtggagtgtgtacgttacctgtgtctgtgtcttttcctgtgtcatatgtgggtctgtttgtgtgtctgtgtgtggtttgtgtgtctctgtctgtgtgtgtgtagctaccaggtctgtggtctgtgtctgtagctggtggtcaccatgatatgagacagccccaggagggtggggacggggcgctcgctgctttctgcatctcctccaggtgtccttggctccaggttactccctgcccaggaagctcacgccttcttccttctgtttccaggtggaggccgtcattcatccccaattcctggaagaattgctttccccagatccacagatggatttcttggccctaagccaggacctggagcaggaggaaggactcacccttgcccaggtaccccaggggcaggagggacctggcacacaaggcccacctgattgtctaatcccccccgctggggatgctcggcttcttggggagccactctggagtgggaagatgcaggttcagagggagtaggatggacaggagccagggaggggagtcagcatgcaagctgtggtgaggcccaacgggaggcc

SEQ ID NO: 167890 - DNA, 407 bp, Homo sapiens
tgctttatttagcagtactgtcatattttgtttttcagcatgggaacaaaataagaaatcagatctcaacttctttaagaatccttagaaatgccccagggaaaataccttgaattaaactgaaaagtatgggcacagaggttagaatcctatcactagaaaaattacagtaacaatttaaaaactaatgcaggccgggcccagtggctaacccctgcaatcccagcactttgggaagctgaggcaggcaaatcacctgaggtcaggaattggagaccagcatggtcaacatggtgaaacccctgtctctactaaaaatgcaaaaaaattggccgggtgcggtggtgggcgcctgtagtcccagctactctggaggctgagtcaggagaatgatgtgaacccaggag

SEQ ID NO: 167891 - DNA, 953 bp, Homo sapiens
gaggcgcgcagaggcgccgagagcgctccccggcgggtcccccgcgcactcgccgcgcccgggcagcggcccgaccgggcgagcatgggcggcgcggagtgacgccgctgtgcccgcttggcatcaaggacattcagcccgcgggggtggggacgaaggggggcagcccggcgtcgccaccgcagcccccgagagccgccgccgctgctcgggctccggggctgggtggaggaaaggggtgttcggaatcgatccccattttccgacctttttgttggacattacgcccaccttggacgccgcaagagaagctgtcaagccccgcaggctctgattcggcgccctccgcgttcctcggctgctcccggcttccctgtgcctcggtggagtatttgcgttcggggctggggctggaggaggcagccacacgcgcgcacacgcacacgttcagaggagggcgagaggcagcggcataggctccatctgcagtgtcaatgcggcgctcccgctgaaggagggaaacgcggcgcgtccagtaggggagactgcattgctgagtcctggccctctgaggggacgactgtgcctgagtgctgctgtgccactgggacccgcctctgccatgaaagccatgccctggaactggacctgccttctctcccacctcctcatggtgggcatgggctcctccactttgctcacccggcagccagccccgctgtcccagaagcagcggtcatttgtcacattccgaggagagcccgccgagggtttcaatcacctggtggtggatgagaggacaggacacatttacttgggggccgtcaatcggatttacaagctctccagcgacctgaaggtcttggtgacgcatgagacagggccggacgaggacaaccccaagtgttacccaccccgcatcgtccagacctgcaatgagcccctgaccacca

SEQ ID NO: 167892 - DNA, 462 bp, Homo sapiens
tgagtagctggggttacaggcatgtgccaccacggccggctaattttgtatttttagtagagatggggtttcaccatgttggccaggctggtctggaactcctgacctcaggtgatctgcctgcctcggcctcccaaagtgctgggattacaggcgtgagccaccacgcccggctgtcttttgttcttaatccacgtatgactttcttcctttcaggtggaatatgccgtcttaagaaatattacagaattaagaagaatttacagcttttacagcagcctgggatgcggccactctctggataatacctttctgatgacaaagcttcacttctggagatttctaaaagattgcaaatttcatcaccacaaactaactcttgctgatatggacaggatattaagtggtgagtgttccagatccttcacatcttttggtttaaagcagaggaccaggccgggc

SEQ ID NO: 167893 - DNA, 516 bp, Homo sapiens
ctggcgctggggaggaccttccaccgagaaagggggcaagcctaggagtactctgggtacccctaacaggaacagagaggagaagacagctggagtcccctggagggctgggccaagcggttgtcagaggcatagatttgctgaggaggcaacaatcaccacactgttcttctgactgagggttgccaacaccccccataagcgacgggtatttacttctcccggctgtactgcatatgctggcaaaagaagccttcggagctcagccaggagaggaggaggacaacactcactccatcagcccacaggaacacttcgtcctgtccccgctacctgggtcagcaaaaccagccccgtgccctctgcacagaagcagaatggtgcagacatctctgtcctcctcagcacgcgctgtgaccccacgcccagggctgcaccttctctcagggactgtggagcccagagcatctgtaacaccgcgatgatgatcctagaaaccatacagggctgctgtga

SEQ ID NO: 167894 - DNA, 430 bp, Homo sapiens
agtcaccttgccaggcccagggcaataactatgcaatgtttatataatttggagcaaaaaatatttgaaatatgtgtgcattgctttttaaccttttctactgatttactttattaaatactgaatagaaacaatatatttataaaatatttattttatatatataataagcacataatgaacacctgtgtctccagtcttggtttaagaaattaagccaaaagtaatcataagtgcttatgattacttttgaagtcacctgtacaacttttgctgactacatccccttcttcaacactctaacgatggccactgtgagcactgtgtatattgaattgtgttgtattttaataccgtgtgcactactttgttttcctagctgtatgctattgcatttagtgagcataatgaattatatcagtataattca

SEQ ID NO: 167895 - DNA, 315 bp, Homo sapiens
attttttatctaggcatgattcctgtttgtcctcattctcttggtcccttcagtcttttaggtcagttcactacttgccttttccttttctaaaataagtagtatagcagaggtcaatgctccaaaacattcaaactgttaccaattactttactttggagtgagtaaaacatctataccacaatgactagataaagaatgggcttaatctttccttgccatcccttacctcagtcaacacaagttgttgaaaaatgactgatgaaaaagcaaggctgagaatgaagctaggtccttcatagaaccaagatgtag

SEQ ID NO: 167896 - DNA, 382 bp, Homo sapiens
ttatgagggtagggattatttttatctctacctcttatatgaagggaaatgaaaaatggaggttaacttgctcaggttcagtgggctgggattcaaacccaggcagtgtagtgtgattgagcccagccactatgatgtattatctagaggagcttaaagtctaaatgaagacacatattatatatatttttgtgaatacctgttcaattactgtaataagttctctaaagaaagagtacaaagggctttgagaaaattttaagagaaggagatgatatagatgaatgtggaactgaaagaagccagtgtacctagatcataatgaatgaaaatggagagcagtaggggattttggtagataggctggagagggtcttttaaa

SEQ ID NO: 167897 - DNA, 505 bp, Homo sapiens
tcagagtatcctatcgccacacaatataaattacactcatttgtggttcctctattctgtatctgtccttccctcaagagtataagcaccatatggacagagaccttgtctgtgcccagcactgaacatggcacaaaatacaaactctactaaatatttgtttaaaagaaaggagaactaaaaattgttaaatcttatgtaaaacaaacatgcagtctgacaaatatgagacaaattcctttttatcaaggaagaacagaataaattgcaaacttgactgttctcctaagaagaaagatgacaaattaaaaagcaaaattacaaaatgaggctttcaatgctaccattcactgaagtatcaggatctctgttgctgactgtatatatgattcatcatttaccaaaacgatatgaaggaggtaattagaaaaatagaaaacagagctcggaggctgggcgcagtggctcacgcctgtaatcccagcactttgggaggccgaggtag

SEQ ID NO: 167898 - DNA, 539 bp, Homo sapiens
gagagcagggctccccaacaaatagctgatctttctcccttgcctggcctagatcggcctctgtttagagaggtggtttggtggttgaagaatgagaacagggtgggagggggacaaacaggcctcttctgtgtcattgacagctgatttttgtttgtcagcgtgctaaggttgtgaagttgccaatccgtgatgattaagattctgttggggtcctttggagaggagagaggtggtggcttctgagaacataaccagaaggcttttagggaaatggaaaagtcatagtacggagcttcagcctagtcattcactgagctcagaagtgctcctcctcacccctcctctcccttccttttcctttctttactagctgggattgttctttcatttattcataaaaataaggtacaaaaacaaataatgccttgccgttgttattaagagagacatttaaaatggatcattgaaatactatgtgggaaggcttattcatagttaattattaatgacacttatcaaagcttgtcctggaccaa

SEQ ID NO: 167899 - DNA, 749 bp, Homo sapiens
gggagcgcccggatagctcagtcggtagagcatcagacttttaatctgagggtccagggttcaagtccctgttcgggcgtttgtagttttcgttactttaacctgctaaattatcccatcaagtcccaagagcggacatcgtaaacccttacatttcaagttgaattcaaatcatttttcactgggttcagaatatgctagatagacgtgttttcagggaggaaaaaaaatgactgaacaaaaaaaaaaaaaaaagaaaaaaacaaacagtgtggggcgcgagcaccgggcccttagaaaaaggtacaagaaacccaagcggagggcggccggggcccaagaagggacaaggcgacaaggggccacaaaggaggtacccacagaaacaaccaggggcacaagaacaaaggcacagggagactccacacaacaagtaaaaaaaacccccgggagaaacaacagacacgttcacggcacacaatcccaacagggaaaacaccccagcgcggccaccacatactgcggggacactacaagaaccccaaggggggcagtcaccaaagagcaacacgccccgccaaaccccacaaaaaataacgacacaaccgaacacgtggggagacacacatcgagaccacgcaggcgtagggcgacgcacagccgagacgcaaccacaacgagccaacaggacgcagagaaccaacaagacagcaacaacgacaagcccgacgtgaaccgaggacggacac

SEQ ID NO: 167900 - DNA, 295 bp, Homo sapiens
gccagctatttcctgcaggctctttggctccttctcaccagcaaacctcggcctgggacattctgtacccagacaaccctcctctcaaccagcagcagatcacacctcacctacatgcctcaaagctcacttcttccaggaagtcttctctggctgtccaactcttccgactactgactctctccttagcaaccattacctttattaatgttaaattaacacaccatcatttatgtgacactgttctagtgtaaaatctctttttcagtctgtatcccattaatcttcaagacaa

SEQ ID NO: 167901 - DNA, 205 bp, Homo sapiens
ttcccttcctaagatatatacagtgaagtctgttaagttagaaagtgaatggagagagaaagagagagagagagaatgtgaatatgacttcgtctgggaatgagttacatgcaagttactagtagtaacttcgggacctccatttccgaggaaaatgaagtgaagcataagaacgaaaccaattaggtgacatttgaacttcctg

SEQ ID NO: 167902 - DNA, 383 bp, Homo sapiens
gtttgaccaactttccttaccactggccacttggcccttgtcttgtttgaccagggttgtcaaacaaggtttgttgtttccttctttgaaggaaagagtcagtgtttcttccattccaatgcatccacttgaggaatttttaataaaatgggcaatgaatgggcagcagaagaagttacaggcctgctgatcaaatgctaagtaataaaccctggaaattctaaactcgtttgcatgaagaccttgcttattttgtaactattatgtattatcaaacgtatacttaattctttgaatgtgttagtatgtgttcaaagtacaccttaattttatatatacatatatttaaattacataaaataaataagccactaaaaattttt

SEQ ID NO: 167903 - DNA, 372 bp, Homo sapiens
ccgggaggcagaggttgcagtgagccgagatcgcaccattgtactccagcctggcaacagagcaagactccatctcaaaaaacaaaacaaaataaaacaaataaaaataaaaaaagaagaggaagagatctttctctctctctctttctgttatgtgaggtcacagtgagatggtggcatgtataagccaagaagactcctcaccagaacccagccatgctggcactctgaactcaggcttccagcctccaacactccgagaaataaatttctgctgtttaagccatccagtctgtgcaattggttatggcagctgaagcagagtaatatatatcatcttttaaattcttgctctgttatcacccccctttg

SEQ ID NO: 167904 - DNA, 352 bp, Homo sapiens
attcagctacgtaatgaaatatcagcatccttcaaagatttggggaggctgggcatgggggctcatgcctgtaatcctagtattttgggaggctaaggcaggcggatcacctgaactcatgagttcgagaccagcctgggcaacatagtaaaaccctatctctactaaaaatacaaaaagttagccagacatggtggcacgtgcctgtagtcccagctacttgggaaggccgaggcacaagaatcacttgaacccgggaggcggagaggttgcagtgagccagatcacgctactgtactccagcctgggcaacagagcaaactctgtctcaaaaaaaaaaaaaaaaaaaaaa

SEQ ID NO: 167905 - DNA, 277 bp, Homo sapiens
gctaagaggggaaagttcatagctctaaacacatacatcaaaaagactgaaagagcacaaactgacattccaaggtcacacctcaagggactagagacacaagaacaaactaaacccaaacccagcagaacaaaggaaataaccaagattagagcagaattaagtgaaattgaaacaaacaagcaagcaaacaaacaaaaaacccaaaagataaataaaacaaaaagctggttccttgaagggataaataaaattgatagaccattaacaagattaa

SEQ ID NO: 167906 - DNA, 291 bp, Homo sapiens
tggtccacaaaatctaaaatatatactgtttggctctttactgaagaaaaatttgccagcctctagttcagacattttagtgactgctattccatttattctctagttggtcagatgatgtttattattgatcatatgaagaattccaatttggagagtgttggtgttttccttttcttttacacttttctcagatttttgttataaaatgcttttgcattatatactgtagagatgataattatgataggttttattatggcatgttattaagattgttatatttgagta

SEQ ID NO: 167907 - DNA, 366 bp, Homo sapiens
aaaatattagctgagtgtggtggtgaatacctgtagtaccagctacttgggaggctgagatgggagaagagcttgagcccaggaggtcgaggctgtagtgatcaatgaccatgtcagtgcacttcagcctgggtgactaagaccctgtctcaaaaaaaaaaaaagtcaccctctaaacagtggaaattagtcttgcatgtcttggagactttgaggctgtgggccctgagaaagcacaggtggctggacagtgccacctccgttgttctctgtgattgcagaagccatcgaggccctcccgcttgccaacacgccagaagtgtttggtctccaccccaacgctgagattggctattacacgcaggc

SEQ ID NO: 167908 - DNA, 306 bp, Homo sapiens
attggctgagaaagaaagtggaaagaagagagcaaccaaaactctaaatttatagtggcctggtcacttctagctgaaaccatcccttcctactttgtagtcagagttcagttccctaacatgactatttctcacctccctctcttccttctcaaggtggataagagtatgaaaaacctgagtatcttcatggcagtgagggaaggggtggctggtctgggtggtgtcctctgctaggccttgccatggggtacctcatctggtctcacccaccttttagcatgaatgacacacattgctactgac

SEQ ID NO: 167909 - DNA, 335 bp, Homo sapiens
aagtacttccttaatttctggcaccataatatgttcaaggcttatcccaactatacgtactatttctaagacacgattctccaatctcttttgtacagcaagaaatttagaaccatattataggatgagaactattagaaactactactccaatacaggatcccggaatctctatcttagaggtgttttggaaaaaagccatcagacatggcaaaattatctatggaaaagcttgtactgaataactcctgtgaagatcacaaaacaaaaaacctcatagtgttatcaacagaagttactgagaagtttttcaacataaagattaacttaaaagc

SEQ ID NO: 167910 - DNA, 437 bp, Homo sapiens
taacatattcccctcaatgaacaagactgaatcaagaaatctcacctgcgtcagactttctaagtcatagagatttatagtaataattttaaatgagtctttgactttcagacccagcgtatgaaggaggagagtgtgagtcagtgccgttcctgggcgtccgctgggaacttccctgactgtccttctggctctcaggagtggagctcacttgctcaattcattccagtgtcccagaggtcacagtctcccctctgtgagctgggctgtcctcggtccctgggcctatctctttgctgtcctccctgggatcttgcccctggggtagccctgcttcccttgcagctttcttctctgctgctggtgccttccccagggctgtgcatgggcttagctctttcttcatttctctccctctctcctcttttcttcctgct

SEQ ID NO: 167911 - DNA, 397 bp, Homo sapiens
tagatgcagaaaaagcatttgataaaattcaatatcccttcataataaatactggcaacaaattaggcatagaaggaacatatttccacataacaaaggccatatatgacaaacccacagctaacattatactgaatggggagaagctgaatgcctttcttccaagaactggaacaaaacaaatatgctctctttcaccactcttattcaacacagtgctagaagttctgtctaaagcaatcaggcaagagaaagaaataaaggttttccgaattagaaaagaggaagtctaattgccccctctttgaagattacatgatcttatatctagaaaaatgtagagactccaccaaaaactctcagaactgatcaacacagtaaagttgcaagatacaaa

SEQ ID NO: 167912 - DNA, 128 bp, Homo sapiens
aaagaaaagaaaccgttaacgctgagtctgatatttcaaaccacttttccccctaaggcattcattgatttgaaggcagatttatggagctagggcaaaaaatacgggcattcagagacagccacaga

SEQ ID NO: 167913 - DNA, 426 bp, Homo sapiens
gcatttagggtggggttgtttttattttaactacatgtataggttgcttatatttcatttcaggatactaaacagaatatcacaaataatttggattaaaagtaggggagagggcactggaatgacacccctgtagcaataagcacacctggcactcatgaaaagaaaccaggctttcttggagaattggctgagtccagggcagggcaggaaaagtataagaaaagcctggaatgtcttgttgtggcagaagtaaaagggtgctcagaaaatgaccctgtctctactaaaaatacaaaaaaattagctgggtgtggtggcggacgcctgtaggaggctgaggcaggagaatcacttgaacccgggaggcagaggttgcagtgagccaagatcacgccgctgcactccagcctgggcaacaagagt

SEQ ID NO: 167914 - DNA, 493 bp, Homo sapiens
agatcatctgttttctattatacaaaacaagaattaatgaactcctgacataacatttatttcaatttgttttcatcttttaaaaagcactcattcccaatcttggttttccaatagtatagggaactaatgatacttaaagattacttcctacatcacctttttaaaaaataagaagtttttaggctgtgtacagtggctaatgcctgtaattctaacatgagagagatcaaagcaagcagattgttgagcctaggagtttgagaccagcctaggcaacatggcaaaaccctggctctacaaaaaatacaaaacttcagccgggcgcggtggctcatgcctgtaatcccagcgctttgggaggcagaggtgggcggatcaccagaggtcgggagtttgaggccagcctgggcaataaagcaagactcagtctaaaacaaaaaaagaaaatatgaattttgtgacaaagtaaatgtaacccaacatttaattt

SEQ ID NO: 167915 - DNA, 137 bp, Homo sapiens
tcccaatctcccatattctgtacttgaaccataccacattgcttatatggcaaactatattttccaaatgcctgctcttctagacccttgccaatattccatgaagagatggcacctgtggcatctcaccttgtcct

SEQ ID NO: 167916 - DNA, 398 bp, Homo sapiens
ttgctttgagtttgatggtattcctttccatgtggctaggaaaagtgagaccatgccttgtcatcttacaccaaagcccttgaataagaacagctcagattaagctagtctgatatattcttaagacctgaccatttggatcttgacctccatctgcagcacataataagtcttttcccagtttctaccttgaacagcctttattttagtttcataatttctgtacccaggacttcaccatttccctgtatttccattgttgcatattgaggttatgcagtctgaagctcctctgaactgtttttcagaatgcctttccttctgcttcggaccatcagagcttcctagtttcctctattcccttctctcaccttcacatttcttttgttcccctttcc

SEQ ID NO: 167917 - DNA, 331 bp, Homo sapiens
actgtggggctccctcccattaggctttgcacagtggcgaccagtggtcttactcccagaagccggggggccgagaatcagcccttgccctgcccagctatggatacagaggttttacaaatttgaatctctgtgctctaaattagagagtttaatctgaccttatgttaaggagcttgcctcgccagtagtcagctggtttttcaaataattcgatacctcattacccatgtaccaggggttaaacattacccttattaaattggctagtctactcacctggtcttcttgccttggtgcatggtggcactctagtttctcttggaacctg

SEQ ID NO: 167918 - DNA, 585 bp, Homo sapiens
gcacttggtacagtgctgggcacttacttgtcaggatttggtagatgctgaactgatttgaactctagcatcatcttgcttaaaattgtcattctttgcctacccttgccctgcccagctatggatacagaggttttacaaatttgaatctctgtgctctaaattagagagtttaatctgaccttatgttaaggagcttgcctcgccagtagtcagctggtttttcaaataattcgatacctcattacccatgtaccaggggttaaacattacccttattaaattggctagtctactcacctggtcttcttgccttggtgcatggtggcactctagtttctcttggaacctgagccaactctgaaccctcagccattttttgtcagtgcctcttttgagcttactggatcccaattccttttttgctttgagtttgatggtattcctttccatgtggctaggaaaagtgagaccatgccttgtcatcttacaccaaagcccttgaataagaacagctcagattaagctagtctgatatattcttaagacctgaccatttggatcttgacctccatctgcagcaca

SEQ ID NO: 167919 - DNA, 422 bp, Homo sapiens
aagttgtgcactactgtggttgactgtaatgcagtcctcagattggttcacttagggaaatactttcccaaccatgttctaggacagacttttgtaaagtgaattaaatgttcttttgactgccatttaaattcctatgtgtgtacataaaaatatacatatatatacacgccattttttaaagagatattgcctagactgggcctgaactcctgggttcaagcaatcttctggcctcagcctcccaagtagctgggactacaggcacatgccattgtgcctggtctatgcactttttattttggagtaattgaagactgaagactctcaagcagttgcaaaattagtacagaagaaaaaaaatagtgcagaggattttcacccagtttcccccaatggtaatgttgattgaacttcaccat

SEQ ID NO: 167920 - DNA, 587 bp, Homo sapiens
agaggtcagaggggaggataaagcatttgttcatattatagtacagaaataatatgaattgcaaatttttttaaacacttgcaaggcacaagagaaataaatcagtgcaaaacaggtcaaaacatacactacctgaaagcattttcagcagaaacaatgttttctacaagggcaaatagtgcacagaaaataaaactaaactaagagacactactattagaagcatcttatatggctggattttttttttttaaggaaaatctaaaacagtctatctaatcacttttttaacaagtccgtaaaaacgtaacagttaaattgacaggtagcaaaagtccaaaataatgaatttctattctgcattatggttggttactgtagagagcttgtaatgaaatctctcatatatgcctgctcacaatcttctgaataccttctgcacattttaatagttgcctctgttgtaagctccccattctaatcagtaaaattaaagggtttctgtttgggtcccctacacttttgtaagctgtctgtgctgtctgtgccccttaataaaacattttctgcttaagagtacctggtgt

SEQ ID NO: 167921 - DNA, 105 bp, Homo sapiens
gagaaaatccttgttcaagtactggttttgacttcacttaatcttgggcaagtcatccagtcttcctggatgtgctgaggtggttgcattattgcctttgtaatt

SEQ ID NO: 167922 - DNA, 412 bp, Homo sapiens
acaagcctgggcaacacaggaaaataaaaaaaattaaaaaattagccaggcattgtggcacatgcctgtagtcccagctacttgggagactgaggcaggaggatcacttgaccccaggagggcaacactgcagtgagctatgatggtcccactgcattccaacctgagatacagagtaagaccttgtcttaaaaaaaaaaaaaaaaaaaaaaaagcaattaaaatacacgagagtatggcattttgggggacttgaaagaaaaaggagtgtgtgtatatctgtgtgtgtgtgtcagcatttcatgaaaaaccacgtgatgaagtagcttagttgcattttggagtcttgcaatgcaaaaaaaaaacactatctttaaatagaattatgcttatattggctaatgctcaaact

SEQ ID NO: 167923 - DNA, 724 bp, Homo sapiens
gggcttgggggctgatcaaggaaatagatgcccacccagtgggagtagcacgcagtgagctttatttaggtgctgctttgaatggcaggcttgcatacaagggaagtccctcatagcataagccctttggaggctgaggttccaggagtcaccatcaagagggagaggccggcaagggaactccccgggcagagggggatcagagagggggcttacatgtctaggtgatgttgttcaacagcatgggcactcaatctctgggtcagagactccctgcagggtggtagcagcttagggtcttgaaatccacaaagttcatcttatccatggctcagagatggtgcagtttcacgagtctgcaaagcagacaggctctcagtggctaaaattttgcttacttggtctgtgtgtaaaacaaacggatgtgtaaaactttgagtttggtgctagcggtcttttaaaagagctagaccaggtgcggaggcactttgggaggccaaggtaggaggatcgcttgaggccaggagttcgagaccagcctgggcaacatggcaaaactccatcaatactaaaaatagaataattaactgggcgtaatggcacatgcctgtaattccagctacttgggaggctgaagttggaggatcacctgaacccaggaggcagaggttgcagtgagccgagatcaccccactgcactccagcctgggtgacacagtgagac

SEQ ID NO: 167924 - DNA, 456 bp, Homo sapiens
gtaaccatcctatagatcagtggaattataaagaaggaaaaataaattcacccatagtatatacaggaatcaatattatccacagtttggtactattaagcatccactaggggtcctggaacatatacactgtggataagcagggactactctacagtccctgataaacagacaagtatttactgaataagcaaaaaaaggaatgcacgttgttttcttatataaagagcagcacttctactagagataatgaacaatgatcttgttttcaaaataaaaaatgttttgacctgattctttacctattcctagttaggcaacagtggcttcaactgagttcccagacagttcctcttccttactttcccttactcataggagcccctgaatttagactgtttacagttctgtagtacatctacaactgtactgatctataggagtggttactagctt

SEQ ID NO: 167925 - DNA, 543 bp, Homo sapiens
gattacatgtgtatgtgtgctaacctataaatatgacccaaattttagttatggcttatttcatattctctcagctaattttcgatggtaattttatcttgtctgagtagtcatggagatagccttattttcaccatgtgtttaatgattaatatatatttctttttgtgagagaaacacttttgtgatttgaagttaatttccaaaaagatttataattctggattttttaaagtttttctctataaacattgttttaaaaacacataacataatatttaccatcttaaatttattgatgtgtatacttcagggccaggcatggttgtggctctcatctgtaatcccaagattttgggaggccaagacaggaggatccctggagcccaaaagtttgagaccagcctgggaaacatagggagacccctctctataaaaagaaaaaattaatgatagccgtgtatggtggtgtgaagctgtggtcccagctacatgggagattgaattgtgccactacactccagctcgggtgaccctgtctca

SEQ ID NO: 167926 - DNA, 112 bp, Homo sapiens
atgatgcatgccatgagccaaccttatttctaactcttcacagctccctgcttcaatcactttcttatcatctcactgaagcttagattcccctaatgagtaactttactca

SEQ ID NO: 167927 - DNA, 570 bp, Homo sapiens
gtaaacccatcatttcttaccttaaccccagcaccagtttctatctgagctattcctggaagcagatatgagatgataatctcattcaagcgaatatactttaagcatgatacgtacacctttgtggcattgtgccacaaaaatacggattaaaataattaccacctcccttctcacttcccaaaaccagcaaactgcccatttaacatcttttgagaaattctgagattgatttatttcctgtcttaattttagtcatgggagctcagtattttccaacatatctccttgcagaacctgctcactcttcattatcaaagtcatagatattccacgtaggcaagacttttcccctccataatatcctcattgaccaacatttggactttgaaaatgataacctatgtaaatacttagccattaaaatcatctgaactttttacaaagctaaaagttattatctttaagatccctccctaccctgagagagtacaccagaaagacagctggagattaaagcatgcagggatttaaagcagtggaggcctttgcttagtcacacaagaatta

SEQ ID NO: 167928 - DNA, 413 bp, Homo sapiens
agtattccattgaaaccaattatacctaaaaagtatattaagaagcattataaataatttgaaaaatgtaaatatttggtgatttaaaataagcctaccactaaaaagcatatttttagtttctaatgactactttccaagtttaactttttttttttttttttttttgagacggagtctcgctctgtcgccaggctggagtgcagtgtcacgatctcggctcactgcaacctccgcctcccgagttcaagcaattttcctgcctcagcctcccaagtagctgggattacaggcgcccgccactacgaagttttaactttttaagcttaccatttatgtcctcatatacctaatatgacaaggaaagacacataaagggaagtgtacaaaatatgcaatgattaatggtggtc

SEQ ID NO: 167929 - DNA, 654 bp, Homo sapiens
ggcctttgaggaatctgaccagcccaaggagaagtaccggaagatattgttctcaggaagtccttaagaattccgctggtcagagcaatggttctggttgagtggttttctgatctttagtattatcatcacctgggaccttgttaaacatgaacgttcttgccccctgctccagactgactgaatctgaaacactgagggtggcagcctgagatttagtttggcaagacccccaagtacacactgtagtttgagaaccactgctcatcagcaaagcttactatgaatgcaaagtttccttgaagtgtatgtcttacatatattgattgatgtcttatgtctccttaagttgtataaaaccaagttgtggggccaggtgctgtggctcatgcctgtaatcccagtactttgggaggccgagactggtggatcacctgaagtttggagtttgagactagcctggccaacgtggcaaaactctgcctctactaaaaatacaaaaattagccaggtgtagtggcaggcacctgtaatcccagctactcgggaggctgaggcagcagaatagcttgaacctgggaggtggaggctacagtgagctgagatcacaccattgctctccaacccaggtgacagagcaagactccatctcaa

SEQ ID NO: 167930 - DNA, 507 bp, Homo sapiens
atgaaaaagccttgagtgctggcaaaggaaacacataagtgttggttatggttagtgtcagaaggtgtccggtttagccgggaaagtgccagaagatgggtgaaggttggggttgtgagctgcgggcttgcaaggtaggagaggtgggttggtacagtcaggtaaagcaatggtatttggtgaaaggaggttctgctgcaaatccgggaggggatccgtgctctatggtaattaaatccaagtcaggagcaccagtcaagccagtcatgggcacacgatgcttgtctttcttgttctggaaatggtggaaaggcctccacgtgactcagggtagagacttacgtactcaagtgtgagatacagttactatagctgtttaaattgccccaaatccctttttagaacaaggcagagcataaataatagctggtttgtcttgctttttattattatattcatgggtttggttttgattcatggtggttgaactctgagtatgtttacata

SEQ ID NO: 167931 - DNA, 482 bp, Homo sapiens
attagtttcagctagtatgcaaactgtattctttgtgtgtggataaggcattagaggctgactgaggaaaacagctccaaacaggcaggaaacagacaaagcatctgtttgcattaacttcctcctacacatctcacctcacaggcatgaactcagaaggtggttcttctaggagctgagagtgtgtacgtggggggtgggggacactcttgtctgaattcagcttccgtcactgtgaatgaggaaattcttggtgacaacctcatgaaaggtactagaacagagtctcaggtcctgagagagctcagatggctgcggaaatttaactcagtatttcacctcaatacaacagaattctcatttgttctacttatgtgaaactaacatggatatgtaaagggcatctcaaccttaattatccacacagtctaagatgaattatttgactttatattccaacctatccctctttccttcctcta

SEQ ID NO: 167932 - DNA, 558 bp, Homo sapiens
ctgaataatccagaggctctatgaggaatcttcaggatatttttcaatagacagaagtaaaagagatgggaaaccagtattaatttataaacagttaggtgcccaacactgtgctaggtcttgccacatgtctcatctcatttaatcttctttaattaggatcaaggtccattttagcaatagtcaaagaacaggacttaggacacctagctcctgatacttaaaattacttaaagtgcattatggtgacacctcagataagtctaaacctctttctaccctgcctaatcaaatattcatttcaaaacactgtatgctgaaatgagccacgtgggagttgaagagaatcaactattcaggtggtgaaaatgtgtgaatgcagctggcagatgaagttccagtgtgatgaattcccagcttgtccttattgctttaggcaacaactgacaggcctgactggtcattggctttccattcctggcattgatatgactgaaaattcttaatgtcacagatccttaaaagctgtctctgttatcatagatgtaaatggtgctg

SEQ ID NO: 167933 - DNA, 1106 bp, Homo sapiens
ttcttaatagaaagccattcccactcagaccaaagttctaagacttctctaatgagtgagatgagaaacgcccagtctattggccgcagatgggagaaaccatctcctagtaatgtgactgaaaggaagaagcgtgggtcatcttgggaatcaaataatctttctgcagacactccctgtgcaacagttttagataaacaacacatttcaagtccagaattaaattgcaataatgagataaatggtcatactaatgaaacaaatactgaaatgcaaagaaataaacaggatcttcctggcttatcttctgagtctgccagagaacctaatgcagagtgcatgaatcaaattgaggataatgatgactttcaattgcagaaaactgtgtatgatgctgacatggatttaactgctagtgaagtcagcaaaattgtcacagtctcaacaggcattaaaaagaaaagtaataaaaaaacaaatgaacatggaatgaaaactttcagaaaagtgaaagattccagctctgaaaaaaagagagaaagatcaaagagacagtttaaaaatagttcagatgtcgatattggggaaaagattgaaaacaggacagaaagatctgatgtcctggatggcaaaaggggtgcagaagatcccggttttattttcaataatgaacagctggctcagatgaatgaacagctggctcaggtgaatgaactaaagaaaatgacccttcaaactggctttgaacaaggtgacagagaaaatgtactgtgtaataaaaaggagaaaagaataacaaatgagcaagaggaaacatactctttatcccaaagttcaggtaaatttcaccaggagagtaaatttgataagggtcagaattccctaacttgtaataaaagtaaagcttctagacagacatttgtgattcacaaattagaaaaagataacttactcccaaaccaaaaggataaagtaaccatttatgaaaacctagacgtcacaaatgaatttcacacagccaatctttccaccaaagataatggaaatttatgtgattatgggacccacaatatattggatttgaaaaagtatgtcactgatattca

SEQ ID NO: 167934 - DNA, 443 bp, Homo sapiens
aatagagtaagattgaccccaactgaccaagaaaatcaaatttctacagctcagtggagcaattcttttttccatataaagaaagcagctcaacattaaaatgggcaaatacttaaggaagaagaaggaggattgaaaaactccaatgctccttttaaaaagctccctagaagaatgtgtattgcaagctgctcacttgaaaactgacaaggttccgctgtttctcttttgtgtgggtggatagacaatagacaggcagagtcaggaaatttcaagtcggggctctggaattaatttattctcacatcaaagtcagtgtggttggggctcaaaatgaaacacttgaataaaaactgacagaaggcattgttccccctcctgcagtgacacagaggtttctaatccccatgagccttagaaattcctcccagcttctggcagcc

SEQ ID NO: 167935 - DNA, 205 bp, Homo sapiens
ttggctggatgaactacagaggctacaaaaaatattttgttatcctaccatgttctttgttccaacctcttaggtcttcctagaaacaaaggcatcagagtcaagaccataaaggagtgcatcttaagacaatgcatggtaccattttaccttcacaaaagtttgctctgtgctcaagaggcaatttatcatttagaaaaaaaca

SEQ ID NO: 167936 - DNA, 249 bp, Homo sapiens
tatttaaagagttcatcacatcagattcaaaccgacaacatctgcgctgcaagggctgctggaagagccaggcagaaccaaatggaaacctggatggaactgtggattctgcctcctgcaagactctgagaccagacctctatgaaggacagtaacaggttgctgctgccactgtgcccgtaatcaggtgtgtgccagcgcttcctgctgggcccaggccagggagaactcctgtgaatgaaaactgac

SEQ ID NO: 167937 - DNA, 231 bp, Homo sapiens
atttttataggtgatgagaaaacaagcttagaaagggaaaggaacttgcttgagttaatagcgttaagtgggacagttgaacctggaacagccttaccttcagagcctgagctcgtaactatcatgctttactgccacctgaagttgggatgatatacaagtaagtgcttagccattaataaatgttatttttattgttagataggttgggaccagatggaggtttgcaag

SEQ ID NO: 167938 - DNA, 1516 bp, Homo sapiens
tcattaatacaagtttttaaaaacagaaacattttagagtaattttaacacttttatcttgcccagaacataaaaaaatcttcattttcaatccttataactttgtgtgagggaaattaggcatcagggtgggaaacagaggtgacttttatttgtctaagtctaccaaattgctgaactagtaggtaaaactcccttcctcttaactgagctgactgatttttgctagatttttcttttcgtttcttcattttgtttcttccgtttcctgggatttcatgtgtgatttctttttctaaagcacaacctttggggtgtagttaagagacatttttccctgtgtccccaccaccccttccacacatgtgcaggtctcccctgagtgcccagacagcgcaggaccacgcagtccactccctctgcccctcagagattctgcctctctctcctgacctgtgccacattcttgtgtcaggaccccacctcccgctgcgttttcttcaacatatgagagtctagatgggcacagcatttagaggagctgccctattctggtgtcctggggagagagacgtgcttgtgaccccggctgtgcaggagccctgaacctttctgggagcaccagctgcgggggccatggtgggagctcacttgggtgattggctcattcaggtctcctccctccttgctgctgcctctggagggtctgctggccgggctggacatgagctctttgtagccagtgtggactggacccatttggccctaagtaactgaattgtgtaccagtcagcagtagggatgcataacaccagagcttcattgattcaaaggcaaagcaggtggcattttactgaacaattaaatgtttgaagtaaccttttatagagtgagaaagatgtctgtctagttttaagtctttctgaagagaaatgggctggaatgtttggttggttgcagctattcttgtgttctttttaaaatatctgaaattatacttagatatggggcaggctttattcctacccaagtagcagcgatcagcgatgctggtgctaacccctggtctttgtctgtttccctattgctgacctcaggcaccacactgtaactcgaggcatcaccaaaggcgtgaaggaggactttcgcctggccatggagcgccaggtctcccgctgtggagagaatctgatggtggttctgcacaggttctgcattaatgagaagatcttgctccttcagactctgacctgagtggagacctttccaccagacacagctcgggcctgtgtaattgtaggagaagacactcagcagtgattgccatggcacagagccgtggtcattgttgctgttacaaagaagaaaaccatctgagttctaactccttggttgcttaaaagtagttcccaagagtctgagaagctatttctatttttaagagtcattttttgtaatttttgtaaaacaaaagtaccaatctgttttgtaaataaaaatcatcctaaaatttgaa

SEQ ID NO: 167939 - DNA, 2785 bp, Homo sapiens
atggcgaagaggcctggcgcctgcccgctcccgcgcatgctccctgacttcaccaaggtcacgctgcagcccgcaggaatgaaaatccacttctccgcattttcgaggtgacctggaagcggttcaactgctctggcttctcagaagaggaggggaccgggcggtaacgaggagccaaggggaggagactgctcgcaaaacccggaaaagctttcccgatccactctgccagcctccgtgcgcctccagacatgcgcagtagcctcccccgcggtggcggcggcggcggcggtggctgccgtggcggctgagagtccagagccggacgttccggccgcttcgggctggcggctggagagcgctcgggtcatgtctgcccagggggactgcgagttcctggtgcagcgagcccgggagttggtgccgcaagacctgtgggcagccaaggcgtggctgatcacggcccgcagcctctacccggcagactttaacatccagtatgagatgtacaccatcgagcggaatgcagagcggaccgccaccgccgggaggctgctgtacgacatgtttgtgaatttcccagaccagccggtggtgtggagagaaatcagcattattacatcagcattaaggaacgattcacaggacaaacaaacccaatttttaagaagtttatttgaaactcttcctggtcgagtccagtgtgaaatgttactaaaggtcacggaacaatgcttcaacacgttagaacgatcagaaatgttgcttctacttttgaggcgcttccctgaaacggtggtgcagcatggggttggccttggggaggcactattagaggctgaaactattgaagaacaagaatctccagtgaactgctttagaaaattatttgtttgtgatgtccttcctctaataattaacaaccatgatgttcgattacctgccaatttattgtataagtacttgaacaaagcagctgaattttatatcaattatgtcactaggtctactcaaatagaaaatcagcatcaaggcgcccaggatacatctgatttaatgtcacctagcaaacgtagctctcagaagtacataatagaagggctgacggaaaaatcatcccagatcgtggacccttgggagaggttgtttaagattttgaatgttgttggaatgagatgtgaatggcagatggataaaggaagacgaagctatggagatattttgcatagaatgaaggatctctgcagatacatgaacaactttgatagtgaagcacatgcaaaatataaaaaccaagtggtgtattccaccatgctggtcttctttaagaatgcattccagtatgtcaacagcatacagccatctctcttccaaggtcctaatgccccgagccaagttccactggttcttcttgaagatgtatcgaatgtgtatggtgatgtagaaattgatcgtaataaacacatccataaaaagaggaaactagctgaaggaagagaaaaaaccatgagttcagacgatgaagactgttcggcgaaaggaagaaatcgtcacattgtagtcaataaagccgaacttgctaactccactgaagtgttagaaagctttaaattggccagggagagctgggagttgctctattccctagaattccttgacaaagaatttacaaggatttgcttggcctggaagacggatacttggctttggttaagaatcttcctcactgatatgatcatctatcagggtcaatataaaaaggcgatagccagcctgcatcacttagcagctctccagggatccatttctcagccacagatcacagggcaggggaccctggagcatcagagggcgctcatccagctggcgacgtgccactttgcgctaggggagtacagaatgacatgtgaaaaagtccttgatttgatgtgctacatggtactccccattcaagatggaggcaaatcccaggaggaaccctcgaaagtaaagcccaaatttagaaaaggttcggatctgaagctcctgccttgtaccagcaaggctatcatgccatactgcctccatttaatgttagcctgttttaagcttagagctttcacagacaacagagacgacatggcattggggcatgtgattgtgttgcttcagcaagagtggccacggggcgagaatcttttcctgaaagctgtcaataaaatttgccaacaaggaaatttccaatatgagaattttttcaattacgttacaaatattgatatgctggaggaatttgcctacttgagaactcaggaaggtgggaaaattcatctggaattactacccaatcaaggaatgctgatcaagcaccacactgtaactcgaggcatcaccaaaggcgtgaaggaggactttcgcctggccatggagcgccaggtctcccgctgtggagagaatctgatggtggttctgcacaggttctgcattaatgagaagatcttgctccttcagactctgacctgagtggagacctttccaccagacacagctcgggcctgtgtaattgtaggagaagacactcagcagtgattgccatggcacagagccgtggtcattgttgctgttacaaagaagaaaaccatctgagttctaactccttggttgcttaaaagtagttcccaagagtctgagaagctatttctatttttaagagtcattttttgtaatttttgtaaaacaaaagtaccaatctgttttgtaaataaaaatcatcctaaaatttgaagtttttaaaaaaaattcttat

SEQ ID NO: 167940 - DNA, 1541 bp, Homo sapiens
tcattaatacaagtttttaaaaacagaaacattttagagtaattttaacacttttatcttgcccagaacataaaaaaatcttcattttcaatccttataactttgtgtgagggaaattaggcatcagggtgggaaacagaggtgacttttatttgtctaagtctaccaaattgctgaactagtaggtaaaactcccttcctcttaactgagctgactgatttttgctagatttttcttttcgtttcttcattttgtttcttccgtttcctgggatttcatgtgtgatttctttttctaaagcacaacctttggggtgtagttaagagacatttttccctgtgtccccaccaccccttccacacatgtgcaggtctcccctgagtgcccagacagcgcaggaccacgcagtccactccctctgcccctcagagattctgcctctctctcctgacctgtgccacattcttgtgtcaggaccccacctcccgctgcgttttcttcaacatatgagagtctagatgggcacagcatttagaggagctgccctattctggtgtcctggggagagagacgtgcttgtgaccccggctgtgcaggagccctgaacctttctgggagcaccagctgcgggggccatggtgggagctcacttgggtgattggctcattcaggtctcctccctccttgctgctgcctctggagggtctgctggccgggctggacatgagctctttgtagccagtgtggactggacccatttggccctaagtaactgaattgtgtaccagtcagcagtagggatgcataacaccagagcttcattgattcaaaggcaaagcaggtggcattttactgaacaattaaatgtttgaagtaaccttttatagagtgagaaagatgtctgtctagttttaagtctttctgaagagaaatgggctggaatgtttggttggttgcagctattcttgtgttctttttaaaatatctgaaattatacttagatatggggcaggctttattcctacccaagtagcagcgatcagcgatgctggtgctaacccctggtctttgtctgtttccctattgctgacctcaggcaccacactgtaactcgaggcatcaccaaaggcgtgaaggaggactttcgcctggccatggagcgccaggtctcccgctgtggagagaatctgatggtggttctgcacaggttctgcattaatgagaagatcttgctccttcagactctgacctgagtggagacctttccaccagacacagctcgggcctgtgtaattgtaggagaagacactcagcagtgattgccatggcacagagccgtggtcattgttgctgttacaaagaagaaaaccatctgagttctaactccttggttgcttaaaagtagttcccaagagtctgagaagctatttctatttttaagagtcattttttgtaatttttgtaaaacaaaagtaccaatctgttttgtaaataaaaatcatcctaaaatttgaaaacatctgctcccttctctcctgct

SEQ ID NO: 167941 - DNA, 1137 bp, Homo sapiens
ccaacactgagggcacccggtgcttcactcaaaggagggagaagctcttaatctgttatacagaccttttgctcttaagtattttaaaatagagaaatgtttctgtgctgataaatgcagtatcttagttgtattagagtggattaaaatggaaaacaatgtcctacttatactctgaatagggtggataataatgttctatgaggtgatcaccagctaatacactaaatctttgttgttacagaattctgcacagccatgggtcccggactcttattttcccccatctgttctcaatacgtttttgaaattgaaactcacccttttttttaatcaaaaacattgccagaccatttagtcctcttggaagggcctctccggtggggcttcagtcctgttaaagatggttaccagacatcaccaggttgaatgctgggactggtgtaccgtgagaagagtggaaagtaaagaggctggctttgaaaatgtgtcttctcaaaggctgcccctactccctattgccattcagctgcattccatcatcctcttcctcactggtcgctttttataccacctcaaaagggggctgagctctgggaccaggaactgagacgcctctggacacgcaccagcagcagcgggtgcagtgagggctggctagcttctccccagtctccttaaacacccagccacggccaggggcttgttgaggttaatgagtttctgtttagtctgcttctagtcttgtgtattttctctggagtgttgtttttgcagtgcagggtgagtcggtgtgggtgtttgaatgctgctgtttgctgttttttaaaggccttctagccctcccatggggttactgcagcaggaattcttacctgtgcttcagcccagcatacagactgctgacaggtaccaagtggaatcaacgcccgctcatagtgtgctgtttgtcaacatgttcgctgcccatggttctcagctcttcgttcctcagtgctctttttcatgctttctttcttttttaatttgttccgcattttggcaaaccatctggttgtaatattgtaacatttcttattttttttccataagttgccagtgtgtttgtgttcgatttaaaaatcattatggatctgg

SEQ ID NO: 167942 - DNA, 494 bp, Homo sapiens
catctcatgccaagagttatctgtgcgagggagtttagtgggtataagaatcaggttttggcatcagacagatctgggttcaaatatggagtctgcagttagtggggtagcaatgggcaagttactcaactgccaagaccccatttccttatcagagagaactggcaccttttttagtgggatggcaatgggcaagttactcaactgccgagaccccatttcctcatcagagaaaactagcacctttttttacatgtggttaacctgaatctggcctgcagatattgatatgctggaggaatttgcctacttgagaactcaggaaggtgggaaaattcatctggaattactacccaatcaaggaatgctgatcaagtaagcatgttctcttttgctcttccatgctgagtgctcaccttttgtgtctttgtatgaagtatttgtaaatgtctatacctatcaaaaatttaatacaaaggactttaaacctggac

SEQ ID NO: 167943 - DNA, 2764 bp, Homo sapiens
atggcgaagaggcctggcgcctgcccgctcccgcgcatgctccctgacttcaccaaggtcacgctgcagcccgcaggaatgaaaatccacttctccgcattttcgaggtgacctggaagcggttcaactgctctggcttctcagaagaggaggggaccgggcggtaacgaggagccaaggggaggagactgctcgcaaaacccggaaaagctttcccgatccactctgccagcctccgtgcgcctccagacatgcgcagtagcctcccccgcggtggcggcggcggcggcggtggctgccgtggcggctgagagtccagagccggacgttccggccgcttcgggctggcggctggagagcgctcgggtcatgtctgcccagggggactgcgagttcctggtgcagcgagcccgggagttggtgccgcaagacctgtgggcagccaaggcgtggctgatcacggcccgcagcctctacccggcagactttaacatccagtatgagatgtacaccatcgagcggaatgcagagcggaccgccaccgccgggaggctgctgtacgacatgtttgtgaatttcccagaccagccggtggtgtggagagaaatcagcattattacatcagcattaaggaacgattcacaggacaaacaaacccaatttttaagaagtttatttgaaactcttcctggtcgagtccagtgtgaaatgttactaaaggtcacggaacaatgcttcaacacgttagaacgatcagaaatgttgcttctacttttgaggcgcttccctgaaacggtggtgcagcatggggttggccttggggaggcactattagaggctgaaactattgaagaacaagaatctccagtgaactgctttagaaaattatttgtttgtgatgtccttcctctaataattaacaaccatgatgttcgattacctgccaatttattgtataagtacttgaacaaagcagctgaattttatatcaattatgtcactaggtctactcaaatagaaaatcagcatcaaggcgcccaggatacatctgatttaatgtcacctagcaaacgtagctctcagaagtacataatagaagggctgacggaaaaatcatcccagatcgtggacccttgggagaggttgtttaagattttgaatgttgttggaatgagatgtgaatggcagatggataaaggaagacgaagctatggagatattttgcatagaatgaaggatctctgcagatacatgaacaactttgatagtgaagcacatgcaaaatataaaaaccaagtggtgtattccaccatgctggtcttctttaagaatgcattccagtatgtcaacagcatacagccatctctcttccaaggtcctaatgccccgagccaagttccactggttcttcttgaagatgtatcgaatgtgtatggtgatgtagaaattgatcgtaataaacacatccataaaaagaggaaactagctgaaggaagagaaaaaaccatgagttcagacgatgaagactgttcggcgaaaggaagaaatcgtcacattgtagtcaataaagccgaacttgctaactccactgaagtgttagaaagctttaaattggccagggagagctgggagttgctctattccctagaattccttgacaaagaatttacaaggatttgcttggcctggaagacggatacttggctttggttaagaatcttcctcactgatatgatcatctatcagggtcaatataaaaaggcgatagccagcctgcatcacttagcagctctccagggatccatttctcagccacagatcacagggcaggggaccctggagcatcagagggcgctcatccagctggcgacgtgccactttgcgctaggggagtacagaatgacatgtgaaaaagtccttgatttgatgtgctacatggtactccccattcaagatggaggcaaatcccaggaggaaccctcgaaagtaaagcccaaatttagaaaaggttcggatctgaagctcctgccttgtaccagcaaggctatcatgccatactgcctccatttaatgttagcctgttttaagcttagagctttcacagacaacagagacgacatggcattggggcatgtgattgtgttgcttcagcaagagtggccacggggcgagaatcttttcctgaaagctgtcaataaaatttgccaacaaggaaatttccaatatgagaattttttcaattacgttacaaatattgatatgctggaggaatttgcctacttgagaactcaggaaggtgggaaaattcatctggaattactacccaatcaaggaatgctgatcaagcaccacactgtaactcgaggcatcaccaaaggcgtgaaggaggactttcgcctggccatggagcgccaggtctcccgctgtggagagaatctgatggtggttctgcacaggttctgcattaatgagaagatcttgctccttcagactctgacctgagtggagacctttccaccagacacagctcgggcctgtgtaattgtaggagaagacactcagcagtgattgccatggcacagagccgtggtcattgttgctgttacaaagaagaaaaccatctgagttctaactccttggttgcttaaaagtagttcccaagagtctgagaagctatttctatttttaagagtcattttttgtaatttttgtaaaacaaaagtaccaatctgttttgtaaataaaaatcatcctaaaatttgaa

SEQ ID NO: 167944 - DNA, 1844 bp, Homo sapiens
attagctagtacgaggctgggtgttgaatcggccgaggaagtcttgaacaaagcagctgaattttatatcaattatgtcactaggtctactcaaatagaaaatcagcatcaaggcgcccaggatacatctgatttaatgtcacctagcaaacgtagctctcagaagtacataatagaagggctgacggaaaaatcatcccagatcgtggacccttgggagaggttgtttaagattttgaatgttgttggaatgagatgtgaatggcagatggataaaggaagacgaagctatggagatattttgcatagaatgaaggatctctgcagatacatgaacaactttgatagtgaagcacatgcaaaatataaaaaccaagtggtgtattccaccatgctggtcttctttaagaatgcattccagtatgtcaacagcatacagccatctctcttccaaggtcctaatgccccgagccaagttccactggttcttcttgaagatgtatcgaatgtgtatggtgatgtagaaattgatcgtaataaacacatccataaaaagaggaaactagctgaaggaagagaaaaaaccatgagttcagacgatgaagactgttcggcgaaaggaagaaatcgtcacattgtagtcaataaagccgaacttgctaactccactgaagtgttagaaagctttaaattggccagggagagctgggagttgctctattccctagaattccttgacaaagaatttacaaggatttgcttggcctggaagacggatacttggctttggttaagaatcttcctcactgatatgatcatctatcagggtcaatataaaaaggcgatagccagcctgcatcacttagcagctctccagggatccatttctcagccacagatcacagggcaggggaccctggagcatcagagggcgctcatccagctggcgacgtgccactttgcgctaggggagtacagaatgacatgtgaaaaagtccttgatttgatgtgctacatggtactccccattcaagatggaggcaaatcccaggaggaaccctcgaaagtaaagcccaaatttagaaaaggttcggatctgaagctcctgccttgtaccagcaaggctatcatgccatactgcctccatttaatgttagcctgttttaagcttagagctttcacagacaacagagacgacatggcattggggcatgtgattgtgttgcttcagcaagagtggccacggggcgagaatcttttcctgaaagctgtcaataaaatttgccaacaaggaaatttccaatatgagaattttttcaattacgttacaaatattgatatgctggaggaatttgcctacttgagaactcaggaaggtgggaaaattcatctggaattactacccaatcaaggaatgctgatcaagcaccacactgtaactcgaggcatcaccaaaggcgtgaaggaggactttcgcctggccatggagcgccaggtctcccgctgtggagagaatctgatggtggttctgcacaggttctgcattaatgagaagatcttgctccttcagactctgacctgagtggagacctttccaccagacacagctcgggcctgtgtaattgtaggagaagacactcagcagtgattgccatggcacagagccgtggtcattgttgctgttacaaagaagaaaaccatctgagttctaactccttggttgcttaaaagtagttcccaagagtctgagaagctatttctatttttaagagtcattttttgtaatttttgtaaaacaaaagtaccaatctgttttgtaaataaaaatcatcctaaaatttgaa

SEQ ID NO: 167945 - DNA, 2630 bp, Homo sapiens
atggcgaagaggcctggcgcctgcccgctcccgcgcatgctccctgacttcaccaaggtcacgctgcagcccgcaggaatgaaaatccacttctccgcattttcgaggtgacctggaagcggttcaactgctctggcttctcagaagaggaggggaccgggcggtaacgaggagccaaggggaggagactgctcgcaaaacccggaaaagctttcccgatccactctgccagcctccgtgcgcctccagacatgcgcagtagcctcccccgcggtggcggcggcggcggcggtggctgccgtggcggctgagagtccagagccggacgttccggccgcttcgggctggcggctggagagcgctcgggtcatgtctgcccagggggactgcgagttcctggtgcagcgagcccgggagttggtgccgcaagacctgtgggcagccaaggcgtggctgatcacggcccgcagcctctacccggcagactttaacatccagtatgagatgtacaccatcgagcggaatgcagagcggaccgccaccgccgggaggctgctgtacgacatgtttgtgaatttcccagaccagccggtggtgtggagagaaatcagcattattacatcagcattaaggaacgattcacaggacaaacaaacccaatttttaagaagtttatttgaaactcttcctggtcgagtccagtgtgaaatgttactaaaggtcacggaacaatgcttcaacacgttagaacgatcagaaatgttgcttctacttttgaggcgcttccctgaaacggtggtgcagcatggggttggccttggggaggcactattagaggctgaaactattgaagaacaagaatctccagtgaactgctttagaaaattatttgtttgtgatgtccttcctctaataattaacaaccatgatgttcgattacctgccaatttattgtataagtacttgaacaaagcagctgaattttatatcaattatgtcactaggtctactcaaatagaaaatcagcatcaaggcgcccaggatacatctgatttaatgtcacctagcaaacgtagctctcagaagtacataatagaagggctgacggaaaaatcatcccagatcgtggacccttgggagaggttgtttaagattttgaatgttgttggaatgagatgtgaatggcagatggataaaggaagacgaagctatggagatattttgcatagaatgaaggatctctgcagatacatgaacaactttgatagtgaagcacatgcaaaatataaaaaccaagtggtgtattccaccatgctggtcttctttaagaatgcattccagtatgtcaacagcatacagccatctctcttccaagagttcagacgatgaagactgttcggcgaaaggaagaaatcgtcacattgtagtcaataaagccgaacttgctaactccactgaagtgttagaaagctttaaattggccagggagagctgggagttgctctattccctagaattccttgacaaagaatttacaaggatttgcttggcctggaagacggatacttggctttggttaagaatcttcctcactgatatgatcatctatcagggtcaatataaaaaggcgatagccagcctgcatcacttagcagctctccagggatccatttctcagccacagatcacagggcaggggaccctggagcatcagagggcgctcatccagctggcgacgtgccactttgcgctaggggagtacagaatgacatgtgaaaaagtccttgatttgatgtgctacatggtactccccattcaagatggaggcaaatcccaggaggaaccctcgaaagtaaagcccaaatttagaaaaggttcggatctgaagctcctgccttgtaccagcaaggctatcatgccatactgcctccatttaatgttagcctgttttaagcttagagctttcacagacaacagagacgacatggcattggggcatgtgattgtgttgcttcagcaagagtggccacggggcgagaatcttttcctgaaagctgtcaataaaatttgccaacaaggaaatttccaatatgagaattttttcaattacgttacaaatattgatatgctggaggaatttgcctacttgagaactcaggaaggtgggaaaattcatctggaattactacccaatcaaggaatgctgatcaagcaccacactgtaactcgaggcatcaccaaaggcgtgaaggaggactttcgcctggccatggagcgccaggtctcccgctgtggagagaatctgatggtggttctgcacaggttctgcattaatgagaagatcttgctccttcagactctgacctgagtggagacctttccaccagacacagctcgggcctgtgtaattgtaggagaagacactcagcagtgattgccatggcacagagccgtggtcattgttgctgttacaaagaagaaaaccatctgagttctaactccttggttgcttaaaagtagttcccaagagtctgagaagctatttctatttttaagagtcattttttgtaatttttgtaaaacaaaagtaccaatctgttttgtaaataaaaatcatcctaaaatttgaa

SEQ ID NO: 167946 - DNA, 2789 bp, Homo sapiens
atggcgaagaggcctggcgcctgcccgctcccgcgcatgctccctgacttcaccaaggtcacgctgcagcccgcaggaatgaaaatccacttctccgcattttcgaggtgacctggaagcggttcaactgctctggcttctcagaagaggaggggaccgggcggtaacgaggagccaaggggaggagactgctcgcaaaacccggaaaagctttcccgatccactctgccagcctccgtgcgcctccagacatgcgcagtagcctcccccgcggtggcggcggcggcggcggtggctgccgtggcggctgagagtccagagccggacgttccggccgcttcgggctggcggctggagagcgctcgggtcatgtctgcccagggggactgcgagttcctggtgcagcgagcccgggagttggtgccgcaagacctgtgggcagccaaggcgtggctgatcacggcccgcagcctctacccggcagactttaacatccagtatgagatgtacaccatcgagcggaatgcagagcggaccgccaccgccgggaggctgctgtacgacatgtttgtgaatttcccagaccagccggtggtgtggagagaaatcagcattattacatcagcattaaggaacgattcacaggacaaacaaacccaatttttaagaagtttatttgaaactcttcctggtcgagtccagtgtgaaatgttactaaaggtcacggaacaatgcttcaacacgttagaacgatcagaaatgttgcttctacttttgaggcgcttccctgaaacggtggtgcagcatggggttggccttggggaggcactattagaggctgaaactattgaagaacaagaatctccagtgaactgctttagaaaattatttgtttgtgatgtccttcctctaataattaacaaccatgatgttcgattacctgccaatttattgtataagtacttgaacaaagcagctgaattttatatcaattatgtcactaggtctactcaaatagaaaatcagcatcaaggcgcccaggatacatctgatttaatgtcacctagcaaacgtagctctcagaagtacataatagaagggctgacggaaaaatcatcccagatcgtggacccttgggagaggttgtttaagattttgaatgttgttggaatgagatgtgaatggcagatggataaaggaagacgaagctatggagatattttgcatagaatgaaggatctctgcagatacatgaacaactttgatagtgaagcacatgcaaaatataaaaaccaagtggtgtattccaccatgctggtcttctttaagaatgcattccagtatgtcaacagcatacagccatctctcttccaaggtcctaatgccccgagccaagttccactggttcttcttgaagatgtatcgaatgtgtatggtgatgtagaaattgatcgtaataaacacatccataaaaagaggaaactagctgaaggaagagaaaaaaccatgagttcagacgatgaagactgttcggcgaaaggaagaaatcgtcacattgtagtcaataaagccgaacttgctaactccactgaagtgttagaaagctttaaattggccagggagagctgggagttgctctattccctagaattccttgacaaagaatttacaaggatttgcttggcctggaagacggatacttggctttggttaagaatcttcctcactgatatgatcatctatcagggtcaatataaaaaggcgatagccagcctgcatcacttagcagctctccagggatccatttctcagccacagatcacagggcaggggaccctggagcatcagagggcgctcatccagctggcgacgtgccactttgcgctaggggagtacagaatgacatgtgaaaaagtccttgatttgatgtgctacatggtactccccattcaagatggaggcaaatcccaggaggaaccctcgaaagtaaagcccaaatttagaaaaggttcggatctgaagctcctgccttgtaccagcaaggctatcatgccatactgcctccatttaatgttagcctgttttaagcttagagctttcacagacaacagagacgacatggcattggggcatgtgattgtgttgcttcagcaagagtggccacggggcgagaatcttttcctgaaagctgtcaataaaatttgccaacaaggaaatttccaatatgagaattttttcaattacgttacaaatattgatatgctggaggaatttgcctacttgagaactcaggaaggtgggaaaattcatctggaattactacccaatcaaggaatgctgatcaagcaccacactgtaactcgaggcatcaccaaaggcgtgaaggaggactttcgcctggccatggagcgccaggtctcccgctgtggagagaatctgatggtggttctgcacaggttctgcattaatgagaagatcttgctccttcagactctgacctgagtggagacctttccaccagacacagctcgggcctgtgtaattgtaggagaagacactcagcagtgattgccatggcacagagccgtggtcattgttgctgttacaaagaagaaaaccatctgagttctaactccttggttgcttaaaagtagttcccaagagtctgagaagctatttctatttttaagagtcattttttgtaatttttgtaaaacaaaagtaccaatctgttttgtaaataaaaatcatcctaaaatttgaaaacatctgctcccttctctcctgct

SEQ ID NO: 167947 - DNA, 2216 bp, Homo sapiens
atggcgaagaggcctggcgcctgcccgctcccgcgcatgctccctgacttcaccaaggtcacgctgcagcccgcaggaatgaaaatccacttctccgcattttcgaggtgacctggaagcggttcaactgctctggcttctcagaagaggaggggaccgggcggtaacgaggagccaaggggaggagactgctcgcaaaacccggaaaagctttcccgatccactctgccagcctccgtgcgcctccagacatgcgcagtagcctcccccgcggtggcggcggcggcggcggtggctgccgtggcggctgagagtccagagccggacgttccggccgcttcgggctggcggctggagagcgctcgggtcatgtctgcccagggggactgcgagttcctggtgcagcgagcccgggagttggtgccgcaagacctgtgggcagccaaggcgtggctgatcacggcccgcagcctctacccggcagactttaacatccagtatgagatgtacaccatcgagcggaatgcagagcggaccgccaccgccgggaggctgctgtacgacatgtttgtgaatttcccagaccagccggtggtgtggagagaaatcagcattattacatcagcattaaggaacgattcacaggacaaacaaacccaatttttaagaagtttatttgaaactcttcctggtcgagtccagtgtgaaatgttactaaaggtcacggaacaatgcttcaacacgttagaacgatcagaaatgttgcttctacttttgaggcgcttccctgaaacggtggtgcagcatggggttggccttggggaggcactattagaggctgaaactattgaagaacaagaatctccagtgaactgctttagaaaattatttgtttgtgatgtccttcctctaataattaacaaccatgatgttcgattacctgccaatttattgtataagtacttgaacaaagcagctgaattttatatcaattatgtcactaggtctactcaaatagaaaatcagcatcaaggcgcccaggatacatctgatttaatgtcacctagcaaacgtagctctcagaagtacataatagaagggctgacggaaaaatcatcccagatcgtggacccttgggagaggttgtttaagattttgaatgttgttggaatgagatgtgaatggcagatggataaaggaagacgaagctatggagatattttgcatagaatgaaggatctctgcagatacatgaacaactttgatagtgaagcacatgcaaaatataaaaaccaagtggtgtattccaccatgctggtcttctttaagaatgcattccagtatgtcaacagcatacagccatctctcttccaaggtcctaatgccccgagccaagttccactggttcttcttgaagatgtatcgaatgtgtatggtgatgtagaaattgatcgtaataaacacatccataaaaagaggaaactagctgaaggaagagaaaaaaccatgagttcagacgatgaagactgttcggcgaaaggaagaaatcgtcacattgtagtcaataaagccgaacttgctaactccactgaagtgttagaaagctttaaattggccagggagagctgggagttgctctattccctagaattccttgacaaagaatttacaaggatttgcttggcctggaagacggatacttggctttggttaagaatcttcctcactgatatgatcatctatcagggtcaatataaaaaggcgatagccagcctgcatcacttagcagctctccagggatccatttctcagccacagatcacagggcaggggaccctggagcatcagagggcgctcatccagctggcgacgtgccactttgcgctaggggagtacagaatgacatgtgaaaaagtccttgatttgatgtgctacatggtactccccattcaagatggaggcaaatcccaggaggaaccctcgaaagtaaagcccaaatttagaaaaggttcggatctgaagctcctgccttgtaccagcaaggctatcatgccatactgcctccatttaatgttagcctgttttaagcttagagctttcacagacaacagagacgacatggcattggggcatgtgattgtgttgcttcagcaagagtggccacggggcgagaatcttttcctgaaagctgtcaataaaatttgccaacaaggaaa

SEQ ID NO: 167948 - DNA, 2450 bp, Homo sapiens
atggcgaagaggcctggcgcctgcccgctcccgcgcatgctccctgacttcaccaaggtcacgctgcagcccgcaggaatgaaaatccacttctccgcattttcgaggtgacctggaagcggttcaactgctctggcttctcagaagaggaggggaccgggcggtaacgaggagccaaggggaggagactgctcgcaaaacccggaaaagctttcccgatccactctgccagcctccgtgcgcctccagacatgcgcagtagcctcccccgcggtggcggcggcggcggcggtggctgccgtggcggctgagagtccagagccggacgttccggccgcttcgggctggcggctggagagcgctcgggtcatgtctgcccagggggactgcgagttcctggtgcagcgagcccgggagttggtgccgcaagacctgtgggcagccaaggcgtggctgatcacggcccgcagcctctacccggcagactttaacatccagtatgagatgtacaccatcgagcggaatgcagagcggaccgccaccgccgggaggctgctgtacgacatgtttgtgaatttcccagaccagccggtggtgtggagagaaatcagcattattacatcagcattaaggaacgattcacaggacaaacaaacccaatttttaagaagtttatttgaaactcttcctggtcgagtccagtgtgaaatgttactaaaggtcacggaacaatgcttcaacacgttagaacgatcagaaatgttgcttctacttttgaggcgcttccctgaaacggtggtgcagcatggggttggccttggggaggcactattagaggctgaaactattgaagaacaagaatctccagtgaactgctttagaaaattatttgtttgtgatgtccttcctctaataattaacaaccatgatgttcgattacctgccaatttattgtataagtacttgaacaaagcagctgaattttatatcaattatgtcactaggtctactcaaatagaaaatcagcatcaaggcgcccaggatacatctgatttaatgtcacctagcaaacgtagctctcagaagtacataatagaagggctgacggaaaaatcatcccagatcgtggacccttgggagaggttgtttaagattttgaatgttgttggaatgagatgtgaatggcagatggataaaggaagacgaagctatggagatattttgcatagaatgaaggatctctgcagatacatgaacaactttgatagtgaagcacatgcaaaatataaaaaccaagtggtgtattccaccatgctggtcttctttaagaatgcattccagtatgtcaacagcatacagccatctctcttccaaggtcctaatgccccgagccaagttccactggttcttcttgaagatgtatcgaatgtgtatggtgatgtagaaattgatcgtaataaacacatccataaaaagaggaaactagctgaaggaagagaaaaaaccatgagttcagacgatgaagactgttcggcgaaaggaagaaatcgtcacattgtagtcaataaagccgaacttgctaactccactgaagtgttagaaagctttaaattggccagggagagctgggagttgctctattccctagaattccttgacaaagaatttacaaggatttgcttggcctggaagacggatacttggctttggttaagaatcttcctcactgatatgatcatctatcagggtcaatataaaaaggcgatagccagcctgcatcacttagcagctctccagggatccatttctcagccacagatcacagggcaggggaccctggagcatcagagggcgctcatccagctggcgacgtgccactttgcgctaggggagtacagaatgacatgtgaaaaagtccttgatttgatgtgctacatggtactccccattcaagatggaggcaaatcccaggaggaaccctcgaaagtaaagcccaaatttagaaaaggttcggatctgaagctcctgccttgtaccagcaaggctatcatgccatactgcctccatttaatgttagcctgttttaagcttagagctttcacagacaacagagacgacatggcattggggcatgtgattgtgttgcttcagcaagagtggccacggggcgagaatcttttcctgaaagctgtcaataaaatttgccaacaaggaaaaaaaaaaaaaaaaaaaaaaaaacaacaacaacaaacaaaaacgaaaacatacaaacaaaacccccggggcgcttcatattgtgcgggggcggcagaagacacagcgggataaaaaggggggcacagggcaaacaaggtgttttcgagaccccacgttttgttggacacggggggaaaaacggggcgcccccaataaaggaggcggcgaaataagcgcaaaagccgcgaccccaa

SEQ ID NO: 167949 - DNA, 1328 bp, Homo sapiens
ccaacactgagggcacccggtgcttcactcaaaggagggagaagctcttaatctgttatacagaccttttgctcttaagtattttaaaatagagaaatgtttctgtgctgataaatgcagtatcttagttgtattagagtggattaaaatggaaaacaatgtcctacttatactctgaatagggtggataataatgttctatgaggtgatcaccagctaatacactaaatctttgttgttacagaattctgcacagccatgggtcccggactcttattttcccccatctgttctcaatacgtttttgaaattgaaactcacccttttttttaatcaaaaacattgccagaccatttagtcctcttggaagggcctctccggtggggcttcagtcctgttaaagatggttaccagacatcaccaggttgaatgctgggactggtgtaccgtgagaagagtggaaagtaaagaggctggctttgaaaatgtgtcttctcaaaggctgcccctactccctattgccattcagctgcattccatcatcctcttcctcactggtcgctttttataccacctcaaaagggggctgagctctgggaccaggaactgagacgcctctggacacgcaccagcagcagcgggtgcagtgagggctggctagcttctccccagtctccttaaacacccagccacggccaggggcttgttgaggttaatgagtttctgtttagtctgcttctagtcttgtgtattttctctggagtgttgtttttgcagtgcagggtgagtcggtgtgggtgtttgaatgctgctgtttgctgttttttaaaggccttctagccctcccatggggttactgcagcaggaattcttacctgtgcttcagcccagcatacagactgctgacaggcaccacactgtaactcgaggcatcaccaaaggcgtgaaggaggactttcgcctggccatggagcgccaggtctcccgctgtggagagaatctgatggtggttctgcacaggttctgcattaatgagaagatcttgctccttcagactctgacctgagtggagacctttccaccagacacagctcgggcctgtgtaattgtaggagaagacactcagcagtgattgccatggcacagagccgtggtcattgttgctgttacaaagaagaaaaccatctgagttctaactccttggttgcttaaaagtagttcccaagagtctgagaagctatttctatttttaagagtcattttttgtaatttttgtaaaacaaaagtaccaatctgttttgtaaataaaaatcatcctaaaatttgaa

SEQ ID NO: 167950 - DNA, 1232 bp, Homo sapiens
atggcgaagaggcctggcgcctgcccgctcccgcgcatgctccctgacttcaccaaggtcacgctgcagcccgcaggaatgaaaatccacttctccgcattttcgaggtgacctggaagcggttcaactgctctggcttctcagaagaggaggggaccgggcggtaacgaggagccaaggggaggagactgctcgcaaaacccggaaaagctttcccgatccactctgccagcctccgtgcgcctccagacatgcgcagtagcctcccccgcggtggcggcggcggcggcggtggctgccgtggcggctgagagtccagagccggacgttccggccgcttcgggctggcggctggagagcgctcgggtcatgtctgcccagggggactgcgagttcctggtgcagcgagcccgggagttggtgccgcaagacctgtgggcagccaaggcgtggctgatcacggcccgcagcctctacccggcagactttaacatccagtatgagatgtacaccatcgagcggaatgcagagcggaccgccaccgccgggaggctgctgtacgacatgtttgtgaatttcccagaccagccggtggtgtggagagaaatcagcattattacatcagcattaaggaacgattcacaggacaaacaaacccaatttttaagaagtttatttgaaactcttcctggtcgagtccagtgtgaaatgttactaaaggtcacggaacaatgcttcaacacgttagaacgatcagaaatgttgcttctacttttgaggcgcttccctgaaacggtggtgcagcatggggttggccttggggaggcactattagaggctgaaactattgaagaacaagaatctccagtgaactgctttagaaaattatttgtttgtgatgtccttcctctaataattaacaaccatgatgttcgattacctgccaatttattgtataagtacttgaacaaagcagctgaattttatatcaattatgtcactaggtctactcaaatagaaaatcagcatcaaggcgcccaggatacatctgatttaatgtcacctagcaaacgtagctctcagaagtacataatagaagggctgacggaaaaatcatcccagatcgtggacccttgggagaggttgtttaagattttgaatgttgttggaatgagatgtgaatggcagatggataaaggaagacggtaataaatagcttatttccagaattg

SEQ ID NO: 167951 - DNA, 305 bp, Homo sapiens
aagctatggagatattttgcatagaatgaaggatctctgcagatacatgaacaactttgatagtgaagcacatgcaaaatataaaaaccaagtggtgtattccaccatgctggtcttctttaagaatgcattccagtatgtcaacagcatacagccatctctcttccaaggttggtttacaaattttagagtgtccaaaaagccagttcatactgtggggatggtaaggaagatgaaagtgtttatccagtattgctggatccgaataactgtggggcggtaccagtcctttttatagttggcga

SEQ ID NO: 167952 - DNA, 1611 bp, Homo sapiens
atggcgaagaggcctggcgcctgcccgctcccgcgcatgctccctgacttcaccaaggtcacgctgcagcccgcaggaatgaaaatccacttctccgcattttcgaggtgacctggaagcggttcaactgctctggcttctcagaagaggaggggaccgggcggtaacgaggagccaaggggaggagactgctcgcaaaacccggaaaagctttcccgatccactctgccagcctccgtgcgcctccagacatgcgcagtagcctcccccgcggtggcggcggcggcggcggtggctgccgtggcggctgagagtccagagccggacgttccggccgcttcgggctggcggctggagagcgctcgggtcatgtctgcccagggggactgcgagttcctggtgcagcgagcccgggagttggtgccgcaagacctgtgggcagccaaggcgtggctgatcacggcccgcagcctctacccggcagactttaacatccagtatgagatgtacaccatcgagcggaatgcagagcggaccgccaccgccgggaggctgctgtacgacatgtgagtgggacgcttgacatcacttttactgcactgaatctctccatgaggttttgtttctctctgcagaagtgggagttgggggaagatcttcaagttcatctatatcttcgatacctaaagcaaacctagtaaggagtccaggcctgccataaattgctgacatggcttttgcagaagagtttaattattattcttatgttttatccttgttaaaacttctgtttcataatttattctagaaataatatgtgctcattacaaaaattcaaacactacttgttatagagaacaaaaagtgaaagtgcatcctaaactgaaccagagttaagttttgtaggcagtatatctatacatgtatgcataatacataaataaggttttggggggaaggggttacaaaagtgagaagaccatactacctttgccctgcagcatgtttcctttactcactctcatggaccccttcccatatcagtatgtagagatccacttcattccttttcatgcctgtgtagtatttcgtagacactctcttcttggtagacatttaaatagatagttttaaattatttgaaattatattcagtgtgtcaacaattttgtagtcatattttggtgtttttctgtggaatagattctaagacattttcatagtcaaagtttatgcgcatttgaaaatttgatacgctatgaaattactctccaaaatgtgcgatcccagtctacattaccgccaatggtgtataaagagtgtgttttcccatacccttcccaacactggatattattagtctctttttagttcttgtcactgtgataggagaaaatggtatcttgctattttaaaaaaaaatttgtactactcatactgttaataagattcagtattgtttcaactgttctctttggctgtgtgtattctgtgatttgcctttgcctattttttctttcaaatagtttgttttattcttgttgacttttagaagctctttctatgttatggttacttgtcttttcacctataaaacccactaaagactta

SEQ ID NO: 167953 - DNA, 2594 bp, Homo sapiens
atggcgaagaggcctggcgcctgcccgctcccgcgcatgctccctgacttcaccaaggtcacgctgcagcccgcaggaatgaaaatccacttctccgcattttcgaggtgacctggaagcggttcaactgctctggcttctcagaagaggaggggaccgggcggtaacgaggagccaaggggaggagactgctcgcaaaacccggaaaagctttcccgatccactctgccagcctccgtgcgcctccagacatgcgcagtagcctcccccgcggtggcggcggcggcggcggtggctgccgtggcggctgagagtccagagccggacgttccggccgcttcgggctggcggctggagagcgctcgggtcatgtctgcccagggggactgcgagttcctggtgcagcgagcccgggagttggtgccgcaagacctgtgggcagccaaggcgtggctgatcacggcccgcagcctctacccggcagactttaacatccagtatgagatgtacaccatcgagcggaatgcagagcggaccgccaccgccgggaggctgctgtacgacatgtttgtgaatttcccagaccagccggtggtgtggagagaaatcagcattattacatcagcattaaggaacgattcacaggacaaacaaacccaatttttaagaagtttatttgaaactcttcctggtcgagtccagtgtgaaatgttactaaaggtcacggaacaatgcttcaacacgttagaacgatcagaaatgttgcttctacttttgaggcgcttccctgaaacggtggtgcagcatggggttggccttggggaggcactattagaggctgaaactattgaagaacaagaatctccagtgaactgctttagaaaattatttgtttgtgatgtccttcctctaataattaacaaccatgatgttcgattacctgccaatttattgtataagtacttgaacaaagcagctgaattttatatcaattatgtcactaggtctactcaaatagaaaatcagcatcaaggcgcccaggatacatctgatttaatgtcacctagcaaacgtagctctcagaagtacataatagaagggctgacggaaaaatcatcccagatcgtggacccttgggagaggttgtttaagattttgaatgttgttggaatgagatgtgaatggcagatggataaaggaagacggtcctaatgccccgagccaagttccactggttcttcttgaagatgtatcgaatgtgtatggtgatgtagaaattgatcgtaataaacacatccataaaaagaggaaactagctgaaggaagagaaaaaaccatgagttcagacgatgaagactgttcggcgaaaggaagaaatcgtcacattgtagtcaataaagccgaacttgctaactccactgaagtgttagaaagctttaaattggccagggagagctgggagttgctctattccctagaattccttgacaaagaatttacaaggatttgcttggcctggaagacggatacttggctttggttaagaatcttcctcactgatatgatcatctatcagggtcaatataaaaaggcgatagccagcctgcatcacttagcagctctccagggatccatttctcagccacagatcacagggcaggggaccctggagcatcagagggcgctcatccagctggcgacgtgccactttgcgctaggggagtacagaatgacatgtgaaaaagtccttgatttgatgtgctacatggtactccccattcaagatggaggcaaatcccaggaggaaccctcgaaagtaaagcccaaatttagaaaaggttcggatctgaagctcctgccttgtaccagcaaggctatcatgccatactgcctccatttaatgttagcctgttttaagcttagagctttcacagacaacagagacgacatggcattggggcatgtgattgtgttgcttcagcaagagtggccacggggcgagaatcttttcctgaaagctgtcaataaaatttgccaacaaggaaatttccaatatgagaattttttcaattacgttacaaatattgatatgctggaggaatttgcctacttgagaactcaggaaggtgggaaaattcatctggaattactacccaatcaaggaatgctgatcaagcaccacactgtaactcgaggcatcaccaaaggcgtgaaggaggactttcgcctggccatggagcgccaggtctcccgctgtggagagaatctgatggtggttctgcacaggttctgcattaatgagaagatcttgctccttcagactctgacctgagtggagacctttccaccagacacagctcgggcctgtgtaattgtaggagaagacactcagcagtgattgccatggcacagagccgtggtcattgttgctgttacaaagaagaaaaccatctgagttctaactccttggttgcttaaaagtagttcccaagagtctgagaagctatttctatttttaagagtcattttttgtaatttttgtaaaacaaaagtaccaatctgttttgtaaataaaaatcatcctaaaatttgaa

SEQ ID NO: 167954 - DNA, 2842 bp, Homo sapiens
atggcgaagaggcctggcgcctgcccgctcccgcgcatgctccctgacttcaccaaggtcacgctgcagcccgcaggaatgaaaatccacttctccgcattttcgaggtgacctggaagcggttcaactgctctggcttctcagaagaggaggggaccgggcggtaacgaggagccaaggggaggagactgctcgcaaaacccggaaaagctttcccgatccactctgccagcctccgtgcgcctccagacatgcgcagtagcctcccccgcggtggcggcggcggcggcggtggctgccgtggcggctgagagtccagagccggacgttccggccgcttcgggctggcggctggagagcgctcgggtcatgtctgcccagggggactgcgagttcctggtgcagcgagcccgggagttggtgccgcaagacctgtgggcagccaaggcgtggctgatcacggcccgcagcctctacccggcagactttaacatccagtatgagatgtacaccatcgagcggaatgcagagcggaccgccaccgccgggaggctgctgtacgacatgtttgtgaatttcccagaccagccggtggtgtggagagaaatcagcattattacatcagcattaaggaacgattcacaggacaaacaaacccaatttttaagaagtttatttgaaactcttcctggtcgagtccagtgtgaaatgttactaaaggtcacggaacaatgcttcaacacgttagaacgatcagaaatgttgcttctacttttgaggcgcttccctgaaacggtggtgcagcatggggttggccttggggaggcactattagaggctgaaactattgaagaacaagaatctccagtgaactgctttagaaaattatttgtttgtgatgtccttcctctaataattaacaaccatgatgttcgattacctgccaatttattgtataagtacttgaacaaagcagctgaattttatatcaattatgtcactaggtctactcaaatagaaaatcagcatcaaggcgcccaggatacatctgatttaatgtcacctagcaaacgtagctctcagaagtacataatagaagggctgacggaaaaatcatcccagatcgtggacccttgggagaggttgtttaagattttgaatgttgttggaatgagatgtgaatggcagatggataaaggaagacgaagctatggagatattttgcatagaatgaaggatctctgcagatacatgaacaactttgatagtgaagcacatgcaaaatataaaaaccaagtggtgtattccaccatgctggtcttctttaagaatgcattccagtatgtcaacagcatacagccatctctcttccaaggtcctaatgccccgagccaagttccactggttcttcttgaagatgtatcgaatgtgtatggtgatgtagaaattgatcgtaataaacacatccataaaaagaggaaactagctgaaggaagagaaaaaaccatgagttcagacgatgaagactgttcggcgaaaggaagaaatcgtcacattgtagtcaataaagccgaacttgctaactccactgaagtgttagaaagctttaaattggccagggagagctgggagttgctctattccctagaattccttgacaaagaatttacaaggatttgcttggcctggaagacggatacttggctttggttaagaatcttcctcactgatatgatcatctatcagggtcaatataaaaaggcgatagccagcctgcatcacttagcagctctccagggatccatttctcagccacagatcacagggcaggggaccctggagcatcagagggcgctcatccagctggcgacgtgccactttgcgctaggggagtacagaatgacatgtgaaaaagtccttgatttgatgtgctacatggtactccccattcaagatggaggcaaatcccaggaggaaccctcgaaagtaaagcccaaatttagaaaaggttcggatctgaagctcctgccttgtaccagcaaggctatcatgccatactgcctccatttaatgttagcctgttttaagcttagagctttcacagacaacagagacgacatggcattggggcatgtgattgtgttgcttcagcaagagtggccacggggcgagaatcttttcctgaaagctgtcaataaaatttgccaacaaggaaatttccaatatgagaattttttcaattacgttacaaatattgatatgctggaggaatttgcctacttgagaactcaggaaggtgggaaaattcatctggaattactacccaatcaaggaatgctgatcaagccttctagccctcccatggggttactgcagcaggaattcttacctgtgcttcagcccagcatacagactgctgacaggcaccacactgtaactcgaggcatcaccaaaggcgtgaaggaggactttcgcctggccatggagcgccaggtctcccgctgtggagagaatctgatggtggttctgcacaggttctgcattaatgagaagatcttgctccttcagactctgacctgagtggagacctttccaccagacacagctcgggcctgtgtaattgtaggagaagacactcagcagtgattgccatggcacagagccgtggtcattgttgctgttacaaagaagaaaaccatctgagttctaactccttggttgcttaaaagtagttcccaagagtctgagaagctatttctatttttaagagtcattttttgtaatttttgtaaaacaaaagtaccaatctgttttgtaaataaaaatcatcctaaaatttgaa

SEQ ID NO: 167955 - DNA, 1223 bp, Homo sapiens
accaggcgcacttctggccaggcagcagcaagctgtgaacagctgctgagctgtcgctgtggcttgtggctcatgcgccattcctggtgagttgctctattccctagaattccttgacaaagaatttacaaggatttgcttggcctggaagacggatacttggctttggttaagaatcttcctcactgatatgatcatctatcagggtcaatataaaaaggcgatagccagcctgcatcacttagcagctctccagggatccatttctcagccacagatcacagggcaggggaccctggagcatcagagggcgctcatccagctggcgacgtgccactttgcgctaggggagtacagaatgacatgtgaaaaagtccttgatttgatgtgctacatggtactccccattcaagatggaggcaaatcccaggaggaaccctcgaaagtaaagcccaaatttagaaaaggttcggatctgaagctcctgccttgtaccagcaaggctatcatgccatactgcctccatttaatgttagcctgttttaagcttagagctttcacagacaacagagacgacatggcattggggcatgtgattgtgttgcttcagcaagagtggccacggggcgagaatcttttcctgaaagctgtcaataaaatttgccaacaaggaaatttccaatatgagaattttttcaattacgttacaaatattgatatgctggaggaatttgcctacttgagaactcaggaaggtgggaaaattcatctggaattactacccaatcaaggaatgctgatcaagcaccacactgtaactcgaggcatcaccaaaggcgtgaaggaggactttcgcctggccatggagcgccaggtctcccgctgtggagagaatctgatggtggttctgcacaggttctgcattaatgagaagatcttgctccttcagactctgacctgagtggagacctttccaccagacacagctcgggcctgtgtaattgtaggagaagacactcagcagtgattgccatggcacagagccgtggtcattgttgctgttacaaagaagaaaaccatctgagttctaactccttggttgcttaaaagtagttcccaagagtctgagaagctatttctatttttaagagtcattttttgtaatttttgtaaaacaaaagtaccaatctgttttgtaaataaaaatcatcctaaaatttgaa

SEQ ID NO: 167956 - DNA, 2185 bp, Homo sapiens
atggcgaagaggcctggcgcctgcccgctcccgcgcatgctccctgacttcaccaaggtcacgctgcagcccgcaggaatgaaaatccacttctccgcattttcgaggtgacctggaagcggttcaactgctctggcttctcagaagaggaggggaccgggcggtaacgaggagccaaggggaggagactgctcgcaaaacccggaaaagctttcccgatccactctgccagcctccgtgcgcctccagacatgcgcagtagcctcccccgcggtggcggcggcggcggcggtggctgccgtggcggctgagagtccagagccggacgttccggccgcttcgggctggcggctggagagcgctcgggtcatgtctgcccagggggactgcgagttcctggtgcagcgagcccgggagttggtgccgcaagacctgtgggcagccaaggcgtggctgatcacggcccgcagcctctacccggcagactttaacatccagtatgagatgtacaccatcgagcggaatgcagagcggaccgccaccgccgggaggctgctgtacgacatgtttgtgaatttcccagaccagccggtggtgtggagagaaatcagcattattacatcagcattaaggaacgattcacaggacaaacaaacccaatttttaagaagtttatttgaaactcttcctggtcgagtccagtgtgaaatgttactaaaggtcacggaacaatgcttcaacacgttagaacgatcagaaatgttgcttctacttttgaggcgcttccctgaaacggtggtgcagcatggggttggccttggggaggcactattagaggctgaaactattgaagaacaagaatctccagtgaactgctttagaaaattatttgtttgtgatgtccttcctctaataattaacaaccatgatgttcgattacctgccaatttattgtataagtacttgaacaaagcagctgaattttatatcaattatgtcactaggtctactcaaatagaaaatcagcatcaaggcgcccaggatacatctgatttaatgtcacctagcaaacgtagctctcagaagtacataatagaagggctgacggaaaaatcatcccagatcgtggacccttgggagaggttgtttaagattttgaatgttgttggaatgagatgtgaatggcagatggataaaggaagacgaagctatggagatattttgcatagaatgaaggatctctgcagatacatgaacaactttgatagtgaagcacatgcaaaatataaaaaccaagtggtgtattccaccatgctggtcttctttaagaatgcattccagtatgtcaacagcatacagccatctctcttccaaggtcctaatgccccgagccaagttccactggttcttcttgaagatgtatcgaatgtgtatggtgatgtagaaattgatcgtaataaacacatccataaaaagaggaaactagctgaaggaagagaaaaaaccatgagttcagacgatgaagactgttcggcgaaaggaagaaatcgtcacattgtagtcaataaagccgaacttgctaactccactgaagtgttagaaagctttaaattggccagggagagctgggagttgctctattccctagaattccttgacaaagaatttacaaggatttgcttggcctggaagacggatacttggctttggttaagaatcttcctcactgatatgatcatctatcagggtcaatataaaaaggcgatagccagcctgcatcacttagcagctctccagggatccatttctcagccacagatcacagggcaggggaccctggagcatcagagggcgctcatccagctggcgacgtgccactttgcgctaggggagtacagaatgacatgtgaaaaagtccttgatttgatgtgctacatggtactccccattcaagatggaggcaaatcccaggaggaaccctcgaaagtaaagcccaaatttagaaaaggtacagtgacatgttttatgactattttgtaaaaatagctttagaaagccaggcacggtggctcacacttgtaatctcagctactcggaagtcgaggcgggaggatagcttttgagcccaggagtttgagaccagcctgggcaatgtagtgagaccccatctcttaaaaaattttaa

SEQ ID NO: 167957 - DNA, 350 bp, Homo sapiens
agctgcatcccacccttcagccagcattcctagcaccctgccatcctccggtttcttttgtgtggcctcaccagccgctttctctcctcaatgtgtcaccgaacatggggccatctggaagtgtgtttagaagataacggagcacaggaatagtcccaagaagtgcatttaaaaactgttactgtgtaataactttatgatacattctgccgcatcctcttaaaaataccttttgtatctgttttcttgtcatttccattatgccttttaaagtgggttgaagaccgtgaatgaacaactgagtggtgtaccatggctgcccttttgcaaaattgaagacctttttttcc

SEQ ID NO: 167958 - DNA, 456 bp, Homo sapiens
aaaaaatccaattcaaactgttttgaacgttggaaaaaaaaagtttggtacattttgctaacccaaaagttaaagcagaaggcaatgtttgacctaagtctcctcaccaagggcaccaaagatccagcctctgcctagtacattttctgttatttctctcaggcccagccttctgggagaccatgcatttctttcagggagcatcaggtgctcttcttggagtcacataggaaggtcaacctccctcctcacagaattgctgttcagatgcagagagcttcactctcagagcagccaagcaagcataattccttagcctggttttcagtggcttaaaatctgtgagactctttcctgaaaccaatgaatataattaagctgattcgattaagccagttactaagtctctatagaggttaaagtgtggtctatcccaccaaaatttatttagagttt

SEQ ID NO: 167959 - DNA, 135 bp, Homo sapiens
tgctttcctattctcttgcctgatgtgaagttgcacattgcatgagttggggctgccaagacaaattaccatatgctgggggcttcaaactacaggaattcttctgtgaccattgtgaaggccagaaagctcaca

SEQ ID NO: 167960 - DNA, 508 bp, Homo sapiens
ggaatattttgaaatcacatcaccagtatttactaaacacttgaaaaaaatgtatcatcagtacatggagacttgaaaactactctttggtcacaaaaagcacttggcagcacatttccagaatgtttaaatttttatttctactcaactaagaacaaaaccaacaagtactactgtaaaccagataagatgatctgctttcagacaaacatgacaggtagcaaaagaagtgaaaaatgactgactacagaaaatagatcatagaataattaggcagattaataagaacaaagaaacagctgcagaaaggtttgtaaccttaccattttaaaaaaaatccaatttcaatattatacacaacagtatcaaccctaaaaattcacagcttagggagaaatgccctgaatcagacaggctgtctgtatgtaataattgttaataatttttttttttgaaacggagtctcgctctgtcgcccaggttggagtgcagtggcaccatctcgcct

SEQ ID NO: 167961 - DNA, 308 bp, Homo sapiens
gtcatttttccattatggtttcttacttttaggtcttgaaagttttcggctttctatctgcctatataattcacatagtgctatggtggacaacactctgtaatggtttttggaaagctaggtactccacaagagtgcatgaagcgtcagagaggaggtctagaactctgggagagctaaggagcaatcaaggactagagctgccctttggctgagggttccttcattaagactagtgactgccatgttgtgctgtgagcccagagaagacgagcatcctgtgggagttcccacctgtggagttcatc

SEQ ID NO: 167962 - DNA, 334 bp, Homo sapiens
aaattgagtgtgaggtgtatgggaactctggactatctttgtaatttttctgtccatctaaaactactaaaattaaaattttattttaaaaagcatagctaaataaaggtaagacactattataagtaatggttattttatccagaaggatattatcgagctctggtatataattcccttagttttaaaagtctattcatgaagtcattcctcaacttctctctctgggtgatatttaatgtccttatggatcgtacttcatctcttctcccactagcttggagcagtttcaggttcccagctaaagaaactgaaggatatcacataacagttc

SEQ ID NO: 167963 - DNA, 832 bp, Homo sapiens
aggtgtgcggagggtaacggatgtagggaggcatttagtagggcttgttctctaaccacctctctccgagagtttcaaagggagtgggatctggggaaggttgaggcctcaggcctgggaactaggaatactttcccttttacccaccaccatcccaggcctggaagaagatcagaagttggacaggagaggtccggccgcgcggacgtcaccttagcgcgccactgtcggctccggtgggctcgggtgagctcgggtgaacgcagcgagcgagggcagaggccagcagaggcgaggagtggatgctgcagggccgaggccgggcagagaaacgcataccgggtcgctccctgcttcgccgccgcctcctggcaggggccagcgaagccaagtgctccagcgccccccgtaacacctcaaagcgcacggagtccgtgtgggggaacttggcggcaggagtgactgggacctaggaacctgcggggggccgcgcggcctccgggggccgagcgcctggacctcgccctgaggtaaacgcgggtcgacccggggggcggatggggctcgggcgggtcgagcgaggcggaggtgagcgagcggagaacgcaggagcatgcgggggccgctaggggggaccaatggatacgcggcggcggggctgccggagcagggcggggcaggcaatgacagcggactttcacgggcgacctaatccccgagattttaggaaacccggcagggagacaatgcagcacccggggggggccccaagggaaaacaccgaaaataataatacgagcagcgggccaaaccagaaacacgatgcagcgct

SEQ ID NO: 167964 - DNA, 594 bp, Homo sapiens
gcagggaagactcactccactgctcttctccatcccaggcggcctgcatgtggttagcacatcattctccaggacacagtacatctgggacaagaccctgccctgccagcttggtgcctcctgccctgcttgccgttctgctctgcatggactcactgggggaacctttcttgtcttcaagcattttctggacactacctgcctgagtgcactgagggtgcagatgagaaggtacaaccctgcctgcaggaaagtcatagtctcctaggggacacagacaaatgaactgggtcacagcaccttgggacgaatgtcaaggcagacaacaggcagctgggtgcaatggtgtaagcctgtaatccctactactcgggaggctgaggtgggaggatagcttgagcctgtgagttcaaggctagcttgggcaacagagcaagaccctgtctcaagaaacgatggacaataggcctagaactttactctgtctcctgacactaagacatccatctgggactcagctgtgtgttcagtgcctggcaccaagcctgcccagcagcagaggtgcagcaacacctgatgaaggaaggaatgtgc

SEQ ID NO: 167965 - DNA, 176 bp, Homo sapiens
gacaaaaaaaaaggaaataaaaggtacacacactgggagggaagaactcacactgtctttgttcacagataacatgatcatctatgtagacattccaaaacaatcaaccaaaaaaaaccaaggttcatattcagtagcaaggccgggcgcggtggctcatgcctgtaatcccagca

SEQ ID NO: 167966 - DNA, 115 bp, Homo sapiens
atttcaagccattgcttctataaattactttttctgcatgatctctccctttccttctggaactttattgtcccatacgttgctgaagctctgtttgttttttctcagtctttat

SEQ ID NO: 167967 - DNA, 476 bp, Homo sapiens
gataacagtagacttgctctgttgcccaggctggagtgcagtggtgcagtctcggctcactgcaacctgtgcctcctgggttcaagcagttctcgtgcctcagcctcccaagtagcagggatatttttagtagagatggggtttcaccatgttggccaggctagtcttaaacaccttacctcaagtgatctgcccaccttggcctctcaaagtgctgggcttacagatgtgagccactgcgttcggccctcatttcttaattacctgtaacttttacattgacccaaatctgggagataggataggatctaattttgaaatgtcaaagacgtgcttttagaacatcataagaagaaccttttgttattttgttggtgggggatggagtctcactctgtggctcaacctcttcctcctgggttcaaggaattctggtgcctcagcctcccacatagctgggatcacagacatttccc

SEQ ID NO: 167968 - DNA, 342 bp, Homo sapiens
cagattttttttttttaattctacaacagaagtaaaattacttgccccaggtcatggaaccaggaaataaaatctagaaacaatccccaagcctttcaagtctcttgagtacattaagcacagtggttgcaacagcaccaggggtcagaagaccttggcagtgcctgactccaccactaacgggccatgtgccattgggcaagtcccatgacttccccctttccacctacagagcctactgacagggctgggactgagcatcggaagagatgctgtccgtgaaagcactctcaagtcaggaactgaactaagaactttactcctcttgacaactccttacca

SEQ ID NO: 167969 - DNA, 290 bp, Homo sapiens
tctcccctccctttttgtttgttttgctggttgggaggttggggatagcaggtgctttgtagagtcaagactctaccacttgactgtctagagaccatagggatctgtagttgctgatcacagactggaatactggaaggtactgttttcagggctatcctgttaaagtgcttcttgttttgtcttgaactaaaacaatgaatactctgaatttctgactcgacattttataaagatggagtgatatgcatttattgaattaacttatttttttagcactctggcttttt

SEQ ID NO: 167970 - DNA, 443 bp, Homo sapiens
taggacatggatgggcacaggacatgtgtctggtgagcgtagctgccagggccggtccctgacaccccaaggagactttctggtcccagcccagcctacactcccacctgctctggagaggctgtgtttccttccaaggatggatgctgatgatgtctgatggcttctggatgtctgatctcaaggggaccttctcttagggggctttaggccaccctggaaaggtctcagcatcaccccttggagcggggaggattttcaccccttgcccacacacaagctaaaactgcttctgctgcagctctgggagacctagaaccagggcccctcctgagagccagtgggtgggggcaggccccctggaaaatcgctgagagctcagcagtttcagccttcactcccctcctcactcccctcctccagcctgcagaaacctagcccag

SEQ ID NO: 167971 - DNA, 299 bp, Homo sapiens
  misc_feature (2)..(2): n is a, c, g, or t
  misc_feature (26)..(26): n is a, c, g, or t
tnacatcaacccagtcaacaccatantctaatagaaaacaaccttaaaccaaataattctgaatggaatagaaggaaaaattaccaactctaaactgcaaaggacaaaaaaaaaaaataaaaagccagctgctttaccctgctaatcacctgaccatgaaaagagccaaattctgtaaaatatttgaagagtaaatttttctgtaaaatattctgagccaaatatgagtggtcatgacccaaggcacagtctcaagaggtcctaagaacatgtgcccaaggtggttgggttgacaaaag

SEQ ID NO: 167972 - DNA, 364 bp, Homo sapiens
agatgggatctcactctgttgcccaggcaggtctcgaactccttgagctcaagtgatcctccctcctcagcctcccaaggtgctgggattacaggtgtgagccaccatgccctgtctaaacaagctgtttaattacagtgttttagatgctgtgagggaaaagtatgtgtgtacagtgagagcaaacaacgcagcctgtgagggaggatctcctggctttgaatccactttcatgcgtctgtcccattaaagtcagacacttgccagccgtgaaactttaatctttttgccacgggtatttaatctaaatttagaggatgagaatgatgcagaggtaccttggatgtcatgaccttccttacgt

SEQ ID NO: 167973 - DNA, 420 bp, Homo sapiens
aagtggatagtagatggcttaactttagttgaacttgagtgaatgtatagtgagttggtgaaatgattgccttaacggaaatgctggtgctgatggatctttgtagacagagagtgagggcgtagtatattctgttgccgttagtttataaggtaccattgatgagaccaagttcaggtcgtcttcctgatttcttcgaatttgagagcctgagtattggtgaggcttggctgccagtattcatttgggatatttgccaaggaggattagataactttctgcatttgcatcgcatattacctctacctggaattgatatggcctgaacactgtttttgaatattttttgcttcatttgagtccttacgagcttgcagtccactccaggtggaccatatcttttaccatcatggccttttt

SEQ ID NO: 167974 - DNA, 1822 bp, Homo sapiens
gcagtgtcactaggccggctgggggccctgggtacgctgtagaccagaccgcgacaggccagaacacgggcggcggcttcgggccgggagacccgcgcagccctcggggcatctcagtgcctcattccccaccccctcccccgggtcgggggaggcggcgcgtccggcggagggttgaggggagcggggcaggcctggagcgccatgagcagcccggatgcgggatacgccagtgacgaccagagccagacccagagcgcgctgcccgcggtgatggccgggctgggcccctgcccctgggccgagtcgctgagccccatcggggacatgaaggtgaagggcgaggcgccggcgaacagcggagcaccggccggggccgcgggccgagccaagggcgagtcccgtatccggcggccgatgaacgctttcatggtgtgggctaaggacgagcgcaagcggctggcgcagcagaatccagacctgcacaacgccgagttgagcaagatgctgggcaagtcgtggaaggcgctgacgctggcggagaagcggcccttcgtggaggaggcagagcggctgcgcgtgcagcacatgcaggaccaccccaactacaagtaccggccgcggcggcgcaagcaggtgaagcggctgaagcgggtggagggcggcttcctgcacggcctggctgagccgcaggcggccgcgctgggccccgagggcggccgcgtggccatggacggcctgggcctccagttccccgagcagggcttccccgccggcccgccgctgctgcctccgcacatgggcggccactaccgcgactgccagagtctgggcgcgcctccgctcgacggctacccgttgcccacgcccgacacgtccccgctggacggcgtggaccccgacccggctttcttcgccgccccgatgcccggggactgcccggcggccggcacctacagctacgcgcaggtctcggactacgctggccccccggagcctcccgccggtcccatgcacccccgactcggcccagagcccgcgggtccctcgattccgggcctcctggcgccacccagcgcccttcacgtgtactacggcgcgatgggctcgcccggggcgggcggcgggcgcggcttccagatgcagccgcaacaccagcaccagcaccagcaccagcaccaccccccgggccccggacagccgtcgccccctccggaggcactgccctgccgggacggcacggaccccagtcagcccgccgagctcctcggggaggtggaccgcacggaatttgaacagtatctgcacttcgtgtgcaagcctgagatgggcctcccctaccaggggcatgactccggtgtgaatctccccgacagccacggggccatttcctcggtggtgtccgacgccagctccgcggtatattactgcaactatcctgacgtgtgacaggtccctgatccgccccagcctgcaggccagaagcagtgttacacacttcctggaggagctaaggaaatcctcagactcctgggtttttgttgttgctgttgttgttttttaaaaggtgtgttggcatataatttatggtaatttattttgtctgccacttgaacagtttgggggggtgaggtttcatttaaaatttgttcagagatttgtttcccatagttggattgtcaaaaccctatttccaagttcaagttaactagctttgaatgtgtcccaaaacagcttcctccatttcctgaaagtttattgatcaaagaaatgttgtcctgggtgtgttttttcaatcttctaaaaaataaaatctggaatc

SEQ ID NO: 167975 - DNA, 2378 bp, Homo sapiens
ctgttctttgcgagcctgacgcccaaaaccaggggtgtgtagcggccacgtcctttcttaaggctctgggttcccttcccgcttcccgccctccgaccctccaaagcagctttccgccttgctctccggctcccggattccccaggtggccgggggcgcgggtccaacggctctgggaaggcgacttcccggcacctccgggcggcgcgagagcacccttggccctgaactgggccggttgtgtccatccctcgaccccttccctagttaggtgtccttttctgtttttcgaacgaccgggtgatgggtgagcggaaagccgcttccaggagaccaaaagaaaggggtgcctttagaggacgggtgttccccaagggctcggactcaggagtcccagatctccctctttaacttcaccccggttgcgcaattcaaagtctgaggggggaggtgcgtccaggtggggccaggtggggcctggagcgggagcgcagccgataagccctgcgcccctctcccccttccttccactgtgcaggcaagtcgtggaaggcgctgacgctggcggagaagcggcccttcgtggaggaggcagagcggctgcgcgtgcagcacatgcaggaccaccccaactacaagtaccggccgcggcggcgcaagcaggtgaagcggctgaagcgggtggagggcggcttcctgcacggcctggctgagccgcaggcggccgcgctgggccccgagggcggccgcgtggccatggacggcctgggcctccagttccccgagcagggcttccccgccggcccgccgctgctgcctccgcacatgggcggccactaccgcgactgccagagtctgggcgcgcctccgctcgacggctacccgttgcccacgcccgacacgtccccgctggacggcgtggaccccgacccggctttcttcgccgccccgatgcccggggactgcccggcggccggcacctacagctacgcgcaggtctcggactacgctggccccccggagcctcccgccggtcccatgcacccccgactcggcccagagcccgcgggtccctcgattccgggcctcctggcgccacccagcgcccttcacgtgtactacggcgcgatgggctcgcccggggcgggcggcgggcgcggcttccagatgcagccgcaacaccagcaccagcaccagcaccagcaccaccccccgggccccggacagccgtcgccccctccggaggcactgccctgccgggacggcacggaccccagtcagcccgccgagctcctcggggaggtggaccgcacggaatttgaacagtatctgcacttcgtgtgcaagcctgagatgggcctcccctaccaggggcatgactccggtgtgaatctccccgacagccacggggccatttcctcggtggtgtccgacgccagctccgcggtatattactgcaactatcctgacgtgtgacaggtccctgatccgccccagcctgcaggccagaagcagtgttacacacttcctggaggagctaaggaaatcctcagactcctgggtttttgttgttgctgttgttgttttttaaaaggtgtgttggcatataatttatggtaatttattttgtctgccacttgaacagtttgggggggtgaggtttcatttaaaatttgttcagagatttgtttcccatagttggattgtcaaaaccctatttccaagttcaagttaactagctttgaatgtgtcccaaaacagcttcctccatttcctgaaagtttattgatcaaagaaatgttgtcctgggtgtgttttttcaatcttctaaaaaataaaatctggaatcctgcttttttgctctactagtacctctgtcacactaatcttatcaaaaaccagttcttaagatcaatgttaagtttattagttaatgtaaatttctcatcctcgaaaagggtgaacataaatgcctttaaggagtatatctaaaaataaacattaggatatctaagtttgatgtaattgtttcaggaaggaaaaaagaaaagcattctggaatgagcctacttcaagtaatcttagtttctaaaactaacagttaatattttcaattccagtatatcactttaagtagaaggggatgtccaagtaattttggttttctaactgttgaatcataagcttgacctgcccccagaggctttttggatgtttttatctgtgttttgccatctctttacactcctcgacattcagtttaccttaatcttcacatttttacaccttgggaagtggcaagcatcgctgggtttaagataaaggagtcacaaaaactaatcaaaataaaatttgcattatgacaacttttaaaactt

SEQ ID NO: 167976 - DNA, 257 bp, Homo sapiens
actcaaaaccactcctagcaataccagatggagacaacaaggcactggatgttactttacgctatcttaaaacattgcagtattttactcatgtcagattataatcaaacaaatcacgctgtcaaacagtttttagacattatcaaatgattaattttgaaattcaaaaaacatgtatccaatattggctggggaaaaccccttgtgactggcactttcgaacagctgtgggaatataaggcagcagcagctttctg

SEQ ID NO: 167977 - DNA, 230 bp, Homo sapiens
acccgcctcggcctcccaaagtgctgggattataggcatgagccactgtgcctagccagagaaaggtataacattgatgagcaaactcatgaattggaagattacattgaggaattctctgagaatgcagcattatatgataaagaaagataacacatggagtaaaatctaagagatacgataggtataggtagaaggactatctagataaataggtgtcttagaggaga

SEQ ID NO: 167978 - DNA, 360 bp, Homo sapiens
ggggttggcttatgcatctgaaatctcatcttgttttaggaagaattgctctgaatatctatggacctggaggctaagaaagacattcatgaaagattgacaaatcaaatcaaatccagaagtatttaaagcaaaggtgcatcaggagaaagtcaggcttaacctagaaattcaagaatgattcaacacggaaaaatctattacagtaattcattaggttaggggaaggcagtgtcgggtgggaccaggcaaggccctggaggaagcaaggctctcctttcccactttagcttgggcagggtggggcatacagcccacagacacatttcaacttgagtgtcattctgtacgcaacatcgt

SEQ ID NO: 167979 - DNA, 779 bp, Homo sapiens
ggttaaactacaggatactagcaaatatgatgcaagcccaaacgtgaagactgcttgagcacagcaggcttgctcccatgtgaataagccccagctgacctcttcaaggatgaaaaccaatgcagagaagaagacctcagcccctaagcatcccatctggcaccatcctagatcatccaaccctaatcgagccagtccaaatcataagaactacatagtcgagtcccagaccaatgaacaataaaaatgtttgatgttttaatccactaagtatggggtgattcatcacgtagtaaaagctaactgatatatgcatatgcccagtgaaagactaatttctaatttgagtccaaaataagttagagacaagattcaaaactcttacatggtgatatggtttggctgtgtcaccatccaaatctcaccttgacttgtagctcccttaattaccacgtattgtgggaggaatccagtggggggtaattgaatcatggaggcgggtcttccccatgctattcttatgatagtgaataagtctcgcaagatctgatggttttataaagggtagtttccctgcacaagctctcttctctcatctgtggccatgtgagatgtgcctttcaccttcagccatgattgtgaggcctccccagccatgtggaactatgactccattaaacctctttgttttgtaaattgcccagtcacaggtatgcctttatcagcggcatgaaaatgagctaatacacatggagcgggggaaggaactcagagaacaa

SEQ ID NO: 167980 - DNA, 404 bp, Homo sapiens
ggagacagagtcttactctgtcacccaggctagagtgcagtggggtgatctcagctcactgaaacttctgccttctgggttcaagcaattctcctgcctcagcctctcgagtagctgggattacaggcatgtgccaccatgcccagctaatttttgtaattttagtagagatggggtttcgccatgttggccaggctggtcttgaactcctgaccttaggtaatccacctgccttggcctcccaaagtgacaggactgcaggagtgagccactgcacccagcccattccttcttttttcattccttcttgtggatttgttttatcaccttatgatattccttatggcttgaaggacttttctttttttttgagtcacagtctcactctgttgcccaggctggag

SEQ ID NO: 167981 - DNA, 489 bp, Homo sapiens
ctgacgtcaacccaatcaaccaaacaacaacagcaacaacaataataacaaaaaacaaaagaaggaaggagtggtcagcagccccagatactacttagatgtcgattgagatgagcttagaagaatgtgcctttagtttgcagcatggaggttgctgatgccatgaaaagcttttttaggaagagctgggacgaattgattggagcaggttaaagaattggagatgaggaagtagacaccacacatacagaaacacatacagagacagctactcagggtcaggcacggagaagacaaatgcttccagggttggagtttggccagttcttcacagtgaagggatggggcaaaagattggagggcatttggaaggaaattcttatagtgacagaactggagtctaagctggtcacggaagaaaatgcaagtccggaggggatttggtgtgaagatggtagtggttctgttgattgggttgacgttagggca

SEQ ID NO: 167982 - DNA, 489 bp, Homo sapiens
  misc_feature (4)..(4): n is a, c, g, or t
cctnacgtcaacccaagtcaacaaaactgttcgtccaagtgcactttccagtacacttaccatgtgacgacttggcgtcctctatatacatgcgtagggatatcaattaaatgtcctttgaagtatagtgcatgagggtgaaggatggaggttgctgatgccatgaaaagcttttttaggaagagctgggacgaattgattggagcaggttaaagaattggagatgaggaagtagacaccacacatacagaaacacatacagagacagctactcagggtcaggcacggagaagacaaatgcttccagggttggagtttggccagttcttcacagtgaagggatggggcaaaagattggagggcatttggaaggaaattcttatagtgacagaactggagtctaagctggtcacggaagaaaatgcaagtccggaggggatttggtgtgaagatggtagtggttctgttgattgggttgacgttagggca

SEQ ID NO: 167983 - DNA, 621 bp, Homo sapiens
tcatcacccaacaccagtaccccagacatatgttcagggaatgagccaatgggccaagggaaaaaaaaagagcatgctaactcttcataaaagtcgaaatcatttctgatggaaggaaaggaagacagagagctgctgaaaaatgggcatgttttttttttcctgcaacagaactgtcctgaatgtcaagccaatgttggcatcatggtagtcaccagagaagagttaatagaactcttcttttataggtaggttaaaaataatttttctgctttagatgtttgtaaaattcctctaggaacagagaggaggaatgagtctttgtgtcagtgggctgtgggcagccagcacccccagtctgccacacatgtggtgccagggatttccatggaaagaacctcaggagacctgattctgggcctgtttcataaggctagcaggctagtgagggccctaggtcataattttaaaatcatactaatatacatccaggtgtgtgtatacattctcagggtagcaggaagaaagtggtggcaagcgaggctggaaaggtggcaggggccagaccccacaagcccctgcagggcatggtatggatttttgcctttgccttaaatcgtc

SEQ ID NO: 167984 - DNA, 432 bp, Homo sapiens
atgatttttaaattcaatacatactgactagaaattttcccaccccagtaaatgataaaaaattaagaacaatgttcatcattggaaattatgcttggggaatcagatggccctttcttttctttctttggcacttgcaacgttgatatttctttggatattgtgaatgacttttgaatccagtcaacttttctttatcaagttttagaaaataatcgtaagcctctactttgcacatgtgtataccttggtagaacagtcaccctgaagatagcgggaatgccacacaagccccttgctggggacataggacgtgcaaatcaatgtcttttcctccagggacagaaaagtggaacgactccaagcaaatcccttgtgtcccaaaagccctgcgtcatctttctggaaaacagctgtgcttataaaagttaa

SEQ ID NO: 167985 - DNA, 356 bp, Homo sapiens
gaggaagtagacccaagagacacgcattggagatcagagagcggccatgcaaaaggaaagacagcaaacgagctgcagcaagctcctaagccctgcagcccaggcacaggaaaccagaggcagagcctcaggcccagggtgaggggcgaagcaccagcctgagcctcttgcagcacagagcagctggaagagagaagtgctggagccaccggaggattatggctgtctactccgagggcagcaacctgcctaggcctgcggtgcaaggcccaagtcctgaccaggtgctttggccaagcccagggagttaggaagtgtaccaggctgctagaggtagctagggctggaaacgcact

SEQ ID NO: 167986 - DNA, 232 bp, Homo sapiens
tgagatcttgagtgctacaggggaaaaggtctgtaagcctgccgcctaccatctcctatggaagtcaggttctccccagatatcgggcatgacgtgacttaaataggatacaggagggagatctccctacgtggaatcctacttacatcatgaaactaatttaattattcccgcttctctctccctccccacctctccaggctcagtctgagttctatctcctccctgaact

SEQ ID NO: 167987 - DNA, 658 bp, Homo sapiens
ggccggaatcctgaagagaggctcaaggcacacagacagggcagggaccacgcccccagtttttgctccagggctgggcaaagaggaagtactcaagggcggaccctgcggctgcccaaccaggatagctgaaggcagagtgaagggaggagcctgggggactgttataggggcgaggagactcggaagggatgttgttttgcttccgcagacacctgacctccaacttcctaggccccagtggacccagagcagcctctggtcagaaaagggcggatgcatccacaggtgtgcataaaagggaaactcaatgattgtcacacagtaggtgtcaggggtaaactgcatttccctacaattgcaaggagtctctttcctctctctctctctcatatgcacacacacacacacacacgcacagagcaacagcatcataggtatgctacagagagccacagagtaattacacacacacacacacacacacacacacacacacacacgtgcacacatacacacacccagacacacacacacacgcagagagcataacacacacagagacacacacacgcagtgcacatatacacacacccagacacacacacacacgcagtgcacaaatacacacacacagacacacacacacattgcacaa

SEQ ID NO: 167988 - DNA, 345 bp, Homo sapiens
tttatgaatcgagttcttcttgtcccacccattcacccactggggtttctgtaaactagcccacttccttttctctttatttttattttattttattttattttttttgagacggagtctcgctctgcactccagcctgggtgacagagtgagaccctgtcttgaaaagaaaagaaaatgaaaagaaataaaaataaacttatgcttttaagcagaagaaacagagaactactactcgtgaactacatgtcagtgtttcaagtatattttcctcttttgctttatctttcaccagcctgggcgacagggcaagactctgtctcaaaaaaaaggggatcctctgaa

SEQ ID NO: 167989 - DNA, 456 bp, Homo sapiens
agataacactatgtgttagtcagatttcaggtcacccatagagcaagacaatttctttctaaagtttagggcagcggttcttacatctcagcaagcatcagaatcatggggaaggcttggcaagctgatgctgtgcttcacctccgaagtctcctttcagcaggtctggtcagagccagagagtgcatttctgacagttctcaggtgaccctttgataagcatggttctggggtcgtgctggctcaggtaggatgcagtcagcactcagtccagggcctggcagtaacctgggggaaagaggaaagtgaggaggggaaggacccacactcccaaatccccggatcccatggtcatcccagcatgcaggctccccacaacaactctagcattgtctcactctttagtaactgtaccactttggtgccctgaagttctcttatacatgctcacccatc

SEQ ID NO: 167990 - DNA, 251 bp, Homo sapiens
aagatgtgagttcttgacttatatctggactgcacatgtgttttatatacaggtgtttctttatgcagtaggtggaaatttgtccattctggttgttagactacttttaagtaatataattcagtaaagctttattatctggaattttcaatcaatttttcctcaaattctaattttaaaaaaattaaccagaactaacccagacacctctgttatgtagctctctgtgaacggtaatgtaaatgtacctg

SEQ ID NO: 167991 - DNA, 345 bp, Homo sapiens
ctgaaccttctcccttgtcctctctcaatctcaagtcccttcttgtgacccacggttccctccctgtccctggaatccatggcaggtagagcgtagacatagatcccttggggtggtgggagtgggaggagtgtcgtatctctcatgccttgaagagcccagatttgcgctgggattaggtttcttcattgaatcagtgctgaaaagggtgatttgtctctgttgcattggttcagtgttgtgattctactgcagtgcctggtgaggctgttatggacttggcctagaatataactgtcatttgtaatttctttaggaaaatgtgttcctcaatccaattggcag

SEQ ID NO: 167992 - DNA, 406 bp, Homo sapiens
ttttttttttcactttcaaagttgttaactatttgtgtttcctcaacattcagataataacccagaatgtcttggtgatactattccagttcctcaaatttcttttaagaatagtatattcttttaccttccccctcattttgataactctttctgcttgaatagtattcttgctcttcccgtataagaattttcagtttaaattaagtctgaattaaagtagatgaattttattatcttcaaaagagcagaactgattatttggatacaaagtgttcaaaatctgttttgtgatgcttttatacttaaatatttaagccaaatgtcagttagtgtaaattagcagtatgttatattaagtattgagcttcaaaactatagctattgttgccgtgtatttaacttt

SEQ ID NO: 167993 - DNA, 499 bp, Homo sapiens
cagagaccaacagcatctcaaaagcaggctctgtcttgtttatctttttattcccagcaccagaacagtctcagaatcaaaatatcagggcatagtttttgagtgacttttcaagaactagatttaatcctggcttggtttttttgttcatcctttaatcaatgctaatcaaatacccaggaccactcagcaggtatttattaagcatttgctctgtgccagacgctaaactaatcgtatctggttcagtggtgaagatagatgggagccttgctcttgagtgcagttacagtacagtactcattctatgatggggcacacaggagggatatgtgagccaaagcaggttggtgggtgggacaggacaagtttcccagaggaagtaaaacctagctaaaatcccaggtatgattaggagctagccacttgagagaagagggaagtgactaaattttcataccacttcacatatatttttcaagaaaatactcgaaagtgc

SEQ ID NO: 167994 - DNA, 357 bp, Homo sapiens
catcacagtaactaatgggctgagaatgtttctattttttcaccaagtaatccatatgcaaatttcctacagtattcaatatgcacttccaagctcagtaaatgttttctattcttttctgcttagctctctcagctttttccaattaggccctgtttatttagaaaaaaagaaaatgtctaaaggaaggattaagctctgtatcttatggagaaagaatgaatattagaaattctttcaggatctagaggatgcattctttactcatcctccccgctgggatgggtaatgagaataaagtaaaagaggatgaagctttttacttcatttggtttgttcagctgaaaacatgccttt

SEQ ID NO: 167995 - DNA, 497 bp, Homo sapiens
ctcccctctttattccccgtctcctgaagctgtgtcatgtgtttttattaatggcaccatagaaaattcttcccttattatggcctaaagatgaattaacataatagcaagcaggtgtatacaaacttgacaattatgcaaatatagtaaatggccctgtaggtactgtacttcttcagaaagatttgagatggacattaagtcttccttgttaatcctgtatttaatgacctctaaatagcatctattgagaccttccattcctttcaacaagttagaaaaacgttccgatttatccctgttcctttttcccatcctctggcaccagctactgtctttatattagaatttgacttcctttcctttcacattgtggctaaagaaataattgttatcatgttttactagtgacttcgtagatgtctaacaatacatcactttatcagaaggagaggagaggaattccctgagctctgtgcaggagctatgttcagttg

SEQ ID NO: 167996 - DNA, 433 bp, Homo sapiens
acatgaaaccaaaccaggtgctcatcaatggtggattagattgtgtacatatataccaccatatggtacatatacactgtggaatactatgctgccataaaaaagaatgtaatcatgtattttgcagcaatatggatgtagctagaggccattattctaaacaaactaacacagaaacagaaaccaaataatgcatgttctgacttaaaagtgggagctaaacactgaatacacatgggcataaagatgggaacaatagacagtgggggctattagagaggcaagggctgaaaaactacctattcggtgccctgctcactatctgggtgacagagtcattagcactccaaagctcagcatcacacagtatacctttgtaacaaacctgcacatgtaccccctgattctaaaataaaagtcgaaggaaaacaac

SEQ ID NO: 167997 - DNA, 656 bp, Homo sapiens
gctggcaactgggaatctttggtgttatttctgcgagcaatgtgaattcattgggttgaacaaatggctagccctttttgcattttcagttttccattccatttattctttattgtgtccttgtatctttctggcccctaaaactcgctcactcactccttttctttctctctgtactgtaagccacttacaaagttgattacatacggcgactaggaacccaccgctctttccccacacctttccctttgcttgccttttttctttttttgaaaaccctcccctctctaagagcctatgtaaaccctgcctgttcttcaacttcctccctagatcctgctctcggcacagcttgcttcttcctctgaaatccagtggtatttcttgtcgggatttctcacctggccccatacgctactgcagtacattgctagttatctctttcctacttaggcgagtgatttacctagctattctgaaaggtgcagcaaagactgtctcctatccttttgtgtttctttctcgttatcagcacaccaactggcttctaactcattaaagattgcgtgattggaatgtaaaacagtcgcgtgaacaacagccatgaccattgttttttttttttttttttttggagacggagtctcgctcgtcgc

SEQ ID NO: 167998 - DNA, 524 bp, Homo sapiens
ataagcctcctaatcaattacaaaagagtcatttttcactttcctttaaaattaaaaagaagtttctctttgtccatatttcaggcctctcatacattgtttgctgacagcgtttctgtgttggaaccacatctcttgttcttccagtagataccctcagggcatagtttctgcacaaaatttatctgaaatctttagtgaccttttgcaggatttaatatcagttcatttggatagttccacatgcataaatgggccttaacaggaatttagcaaataaaagatagtgcctcccatacaccttcttattttttaggcttgctaagtaaaatttaagcagaagagactgtctctgtctttctcttgggctccgtttctgcgttttttgtggaacactaccattcttaggtagagtgggtagggagagagaaggaacagcatcacctcttctctatttttgctcacacagatgccctgtttggcgacatctaagcactagagacttattgaaccggatagcttgt

SEQ ID NO: 167999 - DNA, 561 bp, Homo sapiens
atctcacacgtcagcaaggggtgagattcatgattccttacataataacaggtctgctccagggtgacttccctctccacccatgaacctgaacttgcgagcataattttcacttcacctgacacccacatatacaggcccaggtgtctatgtctctctttctgtttgaatattggaatgagtctctatgaatgtgttactgtgtatgtgtgtctctacttgtgacctttgggcaactgactgtattcttaacctgactgtgcctcagtttcctcatctgtacaattaacatctactttatagggttattaaaaggattacatgagtcaggcatggtggcacatgcctgtagtcccagcctcttaggaggctgaggcaggaggatcacttgagcccaggagtttgagtccagcctgggcaatacagcaagatcctgtctctgaaaaaaaaaaatggattatgtgtaaagtgcctaaaatggtgcttgggtcattgtatatgctcactaagtacttgatgctactgttataattgttaatgtgtcttctgacgtgtcgaggt

SEQ ID NO: 168000 - DNA, 335 bp, Homo sapiens
ctggctttatcccagagctcaggccacatgtttatgttctgtcttccaactccctgcaaaacagcccttctttagccatcttggggccttgggatatgcacaccagtgatagatctgggaaagaggccttgggagtggccttggggctgttccagcagggaattccaagtgccaggtaggaggtaggccagagcggggcctctaaagcacaaccccagagcaaggaccctgttacctaggtcttcaagtggtagcagcctaaagagcaggtgtttactggtgttcatacagcactggcaaatagggagagacacagactgacagaggaattctgc

SEQ ID NO: 168001 - DNA, 420 bp, Homo sapiens
gctgggctgccgtgcgtctgggatggggctgagggagggtgctgcccaggtgctggaggatgttccagcaccaggttccagcggagcctcggaaacaggccccagaggctggtgagcctcgctgggtgtgggcactaatcccgtgcatggtgactcgtgggcgctcacggcccacctggtggcaggtgaaggcttccggttgggcagcagatagtcctgggggaagctggcagtcctggcaccatgacgtatctgggctggtgtcatgcacagtagggcgaatggccacagctgcctgccagcagccctgatcccggggtgtctgcacccttccagcccaacctctgggtctccaaaagcacagtcgggggagcatccaccaggcacaacctctgcggtcctcagaggactgagcagaga

SEQ ID NO: 168002 - DNA, 527 bp, Homo sapiens
atccatttctgtcttattccaaagggtacccctttcaatcacatctgtatttttctgcaaatgtccatttggaacattggactgtggtttgatgggttttttcccttatggtcagtattctgtgttggcttacggagcccctcacccctggtaatttcttctcattaaacctatggagattatattttctattgataaacctatttgtgaaaaatagttgcttaaaaccagattatacctccacttgtaataatgggaaatcttaataaccagcagtagtatctgaaaccagttaggcctcaatgcagatttttgttttaattcctctttttagtgtcctcagactttctggcatacttaatagctgaaaggctgttggtggatttcagtggctactgtttgttaatttttattgcttagtgttaaaatattaagaagtttttgtaaagatatactttagaaagtaacaaagacagacttttgaatttcagaaagatttggaaggaagtgaagttttgtttgagctt

SEQ ID NO: 168003 - DNA, 549 bp, Homo sapiens
caatagctaccctttcctgaatgtttacatgatgctacagaacaggttatttctatggacaggctcttgacagaaactctgaacatggatattactgtccccttcattcaaatgaggctgaactgaggctcataagtatttaactctcacacctagttaacacagtaagatttgaaaccagatatatatgaatccacgaagtcttatctgttaagtatcattcccctctcaacaagaaaaaaacaaaacacagaacaaaaccaaaccaagcaggccgggcgcggtggctcatgcctgtaatcccagcactttgggaggccgaggcgggcggatcacgaggtcaggagatcgagagcatcctggaccacacggtgaaaccccatctctattaaaaatacaaaaattagctggctgtggtggcacacacctgcagtctaagctactcgggagactgaggcagaaggatcgcttgaacctgggaggcaaaggatgtagtgagccaagatcacgccactgcactccagcctagagacagagcgagacttggtc

SEQ ID NO: 168004 - DNA, 153 bp, Homo sapiens
cctgccaagctctatgacaacctgggttatcttccggaacaggatggctctggatttgagatgagatcagagaggtggactgctaaagagaaagagagtttgggaagtcaatgcaaaagtataattgtgggcaaaatatgctgtgttctcaag

SEQ ID NO: 168005 - DNA, 468 bp, Homo sapiens
ggactggtttctgtcttgtctcacaggaaagggcaccaggttggggacctctgaggacaaatgggatggtgaaactagcacgtactgactcctcattgccctctccctgctcttctcgggagggaaggagttggagcatgagtccagcattctaggttttctggagtctgcccaagactctcgttcctgtctcactcgatgaagcactgatgggacctggcatggtctaggtccctgggggctgctgagaacaagagaaagctgggtggtttgtactgcgccagaggacccacggtacagtaggcagagtccagtgcacctcgaaggctgctttttgggtccaggggaagagtagagcatgtgttcagcatttgggcttctcaaggggctgcctgagggactggcttctgtctcacccaactcactgctggcagaacccaacctactctagatgccttggagctgctg

SEQ ID NO: 168006 - DNA, 241 bp, Homo sapiens
ttttgagttgtaagagaatacaacaatttaacgaaattaataaattcattagctgagtgagaaattgaacaaagatagatattatggaaaggaacaaaacaggaatcttggagcttgaggaattaagtgaatgaaattaaaaaaaatacaattgagagccacagtaacagactagaacatgcagaataatacatttctgaacttgaagacagatcgtttgaaataacccattcagaagaag

SEQ ID NO: 168007 - DNA, 397 bp, Homo sapiens
actgcaacctctgcctccaggactcaagagattctcccgcctcagcttcccgagtagctgtgaacacaagcacctgccaccatgcccggctaatttttgtatttttagtacagacagggtttcattaaattggccaggctggtctcaaactcctggcctcaggtgatgcacctgtcttggcctcccaaagtgctgagattacaggtgtgagccaccatgcccggccatgactggcgtaaaatggtgatctcacagtgtatttcactgtagtgttaatttgcatttctctgatgattagtgatattgaatattttttcttatgatttttggtcatgtgtatgccttcttcatgtctttgccgtcgacccggccgcgaatttagtagtagtagtcgacc

SEQ ID NO: 168008 - DNA, 435 bp, Homo sapiens
gcagcaacccaactgtgaagggaaccagccaggtctaccagcagatccttacctattctaccagtccttggtgaaatgagagaagcttacatttagaagctcttggtattaaaatatcccttcttttctgaattgataatagaatttggctttgctaataatgtcctgatgtgccaaatcaacaattgacaagtctgtgtggtttgcccaatactccatgggctcatgaactccaaaaacctgggaagcaccacagtagacaatggcctggggcctcacaagagcaggaacctctgtgatcctggtttatgagcatagacctgtcctcactctgtgtacccctgagctgcctgaataaaccacatgacatagattatcagctcttttcatttttttttttttttttttgagacggagtctcactctgtcgcccat

SEQ ID NO: 168009 - DNA, 237 bp, Homo sapiens
gataattgattacttaaaatccttatatatcttgctcttttttagatagattaatattgtctaaaagctcgcaattttcacgatttattacaatttgttttttaatggcactgcctctggcctagttattcaactcccagtctctatatcttaaggggtcttcttaccaagggttgcttgatgaggaaaatcacacaagcctgtttaccctcctaaatctctgatacctctctcatt

SEQ ID NO: 168010 - DNA, 460 bp, Homo sapiens
ctccattaataatgggattagaaagacacaggtgagttagtgctgaagatgcagagaatgaaggcagttcaacataataaagaccatatatgaaaagcctccatctaacatcacactcagtggtaacagactataatccctccctccctcagaccaagaacaagacaagtgtgccactttctctacttctgctcagcacagtcctggaaatcccagccagagcaactaagcatgaaaaagaaaggaaaccacactggaaaggataaagtaaaattatctctgttcacagacatgattttataagtagaaaatcctaaagatacacacacacacacaaaaccccaactaggattaataaataaattcagcaaaattataggatatggccaggcgcggttgctgaagcctgtaatcccagcactttgggaggccgaggcaggcggatcacctaaggtcagga

SEQ ID NO: 168011 - DNA, 498 bp, Homo sapiens
agatactagagttaaaacagaaagcaagaagtagggggctctgcatgttaagtaggttcagcaaccgtaattagtgattttctagggttgaacaggacacttcctgctttcatgggaaaatcagtttgctgctgaccaacccgtacttctagagcactgagtaaccagcctctaattcggttgtaatgaaccgtgtattaatgttgcagccttctgcccgctctggagacctcacgccatgcctggccttgcagtgagtcttgcgcttgtcagttatgggggcaggactttcttgcaaagctgcttttgttttcccactaaaaatgtgcttatttctaccttaaatagagatgaatcccacaacttgcccaagataaatatgggagacgaaaatctcatttatatttaaggtcatgtgtagttttctatttctcgctctctcacacacatacacacacagagagacacacacttacatcttaaatgtctgcaaaaaaa

SEQ ID NO: 168012 - DNA, 206 bp, Homo sapiens
tatgtagatgtggaattgctgtgtcaaaggatagttgaatgtttaactatataagaaactgtcaaaaattttctaaagtggttgtgctattttatcctcccaacaagaatgaattagttctccagttacatccttgccaagagttgatggtgttatcagtcttttctcccagtctgagttttaccttttcagtttcttaatggtgg

SEQ ID NO: 168013 - DNA, 307 bp, Homo sapiens
aagtaccttatatataaacatcaatcaatagcatactgaattgatgaattaacaatttaaatggggtaaaattaaatacttcactattttagtagacaatttccatgtgtgttacactgtgctaggcactggagatttggggaggaaggatatgatgatgtgcaagacaaaggcatgcttacaagagttccacactctacaaagggaggaaaaaaatgtccctaaaaatgatttgaatcccatccccatcattcatattttgcaatcttgagcgagtttacttagcttctcttgtgtcctcattttt

SEQ ID NO: 168014 - DNA, 463 bp, Homo sapiens
tgcaggctgccccaggacagggcatgcaggcagacacagggctcaatggggtggggagcagattctagctcagtcagccagaatgttctctaagcagagctgttgagatgaaaatcttcgacttttgtgagcaccacgaggtgctttatgtatgttatggtgcattctcccgtgagtgagacgtggttgtcctattccacagatgaagaagggaagtcacttgcttcatggccagggaagggctccagcaagacatgggctcctgaaagtgacagtgtgtgaaggcccggagaggcacaggacctgctggaggatgccaaagtaaacttggtggccacatgtcaaagacggagatgcacaaaatgggaggaacctagatccctgaatgactttgtggagctgagcccctaggccaccctgcattggatgtgaaatgagtgagaaataaacctttggagtttca

SEQ ID NO: 168015 - DNA, 435 bp, Homo sapiens
tacgtggttccggacaggacttctccactcggcactagtgccatttgtagtggtgcgttctctgcatggtagatgttggcagcacccctgcccctagttgtgatactcaaaactttcttcagacagtgctgagagcccctggcaggcaaagttgcttccctctgtggtcgctggcttaagagagtaaagaagcctgcaccttcatgttcctgcccatggcaccttctctaggatcctggaaaccaaataggatttcagaaatggtttttctcccatttgggcttcgagcgcattgccatgtccctgaccattccaaaatgtaggtcaggtcttctgtgttaaatgcacagacacctggtggatactgtcaaggttttggtttttgtttttgttttttgttttttgtttttgtttggagacagagtgcctactccg

SEQ ID NO: 168016 - DNA, 614 bp, Homo sapiens
tcagtgctggcgcctttatcttgaccttcacagcctctagaactgtgagcaataaatttgttgtttatattacccagtctaaggtatttcatcacagcagcctgaactaagacaaataggtatacaatcttatattctgccttgttcatatatattccatatatttttctcgtttccagatagtcttgattatttcaaagggctgcataattagctgtactgacacagtataatttaccaagccctacactctggtaaaccatttaaacctttctaatattttgcattaaaaacatcacagtcaataactttgtatataaaaagcttttggcttatgttaaactacactctagtatatactgctgaatgaatgaatggacttccctgaagcattgcaactgtctcaatagtccaaacattttcacaggtcttgcaaagaaggacagactgcttctaaacggccttacaatttacaaggtaatcagaaatgcattcgctactatctggccaagaaaggtgttaatgagtttttgccaacttaaaaaaaaaacgaagaatgaggaaaaaaaccacacagacaacagtgtagtcagccttaaaatcagaggaaagtg

SEQ ID NO: 168017 - DNA, 424 bp, Homo sapiens
agatttccttcattgactgaaaaaaaaaagagtcataaagaaaaaaaaaactcctttttgcagccgcagccaccatttctccacatcctgtcctctccatctccttttctcacatatagtgacagtgtctgaagccgtggcagccactctgtggctatgtaacaacaaacccaaggacaacagggccaacacactgaaaactgtggaaagatgataatctcttgggaccttgatgatacctttaaattgtagaatcttcctatagttcttgttatgttagaaatatttcttttatttgagctgaaaccatttggattagttaattatagctgctataaaaaatgaactctaaaacagaaataacttaatacataaaaatctcatctctctcttacaacagctaaaacaggggttttcagttggg

SEQ ID NO: 168018 - DNA, 562 bp, Homo sapiens
actcaccccagaacggacaaggcgagggactatgatgggaacatacatgcccctccctccctgtcacttcgggctttctgccagattgacacaggggcagccaccgctctgagagacacgtggcttcgggcacccagctaggcaagcccagctcagtcggtgtccggaaaggccgcgttctcccgcgccaggggccggcaatggtgcggagaggggagaaagaagcaaggcgcctcctccgacagggactgaaagtctgagggcgggatgtcactcaaggcctaggggcagggggcgctcgtacgttcgggcctcaggactccctgccgccgccgatgctgctgccccatctcagcacaaacagcctcagaccgccctggtgcgggggcgcctctcgcagtcgaggcctccacctcccggccccgcccccgcgcggggaggagacgcctcccacctgcgagcgccggggaagaccgaccccggagcggggacccccagcacacacgcgcgtacacacatgcacacacagagaccactgccggtccgctcgcccggcggccgc

SEQ ID NO: 168019 - DNA, 373 bp, Homo sapiens
atcaacgagcacagaaaccctggattccacttttctttcaaataagagagacttccaatagtaaagataaaggaagagaacacctgggaatattaatataatttgaagtggagcttttctgggcaagagatcttgtgctggtgctttaggcaatttgatgagtcctcttctagggtctctggaagctttcttgtaggtggccatggtctgatatgcacaccaggagcagagctttgagcttctgacgttggagcaattgctgaccatcctgacaagggaactgcagagctggttttgagaactacttccagagaacagggagaaggtggttggtccattggtggaatgagagagaatttgatgagctgagaca

SEQ ID NO: 168020 - DNA, 501 bp, Homo sapiens
cctggcaccatcatacccaccgctccttagccctcagttcacactcactgccacggcctccgctcggtctcgtcactggtgagcccgccccacacctgtgtgcctcactcccaaggcgccttcttcaaatgctgcctcagctcaaacacaatcaggtcacaaggcttttctaaaaagcacttttcagaaacagtgacaccaaggcgccaaaggctgctcaggtgccttagcggccagttctgcggcatgtgtctggggctgacaggagggaccagcgacagccagctctgaggagcagagaccagacgatgaggccctgtctcagctctggaccttgttctctcagctcaaacacttacaatggtttctccactgcctaaaagatactggctgctcacagttctcggtttgaaatgtgacaccccacgatctgctttcttcctgcccctctaaccacagctctttcaactctactaaaacttcaaccaaactttcctacgt

SEQ ID NO: 168021 - DNA, 243 bp, Homo sapiens
ggaagggagacaggtagcttgtgggcctctcacttgccatcattgggacattttatttactcagcagatatgtccccaacccttgctctgtgccaggcactggctgaggtcctgggattcaaaggagagtgagcacagtcatggtttcctgcaggagctgagaaatggggtgggtgcagcaccgcattcaggtttggggaacctcagtcccctcatccacaatgggcccagtgatacccctcc

SEQ ID NO: 168022 - DNA, 448 bp, Homo sapiens
tctactaaaaatacaaaaattagccacgcatgatggcggacacctgtaatcccagctactcgagaggttgaggtgggagaatcacttgaaccagggaagtggaggttgcagtgagctgagattgcaccattgcactccagcctgggcgacacagggagactccatctcaaaaaaataaaaataaaataaaataaatggaggtaaagttgctggatgaaatcaacatgaaaactgtatttatatatatgagcaacaaagtaaaatgaaatcttaggccgtgtgtggtggctcacgcctgtaatcccagcactttgggaggccgaggagtgtggatcacctgaggtcagtagttcgagaccagcctggccaacctggtgaaacccgtctctactaaaaatacaaaaattagccaggcgtggtggcaggcacctgtaatcccagctactcg

SEQ ID NO: 168023 - DNA, 379 bp, Homo sapiens
cactttttcttgtaatactaaatatttgtgctcactaatcaatatttaaaaatcaaatttctagagtaatctaatatttaaaaaattcaggcctggtgcagtggctcatgcctgcaatcccagcactttgggaggctgaagagggtagatcacctgaggtcaggagttctagaccagcctgaccaacatagtgaaactccatctctactaaaaacacaaaaaattagctgggcatggtggcaggtgcctgtaaccccagctactcgggaggctgaggcaggagaatctcttgtacccaggaggtggaggttgcactgagccgagaatgcaccgttgcactccagcctgggtgacagagtgagactccatctcaaaaaaa

SEQ ID NO: 168024 - DNA, 135 bp, Homo sapiens
gggagttatgaacctagtttggaggagaacttgaggcatttggggcaagctccaaacagatgtgcttcttgcttcatttttgcatgtgaccaagtcgcaagaggcgcattccttgcatgaatttctttgaaggcc

SEQ ID NO: 168025 - DNA, 446 bp, Homo sapiens
tgaagagtacacagcagcagagtggggtggtcaggtccatgtcttaggattggtccatgtctcaggattggtggggcaggaaatccgagctcactgacagtcacagctgagatctaagtggtgcttctcctggccggtatgtggattcactcatttaattcttaacaaccttatgacttaggtactagttttattttcatgtctgttttgcagatgaggaagctgaggcaggttaagtgacttgtccagggccacacggctggttagtggattctaacccagtgtgactccagagttaaaattcctaaccactgtgtcatactcaggccagaccagcaaggggacggtttggagggttaggggcagggctgatggtggtctgagtgaggagagttgtagtggagacggaaggcgtgcatgggattctacagctctttaggagccag

SEQ ID NO: 168026 - DNA, 2660 bp, Homo sapiens
acattgtagaagagaaactactttctgaagaaacagagtgtctgctacgagctcaattttcagattttaagtgggagttatataattggagagaaacagatgagtactccgcagaaatgaaacaatttgcatgtacactctacttgtgcagtagcaaagtctatgattatgtaagaaagattcttaagctgcctcattcttccatcctcagaacgagcggccagtgaggcaggaggaaaaccaggagattgtgatggcctggaagccaagtgtagaaagtatttcaaggagggagtagtccactatgtcaaatgctgctgggagatcaggtggttatccaaatgccaacccagtccaggtttcaacagcaacattttttcttttcttcaacgaagagtagagaatggagatcagctctatcaatactgttcattgttaataaaaagtatacctctcaagcaacagcttcagtgggatcctagcagtcacagttttcaggggtttatggactttggtcttggaaaacttgatgctgatgaaacgccacttgcttcagaaactgttttgttaatggcagtgggtatttttggccattggagaacacctcttggttatttttttgtaaacagagcatctggatatttgcaggctcagctgcttcgtctgactattggtaaactgagtgacataggaatcacagttctggctgttacatctgatgccacagcacatagtgttcagatggcaaaagcattggggatacatattgatggagacgacatgaaatgtacatttcagcatccttcatcttctagtcaacagattgcatacttctttgactcttgccacttgctaagattaataagaaatgcatttcagaattttcaaagcattcagtttattaatggtatagcacattggcagcacctcgtggagttagtagcactggaggaacaggaattatcaaatatggaaagaataccaagtacacttgcaaatttgaaaaatcatgtactgaaagtgaatagtgccacccaactctttagtgagagtgtagccagtgcattaggatatttgttatccttagacctgccaccttttcaaaactgtattggtaccatccattttttacgtttaattaacaatctgtttgacatctttaatagtaggaactgttatggaaagggacttaaagggcctctgttgcctgaaacttacagtaaaataaaccacgtgttaattgaagccaagactatttttgttacattatctgacactagcaataatcaaataattaaaggtaagcaaaaactaggattcctgggatttttgctcaatgctgagagcttaaaatggctctaccaaaattatgttttcccaaaggtcatgccttttccttatcttctgacttacaaattcagtcatgatcatctggaattatttctaaagatgcttaggcaggtattagtaacaagttctagccctacctgcatggcattccagaaagcttactataatttggagaccagatacaaatttcaagatgaagtttttctaagcaaagtaagcatctttgacatttcaattgctcgaaggaaagacttggcgctttggacagttcaacgtcagtatggtgtcagcgttacaaagactgtctttcacgaagagggtatttgtcaagactggtctcattgttcactaagtgaggcattactagacctgtcagatcataggcgaaatctcatctgttatgctggttatgttgcaaacaagttatcagctcttttaacttgtgaggactgcatcactgcactgtatgcatcggatctcaaagcctctaaaattgggtcactattatttgttaaaaagaagaatggtttgcattttccttcagaaagtctgtgtcgggtcataaatatttgtgagcgagttgtaagaacccattcaagaatggcaatttttgaactagtttctaaacaaagggaattgtatcttcaacagaaaatattatgtgagctttctgggcatattgatctttttgtagatgtgaataagcatctctttgatggagaagtgtgtgccatcaatcactttgtcaagttgctaaaggatataataatctgtttcttaaatatcagagctaaaaatgttgcacagaatcctttaaaacatcattcagagagaactgatatgaaaactttatcaaggaaacactggtcatctgtacaggattataaatgttcaagttttgctaataccagtagtaaattcaggcatttgctaagtaacgatggatatccattcaaatgagagacctaaaatatattaacattttaattaagaatacttgatcaacattttttgaagttcaatttaccatattttataaattgcgcattctgcacagtggacaagtttgcaattctgacttattaaaatttcaaattctgcatatcacaaaatctccttatacttttggtatggcttgcagcatttatgagttttccaaaatatagaaagcagtaggtcagtaggagcaaactagccaacaggtactgtctttgaatttactactgtaagactaagcagtgttactggacacagttttaacttgttcaatctgcttcaaaaacaagaaaaacaacaactatgagttatca

SEQ ID NO: 168027 - DNA, 2294 bp, Homo sapiens
acattgtagaagagaaactactttctgaagaaacagagtgtctgctacgagctcaattttcagattttaagtgggagttatataattggagagaaacagatgagtactccgcagaaatgaaacaatttgcatgtacactctacttgtgcagtagcaaagtctatgattatgtaagaaagattcttaagctgcctcattcttccatcctcagaacgtggttatccaaatgccaacccagtccaggtttcaacagcaacattttttcttttcttcaacgaagagtagagaatggagatcagctctatcaatactgttcattgttaataaaaagtatacctctcaagcaacagcttcagtgggatcctagcagtcacagttttcaggggtttatggactttggtcttggaaaacttgatgctgatgaaacgccacttgcttcagaaactgttttgttaatggcagtgggtatttttggccattggagaacacctcttggttatttttttgtaaacagagcatctggatatttgcaggctcagctgcttcgtctgactattggtaaactgagtgacataggaatcacagttctggctgttacatctgatgccacagcacatagtgttcagatggcaaaagcattggggatacatattgatggagacgacatgaaatgtacatttcagcatccttcatcttctagtcaacagattgcatacttctttgactcttgccacttgctaagattaataagaaatgcatttcagaattttcaaagcattcagtttattaatggtatagcacattggcagcacctcgtggagttagtagcactggaggaacaggaattatcaaatatggaaagaataccaagtacacttgcaaatttgaaaaatcatgtactgaaagtgaatagtgccacccaactctttagtgagagtgtagccagtgcattaggatatttgttatccttagacctgccaccttttcaaaactgtattggtaccatccattttttacgtttaattaacaatctgtttgacatctttaatagtaggaactgttatggaaagggacttaaagggcctctgttgcctgaaacttacagtaaaataaaccacgtgttaattgaagccaagactatttttgttacattatctgacactagcaataatcaaataattaaaggtaagcaaaaactaggattcctgggatttttgctcaatgctgagagcttaaaatggctctaccaaaattatgttttcccaaaggtcatgccttttccttatcttctgacttacaaattcagtcatgatcatctggaattatttctaaagatgcttaggcaggtattagtaacaagttctagccctacctgcatggcattccagaaagcttactataatttggagaccagatacaaatttcaagatgaagtttttctaagcaaagtaagcatctttgacatttcaattgctcgaaggaaagacttggcgctttggacagttcaacgtcagtatggtgtcagcgttacaaagactgtctttcacgaagagggtatttgtcaagactggtctcattgttcactaagtgaggcattactagacctgtcagatcataggcgaaatctcatctgttatgctggttatgttgcaaacaagttatcagctcttttaacttgtgaggactgcatcactgcactgtatgcatcggatctcaaagcctctaaaattgggtcactattatttgttaaaaagaagaatggtttgcattttccttcagaaagtctgtgtcgggtcataaatatttgtgagcgagttgtaagaacccattcaagaatggcaatttttgaactagtttctaaacaaagggaattgtatcttcaacagaaaatattatgtgagctttctgggcatattgatctttttgtagatgtgaataagcatctctttgatggagaagtgtgtgccatcaatcactttgtcaagttgctaaaggatataataatctgtttcttaaatatcagagctaaaaatgttgcacagaatcctttaaaacatcattcagagagaactgatatgaaaactttatcaaggaaacactggtcatctgtacaggattataaatgttcaagttttgctaataccagtagtaaattcaggcatttgctaagtaacgatggatatccattcaaatgagagacctaaaatatattaacattttaattaagaatacttgatcaacattttttgaagttcaatttaccatattttataaattgcgcattctgcacagtg

SEQ ID NO: 168028 - DNA, 521 bp, Homo sapiens
taaagtgctgggatgacagatgtgagccactatgcacagcctccccagttgttttcaatccattcttttgcctacttgtaccttctttcccttccacccatccacatttttcgtgttcccttcctttcttcttctcaccatctattttcctttctgtttctcctccttcccctcttcttttccccactccacattttatgcctaattccttccagaggagcacagacctcattagttgagatttctttaaccccaacccacatgatttttagtttgaattcctaaaacttggctatagattataaatggctctgtgtttgtagacatctttgttggcctaacgagaaaatttgcctctaagatcatttatcagagatctctgtcccatgtgtaaacctatctagttgccagttacacaatgtctaaagtgtttaccttaaggggaatttttgtcaccttaaaaattttctatatttggtacctctgtatcttgaactttaattaaaagtgtatcttcataa

SEQ ID NO: 168029 - DNA, 508 bp, Homo sapiens
aattaagcatcacatccagattcagatatggcatggattttggaattatcagacagaatttcacttgatctaagccaaaaggccaagaagtgatatcagacagaatttaaaataactctcattaatatgttaagaactataatggataaaatagagaacacatgagtactgtaaatagagacagctaaaaatactaagaacaaatcaaaagaaaatgttagaaaattttaaaaaaggcactgtaatagtcatacttttggtgggattatcagtaaactgtacgtggccaaagaaagaataagtgagcttgaagatatgtcagtagacagtttagcttagaaagcacaaaccaggataaaaccccccaattttacacctaagtatatctattaaactgcagaaaactaaagaaaaaaggaaaatcttaaaagcagccaggtgtgcaccttaactatagaagaagaaagataagaattatatcagacttcttttcagaaatcatgcaaga

SEQ ID NO: 168030 - DNA, 215 bp, Homo sapiens
caggcagtgtggtgggcgatggatggatgctgcctcccttgggcggatggtttcttctcccagccccttttttgagtcctgcaagaggaagaaaaagccagcagcaatatgcttggatagctttaactttggatctgtgttcagtgaaaatgctgagtcactttgaatgacctgttcccttatcaattttctcctttggcttttgtgccttgtaa

SEQ ID NO: 168031 - DNA, 462 bp, Homo sapiens
cacatagcagaatgaccattaaaagaggcgggaatgaggtaacatgactgttgatggtactcatctaaatgttttaatatattttgaagttttaaaacttaagccatttgcagttttagtttaaaattcttggtttcttcatagcagcaagttaagaattgtggatgcttcgatattcaactatttacactgtttagagaagaagctgtgctaggagaaaggggagaaaggaagaccactggaggcagccactcctctgttctgggtatttcacctctgctctgaaacttgcaggctgcattgagcaaaagaaaaacaatgtgctttgtgacagcatgcgtgaatgtagaggactttatgctaagtgaaataagccaggcagaagaagacaaatactgcattatctcacttgtatgtgaaatctaaagagttcagttcatagaagcagagagtagaatggtg

SEQ ID NO: 168032 - DNA, 323 bp, Homo sapiens
gccaaagaactggaggaaggacatcgatcacacagtttcagagctgaaagggcattaacacaaggcagttacttctgtgatttatagagatgagaaaggagcaaggatttagaggactagccaaaacacactcagataaaccagctggcaagtgtggatttgaattctgaatactgaatagaagcagctaaagaaacaacatctccctgtgaaacccaacccgatcaaggcaggtgacatctctccactcaacccttagtttaatcaattcctcagttagaactggcttgtcttcttatctcctcttttcatgctcaaaacca

SEQ ID NO: 168033 - DNA, 310 bp, Homo sapiens
gaggcgcccatcgggtgatgcacttggcccacacgcgtgtgctggggaggccgtggggacacagaagtgtgcttcggtgcaggacaggctgggctgagcagctccaggaagtaggcggtggtgaaaccctaaaacatggacctactcacacaagggcttggtgaggggacccccagagctcacagcacaagtgggaatcgtgcaaactaggcttcatggtggaaataccaggagacttttaaaagttcgtagaaaatgcatattttgaaaaaaactgcatgggtttcaaaatgtttctgcaccaaaataa

SEQ ID NO: 168034 - DNA, 497 bp, Homo sapiens
tctaccctactggcagggctatggggaaacaggcactttcatatgctgctgatgggaatgcaaaatggcacaaggcctctgggggaaaatttggcaatatctagcaaaattacatttgcattcagcatttggcccagctgtaccactttttagggatctacctaaatctacactggaaaaaaatgaaaagacacatggacaagactatttgttacagtaaaagattgggaacagccctaatggccatcagtaggagactggtttaataaaccaggacacatccacacaatcgagcgctatgcagctataaaaaggaatgaggaatttatgtagtgctttgaagtgatatctgggatatagtcttcagtgaaagtcaagggacagaacagtaggtatagtatgctgccttttatcttaaaaatgaaaagcatctaaatatatagatacagatatggatatagagatttctgtgtatgtgtgcatatgtttgcttattt

SEQ ID NO: 168035 - DNA, 107 bp, Homo sapiens
aattcctaccctccatttgtctgtcttccctgagctggccaaagtaggcaagatgtagtccacacaggagtcagaaggcaggagggtatcttgggcatgggaggcag

SEQ ID NO: 168036 - DNA, 195 bp, Homo sapiens
tgaaagaaagtgtcaaattagagtcaggacatttgattgctgtttcaccttagtatctccaacctaacatagagaacaatctctgcctagactggtgcatacagtggttatggaaatgaaatgagaaatgagaaagcttcaaaaaccaaatttcaaaataaaagagtatttctcagattaattgttctcaaactg

SEQ ID NO: 168037 - DNA, 352 bp, Homo sapiens
gcctatccctgctggagttcaaatgagtatctgcaactcagagctttccctcaaacaccagacctctctatccatctgcctgctaaatacttctgcttgtaaatgttacaagcactttaagtttagtgcaccacacaccacacccatctctccctggccatcccagcccctgacctcactgcttctgagtgcccctccagtcagtgaatggcacccccaccccctctgacccttccatgaggcacaccagggctggttccttctaattgctaggcataactccaacctatttagtcctcaccttcctcattaacagagtcaaatctgggccccaatcataaaagtctgaccg

SEQ ID NO: 168038 - DNA, 359 bp, Homo sapiens
aagatgttgtaagactatacataggattattccaccaactctttaaatgttcgtggaaaaagtgtgggtaaaaatatacttatttatttgttcatggttaatggatagggttatgggcgactttattttatttctgtaatttatacatttttacaatgtaaatactactttgtttttcttatcattaattgcattgttcaataatatgtaattactgtggaaaaggtagataatacgtaaaaagaagatacatacacacatagttcttttgttatttatgtttgttagtttgagacagagtctcactctgtcgcccaggatggagtgcaattgcgtgatctcagttcactgcaacctcc

SEQ ID NO: 168039 - DNA, 504 bp, Homo sapiens
aagatggtcaaggtaagcagttccttagtctcctattgtgacaaatggtcggggggatggggagcctaaatgttaaaaacaaaaaacccacctcttaaaaacaataaattctactctaagaatgtttcatactactttggaatcagttagcaccccaacacaacttgagccaaacttactctttcttaaagtcctaaaaggagtcatctagcaccaacttgctttcctacactgcaaaaaagaaattttaccttaaccaaagcctacgtttaaaaagagtaagaaaacagttttctaaagaagcatgcattacctgaactattccttcctattttgattagcaattgttttaaaattagcatgttagattataacctcaaagtaaaattaaattctgtatctattctccagataagacctaaagtaaacattacactgcatgttcaaaactagatcaaaacacttgaaatgctacagtaggtgcagagaaccagtttcatagga

SEQ ID NO: 168040 - DNA, 198 bp, Homo sapiens
tatctacccatctgtttactagaggtcctctctgcatatcccatctatgtgggggtttgcatagagaacatcaatactcaaacaaaagaagagctgctcccgctgaataaacctaaggttctgtggaactgttagatacagctaggttcctcttcaaacagcttgtccagttcccctcttctttattctctagttcca

SEQ ID NO: 168041 - DNA, 520 bp, Homo sapiens
agacatatcgcccaacacaaaggaatgacaagggtttgaggtgatggttttgctaattaacctgatttggtcattatacattgtatgtatcagaatatcacatgtacccccataagtatgttcaattatgtagtcgagaaaaccctacagggtaagaaagaggtgccacatcatgggcacttcccagtccagggtactgtaattaaaggtccctaagaaaggtcctcagatcctccaacatatctagtgaaatgatacctaaaacccataattagaactctcgcttcctttcactgcagttccactaggttgggccacattgggtgaggctgggtgcagctagaaccagcattattctgagctgttggcactcttttccaccccaatacagatgaagatactgagaacggagtgtgatggggtaggtgtggaaatagatggaagtaatgacgagaagacaactttctagtattacccacaattgattcatttcaggtctctctcccatgaaccccactga

SEQ ID NO: 168042 - DNA, 149 bp, Homo sapiens
ttgtttagtctgcaccagccatgctggcctccttgatgattctggaatgtgccaagatactcctgcttaggacatttgcatctgctattcactctgcctggaatgttcttcccccagaagttgtacaactatctcctttacaatcttca

SEQ ID NO: 168043 - DNA, 583 bp, Homo sapiens
ttccacattcttatatagcctttattacattcagtgaaattctgtttaaaaacacacattctcagtcttcaaatgaaaatcaacaaaaatatatggctcactataactgtgctcacagtcaactttgtggaagcgcaccttaatttgcttagtgagagatattatatatactacttgatttcaatgttagcttttgtaaagtagctctttgttcttaaccgatggtatcttgttagaaacccagtcctatccattccttgactcttgcaagtttaactggcagaagactgcaaaattatcaagtaaacatgtgacttaaccattccagatcgttcaagcgaacaattcttcaaaacatccaaaatttatactagaataaactcaaatttactatgcaattgcacaacctttcattgtatttctaaagagcagaggacacagaaagaggagaggggcagcccatcggactcacttgacgtattaaggttagcttgccttatatgtaaattttcatatgcacccagccgagcacacaaactcagttaccactgccctggacatgctacatttgagtccaaaaaaa

SEQ ID NO: 168044 - DNA, 405 bp, Homo sapiens
acctgtcctcaagtttatcatatttacaacatgggagacagacataaaagccggtaagctgtaatacaatgtgatacatgctagaagtatatacaagagaatatcttctaggaagtatttgagtatacttagattgagaaggaaacttcctcggattgtctccaaacctattatctaaaacaaaggaaggcatgcccctgaaatggtttctatctctgaacttcccattcccactctcaccctacctgtaacccagggtttcttaacctctgcactagtgacactttgggccagataattcttcactgcggtgggcagtcctgtgcactataggatgtttagcagaatccctggcctctagccaccaaatgccagtagcacccttcttacgttaccccctccatg

SEQ ID NO: 168045 - DNA, 212 bp, Homo sapiens
tgctgtgtgtaagataacagtttccattccaaactgagatacaatgtctttgatggagccagccgggtaggcctttcgggcatcaaaatccttactaaggaaagagccgttttcttcactctggcatatcccctttgtgagaactgcaatataactctccatcattttaactgggctcccatgtttcaggtacattctacacaatatcctag

SEQ ID NO: 168046 - DNA, 404 bp, Homo sapiens
gtggtttacaaataagcccccctgacatttttgtgacatgaggttggtgattaaacctattttacagatgaggaaactgaggctcagcgaggtcaagtgccttccccaggtcgcatagccaggaaatggtgaagccggactttgaacctaggaatgtctggctctaaagccaaagctcattctttctaaatctgcaaatctcataccccgctgtggccctgggaggcttgcccgtgccagtggggaaggcacctctctctccaaccaagagatcaaaaagatgggtgtgtgggctgggtgcagtggctcatgcctgtaataccagcactttgggaggccatagtgggaggatcacttgagcccaggagttcaagaccagcctgggcaacatggtgaaaccctgt

SEQ ID NO: 168047 - DNA, 228 bp, Homo sapiens
gcctccaggcacatggtaactcccagctggttctctgactttggagtcaccgggtgatgtgcaattcctcacttgtgtgctttgaaggttgcatggaaagaacccccaaatgctttccagctcagaaattccaagataatttttgggtgttcaatcaatttgaaagctcctaccaccaaccccgtcagtttctttctacttttatgctttccaaagcttccaaaatca

SEQ ID NO: 168048 - DNA, 667 bp, Homo sapiens
ggcccgtgcagagaagaaagctgcggcaagggggatctccatgaagaccccaactgtcccacgagcaggttaaccccgacagcaccttggtggagaacaagaagcctcagctggtggtgactgcacgtgactctcgtcgagcttgctgtctctctgtctgcgctgtgtcctacagtggggttcccttactgcgttatccaggggaaggcaggacggagatgcctggtctgcaggaagaccccagaaaagactgtcaccttcacacaggctcactgggaagacaaagcagctctggctaaggtggcggaagctatcaggaccgattacaatggcaggtgtgacgagatccacagtcactggggaggcaatggaacctcctttgcaaaaattataactgaggaaattatgacagtgaaagaaatcagacctaaccgactccatcttgcgtctaacctttaagctgtccttgtccattcctcggcgtgggctgaacaaacttcggggaggaattcagctcgtggtttgactctgaaacaaaatttataatagcccttaaccgaaaagactcttcttgcctggggaccagtctgcctttgcaagactaacagattagctacgagatcagaaattgtagtttaggggtcatgcagactctgactctaagagt

SEQ ID NO: 168049 - DNA, 465 bp, Homo sapiens
aaagaatagcctccaggatatatgaaaactctttcaaatcaataatagacaatcacatgaaaaaaaatgagcaaagacttgaacagaagaaaatataaatggtcaataaacatgcaaatatgctcactctcattattaattagggaaatgcaagtataacaacagtgagataccattaactatcctctagatggctaaaattcaacagtttgataacaccaattgttggcaaggatgtgatgcggcaggaactcttcagactgctgttgattaattggtgtgttcagtttgggaaacaatttggcattatctagtaaagttgaagatacatatatcccgtgatggctattctactgccaggtcgatgatcttaaagatctcctaggatacatgcatcaggatattcaaagcagcattgttcatcataccccacactgaatacaacaaaacgtctatccacagtaa

SEQ ID NO: 168050 - DNA, 345 bp, Homo sapiens
ttgatgattaagattacatatcattttgagttttacgtagagaggttcagatgaatgtggagtatgttttgaagagagcaaaagataaaagagaggtaaacacttcatagaattagagctgtaacttagggaagaagaggaaatgccaaaagatcgaaagagtatgacctagtagctgccatagatatttggaagtttatcatattgataagagatttgacttctttatgaataaaagggaaagacctaggtcccttaggcagcagttagagggaggcagagtttaagtggctaaaagggggaacttgtggttctccaaaatggaataataggttccctggctgg

SEQ ID NO: 168051 - DNA, 406 bp, Homo sapiens
gataggtgctcaaggagtatctattgcctgacaagtcaattaaaaatgcaataaatactgctgctgcagccccacagagaaaaagactgatggttatcttggaaaggaggaagacggtccagacggaagccacacaactggctgcagaggtaagaacggaaggaagtcctgtacaagatgtgaaagaccgccagcaacttgagataggctttgttctgccagctactcctgctgcacgcaatgcttcacaaatcagtgctgctgccagcacctcggaggtgcacttcagctcggacgaaggatgcttctcaggtcacacagaaaaccaacaagtacagctgagaacaaagctcaaccacaacttctggctcaagacactaagacaaacctacctcccagcacaaaa

SEQ ID NO: 168052 - DNA, 365 bp, Homo sapiens
aatggcactcacgggagcctcgacctcctgggctcaggcgattcttctgccttagcttcccaagtagctggacgacaggcggcgccaccactctattttgttgctcctatttttagtagtgggagggtcttcctatgttgcccaagctggtctcgaactcctgggctcaagggctcctcctgccccagcctcccaaggtgttgggattacaggcgtgagcaactatgaggctggcatttggtattatttagtaaatatttgttgaaaatgagaaaagaaagacaagtgttccaaagaattttttttttaatagaaaggcaatgagagttacccttctagaattttacatgatgccacggtcatga

SEQ ID NO: 168053 - DNA, 558 bp, Homo sapiens
gtcaaagcatttgaaccaggcccaggctgtgggtgctactttctaaaagattctccccaagccaagggttaccaacttggacctcctcttacagtcctgtttgagcatgatccacctgatcaggcaatttctagcttaatctctttctaaacttttcattgcctggttcagtaccttattttccttagtaggatcctatgttttttgcatttttaagtttcttagttgtcttgccctctaacatttacagcattcgtaatttagcaaatcactaaatgttgtatttgtgattggcatgaatagacccgatatattttttaagctgaaaaagaaatataaccaacctgacattggtttttaaaagtattctatacatacttttattgttttggtaaattagatttggtgaaggttttggttgaagtttgggaaacgttttttatgattctgcagtttctgacatgctaggatgaagccagctttatactgagtaattaaaaagaaatattatgaggcctgaattgtgattttataaatcaatgacaccggtttgggaag

SEQ ID NO: 168054 - DNA, 214 bp, Homo sapiens
tcataaaacatcattatggtttgctatatcatgctttcagcacctttctgaaagataatatgctattttaaaataaacactatgtaaatagtggtgtctgttttgctggaaggtgtagtttggaaagaaacaatttaaattttgcataaaagcagttggttgtaaagcataattgatgcattcttttatactaattaaaattttcatacgtact

SEQ ID NO: 168055 - DNA, 399 bp, Homo sapiens
tatttaatctgatgataaaaaatgcatcattcttgtgttcatatttagcattaaatatgtttagcccatgaaatgagtttagcccacatgaaatggttaggaaccaataatctaagccagcctactacagtaggaaagggaagatgtacctacacattttagtaaagggtcgaggactgcataaactgttgttattggtcatcttgtttgaaatgaagtcattctctcccccaaatgatctgttttgagtcatttttaaaaaatcaatcagggacaccaatgacattccctctaagcttagttaacacttttcaatcttaatccttggcagtatttcatattgtgctctaaatgtcataacttttcctgctgcttctgaggtactccattttcctgatt

SEQ ID NO: 168056 - DNA, 499 bp, Homo sapiens
gctcggtttcctccactagtgcaggtctttgtaagggctctatttctcactgagataatgtgccagctgaggaataaattttacaacacttcttttacctccttggtaacaaggacaagagaaaccttgacaatatatctgatgtaaatcttaagtctcttagcagactaaaatggattcccagatgttttttctgagatgttgcaagaaggcactgcagaggtcaggaattccagttagttttgctactagctcaagatacagggtttttaaggtattaatttgtaatactttctaaaagtatttaattgctgttttttccatttcatcatccatctggttggccctatggtttctctacagtttattccttaagaaaacttcaaaatccaaggcaaccttgcttaggctgatgaattcaaattagcttgtatgttagaatccaacaagaacaggaattaataacttcctctttctacctcattaagaaactatttca

SEQ ID NO: 168057 - DNA, 629 bp, Homo sapiens
cattcacctttaaatgtgctttatagaacttttatagagagcatttattacataaaataaaaaaaaccttctttaaatttgcttcttttttctgttttagaaacaaggtcttgctctgttgtccgggctggagtgcagtggtgcaatcatagcttactgcagcctcgaactcctggcctcaagcaatcctcccacctcagcctcctaagtagctgggattacaggcatgagaatcgcttgaacctgggaaacggaggttgcactgagccgagattgtgccactgcactccagcctgggcaacagagcgagactctgtctcaaaaaagaaaaaaaagaaagaaagaaaaagaaaaggaaaaagaaaaaaagaaaatgcaaatttgttccaatgccactcatgttagggaggaatttgagcataactcaaattttatgtctatttatgcgcatttcctccaggagaaataccaggtaaatgcagaaaattgcacccagtcatgtaggaaaacacaaaatacacgagtcaaacatctaccggttcacacatatgccagggtgccacacccatctacgcctgctgtctcaacttcccctacaacttcagataaccttccttatgcccttcaca

SEQ ID NO: 168058 - DNA, 496 bp, Homo sapiens
acatccaggccttactttcctccctgttaccatctatatgtaaatgttttgactcttgtatttgtatattgatccaagactatgaaattatgaagccttccttgaatgcaaatcagagatttgtataagggttggaaaacagcacagaggagaaaaaaagaatgagaatgctcatcatagcctcagtgatagaactggaagagatcagtggcttcacagcccctgaacagctctcagcaagcaagtgggtttcacaggcagcacctcagggctccatgtagcagcctgcattccctggagctgtgagaagcaaaactcatgcaactggttgcagacatgtttacaagtcactggtgggccaaagatgtggccagaattggtctcaagacacagagaaatcaataaaagaagaaaaagaaaggataacaaagtaagaaccaaactgatgggccaaagatgtggccagaattggtctcaagaaacagagaaatgaata

SEQ ID NO: 168059 - DNA, 929 bp, Homo sapiens
cttttagaaattatatataaaatataacatgtataagtatcaattctgtcatgccctttaaaatgttttgagacagggtgtcttaaaaaagttgtttgcttctgtaatgaagtgtctaatctgtgccacctcattgctatttcttttttattattgacattttaaagaatacataaaagtagagagaataaaataagccccatatacccatcaccacagtttaaccagtatctaatcttgcttcttttatcccttcttctctctcaagctggattattttaaaacaaatatcaaacatcagatcacttcatacataagtatttctgtattacagtgactttcttatattaattattattgatataatttaattgttaatataattattgtattaatttttaattactctgtatagtttataaactatttcttggaatattctagtttatttcagcaaagtctcttgtgactctcctgccctcttttcaagacagagtgctgcaggaggctaccgcttctagtatatagtatatcctataacctatgttgaaattgtaggccatgctgctagattggagttcatattgttgctctgacatttacttgtatggccttagcctaataatttaatcttttttgcttcaattttctcatctttaaacgggagcaataatagtgcctcatcctaggtttttgtgaagattatttgaggcaaattcgtgtaaagcatttaatttagcacatgctaagtgctcagtaaatgttagctaaagttaaaaaatttttaaaaactaaatgctagctgtagagtgtttactgtgtgccaagaactttacaaataagaactcctgaggtgggcatatcacttgaggtcaggagtttgagaccagcctggctaacatggtgaaaccccatctctactaaaaaaa

SEQ ID NO: 168060 - DNA, 295 bp, Homo sapiens
ccctgtgctcctggcctgctttcacttcctggagctgctctttgtccccaaacacactggtaattgtggtctatccagaagtcgaattcaaagttccaagttcctggcacgaaagccccttgactgtgctgtggacagagaccccatctgtaattagaccaggctggagagaagatagaaggtctctccctgtgttcctcctggaaattggtggttatgatcacgtttatgtggcttaagcgtcaagcggatcaaagggcgtgagcctggatggcgtccgtggggcctctccgtg

SEQ ID NO: 168061 - DNA, 244 bp, Homo sapiens
ttgcttatgcctataacctcagcactttgggaggccaaggcaggaggaccccttgagcccaggagttcgagaccagcctgggcaacatagggagaccctgactctagggagggaaattacccacaaagccagcaaacaaattgagcgttctgtatttttattgtagagtttataccaatatccattctatagatgctctctgttgaaatgattcaagaaaaacgaacatctagtttttccttgg

SEQ ID NO: 168062 - DNA, 406 bp, Homo sapiens
tcccctgtcctcacaagctctctgacattccacacaacacaagagttagcagtcatccttcgactgatcctctgccctgctttggctcacttctcacataaagtctcattgaagagtcttccaaaataaagagggctgcatctgctttttctcagctctgccactacttcccaagggcaagtcatcaccatttctggcccatattactgcgcgaaagcagaaaggtgttgataataaagacagtaacagaaggtggtcatcttaactcaggaaagggtcttcttcaggattccagagaactcagtgtcctcagtgttggaaggcatgaatgaatgaaggatgaactgtcttttgaagaaatgactagaaggaaggaggaaaatcgtgatgcattacaatactgagc

SEQ ID NO: 168063 - DNA, 270 bp, Homo sapiens
agtgggaaaaaggaaaggggtttactgcttttaagcttgcattggaaaggttgtcagcccctgtcctataccttctgtgcctacacaatgaaaattgaatcctcagaatgacttggaatcagtctaccctgtggtttgacataaagttttctacatatgtaaagttaaccaggccccactatttctgcattattgaggttctcctctaagtagaatgtctttttgctcttcactatctttcaaaaaataatgagtaggattagagcactt

SEQ ID NO: 168064 - DNA, 116 bp, Homo sapiens
tgaagatattgataacaatcctaactgaattattaggaaactttctgaaggttataatcacactcaaagccttgccattaccctgcagtaccccttacatccaattccccaactcc

SEQ ID NO: 168065 - DNA, 476 bp, Homo sapiens
tctttaagagttatgtgatggttgaattaagtcatgatactgtctgatggaggcttcagtgtatacagatgtaagacaactagaacatgaggggagaagggtgaagggacctagatggtagtgaggtttctacatgctacttgaaatggcaaaacattaatctaaattgactgtaagagtatgtgtatttggccgggcagggtggctcatgcctgtaatcccagcattttgggaggccaaggtgggtggatcacctaaagtcaggagttcgggactagcctgaccaacatggcaaaaccctgtctctattaaaaatacaaaattagccaggtgtggtggtgcatgcctgtaatcccagctactcgggaggctgaggcaggagaattgtttgaaatcgggaggcggaggttgcagtgagccagattgtgccattgcactccaacctgagcgacaagagcgaaactccatctccaaaa

SEQ ID NO: 168066 - DNA, 609 bp, Homo sapiens
aattattccttcaaatatgttttctgtgttgtatactttttctcctctctcaggaatgccaataatttataggtttggtcactttacataatcccatatttctcaaagattttgtttatttttcttaattctttttttaattttttgtcagacttggttattttgaaagactggtcttcaagctctgaggttttttcttctgcttggaacagtctattgataaaactttcaaatgtgttttgaaaatttcagttgagtttttgaattccagaagctctgattgatttcctaagatgtgtatctcttacttcatttcctgaattgatttaggagtttctttgtgttgactttcaacacactctagtgcctgtgtttaaggctgttgagcaagatggaagagtgactgtattttcacttacatgaaaatagctctacccaatacgattttatttgttgcctggcagaggccatcccaggaagtttcttcccagttaaggcctcattttgggatgagatttgtttccattgtgttcctgagggcaactcattttactccaggagagaaatgtaatagtgatgtaggttgtattcaaacagtaactaactgaa

SEQ ID NO: 168067 - DNA, 1144 bp, Homo sapiens
gaattgcatttctctggtgattagtgcagttcagcaccttttcagattcctgttggccatttggcacagaaatttccacactccttgacagaggtgcttaacccttatccatcagcattctcagacagcacctccggttagggacagtatctgaccgtccgacatccctgcagcccccatgtgtcacacagactcagcctcaggtagatggtttccgtagatggtggctttctttggacccttgacatcaaccagttactatttggtctaggggtctcaccaacgctgctcatctagcagggccacacataacaaatagaagcagagcaagccctggaactcctgcctgacagtgacacgacgacagaaacatcttaccagtcagaggaccatgagaaatagattcaaggagcattccacgtgcaagtgagtcttggccccatctgcctttggattttagccgtgaactggaaggtattggaaagaagaccctcagaaatagcttaatcaaaatccctgcgtctgaaccaagtgccttatttctctgtgggcctcaagcttcgctgacatctgtggagcacactgtcctaacaggagtgctgtctgatttcccaacgctctgcaaaacaaacagcctggaagggtggctggtggaaggtggtttttagagagagacttgtagataacaggaaagtgaaggctgtaaggaaggttgtaattaaacagcacatggaaacacaatcacattattgtcccattccatagggataatgatgaccacttcagtgggaaaaggagaggttttaagtcattagggactatgggccaccttttaggaagatttattttcaaaggttaaaatagtgttttggcaattcaagtttcattttcagaaaatgtaattgatgggaacctcagtgactctggatgaataagatgctgttgagtggctctgacttgggccagccgtgcttctcacaggaccttggagaccaaggtcactgtgatctcaggttcagggggcaagtcctctccacacagccctagttggcctcacagctgaaaatgtctcccttactgttggactcctttgttcacccacatgagtttgtgaataaatcctttccagtctgaaaaaaaaaga

SEQ ID NO: 168068 - DNA, 309 bp, Homo sapiens
ggtcattttcttccttgaaatgggcacagaaatttccacactccttgacagaggtgcttaacccttatccatcagcattctcagacagcacctccggttagggacagtatctgaccgtccgacatccctgcagcccccatgtgtcacacagactcagcctcaggtagatggtttccgtagatggtggctttctttggacccttgacatcaaccagttactatttggtaagaacttaagtcattccagtgcctctctcagaagcatttgcatttagaatttctgtgcccatttaaggggatctcagacgt

SEQ ID NO: 168069 - DNA, 1077 bp, Homo sapiens
tctagaggatcccggcctaaagtggaactgctccgttggtcatgctgtaaaatggccatggccacagatgctgtgtcaggaggttgaagtctatagaacacactagacacgtaagagaaggatgccaggtcagggccagggacacaggctgcacatctcacctctcttgatctcatccctcttaatgggacctctcaggtctaggggtctcaccaacgctgctcatctagcagggccacacataacaaatagaagcagagcaagccctggaactcctgcctgacagtgacacgacgacagaaacatcttaccagtcagaggaccatgagaaatagattcaaggagcattccacgtgcaagtgagtcttggccccatctgcctttggattttagccgtgaactggaaggtattggaaagaagaccctcagaaatagcttaatcaaaatccctgcgtctgaaccaagtgccttatttctctgtgggcctcaagcttcgctgacatctgtggagcacactgtcctaacaggagtgctgtctgatttcccaacgctctgcaaaacaaacagcctggaagggtggctggtggaaggtggtttttagagagagacttgtagataacaggaaagtgaaggctgtaaggaaggttgtaattaaacagcacatggaaacacaatcacattattgtcccattccatagggataatgatgaccacttcagtgggaaaaggagaggttttaagtcattagggactatgggccaccttttaggaagatttattttcaaaggttaaaatagtgttttggcaattcaagtttcattttcagaaaatgtaattgatgggaacctcagtgactctggatgaataagatgctgttgagtggctctgacttgggccagccgtgcttctcacaggaccttggagaccaaggtcactgtgatctcaggttcagggggcaagtcctctccacacagccctagttggcctcacagctgaaaatgtctcccttactgttggactcctttgttcacccacatgagtttgtgaataaatcctttccagtctgaaaaaaaaaga

SEQ ID NO: 168070 - DNA, 673 bp, Homo sapiens
tctagaggatcccggcctaaagtggaactgctccgttggtcatgctgtaaaatggccatggccacagatgctgtgtcaggaggttgaagtctatagaacacactagacacgtaagagaaggatgccaggtcagggccagggacacaggctgcacatctcacctctcttgatctcatccctcttaatgggacctctcaggtctaggggtctcaccaacgctgctcatctagcagggccacacataacaaatagaagcagagcaagccctggaactcctgcctgacagtgacacgacgacagaaacatcttaccagtcagaggaccatgagaaatagattcaaggagcattccacgtgcaagtgagtcttggccccatctgcctttggattttagccgtgaactggaaggtattggaaagaagaccctcagaaatagcttaatcaaaatccctgcgtctgaaccaagtgccttatttctctgtgggcctcaagcttcgctgacatctgtggagcacactgtcctaacaggagtgctgtctgatttcccaacgctctgcaaaacaaacagcctggaagggtggctggtggaaggtggtttttagagagagacttgtagataacaggaaagtgaaggctgtaaggaaggttgtaattaaacagcacatggaaacaca

SEQ ID NO: 168071 - DNA, 510 bp, Homo sapiens
cacaaaattaaaccactctgctacttctccagtgtgcatggatgtgtccacacttttctttgcttgatatattttatcagttgctccaaacattagcaaaaagctgttcatggacttgaacattatttagaaacaagcaaccctggtgttgaacatgcctttgacaatatacagttgtctaccttgaatctttcgctcctttcattagactgaatagcacaatggttaggaattggaactctggaattggactgcctgatttcagaatctggttctgccacacactggctgtggaccttgaataatttacttaacctttctggggcttggcttttttatctgcaaaatggggataatgtgggcacaaacctcatagagctgctatgagaaccaaatgctatgatgaatatacaatgttggctcagtgcccggtaaatagtgaatgctccagaaatatgacgatgatgatgatgatgatgatgacaagtaattggccttagctcttgcttt

SEQ ID NO: 168072 - DNA, 146 bp, Homo sapiens
ccacagcaactatgtatctttttatttcagtcctctagattcctctattctattccaatgtgttaattttaaagaatttagcagctagcttccaatttaaaataacgagaaagattttgtcctctatttttatatgaagcacttta

SEQ ID NO: 168073 - DNA, 577 bp, Homo sapiens
ataagtgggaatcatgtcacaaaatagagtaggcagctccagggcctagtccctctaacagaagcaaccagtaagctggaatgagagactggaataaactatttgggaactctggaacctgatgggacacttacaacaatcaggggagtgtttgatgacgagagaagttgctgcttttcattagtaagcactgtgtgcaaatcaactaccaccctcactccttcgcccctcgccgatgagacaggcagctggaattcctggagaagctggctggtgccaaggcaggcagtggggacctgttctctaagaactgaggattttatgttttggttggtctggtgatgccgagtgcctggtccaggtacgtgcattggttttgaccctcttggtggcagcagcttcccccagcaggatctatattggaagacttacagacaagatgctttttttctttttggagccaggtatttaaggaaatctttgtcagatcactgattgaccgcagagagaatgaaacagaaacatcagtgaccacgtacaacaagtaatacacgtgctacaataatcgtttggaaaa

SEQ ID NO: 168074 - DNA, 220 bp, Homo sapiens
gtactgatgcaccagtcttctaaatgtctctgtgctttttacctctgccccctacatgtctgagttctggacagtgaggtgaagtgacagaagtactgggatgatctttgggcaagactgatgaaagagagttgacttgggggacaacctgctcgggtccccttccattctgtggaagctttgttctttcgctctttgcaataaatcttgctgctgctta

SEQ ID NO: 168075 - DNA, 407 bp, Homo sapiens
aaagtagtattaccaacacaatgagctttgcataatatcacaatatgaaatcaataagcaattctagtaacaaaaaactatgacctatgtctcaggcacagaaaacaatatctgtaggatgcattacttaagactgttcaacaaataaataaggtagacttctgagggactgggtatttccagtctaaggaaagtttttattagcaatcacttcatctaaagtaggaggattaaggtataatgggctttaacttcttttcattagagcatactattaaataaatcccaaacaactacatactgcatatttacataaatgttttgtttactccaaaaaattttctcccattatattacatctcatttattaaatccagagatttacgaaaaattttctttttcttttc

SEQ ID NO: 168076 - DNA, 409 bp, Homo sapiens
gtggagttgagaaaaaaaagtgtagcctgatggaggtctctggaatagaacaagccttgcccatgcaggcttccgagcagccctgggtggggttgtggggaggcccccagcggcttgtggcagccttcagctctgcaggagcccgtggggtctagagtcaccgccctctgtgaactggaagctgctctaatgctgtgcacgttttgatgtcacaactatttttacgattctgaaatttaaattcaacagacagccaggtaaatttaaattcaacggacagaacaggtaaatttaaattcaacggacagaacaggtaagctgacatgctggtttgttttttagggtcatgaaccttctagaggctcggaactgtcacattaggtttccctactgtaaattcttttcctga

SEQ ID NO: 168077 - DNA, 521 bp, Homo sapiens
ggataggagagacccttaatgtgcaccaccacacccagctaatttttaaaactttgtatagagatggggtctctccatgttgcccaggctggtcttgaactcctgggctcaagagatcctcccacctcagccttccaaagtgctgggattacaggcattagccactgtgcctggtcatgtactatattgctttgaaggtcttagccagaccaatatagatagatagatagatagatagatagatagatagatagatagacagaatgaagattggaatggaagaaataaaactttcatcattagcaggtgacatgattatgtacatagaaaattttaaagaataagcaaataacctgttaggataaatagatgaatttaataagattgctgaatactcagtcaatataaagaaaatcaactttatgcctacattccaacaacaaactaatagaaaatgttttaatgatatcatttacagaaggatcaaaactatcaaaaatctaggaataaatctaatgaaa

SEQ ID NO: 168078 - DNA, 369 bp, Homo sapiens
cagctgagagagccaaacagactccatttttgtttcttcacttgcagcccccttatccccctcccttaaggacataactagtgcaagctgactccaagcacatccaggaatgcacttactgatagacactgaggcacgctgtaccagcagctcctaggaacgcactcagttaatggtacccaaagcccctgcgtttatcactttgtgataattaagcccctgcacctggaactgtttattttcctgtaaatgtttgtgtaaccatttatcttttaactttttgcctgttctgcttctgtaaaaattgcttcagctaaactccccctcccctatttagatcaaggtataaaaagaaatctagccccttct

SEQ ID NO: 168079 - DNA, 241 bp, Homo sapiens
ttcaccaccgccacgttgttgacgaactgcttgaagcggtccctgcgggcggcgcggccccgcgggtcgccggcatcgagcagcggcttgaagcggctcagcagctcggagttgcgcaccttcccgccgtgctcctgcaggaagcccagcaccgccgcctggctcaccccggcagccgcagcggcggcggcggcggccagcgccatggtggggccctgggttcctggctcccggggcgggt

SEQ ID NO: 168080 - DNA, 230 bp, Homo sapiens
acttcactgaaggacctagcaatggtgaaactgagagcggagagattcacggtgcggtgaaagacaatggagctcctccctggaggcgcactggcacctgcagggtgttagcaaggagttggggatcaggcaagatgagcccagagcaatggggcagaggagagaaaattagctcaatttgggtctgaaacgtcagtgaggatttcacaggagagcagcttttgattgga

SEQ ID NO: 168081 - DNA, 588 bp, Homo sapiens
gctgtatcttcaaaatatgtctatttgactaagaagaagttattcaacaggagttattatctatgaaaaaagtacaaccagaatataaaaaacttgaggaggataaaaagatgttggaagaagtaatattaaatcttaaaaaacatggaaactgcacattggtgaagacacattggtgaagtacaaaaatataaattggatgtagaagaaagggcaatgcaggcaatagaaaaattagtagaaatccctttacaggttagtttgtaaaatcaggtaagtttatttataatgtgctttcatttatttcactgcaaattatattttggatatatatattgtgtttcctctgcctctcttatagcaatttgccttgtagagttctagcaaaaaggtggcatctgtttttactttcaaatatttaaatttccatcattataacaaaatcaatttttcagagtaatgattcttactgtggagtcatttgattattaagacccattggcataagattacatcctctgactataaaaatcgtggaagaaaacctaggaaatattcgtctggacattgcacttggcagtgaattta

SEQ ID NO: 168082 - DNA, 103 bp, Homo sapiens
tcccaagtactatgtaataggtgaataagttttactgacggccgtatttctcaagtgtagactgtgcccacctttttacctgccaattctaagtctaggaatg

SEQ ID NO: 168083 - DNA, 484 bp, Homo sapiens
agcactcctcagggtcctttaataaataagcaaatcacaaatggagtgatggatacgttgaccagttatgagttccatatgagcttatgtaaagccagggttgatttttaattaaattaaggcaaggaaaagcacattcacttaagaagaaacatggattcaaatcaacctgaaggagagagaagggttgagtcagttaaggggtatcagtgctcgaataatcacagtcctgactcagcctaactagggaaaaatgggtaggttttatcctatgagatagattcctacaagctgttggagtttctagaagtagctctaaatgtccccatcgtcttctttccccatgtcttctcatatcacaggagggcattccagctgcacaaagcttcatgaagggctgtcccctggctccatctctgccaatacctgtggggaccatgggaactgtccaggatggcaggaggatagaatgtgtgagacaaga

SEQ ID NO: 168084 - DNA, 490 bp, Homo sapiens
tggctcatcctggctcaaaaagcacccccactgagcaccttgcgacccccactcttgcccgccagagaacaaaccccctttgactggaattttcctttatctacccaaatcctataaaacggccccacccttatctcccttcactgactctcttttcagactcagcccacctgcacccaggtgaaataaacagccatgttgctcacacaaagcctgtttggtggtctcttcacacggatgtgcatgaaagcctccagtggtatactgagttggtcaggacccccattttctctgcgtccaacatccccagttctcctctttggtgattgagtggttcagggaaactggcctttgtaagaactgagaatctaaattaatgcaatttaaacctttgactgtgtatgtgagaggagagaaagaccctctcacattgttttatattgttttatattcagtaaaaacaacaaggaagtaaaaccaaagacaggca

SEQ ID NO: 168085 - DNA, 384 bp, Homo sapiens
acttaatacttcaaggagctttgaacccagatacgacatttgaattcagttggacaggtgttatcattattggctagacaggaaacctgaagctcagaactacttctacttgtccagttcacactgaatgtcttttattgttaaatgtttttgtcctttcaatgtgcctatgctagattaaaacagaagaatcagtatacatttgctttgttaaattaatacatagttttattgccagtaggctacatacattcccttgaaatgtatgtgcttatggaagaaggaacttttttttttgagacagggtctcactgtgtcacccaggcgagagtgcagtggcacaatcatggctcactgcagcctttacctcccgggctgaaatga

SEQ ID NO: 168086 - DNA, 359 bp, Homo sapiens
aagcccgaggatggagagtcacagatgcttgtggtaggtagcaggtggtgtgtatggaaatgggaatgggatgccaaggggatttgggcaggcaccaagcatctgccgcattaccctaatccaggcaataacactcacagtatcccagggattccccttctagcctcgaattcctcttattctcatttattttgtatttactttctagaccatagtttctcagatagtaaaggttctactgactttcctcatctctctgcaacctctttcctgcctagcttctcttccatggtcaagccaatacacacagaattttgccttccattcttcactcaggtgtttcttccacttggaatctg

SEQ ID NO: 168087 - DNA, 348 bp, Homo sapiens
cttcccactcttctcagtctcactctagcccccctcaaatcccccttcccttacatcactttctaattgatgtgagttaaagagtaagtgtcctctcacacatggtactatagcagtgttttttcaaacttttttgattgataaatatatgatgtatatagaaatatacatatattattgaaacaaatgtttctgaaataatacctactattgccatatgtgactcacgtttttattttttactcttttttactctattctatccaactctatttggctaagaaattatatgtgctcagaaccctcttaattgattttatagctcactaacgtgtcaggacccatagt

SEQ ID NO: 168088 - DNA, 273 bp, Homo sapiens
aggggaagaatgttccagacagagtctctgaggggatacaagatgagcttgcatgaaggccagtgtggcaagagtgcacgaatagaggacagaaatcagaggcccagggagagaccagatcacttgaattttgttctagccataatagggagccttcagatgttttattttatttttatttatttattttttgagacagagtctcgctctgttacctaggccgagatcctgacactgcactccagcctgggcgacagagcgagactccgcctc

SEQ ID NO: 168089 - DNA, 276 bp, Homo sapiens
ttcttcataatgtgatctcctcacctccagatttcccttctgctcaatagaactaggaggaaggagagggagcttaacatttcccttctctcagacccttagctccaaggcaatcatcctgagacattttgctacgccatctgcatctgtcacaagttgagttcggagaactcagcttgagacacatctcttgtaacagaaacttcacttggccctttcttctcttatggtaaagaacaaagacatacgcatttgggtagtattctggggtccgac

SEQ ID NO: 168090 - DNA, 290 bp, Homo sapiens
ccgtcctgagcttccagtgttccagaatgttctctggaacattcagggcaccttgactgcttctcatatgctccagtggcctctggatgccaaatcgttggtgacagcctggcatggccccatcaaagagggtgcctcctctaacagctgcgtcttccacacctgcagaatccaggtccacccaggcactatgtacctagggatttgtatgtatcagatcataacaaaacataggtggacttgttaagaatgatttttgtattccaccgtagaccttaagctgaaagtat

SEQ ID NO: 168091 - DNA, 164 bp, Homo sapiens
cgcaacccaggccttttaaccagagctttggtgatcggttctgggaagggcaagtcagtttggcccaggtttagagtgcttgctcaaatactaagaaaaaaatatttttctgagcctcagaataactataaaatgcttcctcgtggtatttttaagcacctgga

SEQ ID NO: 168092 - DNA, 216 bp, Homo sapiens
taagcatggacactgtaatatatcttaatgaagacatatccaatgcagcgtcatctttattctctgataacagccattatgttattcacaggatatatgctcagtgccaaagataagattaagctgcttttaaaagtgaagagtaaggattaactagtgctttataaatacgttctaaaacatttgaccttcagacacagagggcaaaaatagtga

SEQ ID NO: 168093 - DNA, 437 bp, Homo sapiens
tattattgttcatttgattacttttataaatagaaactgttgtacattaaggtctagctttctgtgtcaaacctaagtcttggagtgatagttaagagggtaaaatttcaacaaaagctttctgtgtcaaacttaagtcttggagtgatagttaagagggtaaaatttcaacaaaaatacgtaacaaaactgattcttaacagatttcttaccacccaactcctactactttttttgtgttttttgtttgtttgttttttgagtcttgctctgtagcccaggatggagtgccatggtgtgatctcagctcactgcaacctccacctcccaggttcaagcgattctcctgcctcagcctcccgagtagctgcgactacaggcacgccaccatgcccagctaatttttgtatttttagcagagatgaggtttcaccatg

SEQ ID NO: 168094 - DNA, 526 bp, Homo sapiens
tttctataggtgagttattactcttgaagggacagctttgtttctgtgagaagttccaccttcctcttccagagctgcatactacagctgaaactttgtagcttcttcctgagctcttcaaaagtaatttcacctcaaatgaagaaaaatttcggcattgtaaaccagaacgtttttctttcccccttagccctcaactcaaatgttacaggtataaacatatacctgtatatgttacagtaaattgtttctaagtgagaacaaggattctctcaggagtatgtgcaataatttatcattatgttggcagagacttggaggtgagggaataatataagggtgtgtatattcaaattataaaagaaaatatagggccaggtgaggtggctcatgcctataatcccagcactttgggaggctgaggcagatgaaattgcctgaacccgggaggcagaggttgcagtgagccaagatcgtgccactgcactcctccagcctgggcgacagagccaggctctgtctcaaa

SEQ ID NO: 168095 - DNA, 379 bp, Homo sapiens
ataaatttatcagctcagctagctgatacttcagccccaggaaagtgaaatacataactggggtagaagaagctgccggccagagcccaaggaaaatggggcaccagaaacacgggttttacatgggcccaattcagttttacatagggtctctccctcatcccgcgtggagattagcaagtcaaatttaatacttttgaccacacactggtttagatgcagtattgaactaagtcagactgaatttcagtggtaaaaatacacaaacaaaaaattactacagaagtgaacttggctacagagtcataaggtgatgtgtttactctctcggacaataatcttgggcaacagaaaacacacacacacacatacacacaca

SEQ ID NO: 168096 - DNA, 716 bp, Homo sapiens
ggcagttcttttagacatgcattgtcttgttgcccaacagataaagaattttatgagggatcttaaaaagtagaacatctcttaaagttcgttttaaaaaatgagttgtctcttctaaaatttctctctgattgcttttaggttacctagggtatgaattaatacagacttggaaactctgaaagaacttagaatcagcattttgaggtaaatatgtatatgccaaagtagtgataaggttgccccagtctgctttgttgacttcttagcaaaacaaatttgtgtatgaaatgagaactttaacctccatgagaatgtcttttaaaggactggaagtagtaaaaagaggccactgccaatttgtttttcctgagcttatggtagtggaggcattgcagaaggctcagacctgagcgcaaaccaagtctgatgtcagatctaacaaaatcagtatttgttgatcaaattaaactttttatatctacattttatgctttcttagtttttgatttataatctcttttagagagccaccccaaatttaaatttatgcccgacattaacattaacagtgttcttgaattattttatttataaactaattctataaaaatgtatagtgtagatgtaactgtccttttgtgtttttaatttcattttgggaaattggaattgctgatggatttcatacctgtgttaaagagttactactgggt

SEQ ID NO: 168097 - DNA, 377 bp, Homo sapiens
gtaacttctataatgttgcagtaaatttaggtcgtattggtctgatataggtgtaataagaattttccaaaacaaatcctggtatttggaaacagctatttttacataattatagatactaagatacatttaaattgatatttttttttcttaagtagttttgtcttcttagaacttttaaaactcattgtcattgctcatcacttggtctgaattaaaattcacacgttttatatcattttctattggtaatttttctgtcattttatagtttaaaaagacttatggaagtaataaagcttacaaataaatatgctattaaaatacatcactaagcttagaacttacagtttgagaattttgtccttatgttttaa

SEQ ID NO: 168098 - DNA, 176 bp, Homo sapiens
gcaagcccagcagaattctgattcttacaatcacactctgcccacagcggacacacagagcacaatcagccatgtggaggcaaagccgtcccacgaaacagggggtcacaatgcatttgggtgaaacctggcagcagctgcccaagggctaccaagaaaccacacgaaatcatcat

SEQ ID NO: 168099 - DNA, 349 bp, Homo sapiens
gctgctgccctgggaaaggatcagcttccccatgttactttcaagatggctccccagatggtgcaagggattctggaagaaacatctatccaaatttctagatagaaggggaagatgtagctaacaactctcctctcctgcttgccatgtgtcacaggtgttccactctaatgttgtataatgaaggtgtgcatgaaacaactattaggcctttgcttagtacgtacttatcattcttgtcctaattcctaggaacaggtctctgatgtcctttattcactatacaattttccctgacgaaacttccctgtttaccttgtgaagtcttgattaattaatggaaaataat

SEQ ID NO: 168100 - DNA, 688 bp, Homo sapiens
  misc_feature (688)..(688): n is a, c, g, or t
atagcggtccagcatcacgttattatatctgtgtctggatatggttgacgattaattagtaatcaatcagaatgatcttcctcattgtcattttcctctgcattatttttgaaagcaactatgctgatgttttgcatcttaaattagtttttcttctaagaattccagtagatgggctcatggagtatgcccactgttatgtccagttctttctttctgcataaagtctctgagttttattcacattgttgagtatatcagatgttcattcctttttattgctgagtagtattccattgaacgaatataccacagtttatttgccagtgtcctgataatagacacttagattgtttgtagttttgggtatgtgaataaaactgctatgaacgttcttgttataatttgtgtgtgtgtgtgtgtgtgtgtgtacatatgttttaaagtctcttggaagaatatctaggtgaagaattgctaggaaaaaaaatgtttatgtttaaatgtataggagactgtcaaaccaaagtgattataacattttacattccctctaaaaatgtatgagttctgggtgttccacatcttcaccaagatttggtggtttctgactttataattttgccatgctatatgcgtgtaggatcccagagtgactgaagcatgagtgcattgttttttttataan

SEQ ID NO: 168101 - DNA, 335 bp, Homo sapiens
tttaaaaagagaccatcaaacaggataaagaggattgggaatagggcagagagtggtagaggacaaattgctaagtaattgagtggttaaaggaaagctttattgaaaatgtgattcttaggcagaggtttgaaggaggtgagggggaaactgtgcatgtagacattttggggagaaagcttccagcagagagaacaaatatgcaaatcctctgaattattctgtatttaaatccagaacttggtctcatcagttttttaataacttagaaacttaagtgttagttggttgatggagttactagtagaccatgttgggagctgacaacaatttga

SEQ ID NO: 168102 - DNA, 441 bp, Homo sapiens
aatctactggatctgccatttcctagggacttgcctttttcccacaaaacagagttgaggcaaaggaaaagccagcccaggtagaagaggcaacaaaggcaaggggtggggatccgcatcatgatttcagggaacagcaaacgttccatgggactggagccctgagtctgtgaggagaaatgaacaagtctaccacagtcatccagaatgagaggcaaaattatgtcacaaaaggtgtgagtgggaaaactgggcccagcggcagattattccaggaagggattgtgcctttgtatgtctctgcaatgctaacctcaatgccagttcctcagagtgttacagacatttgccatgcatctgttactcaagtgctctgctcagagagggtcagtcttaagcccccaggagcatcctgttgtgaatcggttcacacttctttga

SEQ ID NO: 168103 - DNA, 358 bp, Homo sapiens
agacaggagagacagagatggagagagacagagagaatgagaaactgagagaaacacagagagaatgaaagagacaaagagacagagtcagtgacagagagagggagatagagacagagacagagagacagtaaaagaaaatgagaaagacagtaagcaacagagagtgggaggaagagagagacagagaaataatgacaggagacagaaaggccaagagagagaagagagtcttcagatacgggaggtttcccgagtgactcagaacttgtgcttcgaaacagacaagcctgggtcccatcttgtgcctgagacacaggctcaagatggcagaatacgagtgtaatagctcacgttg

SEQ ID NO: 168104 - DNA, 336 bp, Homo sapiens
gacttgcgtcatagctcctatgctgacagactgtgcttgacctttgatgagctccagcagagtggccaccaccaatacacagcagtctacccacaaaacctaacccatgccactttgccggcatgcacctgcccacgaccacccctccattgctttgccatcacatggatggaccttgcatccccttccctgcccactgtgggtgcatgtgcactctattgtgccattgttaccagcctgagtgcacccacacctgctgccaagccgccattgcttgtgcaaacacacacaagtacgtcacagtcatggtgtgaatgcatacactgaggtcaccag

SEQ ID NO: 168105 - DNA, 698 bp, Homo sapiens
aatatagtttctaaagttattgcaaattagttcctgctgcttggtaaaataccatatttaaacttaattacaactgccttcctgcaatgaagggccaactttttcaaataatgtgttacagcccagtgactctagggagtctatggtcccattgctgcaaatgagcagatcggtgaaaacaaaaacatattaagaagtccacatttctaacaaacaccttgcaaagaataaaatggtaatttaaggaatatgtccacttaatatacatttcatgtatataggacacataatacaataaataccctttttactacccccaatttaagaagtagactagtataatagaaggcatatctccttggtactcagtatttctaaaaggcagtaatggctgtctcctctaagcacctgagatgatatgcctctgtgcactctagccttagaaatatgcttatctcctgcaggcagagcatgctggaagtgccagggagttaaggttaccaggaacagccctcaactaataatgaggaaaagcttgtggataaatatccaagccccctgccttcaggtaggaacactgatattttattagattggtgcaaaaataattgcggttatatagtctcaaagaggaaacagtctccacgtgaaatcgagccccagttgtccacagtaataacccgcttattaacttagcc

SEQ ID NO: 168106 - DNA, 386 bp, Homo sapiens
agagcatatacagctagtgctagaaaggtcgggtattagaactggaatgacctgcccatccagaagtttttttcactgtcccaaattgtattttatttctggtggtgtctgtactgagtattagggaataattggaattaaagaaaaagaggtaatggaattatatattgcataatatataattatatatgagatggacgagacaaatgtatttctttaggaattggtaatgtacgagcaggagctgaaggagtgggctgctggaatgatcttgagccatctttggtgagagaatgcatacttcgaaggaaatgctgatcgaaatcttattttaagatcttggattgatacatacaataatactttagagcaccatttggacactt

SEQ ID NO: 168107 - DNA, 435 bp, Homo sapiens
gattggctggccttgggctgggtgcctcctcctggttcaatataccatggctggggggtgggggcacaggtaccaagcagggccacctgtggggaaaagtggcctgggtgggtttccctcagcaggggctctggacaggcctgtgtcttgagagcagacatggtgggctctgggacttggcagtctgtgaggaggcctggttttttcctctctaagaacagggcttttaaatccagtgtgaatacagctcactgtgcctctcacttcccgtgtgagaaaaaccacagaaaagcacagctgcacctacatgagaaaccacgcaaaccaagccacttcccccaagtctggtttagccaaaaatgcatttgatttcctgtctccatgttgtggtcaagattgccatttgcttcctgagtttcaggatcacaatcgaca

SEQ ID NO: 168108 - DNA, 313 bp, Homo sapiens
aacatctgctaaattaaaaacaaaaggatctggccctttatgtgtcagtaaacaggtaagaactctgttctcaactatgcgaccggcggcagtggcacaaagacagcataggggaatgaggagtgacagttgagtctactaaggttgaactaagggaaaagagctgaaggtaagaaaacaagctcttgattgagggataaaggtgaatcaagaaggcaaattggttttgtttagttaagaagattaatgagataaagtcaggaaaatcctatagttttatatgtacattaagtaattcttatgttagagatca

SEQ ID NO: 168109 - DNA, 303 bp, Homo sapiens
aaaggattttccttgtcttcccacccaagagtgacggggctgacatgtgcccttgcctctaaatgatgaagctgaacctttgtctgggcaacttaacttaagaataagggagtcccaggcatgctctcccatcaataacaaattcagtgacatcagtttatgaatatatgaaatttgccaaagctctgtttagaccactgagtaactcacagctaggtttcaacttttcctttctaggttgtcttgggtttattgtaagagagcattatgaagaaaaaaatagatcataaagcttcttcagga

SEQ ID NO: 168110 - DNA, 338 bp, Homo sapiens
ttctagatccatgtggtgtcttctactccaggaaggctgtttcacctgggagtgcccccattcttctctccagcatgacattcaccatcctgagttgggattacctcgtcccttgtctgttttcaactagactgtaaacagacagggcctgtgtgtcatttatctttgaatccctagtaccgataccagtgttgccgcactggtatagcataaatgactcctgagcagaggcattgggggcagtgggactcgggcactgtgcctttatggtgggagggagggcaagggtggtctggcaggtcagccagctggttggccccacatgtagctccctcgcc

SEQ ID NO: 168111 - DNA, 202 bp, Homo sapiens
ttctccttcaccctcagcggcaagtcccgctttcctggggcaggacttgccgctttcctggggtagggacaagtacccctgaaccccttctccacattacctgcttttcaagggcctgtttcccttgcctccataactgttgtgggtattgacagccaggcttctaaacctcttaaaactcccccactctggtgccaacttg

SEQ ID NO: 168112 - DNA, 290 bp, Homo sapiens
tcccttatcccatatgtcttactcacttctacattaagcagatacaattatccacaggaaattaacactgatacaataacattaactaatctacaaacttaattagaaatccaccaattttcccactgatgctgtttatctgttctagaatcctatccaggaccccacattatatttaggtactatttcttcttaatcttcctccaatcttatagagttcttatcttcatctttcatgtcctggatgctgtccctcaatttgggtttttccaatactctcatgattacag

SEQ ID NO: 168113 - DNA, 287 bp, Homo sapiens
gtcagaaggcagtaactgtgatgggcactagaggggaaggggaagccctccttgctagtctcttcctctcccaagtttattttttgttcctggagccgagactgacatctttattttttatcatagacagaacaatggattgttggaagctgatgctgaaggaattaagtaggtactttgtatgtgtgcaaggaaggtttgaaattggatgaagaaaaatgtgtggactttgtgcactttgccctggccccttcaaaatgaaggtgacatacccacgaaacactgtt

SEQ ID NO: 168114 - DNA, 421 bp, Homo sapiens
tcaacccagtcaacaaagtgaaaagagaacccacagaatgggataaaacatctgcaaactatccatcggacaaggaattaccaacatgtaaggagctcaaatcagtagcaacaaaacaaaacaagccccaaataatccaattttaaaatgggcaaaagatctaaaatacacatttctcaaaagacatacaaatgattaacagatatatgaaaaaatgctcaacatcactaatcatcagagaaatgcaaatcaaaaccacaatgaggtatcatctcactccagttaaaaccacttgcatcaaaaagataggcaactacagatgctggtgaggatgtgcagaaaggggaaccctcagtgtaagtgcaaatgtctatgataacatccatcaacatcaacataatatatggggctcaagaccact

SEQ ID NO: 168115 - DNA, 412 bp, Homo sapiens
tcaacccagtcaacaaagtgaaaagagaacccacagaatgggataaaacatctgcaaactatccatcggacaaggaattaccaacatgtaaggagctcaaatcagtagcaacaaaacaaaacaagccccaaataatccaattttaaaatgggcaaaagatctaaaatacacatttctcaaaagacatacaaatgattaacagatatatgaaaaaatgctcaacatcactaatcatcagagaaatgcaaatcaaaaccacaatgaggtatcatctcactccagttaaaaccacttgcatcaaaaagataggcaactacagatgctggtgaggatgtgcagaaaggggaaccctcagtgtaagtgggaatgtaaattagagcagccactacgaagaacagtatgaaggttcctc

SEQ ID NO: 168116 - DNA, 284 bp, Homo sapiens
gcaacgtgagttagcacattcacaaggatgggattttccctgtgggcagctcgcccctgagttaactcaggcgcgagctgcccaggggacctcatagccccagtggcaccctatagccatcccttccaaggcctgagtgggtgcagacctgtagatttctcctggctcctttcttttttttttctctgctctgtcgcccaagctggagtgcagtggtgcaatcttggctcactgcaacctctgtctcgtgggttcaagcaattctcctgcctcagccgcccaag

SEQ ID NO: 168117 - DNA, 434 bp, Homo sapiens
gatgcgttgaactcgacggttccatccgctcacacagtttcttctctgcttctgccagggagaggaggttggggagaagcaggaggcacacttgagcatagccttgagcctcccgggtgcagagcctggtccccgcctcccttcctggagtcaccgtcagctggggtgggggccaggctacttcctgcagcggcttgacaagcaaaatgcaatgtgaggtgataaacatggaatctgagacagggccgtggaaaacggttttttgttgagcgtcggggctgccctgttagtattccttttataattttgtgactgccataaaactgtttaggggtcccacagcatggagatcttttgtattaaacagctttcataaaccctgaatgagttccagattctgagactccggaacttcagtccccctccttttcttt

SEQ ID NO: 168118 - DNA, 228 bp, Homo sapiens
cagtgttctccagacaagcagaaccaatagaatatccttctttatcacaaagtattggctcagatatggaggctgagaagtcccatgatctgatattgctgtctgcaagctggagacttaggaaaactattgctgtagtctgaaggcctgagagtcggaggtcaatggcatagattccagtccaagtctgaagtcctgaaaaccaggagcaccaagggcaggagaagc

SEQ ID NO: 168119 - DNA, 265 bp, Homo sapiens
ttagggacaaatgtgagggctttttcgttagttactatggtcactatatactcactcctaggtaccatttcatagcattaaggatggacagcaacaaatatgccttagaaatccattcattctgcaattatttgttgagccccagatactgctaggtctcacatggtccctgcctcatgaagctagttatctagtgaaatggataaacagtagtaaaataatcattctacctaattataggccaagggctaattattctcaggta

SEQ ID NO: 168120 - DNA, 209 bp, Homo sapiens
agaagggtgtaaattggctcaacgattctggagagcaatttgacagaatgtagtgaaagcgtcaaaaatgttcacacactttgacttaaaaattacattcctggaaatttataatacaaacattttctataaaaggtcagatggcaaatactttgggctttgaaggccacatatgtctctgtggcttttcttttgtgtgtgtgtttaaa

SEQ ID NO: 168121 - DNA, 309 bp, Homo sapiens
gtaagccagggaagcctcaaaatgcctcaggtccatgcacccaccgggagcaccgtgtccagcctccatgcccaccctgcttactctctgtggtttggaccaagcagggaatattctgctccaggggcagctctgcacagagacaaagacaagcaacggccaaggccattcaaagcaaggttgccccctaatctcaagcattttggggaggagaagtaaacataattgtaatatattcttgaatcacagttaaacagtacttccttatgttgccaaatatgtaataatatttctactgagcacagaaat

SEQ ID NO: 168122 - DNA, 1053 bp, Homo sapiens
  misc_feature (476)..(476): n is a, c, g, or t
gccaccggcttggcgcggcggccaaactggtgggacagtgtctccaggtagtgaggcccaacctctttaaaacaaacaaacaaacaaacaaaaaaccaaaatgcaaacgtgagtagagaatgaaatacacagtttaaatgccctcactatctttgggttactaatatactaagcctttctggactaagtaaaagatgcaggttcctgcggctagggatagaagccagactggcgtcttcagaatctcccaccaaggctgtacctctggaggagttctaggtttggatttggttttccagtgaagcatgagcccgtatttatcaggctgaatccaggtgacagaggagtgatgatggacattagtgctccatttttcagggatcctccagccccacttggagaaccaggaaaacctttcaatgaactgtgggattatgaagttgtggaagcatttttcttgaatgatataactgagnaatatttagaagttgaacttgtccccacggacagcatttagtgcttttactttctggaagaagaaatgtgtggaaacaagaacttcctttatcgttcagagtgtccagaggagagacaaaatgggaaggcaaagcttatctccctggagttattttccaccaaatgtgacaaaattcaattcatttgcaattcatggatcaaaagataaacgaagttatgaagctctttaccctgtacctcagcatgaactgcagcaaggacaaaacctgattccattgcctagaatacttcaagtctttcaatttaacacactgctggagagagtggaaccaccggatcagactggggtaataggagaatgtgtctttcggggtatgggtacctacgatcattttccctatacctttagataaccaaataattcacttttagatggctgctccttcacaccccatttcctcggaggcggaaattttctgggccgttttttccaacataatctgggggacctgagacgtcgctctccaggttccccatttttacaaggagagtgccgcgggcttggtccacacgcgg

SEQ ID NO: 168123 - DNA, 861 bp, Homo sapiens
  misc_feature (284)..(284): n is a, c, g, or t
gccctctcctgtgacctcggctgaaaagaagaagccagtgtttgagaaaagcttcgtgagacttcagatggattttaaaattgaacacacttgggatggttttccagtgaagcatgagcccgtatttatcaggctgaatccaggtgacagaggagtgatgatggacattagtgctccatttttcagggatcctccagccccacttggagaaccaggaaaacctttcaatgaactgtgggattatgaagttgtggaagcatttttcttgaatgatataactgagnaatatttagaagttgaacttgtccccacggacagcatttagtgcttttactttctggaagaagaaatgtgtggaaacaagaacttcctttatcgttcagagtgtccagaggagagacaaaatgggaaggcaaagcttatctccctggagttattttccaccaaatgtgacaaaattcaattcatttgcaattcatggatcaaaagataaacgaagttatgaagctctttaccctgtacctcagcatgaactgcagcaaggacaaaacctgattccattgcctagaatacttcaagtctttcaatttaacacactgctggagagagtggaaccaccggatcagactggggtaataggagaatgtgtctttcggggtatgggtacctacgatcattttccctatacctttagataaccaaataattcacttttagatggctgctccttcacaccccatttcctcggaggcggaaattttctgggccgttttttccaacataatctgggggacctgagacgtcgctctccaggttccccatttttacaaggagagtgccgcgggcttggtccacacgcgg

SEQ ID NO: 168124 - DNA, 387 bp, Homo sapiens
acgggggcatatgcattcaatactaatgaggcttctgctcattacacagaacaccagaaaacacacacaagataagtacaggttcattcaatcactctttgaaaacacatcatcaaattcaaatgagtaaagcaaacaggtgtgtattccgaagtaaaaaaaattaaaaattttctttttataaagaactttagcataaaaacctggatgtgagaaacctgggaataccttagtcaacaatttggatataaaattatttttaatttgttggcactgaggtaatattttttttctcagtatgatggcatttttatccaagcatatatttgtgaattttgtgttagacttattctatatctgacacatttcgtgaatgggccggaaagg

SEQ ID NO: 168125 - DNA, 588 bp, Homo sapiens
cccatcaacaccttgatcttgggacttcaagcctgcagaactgtaaggcaataactttctgtcatggaaccccccagtgtatgatacttcgttaaagtaaccccagaaaactaatgcaccctgcctctcagtgctggaatgatcttggccaagtcacttccatcctggcctccagtccctcttctgaaaccacgtccaaggataggagccagtgtctccccaaaccaagaacatcgcttatcattgctctgggctgcatttcttggttttacatctccttgctgctcctatcccatgcagcttcctttaagaagggtacctccctgggccttccaacctgaagtcacgccctcccttaatccattcaggctgctaacaaactacaaaatatagtgtatctgtagtatataacaaaatactataaattgggtggcttacaatacaacagaaatttatttctcacagttctggaggctgcgaagtccaagatcaaggcgccagcagatttggtgtctggtgagggtggcttcctggtttatagacggtgccttcttgctgtgttctcatgtagttgaagggacaaacaag

SEQ ID NO: 168126 - DNA, 393 bp, Homo sapiens
ctttgtattgggtaaagagcttgagtctcaatgagtttgggttatatctagctcacatcacagagtctgaaattcttggagtttattttttatcaagtataaaaatcggcctaaaatagttctgtgtaaaaaaaatatcttgtatagtactgggggatgaggtgagaaatgtgccttaagttagtaggcatttatgtagtccatctacatcatggactggaggattgaattttctagtagcaatttaaaagagagagcagtagacatagttgtagacatttcagtggtggaacttcaaggtagaaatattgccatggaaacaaagatttgagtaggagtaagaagaggagttacaaaaggaggaatatttggggaaaaaaagaaaaagtatgt

SEQ ID NO: 168127 - DNA, 244 bp, Homo sapiens
ggtaattatatctggatggctcatgaaattactgtaacatccttgattttattgttccctcaggaatttcctctctattttaaataaaatgtgttttatgcactgagtacatttagtatctccactctgttagacaattacaacactgtagatacacagagctatgcaatgtgcctattttaactatagattagcttcctaggaagaacagtgttggtatcctttgccatttagagtcaaaagg

SEQ ID NO: 168128 - DNA, 114 bp, Homo sapiens
ggcatttccagtgaggttggaatggaggggatgaagataccttgcaggtgactcactgtctgttctaggtgaagaagaatcaagacagactcaggctctctgagtgtctggctt

SEQ ID NO: 168129 - DNA, 484 bp, Homo sapiens
ctcctctgcaaggaatgcagagccagacagacagatcctgaggccccatgctcaggtggtgaggccaatatcaggcactgtctttctccccttataaccaccaaacacatgctgcttcctgatagctcagtactttgcctcataaatgtggaaaacacactagaattcacctatataaaggtacttcggaaaaatgtcttaaggcaagtgcaaaaacaaaatcaaatctaagtgtcaattagttgcatgcagggtgttaggaaaagaataacaaaacactactagagaagatacaaaataggctggcactctagtgaagatggcaattagggggctaccaaggccatcactacttctacctaagggagacttacttacttactttatatatttatttatttatttttttgagacagagtcttgctctgtcacccagactgggtaagactctgtttcaaacaaacaaaccacccccccacaaaaa

SEQ ID NO: 168130 - DNA, 361 bp, Homo sapiens
tatggggatggatacaaagatttcatcccagtttggaagtgtcagcaaatgtgtctcagtgaaggagatgcctgtgttgtgctaaggatgattcggaggtaaaaaaagaaggagagagaggggtcctctggcagtcgaggactgtgtgcctctgcaagcttcccttaaccatggtttttaactttcccttggctgagtgtttttccacgagattaagaggcagaaaaaacagcaacaataggtgccctatgacatcatgggattaaatcataaatatggcttggggtggctcagatctcctcacatgttaatgtgctagaggtagaagtagaggcaaattaaccatgaagtagaagaggta

SEQ ID NO: 168131 - DNA, 202 bp, Homo sapiens
aaaaaaaatccacctagtttttattgagtaatgacttcatgcccagaatggtgttgagtattgggacagaaaatgacagacatataagatgggctgtgccctggagcttatagttgctaaaaggagcagacacacacgcccatgttattcaagaatcgcttgagtttgtcccagcaccccctttctacttctctgcctctgt

SEQ ID NO: 168132 - DNA, 212 bp, Homo sapiens
cccatttccctagtccaggagcagagcagcccaccacattagccatccagtggcctgttgtccagcttgtgcggctttctctggggctgtcatcccaggtaaaggttatttaggagatgataccaaagtaagggggacaatgatgaagattctgcttccgcctgtgcccacctcaaccttctccattcaggagaacctagtcataagtgctg

SEQ ID NO: 168133 - DNA, 640 bp, Homo sapiens
ttacaagaaatgcatctcttaaataagttatctctgttggtgtcctaaggtttattacacctttctacctcagcagggcagcacaatgtagtaagatttaggatgtgccaggggggagaggagccattatgaaatgccaggtgggcctggactgcaggagtcctcagacaattcactcttgcttcatttcctcagagtctgttggacttgtttctgatttttttttaataaggagcctcgtttttttctgtagtaattaaagtagttgcgtgcacatgtgtaatccataaaaagcatacttttgtagccttcactaaaagctacgaagggtggataactgttttattgatgttaaagcagatccacaggacttttggatctttctcctcccctttggctgtggtaaaaatggtttaatatgtaacccttttcaaggatagttgtactttaaaagaatgccgaatgctttaccatatatatatatatatatatatatatatatatatatatattcccgccccctccccaccaccaccataatgggagcccatgatttcaaagctgctttgagcccttatcgcggtaactgcaatacatccttgggcatctaataatgatcccatcttatagtaattaaaag

SEQ ID NO: 168134 - DNA, 699 bp, Homo sapiens
gagtgtccccatctgctcactgccagtcctttgcaaggggacgccgcctcctcagcctccgctctgagtgcgcagcagcccctcctgcccgtctctcgctaccagggtgtttcagaattagggtccgtgtttttccccatcacagtaatgatgataattacatgtttatgcatagctgaagaacaatcccacaaggatatttccatactgtttattagaccttttcagaattcactcttgcttcatttcctcagagtctgttggacttgtttctgatttttttttaataaggagcctcgtttttttctgtagtaattaaagtagttgcgtgcacatgtgtaatccataaaaagcatacttttgtagccttcactaaaagctacgaagggtggataactgttttattgatgttaaagcagatccacaggacttttggatctttctcctcccctttggctgtggtaaaaatggtttaatatgtaacccttttcaaggatagttgtactttaaaagaatgccgaatgctttaccatatatatatatatatatatatatatatatatatatatattcccgccccctccccaccaccaccataatgggagcccatgatttcaaagctgctttgagcccttatcgcggtaactgcaatacatccttgggcatctaataatgatcccatcttatagtaattaaaag

SEQ ID NO: 168135 - DNA, 4463 bp, Homo sapiens
  misc_feature (246)..(246): n is a, c, g, or t
  misc_feature (1066)..(1066): n is a, c, g, or t
  misc_feature (1089)..(1090): n is a, c, g, or t
  misc_feature (1152)..(1154): n is a, c, g, or t
  misc_feature (1156)..(1157): n is a, c, g, or t
  misc_feature (1444)..(1444): n is a, c, g, or t
ggagcagaactcgggcccaggcatacagggagcgagacatcctggccgcgctgagccacccgctggtcacggggctgctggaccagtttgagacccgcaagaccctcatcctcatcctggagctgtgctcatccgaggagctgctggaccgcctgtacaggaagggcgtggtgacggaggccgagggtcaaggtctacatccagcagctggtggaggggctgcactacctgcacagccatggcgtntctccacctggacataaagccctctaacatcctgatggtgcatcctgcccgggaagacattaaaatctgcgactttggctttgcccagaacatcaccccagcagagctgcagttcagccaagtacggctcccctgagttcgtctcccccgagatcatccagcagaaccctgtgagcgagtccgacatttgggccatgggtgtcatctcctacctcagcctgacctgctcatccccatttgccggcgagagtgaccgtgccaccctcctgaacgtcctggaggggcgcgtgtcatggagcagccccatggctgcccacctcagcgaagacgccaaagacttcatcaaggctacgctgcagagagcccctcaggcccggcctagtgcggcccagtgcctctcccacccctggttcctgaaatccatgcctgcggaggaggcccacttcatcaacaccaagcagctcaagttcctcctggcccgaagtcgctggcagcgttccctgatgagctacaagtccatcctggtgatgcgctccatccctgagctgctgcgggcccacccgacagcccctccctcggcgtagcccggcacctctgcagggacactggtggctcctccagttcctcctcctcctctgacaacgagctcgccccatttgcccgggctaagtcactgccaccctccccggtgacacactcaccactgctgcacccccggggcttcctgcggccctcggcagcctgcctgaggaagccgaggccagtgagcgctccaccgaggccccagctccgcctgcatctcccgagggtgccgggcccncgcccagggctgcgtgcccggcnnagcgtcatccgcagcctgttctaccaccaggcgggtgagagcctgagcacggggccctgccnnngnnacggcggcacccggcccggcggcggcacctgctgaagggcgggtacattgcgggggcgctgccaggcctgcgcgagccactgatggagcaccgcgtgctggaggaggaggccgccagggaggagcaggccaccctcctggccaaagccccctcattcgagactgccctccggctgcctgcctctggcacccacttggcccctgccacagccactccctggaacatgactctccgagcaccccccgccctcctcggaggctgcggtgaggcacagcgactgccttacnctccgggggggccctatcagggacatggggcaccctcaggctccaagcagcttccatccactggtggccacccaggcactgctcagccagagaggccatccccggacagcccttgggggcagccagcccctttctgccaccccaagcagggttctgccccccaggagggctgcagcccccacccagcagttgccccatgccctcctggctccttccctccaggatcttgcaaagaggcccccttagtaccctcaagccccttcttgggacagccccaggcaccccctgcccctgccaaagcaagccccccattggactctaagatggggcctggagacatctctcttcctgggaggccaaaacccggcccctgcagttccccagggtcagcctcccaggcgagctcttcccaagtgagctccctcagggtgggctcctcccaggtgggcacagagcctggcccctccctggatgcggagggctggacccaggaggctgaggatctgtccgactccacacccaccttgcagcggcctcaggaacaggcgaccatgcgcaagttctccctgggtggtcgcgggggctacgcaggcgtggctggctatggcacctttgcctttggtggagatgcagggggcatgctggggcaggggcccatgtgggccaggatagcctgggctgtgtcccagtcggaggaggaggagcaggaggaggccagggctgagtcccagtcggaggagcagcaggaggccagggctgagagcccactgccccaggtcagtgcaaggcctgtgcctgaggtcggcagggctcccaccaggagctctccagagcccaccccatgggaggacatcgggcaggtctccctggtgcagatccgggacctgtcaggtgatgcggaggcggccgacacaatatccctggacatttccgaggtggaccccgcctacctcaacctctcagacctgtacgatatcaagtacctcccattcgagtttatgatcttcaggaaagtccccaagtccgctcagccagagccgccctcccccatggctgaggaggagctggccgagttcccggagcccacgtggccctggccaggtgaactgggcccccacgcaggcctggagatcacagaggagtcagaggatgtggacgcgctgctggcagaggctgccgtgggcaggaagcgcaagtggtcctcgccgtcacgcagcctcttccacttccctgggaggcacctgccgctggatgagcctgcagagctggggctgcgtgagagagtgaaggcctccgtggagcacatctcccggatcctgaagggcaggccggaaggtctggagaaggaggggccccccaggaagaagccaggccttgcttccttccggctctcaggtctgaagagctgggaccgagcgccgacattcctaagggagctctcagatgagactgtggtcctgggccagtcagtgacactggcctgccaggtgtcagcccagccagctgcccaggccacctggagcaaagacggagcccccctggagagcagcagccgtgtcctcatctctgccaccctcaagaacttccagcttctgaccatcctggtggtggtggctgaggacctgggtgtgtacacctgcagcgtgagcaatgcgctggggacagtgaccaccacgggcgtcctccggaaggcagagcgcccctcatcttcgccatgcccggatatcggggaggtgtacgcggatggggtgctgctggtctggaagcccgtggaatcctacggccctgtgacctacattgtgcagtgcagcctagaaggcggcagctggaccacactggcctccgacatctttgactgctgctacctgaccagcaagctctcccggggtggcacctacaccttccgcacggcatgtgtcagcaaggcaggaatgggtccctacagcagcccctcggagcaagtcctcctgggagggcccagccacctggcctctgaggaggagagccaggggcggtcagcccaacccctgcccagcacaaagaccttcgcattccagacacagatccagaggggccgcttcagcgtggtgcggcaatgctgggagaaggccagcgggcgggcgctggccgccaagatcatcccctaccaccccaaggacaagacagcagtgctgcgcgaatacgaggccctcaagggcctgcgccacccgcacctggcccagctgcacgcagcctacctcagcccccggcacctggtgctcatcttggagctgtgctctgggcccgagctgctcccctgcctggccgagagggcctcctactcagaatccgaggtgaaggactacctgtggcagatgttgagtgccacccagtacctgcacaaccagcacatcctgcacctggacctgaggtccgagaacatgatcatcaccgaatacaacctgctcaaggtcgtggacctgggcaatgcacagagcctcagccaggagaaggtgctgccctcagacaagttcaaggactacctagagaccatggctccagagctcctggagggccagggggctgttccacagacagacatctgggccatcggtgtgacagccttcatcatgctgagcgccgagtacccggtgagcagcgagggtgcacgcgacctgcagagaggactgcgcaaggggctggtccggctgagccgctgctacgcggggctgtccgggggcgccgtggccttcctgcgcagcactctgtgcgcccagccctggggccggccctgcgcgtccagctgcctgcagtgcccgtggctaacagaggagggcccggcctgttcgcggcccgcgcccgtgaccttccctaccgcgcggctgcgcgtcttcgtgcgcaatcgcgagaagagacgcgcgctgctgtacaagaggcacaacctggcccaggtgcgctgagggtcgccccggccacacccttggtctccccgctgggggtcgctgcagacgcgccaataaaaacgcacagccgggcgaga

SEQ ID NO: 168136 - DNA, 328 bp, Homo sapiens
attcacccagatccttcaagacagtgtccaaccagaatcacatcagcaccttgttccccgttctaatttgacactgtaactacagctatttttaaagagtagaaaaaaaaaaacataaaaatgatacataggaactaggaaagtttctggatatttttctgtggaatgggaaggaacttgaaacttaacctttcaattcatgataaaactatagaacactgtgcacataaaacataagaagtaacagatacaatgcctgaccagccaaaggtcttgactgtagctaaatgaatcacgctggaacaaaagtcctgtgcatttgtgttgt

SEQ ID NO: 168137 - DNA, 905 bp, Homo sapiens
agcctaaggctctttgttctcagtaactacctgtttgtgttaggagtgagttttgtttttctttcagataacaacagttaactaacacagatggccactgccaataaccaagtgaacctaggatgaaccatgagtatataacaaatgatactaccaagtcctcctctataaggacaagttattgtttatcttgagaacatgtatgtaaaggattgtatgtacttggatatgtaaaagagtgaggtttctttctgtctctgcaatctcatgaatggatggcctgtgatgcacatctcagtctggtttaatgcctactcaataatacaactctttttttcccctacatttatgaagagaattttctgggttgacaggaggtttttttgctaactttttccccaacaggtgtttatgccttactcaactattaaaggctattacagaaatgtaccccctctgagactgaacagtgttgcttttttgatcgatcctcatctctaccaggcagggactgagctggtgcctatgtgcctagctcccttctcatactgatgacccaccacctccgcctccttcctgtactgtaccagctttggtggatgggagaagttcagaaggagatcaaattgggttaagtttagagctgaggaagaacgctagagtcccatctcacatagaggtcaggttctaaactcagggttttggacaaaagaaaaactcagaattaccctccattgtttttttcatcggagcaccacttgaagtctttagcatgtaggccccgtcatataaaaaatagcaatctttaaacaacagaatcacacttttcacagcctgatgctcctctccaaaaggtctcagttcacatcttactccatggtacaggtccagggagcaaaacaaca

SEQ ID NO: 168138 - DNA, 300 bp, Homo sapiens
tctgctgttcacggtctatcttctttggctagaatgtgcttctgttttttgggtttgcaccagctccagggatggcgggtagcacaggtgtgctgagggaagaggcctctctgaaaacgtgaacggttactttggagaatgcctgtgttctctgaatatcttctgccctcatcctcaaaactaaaatgaagcccttttccctatgattgctgggccgataggattgtcacaatcccaaagttcacagatacataactgaaaacgggaaagagtaaaagataaatgaatgagagacatggc

SEQ ID NO: 168139 - DNA, 263 bp, Homo sapiens
  misc_feature (16)..(16): n is a, c, g, or t
cctgaggatacggcangctatccggttcaattttacttgtcaattatgtctcaataaagcagggggcaatacaattttttttaatttagcatgcaaaaattttttaaaaacatcaaagctgagtccacagtgttgattttacttgtataaaatatttctgcaaaatttatcctatcaagatatttggttcactccagtcccaccctagaaacctgtcacactttcagttcaggacctacagacccattgaaccggatagcttg

SEQ ID NO: 168140 - DNA, 883 bp, Homo sapiens
cctttagaaattgaaagaggaggagaggaggagagacccacagttgatctctgagaagtgagtagctggaggcaccaggataccagccaagcctaaaggataaagcaaatccctggacatggcttttgattccaagctaagaagtgcaaggtttgaatggtgaagaaatgatggacgctgtttgtctcaaacaaggactctaatgatacaacagaacaagtcacaagaaagcttgcctggaaaaccatacactggcctcttcgtggtgaagtccttcacaatccttacaaacatagaaaatattcagcaattcgtttgtttgttttccagtccactcttacttgagaaaaatgcaaaacatcaaagacacagaaaaaccaccagtctatacagcttgcccatactaaattgttattcatttcagaagagtgtacagtttctttctgtaagactctattaaaccagttactctacaatagcaaacattttaggcaaacctaaccattgcttcccataaagatatttatatctttaagtggtatctgattcatccctaagaaatatgttatcaagatgtttgtttgtttgtttgtttgttcatttgtttttgagatggagtttcactcttgttgcccaggctggagtgcagtggcatgatctcggttcactgcaacctctgcctcccggttcaagcgattctcctgcctcagcctcccgagtagctgggattactggcacccaccaccactcccagctaattttttgtatttttaatagagacggggtttcaccatgttggccaggctggtctcaaactcctgacctcaggtgatccacttgcctcgacctcccaaagtgctgggataacaggcatgagccattg

SEQ ID NO: 168141 - DNA, 1083 bp, Homo sapiens
cctttagaaattgaaagaggaggagaggaggagagacccacagttgatctctgagaagtgagtagctggaggcaccaggataccagccaagcctaaaggataaagcaaatccctggacatggcttttgattccaagctaagaagtgcaagaagctcttccaaatacaactgcaactgccaagagattgatggaccagagaatggcctcttcattccaggcacttctaaagtccaagtggtcaaataccagcctctttttaccaatgttcccacctgtttcattcagccaaatttcattagatgaaggaaggtggtgcattcttgagattgagaatacagatgagaagcaggtttgaatggtgaagaaatgatggacgctgtttgtctcaaacaaggactctaatgatacaacagaacaagtcacaagaaagcttgcctggaaaaccatacactggcctcttcgtggtgaagtccttcacaatccttacaaacatagaaaatattcagcaattcgtttgtttgttttccagtccactcttacttgagaaaaatgcaaaacatcaaagacacagaaaaaccaccagtctatacagcttgcccatactaaattgttattcatttcagaagagtgtacagtttctttctgtaagactctattaaaccagttactctacaatagcaaacattttaggcaaacctaaccattgcttcccataaagatatttatatctttaagtggtatctgattcatccctaagaaatatgttatcaagatgtttgtttgtttgtttgtttgttcatttgtttttgagatggagtttcactcttgttgcccaggctggagtgcagtggcatgatctcggttcactgcaacctctgcctcccggttcaagcgattctcctgcctcagcctcccgagtagctgggattactggcacccaccaccactcccagctaattttttgtatttttaatagagacggggtttcaccatgttggccaggctggtctcaaactcctgacctcaggtgatccacttgcctcgacctcccaaagtgctgggataacaggcatgagccattg

SEQ ID NO: 168142 - DNA, 1039 bp, Homo sapiens
cctttagaaattgaaagaggaggagaggaggagagacccacagttgatctctgagaagtgagtagctggaggcaccaggataccagccaagcctaaaggataaagcaaatccctggacatggcttttgattccaagctaagaagtgcaagaagctcttccaaatacaactgcaactgccaagagattgatggaccagagaatggcctcttcattccaggcacttctaaagtccaagtggtcaaataccagcctctttttaccaatgttcccacctgtttcattcagccaaatttcattagatgaaggtttgaatggtgaagaaatgatggacgctgtttgtctcaaacaaggactctaatgatacaacagaacaagtcacaagaaagcttgcctggaaaaccatacactggcctcttcgtggtgaagtccttcacaatccttacaaacatagaaaatattcagcaattcgtttgtttgttttccagtccactcttacttgagaaaaatgcaaaacatcaaagacacagaaaaaccaccagtctatacagcttgcccatactaaattgttattcatttcagaagagtgtacagtttctttctgtaagactctattaaaccagttactctacaatagcaaacattttaggcaaacctaaccattgcttcccataaagatatttatatctttaagtggtatctgattcatccctaagaaatatgttatcaagatgtttgtttgtttgtttgtttgttcatttgtttttgagatggagtttcactcttgttgcccaggctggagtgcagtggcatgatctcggttcactgcaacctctgcctcccggttcaagcgattctcctgcctcagcctcccgagtagctgggattactggcacccaccaccactcccagctaattttttgtatttttaatagagacggggtttcaccatgttggccaggctggtctcaaactcctgacctcaggtgatccacttgcctcgacctcccaaagtgctgggataacaggcatgagccattg

SEQ ID NO: 168143 - DNA, 721 bp, Homo sapiens
aagaaaaggtctggctgttctgtcaaaactatttagttcaatattgttctcaatgtggcaccatagccctggacatgacacccagcacgtccaaacagacatgattatatatgagacagaaaggcacttacatcactgcgggttgttatgctttaaagggctttttcccccctcttcaaattaaaagttttcaaaaatgaaataaaaataaacctttgaagaaaccagattgagactgaatttggaaggccctcctgcctagtgtatactaaagaaacattttctgggtttgtccctgatgattttccttgtagttgagaaacacaatccactggaagcttttgtggcagaacaagaattttatgaacacgaactttacaaagacttccctaggagatttaaggtctggaaatcaatagatcaatcagcagcttttatcaatctataatggttctctctctttggatgtttggatgaaaatgggatcaacgtaaattgaacatggaatcacttattcttacaagttaaatttgtcaaactgtaaggcacataaatgacatgaaatgtaatcatttttgaatttgggaccctacagggtgcacgttgattgaagaaaaaacaagcagatgttgcttcagcataactcatagaggcaatctaaatgttcttcaatccctgacacttctgatcgtttcccaaataaaccagttcattagttaat

SEQ ID NO: 168144 - DNA, 187 bp, Homo sapiens
tgctctgagccttgtctatagaatgaagggtgggtgctgtgcatggcccctactattactcaaatatatgtagctactgcagggattgttaaaccagagtgttggtgaatttatcatagctttttgttacagaaggtttttttccttaacagatgacaaaaagagaactacattttttttagtgttg

SEQ ID NO: 168145 - DNA, 283 bp, Homo sapiens
tggtccaccaagctcaggataaagcagatttgtggaatttagctttgactccaaatcccgtgtcagttactgtcacggggaaggaaaaaggaagagtgaaaaggtctacaaagtaaccaattcagttacttagcaactggacaaaacttgcctcactacagagggtaaggaggcatctcacacccattcaaagagtaacagtctacaatttacatgcaaatagataaagaaaaaagggaacgggaaatctaaattagcaactggagtttagacagtgagactg

SEQ ID NO: 168146 - DNA, 306 bp, Homo sapiens
cctgaggacatgaaatattttgggttgtaccttgatagatagttaagggctattttattctctttaatattctctttaagcatacactgacttcgaattgaggcagtctctttcttgctcttattctttcctctctctctctctctctctctctctcacacacacacacacacacacacacacacacacatgcaactcacagatttctttaagagtgcagtgagtggagaattgtaaatgcagcagatactaaagaatgtgttatttggtattggactgcattatgttgcagatgtttgttactaa

SEQ ID NO: 168147 - DNA, 321 bp, Homo sapiens
atagaggacccgacggctcaacggaactttgtcgaatgttttctgcagtttatgatacctaaaaatgttttctcaagtataaaattttaacactgaatgtgctttttcaaataatgagtttctcttagagactctgatacaaacttcctcatcagaaatcttgagttaagacttcaagctcctccataataaaagagagcaaacacatacagaatttctctttggtctcttgcagttacgtcttcttttaagggtctcagaaaaataccgtcaaaaaagttaaagctgaaagttccgttgaagccgtgtaatcccagctac

SEQ ID NO: 168148 - DNA, 201 bp, Homo sapiens
gatatcctggtctccagacaatactttactaaatgaaatgacaattataaccaattaaaattcactttacatactacttcacctatttggtatgtattatgcatgaagacagagagtacattgcctcactgctcaggatttctgtgtgtctcagaaattgatggacagctccaagatcttccttttagtgcattttccccc

SEQ ID NO: 168149 - DNA, 524 bp, Homo sapiens
ttgagccccttgacatttacaatagctggaagagctactttggtgaaactccaaaaaatgtgaaattcttttcttgatgaaagagatccaaagcctgtgctagggctgacagcaaggcagagggagcctagaggagggttgttatggggctggaagcagggatgaggatgagacccagcaagcggacactaagtgcctgcactctgctttgcagagaagagaagggccagtagctgccttccaatgggcaaagaggacaactcagtgtgggtgtggggtctgtatctggtgctgctgagtgcagatgaagggggagcttccttccagttttccttgacatatataaatatgggacagacactcctactctggagatagctgaacaaaaatcaaggcgcatttagaactgacacgctcataattgcactgtattagtctgttttcatgctgctgataaagacatacccgcggctggataatttgtaaagagaaagaggtttaatggactcacagttccacatgac

SEQ ID NO: 168150 - DNA, 101 bp, Homo sapiens
tgaatttcttctcttattgcacttagaattttcagtgtgtctaaaaagagtggtaagaatggacttctcgtccttattcctgatcttaggggcaaaacatt

SEQ ID NO: 168151 - DNA, 163 bp, Homo sapiens
tgatcccaggcagagacaaaaccgtgtcttcaatgatcagggagcacatgtaagtcgccaacgcggtgacataaatcgcgttctcagagcctcgcaccaggacgcatggcctgggaaggcacgcaaagagttaaaagcagaacctttccaggaaggccagcct

SEQ ID NO: 168152 - DNA, 375 bp, Homo sapiens
taacatattttatcagagactgtgcacaaagggcacttttaggtagcttcattctccacaggttctatacataaatcatgaggtgttacgagaatattggtccaggaatcagaaaagtgtggaatttacaatcacctaaagcaatatgactttaagaaaatctgttacctcccatcatctccctttcccatctgttaacatttggtggtgatagatttagatgagttgacattgttagatactttctattataagaggttgtctttggtagaattctatgattctaaagtgctgtgactacaagtgtggacaggtgtaatcactttacctctacactgcccgctgcatgctgacactgcctttcatatggtgggc

SEQ ID NO: 168153 - DNA, 545 bp, Homo sapiens
gccaccatgcctggctaattttgcattttaagtagagacagggtttctccatgttgctcagactggtattgaactcccagcctcaggtgatccgcccaccttggcctcccaaagtgctgggattacaggcatgagccaccgtgcccggccaaagcctcgtcttttctccacgtctcccccggagacccctgcctgggacagctcctgcttctggtacctgctggagaccctggccagggcctggctctttgagaccactgtcactgtcccctcccgccccttgtcactgaaatgcccggcctgtgccaggagagagtgagggtgtgctgagggcatagggcaacctgtgggtgggatgactgcccccacgtcctaacaaagccagcccccaaagcactgtggccatctgagtgggcacagtgccctggcccccctgcctccccacacctgaaagcccaaagcctaagaccagagagtcctcaaaggaaggtctttgctgccacagccctaaatctcatcaaggtagatagtcagagtcagcacct

SEQ ID NO: 168154 - DNA, 607 bp, Homo sapiens
cgtcgcccatactctgtgtttgataagaaaagtcaatctttgagtggtaattgaatgggtaagaaacgtttctgaaagttttcacatccctaaaaacattttgagaatgcttatctgaggccatccctgaatttttagccccagagccaccaatttggaattttctgtgtatacttaagtttaccttaagaaatggtcacttcctttgaagtggaaaatctcttaagatctcctgcttctcatccataaatcctttctcagcagagactcatggatgggctagaagctatattcagtcatctttagaagcacatgggatattgatcaaaggggtggggtggtgggaaggtgaggggtggttgagtgtactccttgggtgtcatggctgggatctcagtgtcccttcttttctgcttatttgtacttattgagaagtctgtcttccattttctccttccccatgaacaagtgtgtgaattatttggaggcaagttgttttttttttaaatttttactgccctaactttgactgtggtgcttcacacatgtgaatgcgcttgggttgaaattttattcgttttaccattagtaattatttgaatcaaag

SEQ ID NO: 168155 - DNA, 420 bp, Homo sapiens
catattctctgaatcaatccattaacacagcataaggcatccaggaaataatggctgcaaacaagcctgggagccagaaagaacggctttggtgggtgtactggtgtggagggagccaagaccagtaagaagcctaaggtcacagagtctgcaccaggatctcggtggtgggagtaacagagaagagctgggtctaaaagatgtcaaggaatgaaagtccatgggatttaagcatgtgacctcacatgagttacttaactgctctttttttttcccatttgtaaagtgggatgtgggaggcagaataatgtccccccacataggtccatgtccttatccacagaaactgtgaatacgttaggttacccagtaaagtgttggataaaggaattaaacacttagggaaaataagaatataga

SEQ ID NO: 168156 - DNA, 611 bp, Homo sapiens
ctttaagtttcaggatacatgtgcagaatgtgcaggtttgttacataggtatatgggtgccatggtggtttgttacacagatatacctgtgccatggtggtttgctacacctattgacccatcctctaagttccttcccctcactcgccacccgctaacaagccctggtgtgtgttgttccctccctgtgcccatgtgttctcattgttcagctcccacttatgagtgagaacatgtggtgtttggttttctgttcctgtgttagtttgccgaggatgatggcttccagcttcatccatgacatagcaaaagacatgatctcattcctttttatgagtgcatggtattacacgtattttaatagctttgaaatttatcgatttcaatttacatttattgagtactcactatgggtcaaacaccatgcttctttaccaggggtacaataaacagagccaaaattttatttaacttgtatatacaactttactatcaacattagccattgaggtgtaaaaataaagaagcaatttgtattaaaagtcaatttccacataatcacgtcttataaatgccatttacttttattatacataactcaggaaggtgag

SEQ ID NO: 168157 - DNA, 556 bp, Homo sapiens
cagtcttgaactcctgggctcaggtgatcctcctgccttagcctcctgagtagctggtaccataggcacacaccaccatgcccagctatttttttgtatttttagtagagacggtgtttcaccttgttgcccagctgctctcgaactcctggagtcaagcagtctgccactttggcctcccaaagtgttgggattacaagtgtgcgccaccgcaccccctgcttgaaaggacttctgaatggacttagcagtgattatttgaataccacagttgctgtttcctctgaatccttgaagcctttgtagaattgacagtacaaaccatagttctcccattcacagttttcatttggtttccttgccgtgtgtgggttaggcatcttctgagggccctatgtaggtaggtgttgcaggggaatggatggccgtttttaataaagaaataggatctgggcttcattgttcctaagaaggggctgtcttctcaattcatttgtctcctgggtttatctgataattatttctttccttcagagaggctaattacttttcatct

SEQ ID NO: 168158 - DNA, 199 bp, Homo sapiens
ttgcaacctgccctgaggagtattctcagatctgtttagagtactcttgggaagaaatatcttagtccagatctcccatggcaataacctgcctataagatgtgcaggactggcaacatataatggggctgaaattgcatataacctacaactcagtgtttccactcctagactcacacatgtccatagggagacatgt

SEQ ID NO: 168159 - DNA, 285 bp, Homo sapiens
actccttaccatgctgccacatttaatatgctcctcagccttcttctgatggatcctaactcccccactgtcttccactgtactttgatcaagacgtctgacaaaagaacagttccctctctgaactctactaaaatatacacaccgtaatgaataatttctccaggaaaagaaaggaaataatagttcaggtgaagtttgtggtcacatatggaaaggaaagaaaaaccaggctcagttccagaatgtctgtgtgtcagagtgagatatgtatgtataacgcat

SEQ ID NO: 168160 - DNA, 1064 bp, Homo sapiens
ttcaagctatccggttcaattggttcagatcccttttgaatgagaaatatatgttaacgcattttttgagtgaataatgttttgtcgtggaatgtccatctactttaataggaccaactgttgtcaacagaattactttctacatctgtggaaaacaacatctatgctaacaaaaatcaaggtagcaagtctaacgaaatcgaggctaaataatttgagttctttatgtaaacatatttatgggaaaattttgttgtagattcttctgttaaaaagaatctaataaatttttataattgctattgaaccgggaagtgcacctctgattatgatccatgcattggagtcagctgcacatcaggaagttgcttatctggaggtttcattgcctgttacttggagatacgaccagtgtggcacctcctctgttggtcttcattgccctgtattaccttcaagcattttatatgacttcatggattatcttcttaattattcctatggcacatgttacacctaaccctctattttagtgacagctcttgctctgtctaaccttgtggcagtataattgtttttcatataattactttattcacagataatagaatttaatgtgatataattaaatcctttgacaattataacagtttttaaagtgaaaatattttatttaaatcttgggtctgcagtttattttctagatatctatgtattaatccaacaacgttattccattgaaactaaaagaggtgtgcagagtgtgccacttttaccatgtaatggtttttttcacaatttcttaatatctggtaatctctggttcatgcttttgcaaagaaacacattgcctaaaatacatatttttaaattattaacttcagtgatttaagcaccgggtaaattctatgcctttagacacctatgaactagattcttactgtctctctgtaaaatacatatagagtatttttgattttcagcagttctataactgcttgatgagtagatgttattcccataacatctgtctcatcttgtctttggtgattctaatgacacca

SEQ ID NO: 168161 - DNA, 431 bp, Homo sapiens
cgctgaggctgtcatgctgggcagctcacccaccaggagaggagctttccgactctttttggcattgtctcacgaattacagaagccccctttcgatcatgttttgaagccccttgtcctatcactaagataaatgaatgctggtgtttctaggtagcttctagctttatgttgctttgggtagtgtagtgattatttttatgtataagttcttaatgctagagctctcttgtgagcatgattaaggaatgtgctttcgccttaacaagttctatgttggagatgcaggttggaggttgatcctgaacaccttaagtggatgcttttttattctggaaggagaactgtctggaaataaaattccttatatctaatggtatttcttaaatgctgtttcaactaatggcatttggagcaatgactgtacaaaa

SEQ ID NO: 168162 - DNA, 439 bp, Homo sapiens
aaaatcattattttggaaaggaagaaaaaaatcaactgccttatctactattatattattacatcaagcaaagccatttccatagcaaaagctatgtatccacaaaaatatatcaaatgtttgaaagtataaatcaagaagaaaaattatatgtaagtctgcaaaatttaaaaaggaagtgcaggattgagggagcaaagaaaatatctcacaaatttggctcaaaatactttcctttggtatctgaagcatctgaaacctaatagaaaatcttggcttctagaaaaaaggtaaactaaaagtttaggatatctccgtgtatttttagctgtttgtcagtaaattatatagatgaatataaggcattccaaagcattggtgaaaagaattatatggatagttgtggggttttaaaattgaagaaaatctatctgctaag

SEQ ID NO: 168163 - DNA, 393 bp, Homo sapiens
tcaaaagaaaataagttatcaaaactatcacagacacatcccgagcaaagctattatgagataaataagaataaggagtagaataacatccatacagacagtaaaatgatgccagaaagtcaggctgaccaagcagatcaaattttatctatttcaaaatgagttaaaagactttgattaaatgacataagataggaaagaacaacaaaactcaaacttataaaaattcagaaatgaagtgacagaactcagtaaagaattagaaataaaagaaaaaaaattaataaagactattagaagacatataagaaaaattaagcacaatagataatgcagtaagagaaatagaaggggaaaagaagaaaaatattttaaaaccaaaaaagaagtgta

SEQ ID NO: 168164 - DNA, 262 bp, Homo sapiens
gggacacagaggtgccgccatggatcaccaagaggttcaggactggccagagggaggagaagaggtcaaggtacgtgtggggcacttggatgacgcatctgtgcctgcacacagctgaaatccccaggaaataagacgggagcagggtgggtttctgcagccgaggtgagaccaaaatgccagctcactgccaccctcagtaaagactaacttgccctttcccccaactcccctcccagaagtagctcactctcctctgcct

SEQ ID NO: 168165 - DNA, 151 bp, Homo sapiens
ggttttgagcagacaggaaactgactttgctgacccctctggctgccatgtggtgaaggaaccatggagtcgataagaagctgggagaccagtaaggaggctgttaggacaatacaggcaagaaatgatactggcttggaccaaataatag

SEQ ID NO: 168166 - DNA, 256 bp, Homo sapiens
ttcacataccataaaatgtacccctttacagtgtacaattcagtgatttttggtgtattcacaaagatgtgcaaatatcaccactaattccagaatatttaatcacctcaaaaagaacccccctgacacacacacccagtagcagtccatgccccacttccccctcctgccagcccttggcaaccaataatctactttatgttcaatggatttgcctattctgaacatatataaatggtttcgtgcaacgtatggc

SEQ ID NO: 168167 - DNA, 415 bp, Homo sapiens
tttaattgactcacagttccacatggctgggggagcctcaggaaacttacaatcatggcagaagggaaagcgggcatgtcttacatggcagcagactagaggtgaagtgcgaacataggaaaaactgccttgtataaaaccatcagatcttgtgagacttactatcacaagatcagcatgtgggagactgcccccataatccaagttcctccctagacacatgaggattacaattcaagatgagatttgggtgggtatacacagccaaactatatcaacagccatatcagaagtcttaaaaagtccatggaaattgtgtattatgaaaaactatgcatggatttcaaaatctttttgcaccaaaataaactggtactaattcattataaaatatctcaacaggatctagtttgag

SEQ ID NO: 168168 - DNA, 657 bp, Homo sapiens
  misc_feature (44)..(44): n is a, c, g, or t
tatctatcacctattggctctgtctctctgaagaacctgactgnaagagtgacatttaaaaatgtagtcttggcgggcgcggtggctcacgcctgtaatctcagcactttgggaggccaaggcgggcggatcacgaggtcaggagatcgagagcatcctggccaacatggtgaaaccctgtctctactaaaatacaaaaaaaattagccgggtgtggtggcgcgcgcctgtagtcccagctactcgggagcttgaggcaggggaatcgcttgagccctggagaccgaggttgcagtgagctgagatgacgccactgcactccagcccgaatcacatttttctttctaataaagagactaattctcgctagcatgaggtgggccacttttgaagaaccacagatgtaataaatgaataaataacagatgtctgatcccaccttcgtggttctgtccaccatgtgttttgtttgtccataatttcctatgtgtattagttgcgagctgatagaaatgtttcctcattgggcatgttcttcatacagcttgttttaagccatcagacacagctcgagattgatggagagcctgaaaatgacaacctcatgatttagttttacttgaatatcagtcttccaatattaaatgtattttctac

SEQ ID NO: 168169 - DNA, 210 bp, Homo sapiens
gggaaaaaaattatgactaagtcttcaaaagcaattgcaacaaaaacaaaaattgacaagtgggacctaattaaagagcttctggacagcaaaagaaaccatcaacagagtaaacagacaacctacaaaatattcacaaatgatgcatccaatcaaggtcgaatatccagaatctgtaaggaatttaaacaattgaacaagcaaaaacca

SEQ ID NO: 168170 - DNA, 535 bp, Homo sapiens
aattatggacaaggccgggcacggtggctcacgcctggaatcccagcactttgggaggctcaggcaggaggatcacttgaggtcgggagtttgagaccagtctgaccaacgtggtgaaaccctgtctctactaaaaatacaaaaattagctggtgtggtggcaggtgcctgtaatcccagctactcaggaggctgaggcaggagaatcgcttgaacctgggaggcagaggttgcagtgagccgagatcacacctctgcactccagcctaggtgacacagcaagaccccatctcaaaaaaaaataataataaaaacataaaaattatggacaagaaaaaacactattctggaagctttgttttggcaacaaattatatgacctgacctttcataagtcatttaaactttagggctaggccaggtgctatggcgcatgcctataatcccagcatttagggaagtagaagcaggaggatagcttgaggccaagaattccagaccagcccaggcaatatagcgagacccccgtctccac

SEQ ID NO: 168171 - DNA, 317 bp, Homo sapiens
tacacgatgcagggttagaaaaaaagacaccgctccaggtacagacagataaatacagtgaaaatgactgccgtggaagaccagtgaaatgtcaaaagagggtatgaaaagccctggcgacagcaacattttaaggataagaagccctcaaagggaattgggaagtcctaaatgtaacagagcaacagggcaaggaaatagctgaaatgacccatgctgaggtcacagctgcttatggaaagaaatgaaactaagaggaaactgacaatcagagataaaaggagaaggtcaagaaagcttctgcagaaaaccaaata

SEQ ID NO: 168172 - DNA, 187 bp, Homo sapiens
ggcaactacagaccaatatagatgcaaaaatctttaacaatatattatcaaattgaatccagcaatatataaaaaaggataataaccttttttaaaagatgtgaatacaggttggctaaatatttgaaaaaccatgtaatctattatatcagtaaactgaaaaggaaaataataacaagatatatga

SEQ ID NO: 168173 - DNA, 544 bp, Homo sapiens
caggagcacagaatgatgaaaaagagggtgaaggagtggccttagaaggatgaggaaaataccttgtctccctgtcttccctatcttctttacgtttctctccaaccgtggcctcttctctggacagactccctttgaggtatgggcagttctgaggcatattcacaagcaggagttcctgtggagggaactctaaatcaggcccttggggtaacaggttgggaatgtaaaagtattcagcccagaatgtgatactgtctttgatgcagggtaggcaggccccaaagtggagtttagcccactgggttcttggctttgtccaagaaagaactcaagggcaagccagaggtagaaggaaacagctttatcgaagagacagtgttacagctctatgactgctcctgcagagcagggctactgagtaggcagaaagtagcagctcagggcagttttgtagtcatatttatacccacttttaattgcatgcagattaaggggcagtttatgcagaaatgtctagggaagatgtagtaatcattgggtc

SEQ ID NO: 168174 - DNA, 306 bp, Homo sapiens
tcctgcttttagaagcacacagacagataaccactgtgcagcaaagtaagtgctgtcatggagttaaacggcacatgcttctgtaggagcataaaggagaaattgcttactgaagagcaagggagcagggtagaaagagatgtcagcagagctgagtcttgacatttgtataggtgttttcttagtttggaagtatattccaggtactgggaacatgtgtgttgtctccaaggaaggagatagcatggcagatttaagaagctagaaatattttaatgtagttggcagatgaaatacatttggggg

SEQ ID NO: 168175 - DNA, 276 bp, Homo sapiens
ttgcaagtccaaaatattgttatgaacagaatgcaaataaagtcttaaagttatgaggtgatatggtattgataattgactttaatttaaagagactggtaaaggataggtatgtgcttttctaattgagagtccagaaggtagatatatggttagagaatctcaagggagaaactagccagctcttctctgccttccccaaagttagatcaagagttcgtattaaattacatatgtgatgatattaagacattaataacttttggggtgtgtgtg

SEQ ID NO: 168176 - DNA, 499 bp, Homo sapiens
agaattttcaacttgcagtaccccaaggtaccttaagtcatgctttttcatcttagtgtccttgtactatgaactcttttctccttcttcacttaactgtctgctactcatcctttaagactcaatttatgccaaggatctggggagaggtagaaatgaataggtaaactacagaagatttttagggcagcgtaactattctatactataagggtggatatgtgtcatcacacatttgtcaaaatccatagaatgtacaatacaaagagagaaccataacgtaaactacagactttgtttgagatatcatttcctctgggaagcagttcctaaccatcccaaatttgtattacattctctttctctgtattccttgaatatcaagtacttacgttcccattcattcatccatggacgcttgggttgcttccctgttttagctattgtgagtaatgctgctgtgaacatagtgtacaatatctcttttgagccgcatatc

SEQ ID NO: 168177 - DNA, 652 bp, Homo sapiens
agaattttcaacttgcagtaccccaaggtaccttaagtcatgctttttcatcttagtgtccttgtactatgaactcttttctccttcttcacttaactgtctgctactcatcctttaagactcaatttatgccaaggatctggggagaggtagaaatgaataggtaaactacagaagatttttagggcagcgtaactattctatactataagggtggatatgtgtcatcacacatttgtcaaaatccatagaatgtacaatacaaagagagaaccataacgtaaactacagactttgtttgagatatcatttcctctgggaagcagttcctaaccatcccaaatttgtattacattctctttctctgtattccttgaatatcaagtacttacgttcccattcacttatcaaatggtactacttatgtttcttcctctctggacttgagctccctgaggtcagggactttcattcctctctctctcttttttttttttttgagacagtctctcactcccaggctcgagtgcagtggtgtgatctcagctcactgcaacatctgcccctagcgttcaagcaattctcctacctctgcctctcgagtagctgcgattacaggaaagtgccaccatgcccagctaatttttttttt

SEQ ID NO: 168178 - DNA, 437 bp, Homo sapiens
agagatgtgccagcaagggactcagcgagacggcgacacaaatgtgccgacaaacatatacagagacagacagagataacccaggcaaaggcgcggacttgaggcgacaagctcctggtgaatacccggacccagcctcgccgtcgcccccgtcgtccagcaggggtcgctgttacccagcgaccgcgccctccgggaccttggggccagatactggccaccaccccttgggaagcccttctgtcccccagtgccaagactgggagttcggagggctcggacactctcctctccaactttgggaagcatggtgggtttggcctcacctgtgtgaacatggaggagcggcgagggagctgaaaagcgctttaactgcccccctctccaactaccagctaatcgctcctataaatacagacggcctggcctggcattaa

SEQ ID NO: 168179 - DNA, 180 bp, Homo sapiens
catacatgtgcatgtgtctttagaacaatttatagttttttgggtatatacccagtaacaggattcctgggttgaatggtatattagtttgttttcacgctgctgataaagatatacctgagactgagactgggtaatttataaaggaaagagttttaattaactcatagttccacatgg

SEQ ID NO: 168180 - DNA, 273 bp, Homo sapiens
ttggtgactgttgaaagtgttatgcatataaatttgaaagtggaataggatagactgagattatgagggaagactgtcttaaaatgaagtcatgatcaatgaagtaaaagctggcagatagtaataccgctaaactcttgggtcagtccttgcctgaagcctgagaggaattctagaccttcagattcataagccaatgaatatgctatattctgtgtggcaattttagttatgtttttattacttttacaataaagtatcttaacacatatg

SEQ ID NO: 168181 - DNA, 522 bp, Homo sapiens
gccctgtaattattttgtatcatcttcattgaaataacacttattaggaccttatttcatttgcagcaacacaagtcagagtgttctccaaagtctcacattataactctcagttcaccatgctgtgtgtgagctccttgagagtagggcttacatctcagccatctttgcatacttcacactaggacgttgtctggcacacagtaggcatataatgtttgttgaataaataagtgaattaaatttgatacatatgactagctctgtagtagcttctgttgtataagttatgatataggggttacccaaactgcaaaaaaatgaaatgtacatttgtaagatattgtgtttaaatggtttataactaggatgatggaagttgtgaagtcacatgaaaagctaacagatgtttgagtggcttttaaaaatagatttgcaggctatggagggcacactgaagcctattttcacgagtatactggctagttttgttcccaagctttctactgcccccaggggact

SEQ ID NO: 168182 - DNA, 514 bp, Homo sapiens
tgcctcagcctcctgagtagctgggattacaagcatgcaccaccatgcctggctaatttttgtatttttagttaagacggggtttcaccatgttggtcaggctggtatcgaactcctgacctcgtgttccatccgcctcggcatcccaaagtgctgtgattacaggcgtgagccaccgcacccggtcaccctcaatttatttttaaactttatttttataaatatatgtggttcaaagataattttgttacatgtatacattgcataatggttaaatcatggccttagggtttccataacaagaataacaaatattgcatttactaattaatgtctaactcttaattccctcccacccactcactcttccaaggcttcagtgtctatagttctcccctctatatctatgtaaacacattttagcacctacttattagtgacaacatgttatacttgactttctgtatctggcctttgtcacatagcatattatctgtcacatccagttccattc

SEQ ID NO: 168183 - DNA, 107 bp, Homo sapiens
gtctggcgtttagcatctttgtacagagccagtctcagtggatgtagcctcaggactgtgcagagaaaatcacctggcttattcagaagggcattaaggacagcagt

SEQ ID NO: 168184 - DNA, 269 bp, Homo sapiens
ttctgctgacttcaggctcagtttgttcttctagttccagtttttcttaaaaggtctaggttactgatttgaggtcttttttaatatagcatttatcactataaattttctaagaattgctgtaattgtaccctccaaaacctttgatatgtttgtcttcattttcattcacctcaaagtattttctaattaacctcatgatttctttgacccattatttaggagtgttaatttcaacatatttgtaaatttctcaagtttctttttag

SEQ ID NO: 168185 - DNA, 120 bp, Homo sapiens
ataaaaacacaaaacaaaacaaaacataagagccagtgttcatcaatgatcagcaaattagtagattaggtaccttgttgaaattttagtttagccttaatggcgtctataaattaatag

SEQ ID NO: 168186 - DNA, 440 bp, Homo sapiens
tacacacctacatatacataccataacacacacacacacacacatatacacacaaacacacacatatatacacacaccatatatatacacacatatatacacatccacaccatatatacacacaccatacacacacatatatacacacaccatatatatacacacatatatacacatccacaccatatatacacacaccatgcacccacatatatacacacaccatatatatgcacatatatatatacacccacaccatatacacacacatacacatatataaacaccatatatatacagacacatatacacacccacagatagacacacatatacacaaacatacacacaattatatcacaaggtctgattgtattactgagacacagtgaaaggatgttccataacaggaaggttatgcctgatccagtgagacagag

SEQ ID NO: 168187 - DNA, 650 bp, Homo sapiens
atacacaccatacacacatatacacacacataccccatatatacacacatatacatacctacatatagagacacatatatacacaccatacatatacaaacacaccccgtatacacacatatacacacctacatatagagacacatatatacacaccatacatacacacacaccccatgtacacacacatatacacacctacatatatacacaccatacatatacaaacacaccccatgtacacacctacatatagagacacatatatacacaccatacatacacacaccccatgtacacacatatatacacatccacaccatatatacacacaccatacacacacatatatacacacaccatatatatacacacatatatacacatccacaccatatatacacacaccatgcacccacatatatacacacaccatatatatgcacatatatatatacacccacaccatatacacacacatacacatatataaacaccatatatatacagacacatatacacacccacagatagacacacatatacacaaacatacacacaattatatcacaaggtctgattgtattactgagacacagtgaaaggatgttccataacaggaaggttatgcctgatccagtgagacagag

SEQ ID NO: 168188 - DNA, 439 bp, Homo sapiens
taccccatatatacacacatataggcacctacatatatacacaccatacacacatatacacacacataccccatatatacacacatatacacacctacatatatacacaccatacatatacaaacacaccccgtatacacacatatacacacctacatatagagacacatatatacacaccatacatacacacacaccccatgtacacacacatatacacacctacatatatacacaccatacatatacaaacacaccccatgtacacacctacatatagagacacatatatacacaccatacatacacacaccccatgtacacacacatatacacaactacatatatacataccatacgtatacaaacacaccccatgtacacacctacatatagagacacacacatatacacaccatacacacatatacacacacac

SEQ ID NO: 168189 - DNA, 292 bp, Homo sapiens
  misc_feature (17)..(17): n is a, c, g, or t
gactgttatggtggtgngtcgtatggtggtgctgcactggtttttttcacttggatgtgcctcaagacccataaattcaggattgtcagatgagagctcatcatccctctccccaaccccaaattcttcctcctacctttccagtcacctaaagcttccaccatcatccagtgatgcaagctggaaatctggcagtcaccctagactctcctctccaatcatcaaaaccttattttaaggtttgaaaggcttcaaagatgtcctgaatcccagtttaagcaccaccaataca

SEQ ID NO: 168190 - DNA, 215 bp, Homo sapiens
aataattgtcatactttttgttttttgattcagcacttcctaacagtcactgagcttacaaagccatggttcatgatttccacaaacttactttttatttatctcctaaccaaactccagggaacctactgacttaccctttcctgagaacacaatatactttttaccccttgtcttttttatctttatgcgattgtttcttccacctaaactgg

SEQ ID NO: 168191 - DNA, 358 bp, Homo sapiens
tgggaggatggcctctgttaggagtttgagactagtctgtgtaaccctgcaaattcccatcactataaaaaatttaaaagttagccaggcatggtggcacgagattgtagtcccagctactcaggaggctgaggcaggagaatcacttgggcccagggggtcaaggctgccctgagccatgatcgtgccactgcactcgagcctgggtgacagaccaagaccctgtcactaaaataaaataaaataaatacagaaaaaaatgtactagacagggaaatgaacaccaaaatgttaagattaaaaattattaactcttttttattccttggtgaatttattgacttgtgttgaggatgtt

SEQ ID NO: 168192 - DNA, 757 bp, Homo sapiens
gatcatataggattgcctcgagccagattcgcacgagccatcaacagatcagacagcttgtactcacaggccaaggacacgtggaaagaggctcaattttctagatgggtggcaacagccatgatcttctgtcctctgggtccccacaagcctggatgaactcaagatctgactcagtggcacagtgaggagacctttgaggcctcagtgaccatccttggacttcacctctcacggctttcaggcagagaggccctcccatgcccacaacaggctgagcccagccttcctcggggtttgcttccaggcctgacttttactcccctttctaagtgaggcagccatgactggccacttcatgtgctcctggagaagggcttgcaccagccgttttcaggaaagtcaagcagctgttgactcctgagtctgggtgaatttgtgtgaagagcataaggcgctgtttcttaaccaaaacgcttcctcttgcagtgcagatgggatgtgcttctccacaggaggccccacggcttccccacccctcagaggagcgccgtgcgtgcgtctgtgtggaggattggcagctcctgcagtcggcccttggtcctatttggcgacgcctctgccttccccttaattatacagtcatgagccgccctggaatcacggcagctccggatggatcctggatgccagaatgcagcctcagcacggggctgcaggacaggagtgagcgaggggctgcagagccggcggccgc

SEQ ID NO: 168193 - DNA, 611 bp, Homo sapiens
acataaaccacttcccctaataaatcccctctcatatagcttcatctatctatctatctatctatctatctatctatctatctatctatctatctaactatccatccatccatcctattggttttgtctctctggagaatgctgactaatactccagattataacatggtgtcccagtacttccctccaccccaatggcagaggatgtcggagaaggctgagtaggaaaacccctgtcttcccacttcctagtgtcctagtgtcaagggagaacccacacccacccagtggtaatgagaaccccacccctgaatggggtagtgtcagagaaggattggttcaaccaggactttcaccaccactcagtggaactgaggcctcctcccatccggaccctgtcagtggagactgtgtggtgagcagtgagcagaggaggcattcctccctgtaccagccaggctggtatcagcgtaggcctaagggagagctcaaactcccaccccatccaccaataacgagatgtccctccaactgggtttcaatggaggcaagtagagatcctggacttccagcagtaatggggtggtgcccaccttcccccaccagaggag

SEQ ID NO: 168194 - DNA, 451 bp, Homo sapiens
tgtgccactgcacgctagcctgggcaacagagtgagactctgtctaaaaataacaaaaacacaaaaacaaaacaaaacaaaaaacctggaaagacaccaaaatgctaaattgtacacattttgtgagtaacaagactgtggataaatttttctcttctgttctctgttattttttaggtttttttaaagagtgtgtaaaaatttaaattagaaggcaattttaaaaagctctaaagcaatcttcaatctcctaagaatacttaaggtatttccttgtgtgaaaaactctagagtagtattaaaaaaatatacatattggctgggtgtggtggctcacacctgtaatcctagcactttgggaagtagaggtggaaggatcagctcagtcttgagctcaggagttcaagattagcctgggcaacataatgagacctcgtctctatttaaaaaa

SEQ ID NO: 168195 - DNA, 245 bp, Homo sapiens
ttggatgagggcctcaggaagcttctactcaaggcagacagcaaagggaagctaatttttccattttgtagatgagaaaactgggacaagaaatatttagcaatttgtctaaacctacaatataagaggtagatcccagattgaaacatacacagtctgactctaaagactctttgtatttcaaagaaagtagccccttggctctgatattagttgcagatattttaaattcttatttaaaaata

SEQ ID NO: 168196 - DNA, 438 bp, Homo sapiens
gctggaagtccagggtcaggtaagcagcacagtcaggttctggtgggagccctcacagggcggagagaaagctcagggttcttcatccccttatcagggcaccagtcccaacgtgggggctccacccctgtgacctcatccaaacgcagtcacctcccaaaggacccaccttgtaataacgtcacattgtggataatgggcttcaacatatggatttggggggatacaaatgttcagtccatagcaaagtgcttggcctgatggagtaagtgatgtttcctctttcctcctgggacagcttgacatcccagatgggaaagaactttattctcaacaatcataggagggaggagcatcatagaagggaaaagatacaccttcctggcctgaaaattgacatcaacaggacctctcaggggatacccaggaaatctattt

SEQ ID NO: 168197 - DNA, 525 bp, Homo sapiens
caacatggcacatgtatacatatgtaacaaacctgcacattgtgtacatgtaccctataacttaaagtataattttaaaaaataagtaaataaataaataaaaaaagaaacaattgctggctttgcaattctctttcctccaaaatcgccaaggcctcaatttactcattgctgaaaaaggacgactctgtatatttttaaatgaagagtgttgtttttacctaaatcaatctggcctggtatatgacaacataaaaaaactcaaggatagagtccaaaaacttgccaaccaagcaaataattatgctgaacccccttgggcactctcttaattggatgtcctgggtcctcccaattcttagtcctttaatacctgtttttctccttctcttattcggactgtgtgtcttctgtttagtttctcaattcatacaaaaccgtattcaggccatcaccaataattctatatgacaaatgctccttctaacaaccccacagtatcagcccttaccccaaaatctttct

SEQ ID NO: 168198 - DNA, 172 bp, Homo sapiens
caaatagacatgagctggggatttcccaggttctgagaaaagacaggaatataaatacattggacttgttgcacatgattatttggaaactatttgtatttacataagcaaaatattccatacttttacgagaagaatacttacttcatttttatatcacgtttttgcatac

SEQ ID NO: 168199 - DNA, 167 bp, Homo sapiens
gcaccaagcacagaaaggttaagtaacttgttgaaggtcccacagctactaagtaagtgatagattcaggctttgaatttaaataatctggctcactccagatttcatgatcttaattaccacaccacatttcatatagtaataatctgaaaacagaaggagaaaga

SEQ ID NO: 168200 - DNA, 349 bp, Homo sapiens
catctgcaaattactgccagaaaaaaaatctgcctttcatttctaaaaggcactctggctttggtcctacttctgctgattaagcagcatcttcttacagagaaggcagccaactcaaagagaaccctttcctctgtgtgccaggactcaactagcacagctaaagcatcatccaatttggctcttcagtggattccatctcagtatcagcttttacttaacaacccagagaaacacagtgacccactacctctaagcattgacagaataaatagaaaatgtttgtgtgtacataaagctaggaaggcactaaactaagatgctctaaacaggaacactcatacacagg

SEQ ID NO: 168201 - DNA, 313 bp, Homo sapiens
ttaagcacaatttttctttcttttaatgtttagcttgatgcagactctttgtaggatactaatgttgggatataaatgatgctttgtgaacacccccaaaatatttgagcaattttttttctcccttaataagttcacggtgaggtttcaaagagcaagagaacttagtttaagacatttcagtaactggaagatacttttatcatgctagggcagagcaaaagaactcggtacggtatacggactcatgcttgaatcatgcgcattaacgtgagtctttttttaaagtgttcattttcatttgttcagtttc

SEQ ID NO: 168202 - DNA, 921 bp, Homo sapiens
caaaaaaaccaaacaacaaccccatttctccttctggttgaatgattcatcaagaatcttggcccaagtacaatacagtttcagggaaaaaagactccagggaatgaagagggaacgtaatcatgccctttccgataaccccgttattaggcaacgcggcgcagatgaaattctccagggagcaagtgagtgaggcgtggcttacattttgtatactgagccctgttgagtgacttcacacctccactccctgttctatgccagcaaggtggggcagctggggtggcgggcgagctgagggtcacctcagagctgaggtcgaaagaaattcttacaagtaaaataatcactaacaatttttatcgtcatagatatggagttgttggtcttgagaggcagactgtgcaggaacaaaggctggcgggtggactgtggtgctcggatgctgcagtcccaggggaagagctgtcgtttcagtacccaccttcctttccctcctctggccacagaatactaataataataaagaaaggaaaagaaaagaaacttctcagagaggttcctagtggctaaaaaactcctggttctccaccccctgtgagtttacgacatctgcaaaacaagactgttaagatacagaaacaatataaaggcactgaaaaatgattcttttttttttctttttagagatggggtcttgctctgttgcctaggctggagtacagtggtgggatcgttgctcaccgcagccttgaacttatgggctcaagccaagctcccacgtagctaagacaacaggcatgggccaccacgcccggctcaaattactctaagacgctcagggaccctaccttacaaagcagttgatattccagtttgaataaatttaattgatttttttttgagtattgtcttttcata

SEQ ID NO: 168203 - DNA, 255 bp, Homo sapiens
tagtgagcatagtacccaacaggttttcagtgcttgcctccccctcctctagcactccccagtgtctcttgttgccatctttctgtcctctagaactttgttatcttgcctgactgaaactctgtatccacggaacaattccccacttcccctccctgaggcctctgggagccaccactccactgtctgcttctgtgattttgactactttagattcctcacgtacatagagttatgccgctcttgtccttcagt

SEQ ID NO: 168204 - DNA, 496 bp, Homo sapiens
gaagaggttgtatgtgtgaacctggatctgggccctaagaactgaaatatttggcacttgggcttgttaaaaatgattcttcctttattgagcataacatgaggggtcacattcaactttcagaaaagaggactcaggctccaattctatgttctgtttctatcctttaggggtagtttttcaacctcagaaaacattttctgagtttaggttgtattttgcttccttgaaatttgttttagttcagacatttcttagagaatttttgttgtaacaggatagagttggacttttcctgctaagaccctaatgataaggttgagtgtacagtcaaccttttatgttttaaggcataaattgaggactagactctgcacctgcttggggcttattaagaagtaaagaggctctgctgttcctaatcatcccatcagcaccaactttatcattctctctcctctcctccctcccagaagcagatcagaagactagggtg

SEQ ID NO: 168205 - DNA, 463 bp, Homo sapiens
tgttgggattacaggcatgagccactgtgtctgcccccaagtcctttttaaattaaatttcctttttatacatttcagtggcctgattatgtaattcttatcaatctagcagattcagtatattaatatggcaaacctaataatattcccttagatgtttcaatactattcataaactcagtaagatttcaatatagaagtacccatttcaaattagttataagaatgtacttaaaacagccacatactctaacacacttcaagtatatataagaccaaaaatatgcatagattccttattaatacagaaatataaatctatggctttgcttctttcaagcctttctatatgtaactcagttttactggattaggagatggatactgtacagttactgtcctagttaactgaggccactgtccagtcgacgcggccgcgaatttagtagtagtaggcggccgc

SEQ ID NO: 168206 - DNA, 448 bp, Homo sapiens
aggcaccccctagatccgtctgctgcattcccgggggtggagagctggatgagctcacctaatctgcaagcgtcatgacaaccaaggaaggagcccagacaagagctgagggaagatctgtgggttgaccaaagaatggagaccttgaatatcccattatggtgactgaagcggggaagggtatgatgaagatagtactttgggagaatcactccggcagcatcgaaggagggaccggaggcagagaagccaattaggatggcagctgtggcaatatctgggatgaggactcagataggggaagtagcagcgagaatgtgaatgcagaaaaatggctagaggctgagcacagtggccccagcattttgggaggccaaggcaggaggtctgcttgagtccaggagttccagaccatcctgggcaacatggcaagatgccatctcttaaa

SEQ ID NO: 168207 - DNA, 168 bp, Homo sapiens
gccacatagaagaggatgaatgggccctgggtagcagtggtggaggatgcgagggaagtcagaatccaggcagacctgggatggcgggacatgggagggggaggggaaggtgagtcaagaatgacctgaggcagagctgggcatgggctcacacctgccatgggctca

SEQ ID NO: 168208 - DNA, 604 bp, Homo sapiens
gtttatgtgtgctttgtttaaaaattagagacattttattttttcttaagtaacagaaatcagactttcaaaaaagctctttaaacctagactaacttatttatgacaattttgtcatatatttgaaagttaattttaggaaaattacagagccttttaaccaccctatggccagacttcagtgttgttctttttatttctacctcatttcatgttgagtcttaacttcgctgtctctctttatcatcccctacccctagtctgaatgttgaagaatgctaaagtatattttattgcttcattgactaaaactatgtttctaaaactatgaatttgcttaatgagtcagcaactgtaactataattaacagtatagtttttacaaccatagttttgtggtaaatgtgcagttctcagaatttaaatgtaaacgttcaatgaaattaaacaaaacccaaatcttcatgcaataggtagtatatatgtattcagtaagggtcaccaaacattaattgaggttctattatggttaacttttctactttgtacttagggataaaaagatgagtaaaattgtttcctgcatttttccccacccattccc

SEQ ID NO: 168209 - DNA, 650 bp, Homo sapiens
tcggtaccccattactttgtcacaggcaagtggcacaacttgccgagtggttggggctgtagaatcctgcacacccagaatcagaatccctgctctgcccctcactagagcaggtgtgctaactagacacatcatataacaggtcatctgtaaacacagggacaatcatagcacctgagtcaacaggccgtatcaccgtttaaatgataatgcgtgtcaagcatttagtccagtgcctgacacacaagtattcaaacatgatgactgctattatcactactgcaagcctagcactccccactccacactccacacggtaaaatctgttgacatttgtcacctgcgccagacaatgcactctttgagtttagactccacctaagtcaccttgacacccccagccccgaccatctcctaggtctaaacaacccatgttcaatatactggggaggaggtcatgagtcatgtgtcagaggcaaggtaggggccattcatgtcagattctctgctcgtcatatgaggctgagggggggacagaatggaaaacccttcactctcaacaaacattattaagcaaggacccatgacactcactgagctaggctagagtgcaagggtgcagagactgtgacaaagtgcatgggctgtat

SEQ ID NO: 168210 - DNA, 715 bp, Homo sapiens
catatattttattcctctgtgtaatgcaagtgtctcctaaacccaaacatactcaggtctctgtacattgaaatattgcagccctttatttctcctgggacacattcttttctctccactccctccactccttccatgctgttctcacctatggccaacactcaactcacttttatggagtttatcaaactaccaattcttccaagtgtttcccattttatgaaatatttcccaaaagacagcctctcctagcaccattgcctgacataccaagctctccactacaacttttttcacactagtgacacacacacacaaaatctgtattttattggcctcaccagccaaactcatgtgccatatttataaaataaacaaaatatcaaaattctgatgcctgctgctccttttctccttttaatatcttggagttttgtcctaaggatctcctacttgagaccacggaaagcagcactgttagtaatagaattctgatgttgatgccaagacattaaccatgtttccaacaggacactgacaaggccaacagaaacaaagtgtatttctaacaggatgtggccaagatcacactgaagctacttctgagttactgctgctttcttgcctagctgatctggcctcctgaacaaagattactgaaatgtccggtaactaaactgccccctcttcttgacacttgcatccagaggcttcc

SEQ ID NO: 168211 - DNA, 635 bp, Homo sapiens
gatcctgcggccatgctttgatctcccatctctctatccttcatgcttttcccgggtatggtggccgtgcccgggtctccatcgtctcggggtctcctcttacagtctgttctgcggggcttgccagtcttgagtgactgtctcgtccttttacaaacgtctctgactggcgaccatcctgtgcgcataccaagctctccactacaacttttttcacactagtgacacacacacacaaaatctgtattttattggcctcaccagccaaactcatgtgccatatttataaaataaacaaaatatcaaaattctgatgcctgctgctccttttctccttttaatatcttggagttttgtcctaaggatctcctacttgagaccacggaaagcagcactgttagtaatagaattctgatgttgatgccaagacattaaccatgtttccaacaggacactgacaaggccaacagaaacaaagtgtatttctaacaggatgtggccaagatcacactgaagctacttctgagttactgctgctttcttgcctagctgatctggcctcctgaacaaagattactgaaatgtccggtaactaaactgccccctcttcttgacacttgcatccagaggcttcc

SEQ ID NO: 168212 - DNA, 435 bp, Homo sapiens
cccagaagtggaattgctggatcatatggtaattctatttataattttctgcggaaccaccacactgttttccataacatagtggctgtgccattttacattcccaccagcagtgtgccagagtttccaatctcttcacatgcttgcgaacagttattttgtttgtatgtttgtttgtttttggtagtagccatcgtaatgagtataaggtgagatgtcatttggatttgcatttccctagtggcaagtgatgttgagcatctttttgggtgctggttggctattcgtatattgtctttggaaagacttgttattcaagtcctttgcccatttttaaattaaggaatttgtttttttgttgttgatttgtaggagttttttatagatccacatattaactcctcatcagatacatgatttgcaaatatttcctcc

SEQ ID NO: 168213 - DNA, 258 bp, Homo sapiens
atttctctagacaggattgcatttgcttctgtgggtatcttgattcagggttggaggtgggagggagttgtgtcccagtccagggccattgacttaaactgtagtcatgggttgaggttttggggaccacccagctaatataatttggggcagtaaatatgtattctttcctcagtcccaaggcaactctccttgggggctggagtgagggatagggtcccagcttaatggggagagactatctatcttggtggcttt

SEQ ID NO: 168214 - DNA, 1006 bp, Homo sapiens
ggagcgccgctggccaccgagcagtcatgctcttggaaatagccctgacagcgccctttgccgtccatctctgagtgacgcaccgtcagccgacctccagggtgggctgaacgacgtccaggacacgaccggagtcggggaccggaaacccccggccactgcgctgcctagcgcttttttctctgggcccttaggccctggactttcgaccgctgagggcacaggaagtggtggcacgctgctggcagatgcctcgcaagccctggtgtggtgggtgctggaggcacccgcaggcaccccggtggcatggtgaccttcgagcgggcacggacagatgggcctcaccctgggccatctgcttcctcccccagctctgtttgaaaggggacgcccaccggcaggtggtgggtttggcctcagtggaaatgcagtgagagccaaggccttttgcgataacatggagttatgggcaggggcctgtccctgacttgggccttaaggttagggccccactcccagcttcatctgcttgcctgaggttctgggggatagtgcacctgaacacctccctttctgctttcagaggtccccatagccggggaagaagtactgggtctggggggaccccatgtggtgctgggttctatcttttgttgtgacatgccagtctgacttccttctgccttttcccaacccgttcttatttctttcctctcaaggctgagttctctgtgaactaattaggtgacagaaaaaactcattaacgtggatctgagtaaatggcctgaatcaccgctgtggctggggactaggagatggcatttgtgcgagccctgggccccaaagacaggagatgaccaatttttcctcttagatctgaagagggtggaggcgggagagacatcgttgctgcagcttcactgtccttggaggaagtaaagacattcctgatttgctccaagcttaccttcccccagctccttctggagagcgacaagcctcgtg

SEQ ID NO: 168215 - DNA, 118 bp, Homo sapiens
tgtttcctttaagggaaagcattatagcagaaccacatccaactctagccccatagaaactattttgagacacacaaaacctaaaagctatttttgtcttgatctgggtagaatttat

SEQ ID NO: 168216 - DNA, 338 bp, Homo sapiens
  misc_feature (5)..(5): n is a, c, g, or t
gttanaatggtcaagtggaggggagaaattgatgatgtagggaaacgagagagagagagaaagagagagaagcagagtgagtttcttgagtaggcaagaggggatgggagtctgatggagaagtagagaggatgtccttagagaggagccctgacatctcagtcacttagctggtgggaaggcaaaggatgtgggtgcagatactggtaggtgtgcaggtgtggtggtgcgagcttgcaaaagttcccaatgcttctattttctttgtgaaataggaaccaagttcaccatggagagagtgagtgggttggggaaaaggtgttgtatgtttgaggagt

SEQ ID NO: 168217 - DNA, 164 bp, Homo sapiens
caagtttgattccaaccttgatctaacagacctggcttggttgagtatttgttggctgttagctacttttaccatcaaatcctgtgcttggccttcagcttgctctgcttggctacagcatgagatgaggattgttggcaagctaccacagagactctgcggct

SEQ ID NO: 168218 - DNA, 278 bp, Homo sapiens
tcagcagactaacaaaagctcattgtgacatgggagagaacaaacggaggagctgcagtacaatgtccaacagcgcaatacatagagagctgagtcccagaagagacagacacacggaagagctgtggtgcaatgtccaacagcacaaaacatagagagctgagtcccagaagagagagacacaatggaagagctgcggtacaatgtccaacaacacaatacatagacagctgagtcccagaagagagagacacatggaagagctgcggtacaatgtc

SEQ ID NO: 168219 - DNA, 319 bp, Homo sapiens
cagaacaatgatgattacctagctaatggtggaggggcgggggttacggaaagagaggaaaagcaaaacatcaaaattgcacagagggaaaacttagccaactaacacctgccagaagagactagagggtggggctggagtaagcaggttccgctagactcttccctagggaggctgctaaagcttcccaactctgaaggtctttgtgtgagaggtgaggggtgggtggaagtgagtgagtcctgcctgggaggcaaacaaagaaaggaaaagggaaaggcaagggtgcttccacttctcaaggtaacatacttgaatg

SEQ ID NO: 168220 - DNA, 399 bp, Homo sapiens
gcaaaacaaacctgactccttctcagattgacttgattctacccctacaaggctgcagcagtgaattgattctctaagaatttagataacttacttactatctgcaactttgtgagcttcccaatatctggcggcaggatttcaaaatcgttgtcacttagatagagtgcacacagggtggctgcaaattaaacagcaatatataaacagggtggcatggaacccaaccatttgaggtctgatcaatacgagggagtcagctttgattaataaccctggcttggtgaaaagcctttgacatacctagggctcccaataataacaagcaggtcaaacttacatttactggcttattgttgtggagctggtgtgtccaggaaaacatctatatccaagagg

SEQ ID NO: 168221 - DNA, 315 bp, Homo sapiens
ccgggggtcagggaccaggtggggatggggaggtgggtttggctataaaaggggtaacgagaaggattttgtgaggaggaaactcacttttgactgtatcaatgtcaatattccagttgtgataacacagtatagtttattaatataagttgttaccactgggggaaactgaataaagggtacacagcctgtttttttttcttttcactttttttttttttttgcagactctcttgctgttgcctaggctggagggcagtggtgtgatcacggctcactgcagcctcaacctcccaggctcaagcgatcctccca

SEQ ID NO: 168222 - DNA, 945 bp, Homo sapiens
agcggagcttggacagccacgcgtgcgcccaggccaggcggagggactgccccgccctggtccagtgattgatcagcagtgattactgaggctttaatggtccgcttggatgggaattaattctgggatggataaataatgcatcgaggtttatgtagtccaaggcgagccgtccgtccggagccaggagaggtagccgagggagcctgacgggtgacgccagcggccacggggccccgaacgagcaggacatgaggggcgactaggcgcgaggacgagcaaaagcaagtggatgacagcatgaacggccctgcggggctggccggacggctgcaagaacatgctgagcccaaagatcaggcaggccaggagggcccgctccaaaagcctagtgatgggggagcagagccggagccctgggcggatgccgtgccctcacaggctgggccccgtgctgaaggcgggctggctgaagaagcagaggagcatcatgaagaactggcagcagcgctggtttgtgctgcgtggggatcagcttttctactacaaggacaaagatgagatcaagccccagggatttatttctctacaagggacacaggtgactgaacttcctcctggccccgaggacccagggaagcacctctttgagatcagcccaggtgggtgctggggagcgggagaaggtgccggccaaaccccgaggcgctcctgctcatggccagctcccagcgtgacattggaggactgggtgcaggccatccgccgagtcatctgggccccgctgggcggagggatctttgggcagcgctagaggaaacaagtccaccacgagcggaagtatggcccccgcctggcgcccctgctggtggagcagtgtgtggacttcatccgggagcgcgggctcactgaggaggggctgttccgcatgccaggccaggccaa

SEQ ID NO: 168223 - DNA, 620 bp, Homo sapiens
atacagaagaaatttgcacagactgccagcttcattatgctgccgacagcttccagcaaaaggaggacgtttgcagccagatatttcacccgctccaaaagcctagtgatgggggagcagagccggagccctgggcggatgccgtgccctcacaggctgggccccgtgctgaaggcgggctggctgaagaagcagaggagcatcatgaagaactggcagcagcgctggtttgtgctgcgtggggatcagcttttctactacaaggacaaagatgagatcaagccccaggtgagaagtgcatgtccggtgtgccatgggcatcgtggcagggctccacaagagggaagaccatgcccaggagaagggaggaaggcacagagccactgactccatcacagtgatgttttgccaggatttccaaagtaattttcattcttatcccccatgttcctggtatcacagcctgttttactggaacatgtccacaacttctgcaatgaaaatgtttccttaaaatgttgatagagaatgtccttgtccaacttaagaaaacaacgtcttccatgttctttttggccccttcatgcttccaagaaggacatacatgcacgacatatacc

SEQ ID NO: 168224 - DNA, 874 bp, Homo sapiens
agcggagcttggacagccacgcgtgcgcccaggccaggcggagggactgccccgccctggtccagtgattgatcagcagtgattactgaggctttaatggtccgcttggatgggaattaattctgggatggataaataatgcatcgaggtttatgtagtccaaggcgagccgtccgtccggagccaggagaggtagccgagggagcctgacgggtgacgccagcggccacggggccccgaacgagcaggacatgaggggcgactaggcgcgaggacgagcaaaagcaagtggatgacagcatgaacggccctgcggggctggccggacggctgcaagaacatgctgagcccaaagatcaggcaggccaggagggccaaaccatatcacgctccttccctgagtccttgacctggagtagatgcctgggttgtctccatttctcaaatgaggaaactgaaggactgacatcaggccaagactaacaggtactcactctcagatagcgcctgaaagctgacacaagttcagtgagactgctaggacaaccccctgccgtgccattaatgtctgcccacaaaaacctcacacctttggctggctctatcttccatggccctcatctcagcaccacctgggggtacgatgaagatgccatcaggtgtcggagctcatcttgtgctcacagctcacaggaccgcccctgtgtcagatgcccttcacttctggacctcataacctccacccagctcaagttgacttagcaagccctaactgtgcatccttcataagctgtaaattgttactcaaaccagccaagaggatgtcactgctattattattgcattactgttttgatattgctgttgttattta

SEQ ID NO: 168225 - DNA, 742 bp, Homo sapiens
agcggagcttggacagccacgcgtgcgcccaggccaggcggagggactgccccgccctggtccagtgattgatcagcagtgattactgaggctttaatggtccgcttggatgggaattaattctgggatggataaataatgcatcgaggtttatgtagtccaaggcgagccgtccgtccggagccaggagaggtagccgagggagcctgacgggtgacgccagcggccacggggccccgaacgagcaggacatgaggggcgactaggcgcgaggacgagcaaaagcaagtggatgacagcatgaacggccctgcggggctggccggacggctgcaagaacatgctgagcccaaagatcaggcaggccaggagggggatttatttctctacaagggacacaggtgactgaacttcctcctggccccgaggacccagggaagcacctctttgagatcagcccagcacaacagacgtgcacacggtggcctccctgctgaagctgtacctgcgggagctccccgagcccgtggtccccttcgccaggtacgaggacttcctcagctgcgcccagctgctcaccaaggacgagggggagggcactctggagttggctaaacaagtgagcaaccttcctcaggcaaattacaacctgctcagatacatctgcaagtttctggatgaagttcaggcatactcaaatgtcaacaagatgagtgtccagaatctggcaaccgtttttgga

SEQ ID NO: 168226 - DNA, 915 bp, Homo sapiens
agcggagcttggacagccacgcgtgcgcccaggccaggcggagggactgccccgccctggtccagtgattgatcagcagtgattactgaggctttaatggtccgcttggatgggaattaattctgggatggataaataatgcatcgaggtttatgtagtccaaggcgagccgtccgtccggagccaggagaggtagccgagggagcctgacgggtgacgccagcggccacggggccccgaacgagcaggacatgaggggcgactaggcgcgaggacgagcaaaagcaagtggatgacagcatgaacggccctgcggggctggccggacggctgcaagaacatgctgagcccaaagatcaggcaggccaggagggcccgctccaaaagcctagtgatgggggagcagagccggagccctgggcggatgccgtgccctcacaggctgggccccgtgctgaaggcgggctggctgaagaagcagaggagcatcatgaagaactggcagcagcgctggtttgtgctgcgtggggatcagcttttctactacaaggacaaagatgagatcaagccccaggagaataagtgagggaagctcagcaataaggagccatagaagattgatttaaagtttgatgtgattgagtaaaagcttgagactggtggggagaaagtcaagatggatgggaaagcacatgcacttctaggagtggaacattaatattggacagtcggaaaccagaaatctttaagaaagaggaaacctcaggggaagaaagagaggccatcctatcccataacttgaaagtcacaggaatatttcagcctgcagggaatcttcatttcccagcccattgtttaccaaacttgcacgtcaaaaacaaaaacaaaaaataaaatgttgctttcatgaactct

SEQ ID NO: 168227 - DNA, 121 bp, Homo sapiens
atttggaaagcacagaaaaatttgctagtagttaacaaaaaagatgttagcattgtgctttataatgcactgaagagagactgtcttaatttatccatcccctggaacgtgaggcaagaat

SEQ ID NO: 168228 - DNA, 423 bp, Homo sapiens
acaagaatggagtaggtgtgggcaggcctcagtagggaaaaggaatggctccaaactcccacaccattgggtctttgtgagtaggcaggtgggtcttgtgcaccttggcggttccccagggtgtcctgcagggatggggcaccaaaaaggcctttaacccttcccctttaagcaggggacccatgtggatcctgaagttgtgcatcagctcactgtagctgctctgagctggaccccagccactctgaggggttcctaggacttgcaaagggcccctctcccccatccttctctgcctaccactctcctgctgatgacaagtccacttctatacactgcttaggcacagccccccaagaaagctctgcagggatgaggagctgaggcacccgcatagtccagccttaaggggtttctgtgatg

SEQ ID NO: 168229 - DNA, 112 bp, Homo sapiens
tcattttacttaattccatgggacattaattaaatagccacatgtagctttggtggatgtccgaatgggacagtagcatccattcgctaaatagccttgggtaagacaattt

SEQ ID NO: 168230 - DNA, 897 bp, Homo sapiens
ggcagacccagacagaaattttccttcaaccaagcaccacattgctccacattgctgttctccggcaatagactctcactttttcttccttattggctaaatggtcctctcaaaggtcacagttgctaagtatattgattgatagggtttttctgccccgcggggattacaacatggtaagcctagtgactgaacactgcacactgtccagttagaaggcagcagtcaaggaagacacagagatgggttttctgaagcatccccaccggctcctgctaacgggcacccttgccacaacccttggggacacaggacaggcacagtcccctctcttagtgctttagctctcattggcctgagtggttgtcattccggatagaggtcagtgacttctagcaacagcacaagtctagacagaacatttaaacaaaatatcatcaaactttggaattacaagtgacgtttttggtcatctagttcatttccctggctaatcttcagatatttttgaaaacattccctcaggagttgattcataactggggccaggagaatgtgctctcgtttgagatggtctgtttcctgagacagtcatgatgatggtaaaattattgcttgcattgggctgcccaggccggtgtagctccagccactgtgcattggtctgctctttctcactcaaatcatctctgtttctctaattgctccccatgggtggtgtgtcttactctcttgccatcctagatgttgtcccccaaatgcactgttgcttgtcaaactccatcttttgggaagcttttttgctatagtttccacttgtaatctcacccattaagcatataatagaccacaattggccccattatgtactttctaaaaattactttccctctatcc

SEQ ID NO: 168231 - DNA, 341 bp, Homo sapiens
agaggatctctaagaggtggtgtctcccaggcagttctagaaggcctggatgcaggctcaggagcggccgggtgactgtgacagcttcaagaagaaatgcacttcttggtttgtttttacatttttaaattctattaacttatttgtaaacaggtgatgcattcatgtatttcagtagccaaagatagaaaaggtgtatggtgaaaagtccccaggcaccctgctccctttcctggaggcatcagtttctcctgattccttctgtgtatccacctctgccctgcccccatccatacacagcctgcaacatgccctttgcctctcactcttctttttaacgt

SEQ ID NO: 168232 - DNA, 439 bp, Homo sapiens
aactccagccctaacctttcttctgagtttcaggtccttaaatatattatacatgtctaacattaattcattaaggctccatctgtccaaatccaagtctcaaattctctatttctgttcatggtaacaccattctttcagaaccaagacttgaaacctcaaaaatcaattttaactcctccttcactgtcacatccagacagtcctgctgataactcttttcaaaaaacctgagttattgaaaaagaactgaaatagaatctgaaagaatacacttcatccctaaacacagttatgtgtatcaaatgataaaactttttaaaaccattttgtcatccacacaatggaaagagtatagttgctctgcctactttacaataaacaaatgcatgacagcacactaaaaatcctgagccattatataaatatcatctactat

SEQ ID NO: 168233 - DNA, 272 bp, Homo sapiens
acatatgctagatgtaagttctttgtcagatacatggtatgcaaattatttctcccagtctgtaattcattttttcaacctctttacagggtctttctaagtaaaaaaaaaaaaaaataaaataaaaaaaaaaaagtgtttatttattttaatgaagtccagttttatcacttttcccttttgtagattttgttttcgacatcaagcctaaaaattatttgcctagcccaaggtctcaagagttttcttctgttttaaaaagtttaatgaat

SEQ ID NO: 168234 - DNA, 111 bp, Homo sapiens
atcattgcccagtgtctgcagatcccagcatgagaagtacaagttcactcaacatatccagtgtcctttacttagagctcagggactctaagagtgtgttctcttatttac

SEQ ID NO: 168235 - DNA, 159 bp, Homo sapiens
gcattacagacataagccacaacacccagctgaatttatcttttttacagatatctttttaggttgttttaatggcagttaatggggagagattagatgctagtatttaatacatcatcatgaactagacatgaacacattcttcagactgagtgtaat

SEQ ID NO: 168236 - DNA, 238 bp, Homo sapiens
gtgtctctccctggcccattttgaaagccaaggatgtgacctccgcctgttccctctctccgcccttctacctcctgacctccgtcccttctgtgtgtccagcaccatggcctgtaagcctcatattccctatagcaacccagcactgtgtatagggctttgaggatgtacagacagattcttaaagtgggaaatcgggccgggcgcggtggctcacgcctgtaatcccagcactttg

SEQ ID NO: 168237 - DNA, 251 bp, Homo sapiens
ggatggtggaatcaatggcccgctttgtgtcaatagacctcccaatggaggtgtgcacagttgagtctggagttccagggagaggtggggaatagagagattagctttatagtcattagtagcatcagagctcaagctgtgggactggatgagctccctggcagggaggtagagaagagtgctgaggactgaatcctgagcatcaaaccaccagcaaaggaggctgaacgggggaggccatggtgatttca

SEQ ID NO: 168238 - DNA, 773 bp, Homo sapiens
  misc_feature (678)..(678): n is a, c, g, or t
  misc_feature (702)..(702): n is a, c, g, or t
attgtaactccataatctccaagtgtcatgggagagacctggtggaaggtcattgaatcatggaggcaggtttttcccatgctgttctcatgacagtgagtaagtctcacgagatctgatggttttataaagggcagttcccctctgcatgctctcttgcctgacaccatgtaagatgtacctttgctcctcctttgccttccaccatgattgtgaggcctcccaagccatgtgaaactgtgagtccattaaacctctttactttataaattacccagtctcaggtatgtcttcacagcagtgtgaaaatggactaatacagctcccttccaggacagggcccttcaccaaagaaaaactactaggaatagaatcaaaattgagcaggacagaaacaatagagatgaatgaaacaaaagaccaaataaaagtgaaggagggaaacaaacccagaaaatcacagaaagcatgttactgtttttaacactaaatgaaaacaacacaaaatggagttctgaggagttgcaaaaaggtattttggacaatgtctccttgtaaggctgtggaaaaccaattttacattttaaaaaagcacagagaaagattaaggccaaaccccatactagaaagaaattttatataagagaagagtgagagagagaaaggcgatgagatgtnggaaggaggcatgagatgttggangcgcgatgagatgttggaaggagtgatgagatgttggaaggagagatgagatgttgaaggaggatgtatgt

SEQ ID NO: 168239 - DNA, 714 bp, Homo sapiens
attgtaactccataatctccaagtgtcatgggagagacctggtggaaggtcattgaatcatggaggcaggtttttcccatgctgttctcatgacagtgagtaagtctcacgagatctgatggttttataaagggcagttcccctctgcatgctctcttgcctgacaccatgtaagatgtacctttgctcctcctttgccttccaccatgattgtgaggcctcccaagccatgtgaaactgtgagtccattaaacctctttactttataaattacccagtctcaggtatgtcttcacagcagtgtgaaaatggactaatacagctcccttccaggacagggcccttcaccaaagaaaaactactaggaatagaatcaaaattgagcaggacagaaacaatagagatgaatgaaacaaaagaccaaataaaagtgaaggagggaaacaaacccagaaaatcacagaaagcatgttactgtttttaacactaaatgaaaacaacacaaaatggagttctgaggagttgcaaaaaggtattttggacaatgtctccttgtaaggctgtggaaaaccaattttacattttaaaaaagcacagagaaagattaaggccaaaccccatactagaaagaaattttatataagagaagagtgagagagagaaagggaataacatccctacctgcaatgaaagcacgtctgcaaacaggtgaaa

SEQ ID NO: 168240 - DNA, 545 bp, Homo sapiens
tcttctccattttcttatttatgaaaagaatatagcattacttcatgattatttgagggtaatgaatttatgaagtactcgaattaacatttatacccactttgtctatagtatgaaaacctctggactcacgtgattgccatcatgtgccacgttgatgaaattgagctcttagataatcagagtcaatgttgattaatatttttatattttatcacattgtaatttgttaacattgctgaagagtgttatacgtgatcagtaacttgcatgattaataagcattgatgtttatacatattcgtttgttttctaggtattccaactttattatatggacttggctcctggttatttgccagagtcacagagactgtgcataccagttatggacccataacagtttattttctcaataaagaagatgaaggtgccatgtattgaaagtgtgcgtcaaagaacataaatatcagtggattttctctgtgtatatgtgcagtatttatttttgatcctttaaaataaaacttttgcaaatacttttt

SEQ ID NO: 168241 - DNA, 274 bp, Homo sapiens
cccagaccaccgagctgcccttcagtctcagtgaagtacaatgtagccactaaaaagactgaggtcatgttttggaaagtccaggccggaggatcgcttgagcccaggagttcaaggccagactgaacaacacagcgagactccatctcttcagaaaatttaaaaattaaccaagagtggtggcacgcacctatagatctagctactaggaaggcagaaaaatcccttaagcccaggagtctgaggttacagtgaatgatgatggagccactgc

SEQ ID NO: 168242 - DNA, 585 bp, Homo sapiens
attctcagatggagacactggctcaagatggaaatgaatgataatgaaatgattccaggaaaacaaaaggaagaagaaagcttcttgagatagctgaacatgtgttggaaaaggaagaaatgtgggaaaagcgagttagtgactgtgactgtgtatacctcgtagtcaaagactgaaaaaatcagtctgggagtggaaagaggcagggagagaaagaatctggggcagggggtatacaatgtgcacgatgctactgatgctcttaagagaaaaagtgactatggtgcaacaggcactaatggtactatcacccaggggtcggccagcttagagcccagagccaatgaacctggagtagaggtggtgtagaaatgagatgcgtaggaactcatttgaaggcagatttaactagtcaattctagcacattgttcagcgtctgaccaggagttcaagaacagcctggccaaaatgttgaaacccagtctctactaaaaatacaaaaattagctgggcatggtggtgtgtgagcctttattcccagctactggggaggctgaggcaggagaattgcttgtacccaggag

SEQ ID NO: 168243 - DNA, 538 bp, Homo sapiens
tagccggtaccttccaccagcaagactgttccttgagagatatgtccactaaagtagcaatcttctatttcttcttcccactcccctttctccccctccattgaaagaaggtggtgagacaggaaaatgtagaggcaagtgatggagaagccacttcctcatatgcagagtgcattatttagttacctctcttctggagagagcctctgtaaccacagccttccttcttcctccagtccttacttggtatttattgctctgtgcttagccagatcctactcctatgctagagaattgcctgtagcaagctgcagccttctctatctttaaggaatttacaacccaaagcaagagacaggtaagcagttattaaagtcttccttcttgctaatgtaaatctcccctgctgtaatatatgctctttgtttctcattcatttggattaagagatctcagggccattaacccttacacacaggaaaacatttctctctgaaaaagcctagggagcgaccaaacagtggcggagatagggaaa

SEQ ID NO: 168244 - DNA, 195 bp, Homo sapiens
aagtgaaataagccagtcacctaaagacaaatgttgtatgattctgctttgatgacctggagtcatcaaactcagagagacaaaaagtcaaatggtggaggccaggagctggagaagggggaatgagtggttaatggagacagagtttctgttttgccagatgaaaagagttctggagatggagggaggtgatgg

SEQ ID NO: 168245 - DNA, 111 bp, Homo sapiens
acactcccaaatccttatattgagccctgacttctgcactgagcaccaggattgtagaccaacagcctccctgccatctccactcagaagcctaacagttacctcaaattt

SEQ ID NO: 168246 - DNA, 236 bp, Homo sapiens
tacaaggcatgtggtggatgctacgtaaatggtggtagctagtaataggaacaaaacgggtgctgaaaactcttaagtgttgggtcctgggttgataagggaggtgagatctaaagatacaagtaggaggtgccaggtaggtgtccaggaaaaaactgaaagagttgttgttcacactctgttaaaaggccttgaaggccataacgaagctttgggtggggggaagtcagaaatcc

SEQ ID NO: 168247 - DNA, 539 bp, Homo sapiens
attccatttgctgtctttcttagcaatgtcttagcaaaagtcttctatttgccacacgggtccaagcttccgcttactaagcacccaagtgccagacaaccccggaggcaggtactcccattgtccccactgtacagatgaagaaactgaactcagggtcacacaagtgataaggggtggcagagatctgaagctgtgcgcggaggcgtggccagcgtgtgcgctccgacttctaaatccctactctggatattgaagacgggaaagaccgagccgctcattctacagatggggaaaagcgaggcctgaggagtcccagagcgggtgccagatcgtagggagcagccagcaccccgggtcccctccacgacacaaccacgtccctcggccacttctgggtcccgcgcgcgtctcggacgcggcaggacagctctaggacgcacggccaccagggggccgaagggaagggcgggggcggaggctcggagctgacccaccgcctcgccccggaagctccgaggccccgccccggcggccgc

SEQ ID NO: 168248 - DNA, 398 bp, Homo sapiens
ggccctactaatttacttatattccacttccttttaaaaatggcatagaggcaagttcaaatactacacatgaatattgtctaaagttgtgtatattaggttaaaatgttgcagcttttactcagaggtgaacacggttagtcaggttataggaagtgatctcatttctacagacaccctaactgaactactggcaaggaactgtggacgatgcaaggttgtcattccttctctctacagtcctgggtagcgctgcagcttagccacatgtacctagaggagctgctttcacattctgtgcaagtttgtgaacttctgcagaggctgtaggcaacaagcacactgaaaatccagcacaaagatatatactttttttttttttttttttaaacaaaggc

SEQ ID NO: 168249 - DNA, 640 bp, Homo sapiens
gaacctcagatgagctctatgtttatttacaatgtttggcactcagaaatcaccaggcagatgaggatttaagacaatgttactgaacgccaagagaaacaacagactatggaagtggatcgacagggatccagatagtgaagttattagaaaagggtaaggtatgtagtatgtttacggagttaaaagattaagaatagggaaattggaaccacaccaccccctccccagtagaaaaaccaaatgtaaactgtagagttaaaggactgtaaatgaaattaagatgtcagttaatgggtttagcagtacattagtaataagtagaaaacaaatgttcagaatgaaatatggaaataaaaatggtctggacatacattatagagtgagtcttagggattctgtggaaaggtctaaccaacatgtaattgaaatcctagtaggaaaggaaggaggagtgctgcataagcagtatttggagtgatgatagctgagaattgttcataacaggcaaaagccatctcatcacagatttaaaaaatactaccagaaatctaagataaggagaacattttaatagtaaccagaggccaggtgcggtggctcactcctgtgatcccagctctttgggagactgaggcgg

SEQ ID NO: 168250 - DNA, 546 bp, Homo sapiens
gaacctcagatgagctctatgtttatttacaatgtttggcactcagaaatcaccaggcagatgaggatttaagacaatgttactgaacgccaagagaaacaacagactatggaagtggatcgacagggatccagatagtgaagttattagaaaagggtaaggtatgtagtatgtttacggagttaaaagattaagaatagggaaattggaaccacaccaccccctccccagtagaaaaaccaaatgtaaactgtagagttaaaggactgtaaatgaaattaagatgtcagttaatgggtttagcagtacattagtaataagtagaaaacaaatgttcagaatgaaatatggaaataaaaatggtctggacatacattatagagtgagtcttagggattctgtggaaaggtctaaccaacatgtaattgaaatcctagtaggaaaggaaggaggagtgctgcataagcagtatttggagtgatgatagctgtaaaatgtttattatgggcatagcccctcttctgatttatttaaaaatatcttccc

SEQ ID NO: 168251 - DNA, 458 bp, Homo sapiens
ttcttcccacatggacctctgtgtgtggcatgtatatgtgagtccagacacaagcgcgctctctcacagcacctgtgctgggcaggtagcaaaacctccgaggaatgcgcaaatgccttttttcagctcctgctctgctgactacgattcaatatccatgtccaaatagagcaatgcagttttcccttccttccagccctcctctgaagaagaaagctctttttcctcttcctccctcctcaccattgcttccctcctacgtttaataagctagtgggttacttactgcaaccaccttttgtttcctaaccagaatcaattttctttgcttttctctgttcccattaattgtgattcataggaacttaaaaggctctcatagcagcatttatatttggaagctgtaaatctcagaaagtaactttctcttgggatacatagacacacacacatcctcc

SEQ ID NO: 168252 - DNA, 239 bp, Homo sapiens
tactccattaatcttctaattagtcaacctgctttaagcttcttgccctccaataatttgttgcacacaatatggccagaattagccatcaaaaaacaagataactgggtcactatgctactgtaaaaccttcaataataataataataataagcaggcatccttgaagtgtttctcagaaaggggacacaaaacttactgccatgaaactggcagaggaagggtagtatggcatattg

SEQ ID NO: 168253 - DNA, 416 bp, Homo sapiens
gccagcaaggtgggactgcagcgggggcatgaaggagctgtgaagaggctagagccaagtaaggggctaccggaggtggctcaggggtctggctctgtcatcaggtctccttggagagcggtgagttcaccagggctgccctgggcagagtgagctggtgctgagagaactgcaactgtgacagcctaggggccagacgctggacacgtggctgtgatgaatggcatagatgagaggtaacagcctggggctggggcagggagtgcgcctgggtgcgcacccaggcgcacttctagctcttaggctcaagcaatcttcccatctcagcctcccaaagtattgggtcaactttctccagcgcctctcctttcccagaagtgcgcctgggtgcagaagtgcgcctgggtgcagaagtg

SEQ ID NO: 168254 - DNA, 311 bp, Homo sapiens
ccccaccatccgcaaactagattaactatcactgttaccgtcttagagcattgatatgggataaatcctccaaagggcttttgagggaaatgttttatatgtaataatgtgggatgaggaatatgaggaattacactcattttagtcttgttactataaagttatcaaacagaatatgacaagttacactcaatgccaaccatacctataaatactttttttcccattagtacacataatatattctcattgtagaatattagaaaacaattaggaatggaagacaagaacatttctaattacaatgccca

SEQ ID NO: 168255 - DNA, 491 bp, Homo sapiens
ctacaaagaacatattggtaccgtatttctgttccgcagatggagagggtgaggctcagagaattcaacggacttggccaggatcatggaatcagtgagtggcagaggcaggactcaacttgagaaagcctggctctgcagccactccagaccaatgtggtagtggaggagctggaagcagacaagggtccttgcaccccaaccacataccgaatgcagggccacccagaagtcagttgagtgcgcttgaggctactctgtcggtgtatcctctacgaaggcgaacaaaaccccagtctcgcgttgaaggagcctctgtctaatgaggagacacctgactctaaacccaggggcaataaagggcattcattcaaagcactggaaataagcagagaggagagagtgacggattggaggatatgctttctggagtaggaagcactcagaccaggccttgaaggacagaaagcaggatttaacagctggaagga

SEQ ID NO: 168256 - DNA, 350 bp, Homo sapiens
gtatgaagtgtctggagactccgttgggaggtctcagtcagaaggagcggggtcagagaaccacttaaataagcagtctgtctgccccttgacagggtgggtgtgctacactggggggaatccccctcatctggactgccttgactctccagagccagcaggcagagaagactaagatcactgatccatgatacttcagccatccttcctcctaggggctcctcttggggttatcagcgttttgtccataaacccctggctggggatgctgagattcccacagggaggccctgtccagtgaagaggagtgaatctgggttccaccccatctcgtgagcaccaccaataca

SEQ ID NO: 168257 - DNA, 209 bp, Homo sapiens
aggacagtctgttcaataagtggtgataggaaaactggatatccatatgcaaaagaataaatttggacccttatctcaccccatatacaaaaatttaactaaaaatggattatagatttaaacataaaacctgaaaaccactggaaaaaaacataggggaaaaaactacatgatatttctccagcctacgatttttttttttgggtttg

SEQ ID NO: 168258 - DNA, 165 bp, Homo sapiens
caggagaatcatccaggtaagcaaagctatagaataggtagaaataataaataattattattttaaattactaaatatattacatcaaaagaataactaaaacattacagatttcagtttccatctggtatgtcatcgtctttcatcctgaagaattttttttag

SEQ ID NO: 168259 - DNA, 243 bp, Homo sapiens
tgcctgttatccagttccaaagtcacttccacattttcaggaatcttcacggcagcatcctacttccagtaccaatatactatattagtctgtttttactctgctgataaagacacacctggggctgggtaatttataaagaaaaaaattaaagttccacatggctgaggaggcttcacactcatgctggaaggcaaaaggcacctcttacatggtggcagacaagagaaatgagagtgaatc

SEQ ID NO: 168260 - DNA, 194 bp, Homo sapiens
agcgacaggacagcacctgtctgccatgcacttcagtgtcctctgatgagccaggccagcactgagggcctcccacgccctcttgctgaatctttggggacctgtaccatcatccttcctttacagataaggaaactgaggcagaccacaggacggggtcgacgcggccgcgaatttagtagtagtagtcgacc

SEQ ID NO: 168261 - DNA, 503 bp, Homo sapiens
ggcagcatggcaggaaaaaatactggagacccactggattacaggtgaaaaggtgaaggggagaagtctcaacatttgtcagaggaggagatctgagcaccaagccaccctgtgttgtctgaagaattacacttgagaaagcttgcacatacatgtgctatcttgggttgagtaaataattaaagaaaacgggaggtttagaagaaagaaggatgtggctgaaataataaaggcaggcatagccccaggtacctaataactgggggtttgaatgcccacaggaatcaggcaaacaataaagatggtggcagtgggttcagtacattacacataggaaaaggtgggaaagaggtcacctggagatgtcccatcccatcagctttatcatccgatgcttgattagtggaaatgcaggcccaatattgccaggacttccaagtcttcaagagaagttgcaatctagagtttatataaaaactcctgaatttttttttttttttttt

SEQ ID NO: 168262 - DNA, 107 bp, Homo sapiens
ggcccagcccatgcttctctgcagaagtggacgtgcttttctgtttatttttcttatttaaaaattttaaatccaactatcttgaaatagttggaggtacagagctg

SEQ ID NO: 168263 - DNA, 242 bp, Homo sapiens
ggaattgatgtaccttgtattacctgtggtaattaataatcatgttttagaagattgtttagaggcaacacttttataataagacaaaaaaattataaagtcatatttaaagcatggtcccaattatgaaagaaatatacatccacaggtatatatgtaaacacagataacatatctgagagaaaatgaaacaataaataagtggatgaataaatacctgcattatgggccaggtgcagtgg

SEQ ID NO: 168264 - DNA, 337 bp, Homo sapiens
tcatggctagaagcttgtcggtgactctgactgtggactattgtgagctttcagtcattagctttggaccttagctgtgattccaggtcaggaggaaagttccactcaacttgctatttctcatctagctcggcagtgttgagaggcctggctcttttcctgaagctattttccccaagctggatatcttaggacttctcttcctttcctgcctgcccagatcccatgcagggcagctccctttctcacagacccctgcaaacccctccctccactatctttcctatgtcttctgccaacctcaggccctggagccctctaacatctgtcttctctg

SEQ ID NO: 168265 - DNA, 264 bp, Homo sapiens
tgctgggattacaggcgtgagccaccgcgccaggctaactcatttaattcttaacagtacagatgaagtaacattgtgtgactaacttgctccaaaatcacacagctattaagtggtggggtggagtttaaattaaagcagccaaagtgcagagtgtatattcttaaccgttgcactctttcaagtaggcatgtaatgtgctttgcttgggtgacttcagaaggggagatgtgttttgataagcttactatgtgttttgctaca

SEQ ID NO: 168266 - DNA, 469 bp, Homo sapiens
aaaccaccatggcacatgtatacctatgtaacaaaactgcactttctgcacatgtaacccagaacttaaagtataaaaaaaaaaaaacagaaaaagaagtaataataaagtactgagttgatttatataaagataataaaaatattgttattcttaacaataactaaatccaaactattcttggaccagaaatattttattggttctatttttttgataacggagattactgggtcaattggtaaactttgtttaaatgggatctgtggatcagacagtaatattaataatttattgtatcaatgtttccttgtatttaatcagtatactaaggttatataggagtgttcttgtgtttaggaaatatacaccaggtatccagggataatagtgcatcatgtctgtaacctactgtcaaaggattcagaaaaaatattaacataagagataaagacaaaaggagacagaa

SEQ ID NO: 168267 - DNA, 229 bp, Homo sapiens
aggagatgcaagaaggggtcatgagaataaggagacaggacccaggcagaagcctcctatccgggaccccaagccgtgcccctcttcacctaagtatgggaactcttaacccagaaagatccaggcctgggctgaagtcctgccctgactgttcccagctgtgtgactgtgggcaggtggctttacctctctggctttacctccatctcggagccttgggttttctgaa

SEQ ID NO: 168268 - DNA, 146 bp, Homo sapiens
ctggattactttcaaattcagaaatactttctatctttagagacaaaagaatgcacagaagtttgtttcctttagtagagtgctagaatattattcatacttgggttctcggataggattccaaactttaattttgcacactttta

SEQ ID NO: 168269 - DNA, 307 bp, Homo sapiens
agacaggggtctcgctatgttgcccgagctggtctcgaactcttgggctcaagcgatcctgcttcttcagcctgtccactagctaggcttacaagcgtgggaccccgcgcctggctgaagagaggtatcattaaggacgagacccccttggccagggaagccctgcgtaagcaacgcccctctcttcaaagggatgccccgctccctccgcccactcccagccttccagccttggctcccgaggacacgactccgggccctgccaccttctgataggctcgcgagaccgaggctgcaaagagagccg

SEQ ID NO: 168270 - DNA, 323 bp, Homo sapiens
agctcaaagaactacaagtagtttgatatggttgaaccaaggaattcaagtgaggataatgtggctagaagaataagctgggcccactccattaagaactttaatgggctaggcacagtggctcacacctgtaatcccagcactttgggaggccgaggtcgggggggatcacttgaggtcaggagttcgaaaccagcctggccaacatggcaaaaccccgtctctactaaacagacaaaaattagccgggtgtggttacgcacacctgtaatcccaactcctcaggaggctgaggcaggagaattgcttgaatccaggaggca

SEQ ID NO: 168271 - DNA, 558 bp, Homo sapiens
cgctggagtgcaatggtgcaatcttagctgaccgctacctccgcctcctgggttcaagtgattcccctgcctcagcctcccgagtagctggaatatggacatgtgccaccaaacccagctcattttgtgtttttagtagagacggggtttctctgtgttgatcaggctggtctcgaacgcccaacctcaggtgatccgcccacctcggcctcccaaagtgctgggattacaggcgtgagtcaccgcgcctagcctccggccagacttttaaatgttagccttgcaggtagttgtgcagtagtatctcccagccttaatttgctcttctttgatgactcatgaggttaagcaccttttcatatgtttactggccatttggaatatatgtgtacctatgtatctcttgccagttcacctcttttgtccatttttctatttatgtttattcctcattgatttttaggagttatttatattttttttcctttttttttctttgtttgaggcagagtcttattctgttgcccaggctggagtccagtggcacagtctcggctc

SEQ ID NO: 168272 - DNA, 355 bp, Homo sapiens
aagaatccaatctaagtgaattgcattcctaggccaaacatcctcatcatcaaaaaataattattcaatgcctgccttatatagagaatcggaaacagttatctcagtgtccttgttgttttgagtgcattaacaggccttagtaacagcatttgggtgcattcctaattttgtatagactatgaaagtgacctgtcatttataatactactgagaggctttgccatttatgctcattttcctgcactagctattgtcaacacttagaaacttgtcttctattgcaagatgccagtttactcctctccctggcaagcaaaccacacacgtgcctaaaagaatccttcatacatct

SEQ ID NO: 168273 - DNA, 553 bp, Homo sapiens
cattcagtctatcacaagaaggaagaaaatccagtagctttgttttcctctttcttatagatctctgctctagagccaatctaaaaactgaattctggtttctagtttttctaagtctgtatccactgacatacaatcaaataaaatgtctttaagtaaacagagatcttcatctcatcagctttaactggtgaatctggccagggacatttatcactcaatcccactgctttttctttaagaagaattgccattgtcattacctctgaagatgcaagcagcatttaagtgatagccacttaccatggggaatgttccagccacaattaacttcccattacgatacccatccccatttttgtatgcaattattttcactgccttttggtgtgtggctgccatgccactgtgagatgcagcttgcgtgcaggtcttcatccgtaaagacaatagacgtgcttggtagtaacttagagttttttcagccttgtcacacgacaaatcaacctaattttttaaaaaataaattgtacatttactcaaactttcttgt

SEQ ID NO: 168274 - DNA, 343 bp, Homo sapiens
gacactttgcactgaagtcaaaaataaatagagatgtggctagattctaccggtgggacacaaacagcttaacccaaagtgggtctgctgtaaaaaccaatacatttgcattttagcaatttgatctggaccaagtctgtgatgcattacaatgctgggatcaaatcaagcttttctggaggtaatccaaacacaacaggaggctatgggaaccctactgcatggggttcctctactgctgtttaactgtgctaacctcctgaaccataaagggtaattaaaagtcatctgcacatgaagcactgaaagtgtaaatgggaagcacaaccgtggcttctagcag

SEQ ID NO: 168275 - DNA, 158 bp, Homo sapiens
ggatcaataaagcatgatgtagtcatgtggtagagtactatacagtactgaaaaggaagaacaagaactcatgtatcaatatggatggccctctcaaaccatgttgatcaaaaccacaattgcagaagtatatacagtatgatgccgcctgtataaaa

SEQ ID NO: 168276 - DNA, 648 bp, Homo sapiens
ccagaactgagaccaaatcaagaattggtaacgtgtgccctgctgaatttcagaatgcaaatggatgagaaactactgtgcctcctgtttcctcttttctcgctcagatattgcccgccacatctgacccagaccaagtatctctcccatagaagtcatccttgggtactaacactactattgtgtcccagagctggttccttctcgtgggttctcggtctcgctgacttcaagaatgaagccgcagaccttcgcagtaagtgttacagctcttaaaggtggtgtggacccaaagagtgagcagcagcaagatttattgtgaagagcgaaagaacaaagcttccacagcgtggaaggggacccgagcgggttgcccccattccatctttccaaccatccacccacatttaccaacttctactctgacctttagctattcactaaagaagcagaagaatcaaactcagcccctaaccttgtgaggctctccatcttgtagaggagacccacagaaaacagataaattatgaaccttcctagtaaggactattgaagaggccaaaacaataggtttgggggatttagggaaaggaaggccaaataggggtaggtcaaacacaatcgctgtctctgggcatgactttgcac

SEQ ID NO: 168277 - DNA, 195 bp, Homo sapiens
taaattttaagtggagatggagtctccctgtgtggcccaactggtctccaactcctgggctcaagccatcctcccgcctcagcctcctgagtagctgggactacaggtgtgcactaccagcccaactattttattttatcttattattttatctgagacagcatctcggtatgtgacccagggtggtatcaaagt

SEQ ID NO: 168278 - DNA, 113 bp, Homo sapiens
gcagaaggtaaaggagggcaggggaaggtgaaacttagcagagggaaaaggaagagaataaggcctagtatttacctgttaggggattttccatagtcactcagttcagtgtt

SEQ ID NO: 168279 - DNA, 226 bp, Homo sapiens
aaccttacttcagactttgctttttgggaccacctgagttcatggtcagtgtttccttctagtcctatctgcatattagtggctaatcaacctgtatactccttactgaaaaaggtgaatttggctacacttagaactgattctttcagatactcccagttaggaaaacaggacagtagctacattacttccatattttccatgagaaagtagtgatcagttagct

SEQ ID NO: 168280 - DNA, 377 bp, Homo sapiens
gtgtgcccctctgcccccacagctggcccacgcgtgtgcccctctgcccccacagctggcccacgcgtgtgcccctctgcccccacagctggcccatgcgtgtgcccctctgcccccacagctggcccatgcgtgtgcccctctgcccccacagctggcctttgtgaaggtgaccaactacatgggtttttgaaaggggcacttggagggccccctgaaatacctaccacctgcaatggagcctgaaatctgactaaaggagatttgtgtctttggattaagcactaacctttacttaaaataggaatattgttcaggggtatgcagataaaccatttcctctattgaaaataaaatccatcactatctacatcatg

SEQ ID NO: 168281 - DNA, 509 bp, Homo sapiens
ccaacacttgtgggaccgcaggacggtgccgggagcaaggttgaggctgcagcagaggctctgggtctgggaatgggtcctgcctggccatgcaagggtggaggtggtgcagttgatggccttggggactgccacttttgctcccacagctgctcctgccattaccactcatgcctctctactgcagctggtgtgatggcagcagctgctctgggtgggtatatacccagaaggatataaatcattctaccataaagactcatgtacatgaattttcattgcagtactattcacaatatcaaagacatggaatcaacctaaatgcccatcagtgacagattggataaagaaaacatggtacatagacactgtggaatactatgcagccataaaaaagaatgagatcacatcttttgcaggaacacggttggagctggaggctgttatccttagcaaactaatgcaggaatagaaaaccaaatactgcatgttctcacttataagtggga

SEQ ID NO: 168282 - DNA, 441 bp, Homo sapiens
ctgttgttcttgcttaatactgcccatggacaatcttgtctacactggtgggcttaatttccgtgtatgtgtgcaggttcccttgcctttgggcatgttatgatcctgaaaatatgtctaaaagctgggtgaaaagtagattggagatgtactttcctgataatcaggaccaaatatctttctaaaggtaactggacaaactacaaaaaataaaacttctctggttgaaggcattgtatatctaagaagatactgaagaactaccaggccagtatctgcatgagaacaaaggcctagggtgatgattttggtattttgagtctgtttttagtcataggggcaactgagaggctgcatttgatagctttgtggggctaggaagacaggaattggagttctaagcaaagggtgggcagagtcaatcacttatttgggattgag

SEQ ID NO: 168283 - DNA, 335 bp, Homo sapiens
cagagttttggagcactgactccagaagtttcttttaggcaaatctccattcactattcagctcacccctagattactgcagtgtatggcactcagactgcctcttgctgctgccatgaccatgacagataaggctaatggattacagcattctgtcacccttagcctgatgtaatcttagagttcttctgcataaagcagccattcctgatggaatagaatcctcacttgtgtttaaagctacttatcagctgggtgtgatggctcacacctgtaaccccagcactttgggaggccaaggctggtggatcatttgaggtcaagagttcgagacc

SEQ ID NO: 168284 - DNA, 594 bp, Homo sapiens
caagatcgcgccactgcacaccagccttgtgacagagcgagactctgtctcaaaaataaaaataaaaataaagaatgaagtgggacccttaccttcataacacatacaaagattagctcaaaatggatcaaacacctaaacctaagagtaaaactataatgtttgaggagaaaacataggagaaagatttcatgacattggatttgacagtgatttcttggctatgataccaaaagctcaggcgacaaaaataaaaatagatagattggactacataaaaatttaaaacatctctgcattaaagggcccagtcaacaagaaaaggcaggccacagaatgggaggagatatttgaaaaatcatataactgataaggagttaatatccagaatatctaaagaactcctacaactgagcaaaacagcttgattttttaaatgtgtgaaatacttaaatagacgtttctccaaagaatataatatctgcaaatgaccaataaatgcatgaaaagatcctcaacatctctgtcattaggaaaatgaaaatcaaaattacagtgagatacttcacacccactaggatggctactatttaa

SEQ ID NO: 168285 - DNA, 500 bp, Homo sapiens
gggctcaagcagtcctcctccctcgacctcccaaagtgctgggattacaggcgtgagctgccttgctcagcctcagcacctcttaaaaaggagttaatttcaagagttattcaaagtgcaggaaatttaagaatgaatgaataatcgttatcccataagcaattattttaaacttcaaaattataagagtactatgagggttttgttcgttttgcttagtatttgaaattgtacatatttccatatattttctggccataacctgtacaagtatttgtattttctctgagtttcaagccttctctttggaaaagggaaccctgacttagagtgccctgtgattttttttttcaacctgtgtacatttaaaactatagattatagccatctgtttttaaaatagactgacaggactataaatacatttttctttctgttgtattgcttgtcttaaaaataacttatacccttccttttctccttcttacccccaaccaaaa

SEQ ID NO: 168286 - DNA, 794 bp, Homo sapiens
gccagttccctggacaatcccagctgcttcatcttggactgacatggacaccaggcagtaacaccagctcttgggagttggtgggaacaggtgtaatatcaaagctcccagctctgcactctcctgtcacataggaagacctcagaaaatggaggttccttcctttccacctgcactgggggagtgcaatgagcagaagaaaagcgaaggtccctccaccttctgagatcagctgacacctgagcttaggtgcatccctagccctgcagcctgttgcttcccttgaccgccacccccacctccatcttcaaggctgtgctgggcactccaggctgggcctgacgcgttccaaatctgcagctcccctcactctgcatcctgggcctccaccactctccaggagagtgggagacgcctgagccatgggtggcgagaagcggcagtcctgtgccgcctcagtgccccacttgcctccttcgtggaatggacttgacatccctgcctcgctggccagggcgtggccgaaacctacccaggatgtaggagcacctggcacagcgcttggccagtgaggcggtggttgcaataataataaccatcccttgttgaacattcaccagataaccaaattctccacaccgcatttcacttaggcctccctacctaagagctgggtcctaattcactggttctgtacatcaggaaggcaaagcacagacagagcacaccacactgcagctgtctcctgcctcccagtgcatcagagtctggagcgcgtgcttctctggagggac

SEQ ID NO: 168287 - DNA, 963 bp, Homo sapiens
gccagttccctggacaatcccagctgcttcatcttggactgacatggacaccaggcagtaacaccagctcttgggagttggtgggaacaggtgtaatatcaaagctcccagctctgcactctcctgtcacataggaagacctcagaaaatggaggttccttcctttccacctgcactgggggagtgcaatgagcagaagaaaagcgaaggtccctccaccttctgagatcagctgacacctgagcttaggtgcatccctagccctgcagcctgttgcttcccttgaccgccacccccacctccatcttcaaggctgtgctgggcactccaggctgggcctgacgcgttccaaatctgcagctcccctcactctgcatcctgggcctccaccactctccaggagagtgggagacgcctgagccatgggtggcgagaagcggcagtcctgtgccgcctcagtgccccacttgcctccttcgtggaatggacttgacatccctgcctcgctggccagggcgtggccgaaacctacccaggatgtaggagcacctggcacagcgcttggccagtgaggcggtggttgcaataataataaccatcccttgttgaacattcaccagataaccaaattctccacaccgcatttcacttaggcctccctacctaagagctgggtcctaattcactggttctgtacatcaggaaggcaaagcacagacagataagtagcttgcccaaggtcgcagagctgtaagggatggggggctgggattgggaacccctggaatccactttcagagccaggtttcttcccctttgccctgtacagcaggtgcccatgagcaggtgttccttccctacaggcctccctcctctcccctgctggaaagggcagatggggagggctgagaggaaaacaggggcatggtggagatgcagaggatctgcctcaggctccgctgc

SEQ ID NO: 168288 - DNA, 267 bp, Homo sapiens
attttagaacgatggtgattttggagtattatctgtgcagcaaaggaggaaaaacaaaacacatacaaatgaaaagtgcttctagatgatgctgagggcttggctgaggttggtgagtataaattagtattgttgctactttataattctgtgatttccttcagtatcctgcagtcaccctagtataacagcagagatagtacttgaagtatttggtccagagttagagctttacttggcagacgtggaagcagtaaggttaaagga

SEQ ID NO: 168289 - DNA, 1778 bp, Homo sapiens
gagtaggctaggtacgaggctggtttgaatctaacggccgcatggtaactcaggcgccgggcgcactgtcctagctgctggttttccacgctggttttagctcccggcgtctgcaaaatgaagattgaggaggtgaagagcactacgaagacgcagcgcatcgcctcccacagccacgtgaaagggctggggctggacgagagcggcttggccaagcaggcggcctcagggcttgtgggccaggagaacgcgcgagaggcatgtggcgtcatagtagaattaatcaaaagcaagaaaatggctggaagagctgtcttgttggcaggacctcctggaactggcaagacagctctggctctggctattgctcaggagctgggtagtaaggtccccttctgcccaatggtggggagtgaagtttactcaactgagatcaagaagacagaggtgctgatggagaacttccgcagggccattgggctgcgaataaaggagaccaaggaagtttatgaaggtgaagtcacagagctaactccgtgtgagacagagaatcccatgggaggatatggcaaaaccattagccatgtgatcataggactcaaaacagccaaaggaaccaaacagttgaaactggaccccagcatttttgaaagtttgcagaaagagcgagtagaagctggagatgtgatttacattgaagccaacagtggggccgtgaagaggcagggcaggtgtgatacctatgccacagaattcgaccttgaagctgaagagtatgtccccttgccaaaaggggatgtgcacaaaaagaaagaaatcatccaagatgtgaccttgcatgacttggatgtggctaatgcgcggccccaggggggacaagatatcctgtccatgatgggccagctaatgaagccaaagaagacagaaatcacagacaaacttcgaggggagattaataaggtggtgaacaagtacatcgaccagggcattgctgagctggtcccgggtgtgctgtttgttgatgaggtccacatgctggacattgagtgcttcacctacctgcaccgcgccctggagtcttctatcgctcccatcgtcatctttgcatccaaccgaggcaactgtgtcatcagaggcactgaggacatcacatcccctcacggcatccctcttgaccttctggaccgagtgatgataatccggaccatgctgtatactccacaggaaatgaaacagatcattaaaatccgtgcccagacggaaggaatcaacatcagtgaggaggcactgaaccacctgggggagattggcaccaagaccacactgaggtactcagtgcagctgctgaccccggccaacttgcttgctaaaatcaacgggaaggacagcattgagaaagagcatgtcgaagagatcagtgaacttttctatgatgccaagtcctccgccaaaatcctggctgaccagcaggataagtacatgaagtgagatggctgaggttttcagcagtaagagactccccaggtgtgcctggcctgggtccagcctgtgggcgcttgcccctgggcttggggctgccgtccccactcaggcgtggtctgcagcgctgtcagttcagtgtggaaagcatttctttttaagttatcgtaactgttcctgtggttgctttgaaagaacccttccttacctggtgtgttttctataaatcttcataggttattttgattctctctctctctctctctaagttttttaaaaataaacttttcagaacagtt

SEQ ID NO: 168290 - DNA, 1777 bp, Homo sapiens
agcatcgagtcggccttgttggcctactggtaacggccgcatggtaactcaggcgccgggcgcactgtcctagctgctggttttccacgctggttttagctcccggcgtctgcaaaatgaagattgaggaggtgaagagcactacgaagacgcagcgcatcgcctcccacagccacgtgaaagggctggggctggacgagagcggcttggccaagcaggcggcctcagggcttgtgggccaggagaacgcgcgagaggcatgtggcgtcatagtagaattaatcaaaagcaagaaaatggctggaagagctgtcttgttggcaggacctcctggaactggcaagacagctctggctctggctattgctcaggagctgggtagtaaggtccccttctgcccaatggtggggagtgaagtttactcaactgagatcaagaagacagaggtgctgatggagaacttccgcagggccattgggctgcgaataaaggagaccaaggaagtttatgaaggtgaagtcacagagctaactccgtgtgagacagagaatcccatgggaggatatggcaaaaccattagccatgtgatcataggactcaaaacagccaaaggaaccaaacagttgaaactggaccccagcatttttgaaagtttgcagaaagagcgagtagaagctggagatgtgatttacattgaagccaacagtggggccgtgaagaggcagggcaggtgtgatacctatgccacagaattcgaccttgaagctgaagagtatgtccccttgccaaaaggggatgtgcacaaaaagaaagaaatcatccaagatgtgaccttgcatgacttggatgtggctaatgcgcggccccaggggggacaagatatcctgtccatgatgggccagctaatgaagccaaagaagacagaaatcacagacaaacttcgaggggagattaataaggtggtgaacaagtacatcgaccagggcattgctgagctggtcccgggtgtgctgtttgttgatgaggtccacatgctggacattgagtgcttcacctacctgcaccgcgccctggagtcttctatcgctcccatcgtcatctttgcatccaaccgaggcaactgtgtcatcagaggcactgaggacatcacatcccctcacggcatccctcttgaccttctggaccgagtgatgataatccggaccatgctgtatactccacaggaaatgaaacagatcattaaaatccgtgcccagacggaaggaatcaacatcagtgaggaggcactgaaccacctgggggagattggcaccaagaccacactgaggtactcagtgcagctgctgaccccggccaacttgcttgctaaaatcaacgggaaggacagcattgagaaagagcatgtcgaagagatcagtgaacttttctatgatgccaagtcctccgccaaaatcctggctgaccagcaggataagtacatgaagtgagatggctgaggttttcagcagtaagagactccccaggtgtgcctggcctgggtccagcctgtgggcgcttgcccctgggcttggggctgccgtccccactcaggcgtggtctgcagcgctgtcagttcagtgtggaaagcatttctttttaagttatcgtaactgttcctgtggttgctttgaaagaacccttccttacctggtgtgttttctataaatcttcataggttattttgattctctctctctctctctctaagttttttaaaaataaacttttcagaacagtt

SEQ ID NO: 168291 - DNA, 1746 bp, Homo sapiens
caaccttacggcttaggtacgagtgctggcgttttgtcctagctgctggttttccacgctggttttagctcccggcgtctgcaaaatgaagattgaggaggtgaagagcactacgaagacgcagcgcatcgcctcccacagccacgtgaaagggctggggctggacgagagcggcttggccaagcaggcggcctcagggcttgtgggccaggagaacgcgcgagaggcatgtggcgtcatagtagaattaatcaaaagcaagaaaatggctggaagagctgtcttgttggcaggacctcctggaactggcaagacagctctggctctggctattgctcaggagctgggtagtaaggtccccttctgcccaatggtggggagtgaagtttactcaactgagatcaagaagacagaggtgctgatggagaacttccgcagggccattgggctgcgaataaaggagaccaaggaagtttatgaaggtgaagtcacagagctaactccgtgtgagacagagaatcccatgggaggatatggcaaaaccattagccatgtgatcataggactcaaaacagccaaaggaaccaaacagttgaaactggaccccagcatttttgaaagtttgcagaaagagcgagtagaagctggagatgtgatttacattgaagccaacagtggggccgtgaagaggcagggcaggtgtgatacctatgccacagaattcgaccttgaagctgaagagtatgtccccttgccaaaaggggatgtgcacaaaaagaaagaaatcatccaagatgtgaccttgcatgacttggatgtggctaatgcgcggccccaggggggacaagatatcctgtccatgatgggccagctaatgaagccaaagaagacagaaatcacagacaaacttcgaggggagattaataaggtggtgaacaagtacatcgaccagggcattgctgagctggtcccgggtgtgctgtttgttgatgaggtccacatgctggacattgagtgcttcacctacctgcaccgcgccctggagtcttctatcgctcccatcgtcatctttgcatccaaccgaggcaactgtgtcatcagaggcactgaggacatcacatcccctcacggcatccctcttgaccttctggaccgagtgatgataatccggaccatgctgtatactccacaggaaatgaaacagatcattaaaatccgtgcccagacggaaggaatcaacatcagtgaggaggcactgaaccacctgggggagattggcaccaagaccacactgaggtactcagtgcagctgctgaccccggccaacttgcttgctaaaatcaacgggaaggacagcattgagaaagagcatgtcgaagagatcagtgaacttttctatgatgccaagtcctccgccaaaatcctggctgaccagcaggataagtacatgaagtgagatggctgaggttttcagcagtaagagactccccaggtgtgcctggcctgggtccagcctgtgggcgcttgcccctgggcttggggctgccgtccccactcaggcgtggtctgcagcgctgtcagttcagtgtggaaagcatttctttttaagttatcgtaactgttcctgtggttgctttgaaagaacccttccttacctggtgtgttttctataaatcttcataggttattttgattctctctctctctctctctaagttttttaaaaataaacttttcagaacagtt

SEQ ID NO: 168292 - DNA, 1728 bp, Homo sapiens
taggcatagtaggagccggtgttaatcaggcagaggcacgctggttttagctcccggcgtctgcaaaatgaagattgaggaggtgaagagcactacgaagacgcagcgcatcgcctcccacagccacgtgaaagggctggggctggacgagagcggcttggccaagcaggcggcctcagggcttgtgggccaggagaacgcgcgagaggcatgtggcgtcatagtagaattaatcaaaagcaagaaaatggctggaagagctgtcttgttggcaggacctcctggaactggcaagacagctctggctctggctattgctcaggagctgggtagtaaggtccccttctgcccaatggtggggagtgaagtttactcaactgagatcaagaagacagaggtgctgatggagaacttccgcagggccattgggctgcgaataaaggagaccaaggaagtttatgaaggtgaagtcacagagctaactccgtgtgagacagagaatcccatgggaggatatggcaaaaccattagccatgtgatcataggactcaaaacagccaaaggaaccaaacagttgaaactggaccccagcatttttgaaagtttgcagaaagagcgagtagaagctggagatgtgatttacattgaagccaacagtggggccgtgaagaggcagggcaggtgtgatacctatgccacagaattcgaccttgaagctgaagagtatgtccccttgccaaaaggggatgtgcacaaaaagaaagaaatcatccaagatgtgaccttgcatgacttggatgtggctaatgcgcggccccaggggggacaagatatcctgtccatgatgggccagctaatgaagccaaagaagacagaaatcacagacaaacttcgaggggagattaataaggtggtgaacaagtacatcgaccagggcattgctgagctggtcccgggtgtgctgtttgttgatgaggtccacatgctggacattgagtgcttcacctacctgcaccgcgccctggagtcttctatcgctcccatcgtcatctttgcatccaaccgaggcaactgtgtcatcagaggcactgaggacatcacatcccctcacggcatccctcttgaccttctggaccgagtgatgataatccggaccatgctgtatactccacaggaaatgaaacagatcattaaaatccgtgcccagacggaaggaatcaacatcagtgaggaggcactgaaccacctgggggagattggcaccaagaccacactgaggtactcagtgcagctgctgaccccggccaacttgcttgctaaaatcaacgggaaggacagcattgagaaagagcatgtcgaagagatcagtgaacttttctatgatgccaagtcctccgccaaaatcctggctgaccagcaggataagtacatgaagtgagatggctgaggttttcagcagtaagagactccccaggtgtgcctggcctgggtccagcctgtgggcgcttgcccctgggcttggggctgccgtccccactcaggcgtggtctgcagcgctgtcagttcagtgtggaaagcatttctttttaagttatcgtaactgttcctgtggttgctttgaaagaacccttccttacctggtgtgttttctataaatcttcataggttattttgattctctctctctctctctctaagttttttaaaaataaacttttcagaacagtt

SEQ ID NO: 168293 - DNA, 1900 bp, Homo sapiens
agcatcgagtcggccttgttggcctactggtaacggccgcatggtaactcaggcgccgggcgcactgtcctagctgctggttttccacgctggttttagctcccggcgtctgcaaaatgaagattgaggaggtgaagagcactacgaagacgcagcgcatcgcctcccacagccacgtgaaagggctggggctggacgagagcggcttggccaagcaggcggcctcagggcttgtgggccaggagaacgcgcgagaggtgtggccagtggaccagggagttgggggctgcaagcagggctgctgcggcgagagagctgctgaagtcggtggctcggggcgggatgcgcgcgccaggggtctcccgccattatttcctcaggcatgtggcgtcatagtagaattaatcaaaagcaagaaaatggctggaagagctgtcttgttggcaggacctcctggaactggcaagacagctctggctctggctattgctcaggagctgggtagtaaggtccccttctgcccaatggtggggagtgaagtttactcaactgagatcaagaagacagaggtgctgatggagaacttccgcagggccattgggctgcgaataaaggagaccaaggaagtttatgaaggtgaagtcacagagctaactccgtgtgagacagagaatcccatgggaggatatggcaaaaccattagccatgtgatcataggactcaaaacagccaaaggaaccaaacagttgaaactggaccccagcatttttgaaagtttgcagaaagagcgagtagaagctggagatgtgatttacattgaagccaacagtggggccgtgaagaggcagggcaggtgtgatacctatgccacagaattcgaccttgaagctgaagagtatgtccccttgccaaaaggggatgtgcacaaaaagaaagaaatcatccaagatgtgaccttgcatgacttggatgtggctaatgcgcggccccaggggggacaagatatcctgtccatgatgggccagctaatgaagccaaagaagacagaaatcacagacaaacttcgaggggagattaataaggtggtgaacaagtacatcgaccagggcattgctgagctggtcccgggtgtgctgtttgttgatgaggtccacatgctggacattgagtgcttcacctacctgcaccgcgccctggagtcttctatcgctcccatcgtcatctttgcatccaaccgaggcaactgtgtcatcagaggcactgaggacatcacatcccctcacggcatccctcttgaccttctggaccgagtgatgataatccggaccatgctgtatactccacaggaaatgaaacagatcattaaaatccgtgcccagacggaaggaatcaacatcagtgaggaggcactgaaccacctgggggagattggcaccaagaccacactgaggtactcagtgcagctgctgaccccggccaacttgcttgctaaaatcaacgggaaggacagcattgagaaagagcatgtcgaagagatcagtgaacttttctatgatgccaagtcctccgccaaaatcctggctgaccagcaggataagtacatgaagtgagatggctgaggttttcagcagtaagagactccccaggtgtgcctggcctgggtccagcctgtgggcgcttgcccctgggcttggggctgccgtccccactcaggcgtggtctgcagcgctgtcagttcagtgtggaaagcatttctttttaagttatcgtaactgttcctgtggttgctttgaaagaacccttccttacctggtgtgttttctataaatcttcataggttattttgattctctctctctctctctctaagttttttaaaaataaacttttcagaacagtt

SEQ ID NO: 168294 - DNA, 1780 bp, Homo sapiens
  misc_feature (24)..(24): n is a, c, g, or t
cccctgagcgctttttacatcggncgaggctagtaacggccgcatggtaactcaggcgccgggcgcactgtcctagctgctggttttccacgctggttttagctcccggcgtctgcaaaatgaagattgaggaggtgaagagcactacgaagacgcagcgcatcgcctcccacagccacgtgaaagggctggggctggacgagagcggcttggccaagcaggcggcctcagggcttgtgggccaggagaacgcgcgagaggcatgtggcgtcatagtagaattaatcaaaagcaagaaaatggctggaagagctgtcttgttggcaggacctcctggaactggcaagacagctctggctctggctattgctcaggagctgggtagtaaggtccccttctgcccaatggtggggagtgaagtttactcaactgagatcaagaagacagaggtgctgatggagaacttccgcagggccattgggctgcgaataaaggagaccaaggaagtttatgaaggtgaagtcacagagctaactccgtgtgagacagagaatcccatgggaggatatggcaaaaccattagccatgtgatcataggactcaaaacagccaaaggaaccaaacagttgaaactggaccccagcatttttgaaagtttgcagaaagagcgagtagaagctggagatgtgatttacattgaagccaacagtggggccgtgaagaggcagggcaggtgtgatacctatgccacagaattcgaccttgaagctgaagagtatgtccccttgccaaaaggggatgtgcacaaaaagaaagaaatcatccaagatgtgaccttgcatgacttggatgtggctaatgcgcggccccaggggggacaagatatcctgtccatgatgggccagctaatgaagccaaagaagacagaaatcacagacaaacttcgaggggagattaataaggtggtgaacaagtacatcgaccagggcattgctgagctggtcccgggtgtgctgtttgttgatgaggtccacatgctggacattgagtgcttcacctacctgcaccgcgccctggagtcttctatcgctcccatcgtcatctttgcatccaaccgaggcaactgtgtcatcagaggcactgaggacatcacatcccctcacggcatccctcttgaccttctggaccgagtgatgataatccggaccatgctgtatactccacaggaaatgaaacagatcattaaaatccgtgcccagacggaaggaatcaacatcagtgaggaggcactgaaccacctgggggagattggcaccaagaccacactgaggtactcagtgcagctgctgaccccggccaacttgcttgctaaaatcaacgggaaggacagcattgagaaagagcatgtcgaagagatcagtgaacttttctatgatgccaagtcctccgccaaaatcctggctgaccagcaggataagtacatgaagtgagatggctgaggttttcagcagtaagagactccccaggtgtgcctggcctgggtccagcctgtgggcgcttgcccctgggcttggggctgccgtccccactcaggcgtggtctgcagcgctgtcagttcagtgtggaaagcatttctttttaagttatcgtaactgttcctgtggttgctttgaaagaacccttccttacctggtgtgttttctataaatcttcataggttattttgattctctctctctctctctctaagttttttaaaaataaacttttcagaacagtt

SEQ ID NO: 168295 - DNA, 1780 bp, Homo sapiens
cactagctagtacagccggtgttaatcggcagataacggccgcatggtaactcaggcgccgggcgcactgtcctagctgctggttttccacgctggttttagctcccggcgtctgcaaaatgaagattgaggaggtgaagagcactacgaagacgcagcgcatcgcctcccacagccacgtgaaagggctggggctggacgagagcggcttggccaagcaggcggcctcagggcttgtgggccaggagaacgcgcgagaggcatgtggcgtcatagtagaattaatcaaaagcaagaaaatggctggaagagctgtcttgttggcaggacctcctggaactggcaagacagctctggctctggctattgctcaggagctgggtagtaaggtccccttctgcccaatggtggggagtgaagtttactcaactgagatcaagaagacagaggtgctgatggagaacttccgcagggccattgggctgcgaataaaggagaccaaggaagtttatgaaggtgaagtcacagagctaactccgtgtgagacagagaatcccatgggaggatatggcaaaaccattagccatgtgatcataggactcaaaacagccaaaggaaccaaacagttgaaactggaccccagcatttttgaaagtttgcagaaagagcgagtagaagctggagatgtgatttacattgaagccaacagtggggccgtgaagaggcagggcaggtgtgatacctatgccacagaattcgaccttgaagctgaagagtatgtccccttgccaaaaggggatgtgcacaaaaagaaagaaatcatccaagatgtgaccttgcatgacttggatgtggctaatgcgcggccccaggggggacaagatatcctgtccatgatgggccagctaatgaagccaaagaagacagaaatcacagacaaacttcgaggggagattaataaggtggtgaacaagtacatcgaccagggcattgctgagctggtcccgggtgtgctgtttgttgatgaggtccacatgctggacattgagtgcttcacctacctgcaccgcgccctggagtcttctatcgctcccatcgtcatctttgcatccaaccgaggcaactgtgtcatcagaggcactgaggacatcacatcccctcacggcatccctcttgaccttctggaccgagtgatgataatccggaccatgctgtatactccacaggaaatgaaacagatcattaaaatccgtgcccagacggaaggaatcaacatcagtgaggaggcactgaaccacctgggggagattggcaccaagaccacactgaggtactcagtgcagctgctgaccccggccaacttgcttgctaaaatcaacgggaaggacagcattgagaaagagcatgtcgaagagatcagtgaacttttctatgatgccaagtcctccgccaaaatcctggctgaccagcaggataagtacatgaagtgagatggctgaggttttcagcagtaagagactccccaggtgtgcctggcctgggtccagcctgtgggcgcttgcccctgggcttggggctgccgtccccactcaggcgtggtctgcagcgctgtcagttcagtgtggaaagcatttctttttaagttatcgtaactgttcctgtggttgctttgaaagaacccttccttacctggtgtgttttctataaatcttcataggttattttgattctctctctctctctctctaagttttttaaaaataaacttttcagaacagtt

SEQ ID NO: 168296 - DNA, 983 bp, Homo sapiens
  misc_feature (24)..(24): n is a, c, g, or t
  misc_feature (830)..(830): n is a, c, g, or t
  misc_feature (833)..(833): n is a, c, g, or t
  misc_feature (836)..(836): n is a, c, g, or t
  misc_feature (843)..(843): n is a, c, g, or t
  misc_feature (846)..(847): n is a, c, g, or t
cccctgagcgctttttacatcggncgaggctagtaacggccgcatggtaactcaggcgccgggcgcactgtcctagctgctggttttccacgctggttttagctcccggcgtctgcaaaatgaagattgaggaggtgaagagcactacgaagacgcagcgcatcgcctcccacagccacgtgaaagggctggggctggacgagagcggcttggccaagcaggcggcctcagggcttgtgggccaggagaacgcgcgagaggcatgtggcgtcatagtagaattaatcaaaagcaagaaaatggctggaagagctgtcttgttggcaggacctcctggaactggcaagacagctctggctctggctattgctcaggagctgggtagtaaggtccccttctgcccaatggtggggagtgaagtttactcaactgagatcaagaagacagaggtgctgatggagaacttccgcagggccattgggctgcgaataaaggagaccaaggaagtttatgaaggtgaagtcacagagctaactccgtgtgagacagagaatcccatgggaggatatggcaaaaccattagccatgtgatcataggactcaaaacagccaaaggaaccaaacagttgaaactggaccccagcatttttgaaagtttgcagaaagagcgagtagaagctggagatgtgatttacattgaagccaacagtggggccgtgaagaggcagggcaggtgtgatacctatgccacagaattcgaccttgaagctgaagagtatgtccctgccaaggggatgtgccaacaagaagaaatcatccagatgtgactngangantggatgnggnnatgcgcgggccccgggggaacaagaaaccgagccatcgagggcggcctaagagcaagcaacagacgccaggccacatccgagcgagtaacacgggcgacaacctgccaggcaagagcggcaggggcaggcggaacg

SEQ ID NO: 168297 - DNA, 800 bp, Homo sapiens
  misc_feature (551)..(551): n is a, c, g, or t
  misc_feature (554)..(554): n is a, c, g, or t
agcatcgagtcggccttgttggcctactggtaacggccgcatggtaactcaggcgccgggcgcactgtcctagctgctggttttccacgctggttttagctcccggcgtctgcaaaatgaagattgaggaggtgaagagcactacgaagacgcagcgcatcgcctcccacagccacgtgaaagggctggggctggacgagagcggcttggccaagcaggcggcctcagggcttgtgggccaggagaacgcgcgagaggcatgtggcgtcatagtagaattaatcaaaagcaagaaaatggctggaagagctgtcttgttggcaggacctcctggaactggcaagacagctctggctctggctattgctcaggagctgggtagtaaggtccccttctgcccaatggtggggagtgaagtttactcaactgagatcatcaagactttatccaaggaggaagagaccaagaaataaaacctcccactttgtctgtacatactggcctctgtgattacatagatcagccattaaaataaaacaagcctttaaaanaanaaaaaaaaacaaaataacaaataaacatactaaaaacaaaaaaaaaaaaagaaaaaaaaataccccggggggtcttcattgttggggtggggggaacacaagggtatatcataggcgccgccaggtgtgcatatggtgtctcccgagcacacctttttttggtcaccaggggggggaaactacggggggcccccccaaaggggggggggcgcattaaatccacacacgccgggttcacctgttaat

SEQ ID NO: 168298 - DNA, 532 bp, Homo sapiens
ttttagtgagtttcttgtaagagaacgtcagcatgacttttattaatgtcagagaatgcatttttttccttttgataaaagaagaaaggacctttcacattcaaaattcaatttttcccctaacatttccaatatgacacaagcatatggtaaataaaattattctagtaaatattagaaccagtggaccagtgagggagacttggagtatgctgtgaatatattgaatactaaagagcatctgaaatataaaaatcattgaacttttaataaaaactgaataattcaatagtttttcattaaagaaaaaagaaatgtaaacaataacaatcattaactcaggtctgtctatgtatcagagacagctgacaaatgtgatgagaaagttttcaagagttttacacagtggactatactgggtagaaaagtctgctttctattttctcggccaagaatataaataaggttaggtttacaaataaaactttcactgaagtaaaggaataagacacatcaaataactgcaattaaa

SEQ ID NO: 168299 - DNA, 115 bp, Homo sapiens
caccaggtccccactgatgaggcctttactgaggaggccacaactaaccaggtcccaactgactaggtcctgatgaccaggccccctgaccatggtccactgaccaggcccctga

SEQ ID NO: 168300 - DNA, 1647 bp, Homo sapiens
  misc_feature (518)..(518): n is a, c, g, or t
gcgaccaaggcgcctgcgcgaccccaggtccggcccatccctccattccctgtaaccgccagcctccgcccctcttgacaaccacccgctacgcttacccggttacaaggaacccaggctgcaaccaggaaaaactgccatcagaaagtttatctaagccggagcaaacttggctggaccggcccctgacccgccttggcgctgccgcccctgtcttctgcggtccccggccaggcgaggaccagagttttgttctcggagattcttgcctttcttgttttagcacaaacgcgcacgcacccctttcccataacgagcccctccgcccaactacagatcccgggatctgttgcaggggctggaaaggccccactcgagaggcctgagctggctgcggctcttggttccggggcaggttctccagggttggatacgctctggacgcctgggcgggttgttttgcttcggcctcgctggccaggggcccgcccaccccgcctggaacgcggtttggatcngcgctgggagccctccgtaaccccagctgaaggccgcgcaggcaggcggggacgccggagctgcggggccggttcccagccagcatccagccttttcggaatcaggcgggtccctggtgattcgctgggttttcccacttcccacggggacctcacctttgggaattaattgctgacagtgttagagttacaaagtagccagtgtcacggagggaacctcaaagagacaaagggacacctcgaaggtgtcagagagacggttgtttcggacagaaacagaacagcgaagcggaaagaaaacagaccttatttctgttctgttccacttcagatagtagcagaggagacttggatttcattggtgttggttttcgtgattcctgccttctaaaatcccaagacttatttatcatttatcatcagctcagatcccaggaaaacagtccactgcacttcggtttctgctccaagtcacccattaaataaataattgaacacctgctggtgccaggcgcagttctaatgcttgggatatgtcggtgaacaaagcaaaggtctccctcacctgggggagctgaaggcctgcggggaagaagtgggagacagagggtaaaccatggccatccctaagtaaattatttggggtgttggaagaggtcggtgatagggaaaacaagaaaaagaatatgggggcccagagtgcttgtgtctggagcaggtcacagaattaaatagatggtgtgtgtcaggcctctgagcccaagccaagccatcgcatcccctgtgacttgcacgtatacatccagatggtctgaagtaactgaagatccacaaaagaagtaaacatagccttaactgatgacattccaccattgtgatttgttcctgccccaccctaactaatcaatgtactttgtaatctcccccacccttaagaaggttctttgtaattctccccacccttgagaatgtactttgtgagatccacccctgcccacaaaacattgctcttaacttcaccgcctatcccaaaacctataagaactaataataatccaccactctttgctgactctctgtttggactcagcccacctgcacccaggtgaaataaacagccatgttgctc

SEQ ID NO: 168301 - DNA, 464 bp, Homo sapiens
cataaaattgcatctcattgttgctttaatttgtattttcctgattactggagagaatgaacatcttttttattgttattggctaagctggtatcctcttctgtattgcctatgtgtacattagccaattttgaccattttagttatggttttggggtgggctcttcttaatgaattttagaatcaaagttagatatttctttaagtgactggtaagattgattttatccttctgtatatacaggcacctttatacctatgatttatctcaagagaatgtttacagatattccatggttgggggatgagacaaggataaacagaggagaatgatgcttttagtttactctcacagccttcgtggctacgaatgggcagccaagtaggttggagagaagcttctaaggaattgcaagatataagaaagcagtgccctgaagataactggcatcagaaataacatg

SEQ ID NO: 168302 - DNA, 151 bp, Homo sapiens
aaactcctgagctcatgtgttaatgtccatcttcacctcccaaagtgctgggattgtaggagtgagccaccacacctggccaaaagtttgataatttagttgtattaattatttccgtgttgtcacagagaaaatttttaaagcaatttaa

SEQ ID NO: 168303 - DNA, 535 bp, Homo sapiens
cctgtagaaaccattaaccccttcagtttctaactggtggttcatttctcctcagcatttatttataatgataattataaattattcctttttatgatgtgtcgaaatctggccctaaaagcttttcctgtattgtcttatttaatcctcatacaatgctatgcagtaagttatttttgcagctaggaaaactgaatgtctggtgtcatgtgacttgtctaaggtcacagacagcaagtagtagcaccaggattcatacccagatctctcaagaaggcaaaaaacaaattgcatacacacctaagtataacactctatattattcacccttccctcttcacaggcatcttcttgagaaagtactcactatgcttggtaatctccacctttacctctccttccctccatggctcagcatagtttacactccatagtttgccaccccatccacactttcacttccctcaccaggactatcagtgtcctatttctcaatgcagtagacattgtgctgtctgtcctcttttgtatttga

SEQ ID NO: 168304 - DNA, 315 bp, Homo sapiens
caagctatccggttcaatccctgttcgtagtaggagactattttatctctgctccattgcgttgacatttgcaccagcctacacttcctgtttctctaatcctttgaacctatgaaacaatgcatatacatagccctgctttcttaaacagaggccgggcacttccaggctgaaaaatttcccaccgcgcctggcagtaactgattcttaagggaaatgagctcccgagaaagctggaagcctgtcctacatttttttttaacctatttgcagattcgcaattgaaccggatagctgccgggatctctagagcta

SEQ ID NO: 168305 - DNA, 281 bp, Homo sapiens
cagaacctaagccaactggccatgcccactctcaggccattcctcaaccccagtggccctccatgttcataccactccctcctttctgatgggtctgtgttgatctctctgggctcatggtggtgggggtggcatccttgactagttcttgttttattctgaaagtgacatactggcattaaaaaaagaaaaatcacatcacagaggtcacaggcagggtgcggtggctcacgcctgcaatcctagtgctttgggaggccgaggtgggtggatcatctgag

SEQ ID NO: 168306 - DNA, 166 bp, Homo sapiens
taattgtgtctaataaaaaatgaggtttatctaataataaaaatggggttggattttctatgtctttttttttttttccaagatggagtcttgctctgttacccatgctagagtgcagtggcattatctcggctcactgcaacctctgcctcccgggttcaattct

SEQ ID NO: 168307 - DNA, 334 bp, Homo sapiens
ttttcttagagaattaatcacatcttcttttaggagtgaactttcatttagaggcagatcttgaaaatcttcaactttttgatttattgtaccttttgcggctccagttacatgtaagtttttttatttgtaattttttcccatcaataagcatttcagattactagttttttgacaaacatgaggtagacattcattaccaactcttaatagctggcattttagattataaagaatccaatataagaatcaagtatattttattcaggaaaataatcttacatcaacaacatacttttcttttgagcgggagatgtaatatgctctatagatt

SEQ ID NO: 168308 - DNA, 172 bp, Homo sapiens
gcacaggtggctgctcgtggcccacgaggggttctccccagaagagacaggaagggcccaccgtgtttcccacagcaatgtcctcatgcacgctgaggcacacatcttacgtggatgctgttagtattcagtacactgcgtctaaaatgcacgtgtgtgcaaatgcgtgtct

SEQ ID NO: 168309 - DNA, 415 bp, Homo sapiens
cagggaggctgaggtgggaggatctcttgagcccaggaggtccaggatgcagttaacgatgatcctaagaccacgaggcaattggaggatcctcaaataccagggagaaactagctagcagacatagtatggtgggaggggaagatcaaggcaaatgccttgggagtgggtgagaattgcgacttcatattggatctcctgacctgtgaaggcccttttctaggctcctctggacctgtcctctgcccaggttcaaccagaaaaggatggagtttgttgcatggtatcatcagggtgaggttgggagatgatgcgggaacgctcatccctggtcttaggaacgggagaacaaaggaaaaatggcatcatttccacctaaaaagttacaagcacttcaccagaaggaacagcccag

SEQ ID NO: 168310 - DNA, 386 bp, Homo sapiens
aataaaaatccctatggaaacagcatctttgtattttagttatgttgatatgtaattaaatacattctacaatttgaatcctgatttcataggcaacaaaggaggaacatgttaactatttttcactctaaacttcctgaaaaggtagccttgttttctgtctctcttcctcccttcccttgcacaatccagcccataacaatttggttgagcttcacctgctgatgagaccatccttgccaaggttatcagcgatgtccagattgttaggattaacggccttcatctcaggtccttctgcagcagcttacctgagcatctggcactctctctagcatttgtctttgaaactctctccctccctgactctggcaggacagttctta

SEQ ID NO: 168311 - DNA, 152 bp, Homo sapiens
catcatctttcccctcccactgatttccagtccatagttctggactgaacccctaatttgagatcttcctggaaaaacttgagacaaattggtcataattttatttctaaattttttctttttgtagatttgtagagatggggtctcgctat

SEQ ID NO: 168312 - DNA, 370 bp, Homo sapiens
ccctcatatatttttctaataaaagtagtatcatttacaatatgagaactacaatcatactttgtatttgtctcttttagtcaaaaatttacggttttgttcacataaggaaaaaaggtaagacaaagaaaccatttttaaagctcttcacacatcaaacactgaattaagacctttgtgtttttaattgttttgctgcctggaaccatcctattctgtctgatttctctacagttttcagtgtgtttccttcatctcagacacacaaacatgcccaaacacagtaaatcacagttaattgcatgtcttaaattaaaagacaaaaaaaatcacacaattaattgggggaacttgtcagttggtgaatgaa

SEQ ID NO: 168313 - DNA, 275 bp, Homo sapiens
gcttatccattgcactccggatgtgctgacccctgccgtttccccaaatgtgggaaactcgactgcataatttgtggtagtgggggactgcgttcgcgctgtcctctgaattttgtgctggaaaacgcagattgtatgtgaagggatacttttagtagtgcataatatgggtggtgtcatgttatttttacagttggatggctggggaacagaagtggcatgtcgttgtcctcgctggagaaggaacaagcgtcagccgttgtgagcctgtttat

SEQ ID NO: 168314 - DNA, 147 bp, Homo sapiens
tttgtaagttacttgggggccagcacctcctcttaatcaccttactgttgcccacacactgaccattgagccgtcagcacaagatgatcaatagagatgcgttgatgatttgagaggccaatgactagttccactattctgagtcag

SEQ ID NO: 168315 - DNA, 610 bp, Homo sapiens
  misc_feature (453)..(453): n is a, c, g, or t
  misc_feature (544)..(544): n is a, c, g, or t
  misc_feature (549)..(549): n is a, c, g, or t
gtcttattgaactggataatccaatattatggatacaatgtcatacagtattatggaggcatatgtgtaattatcaatataaataatactggagaaatttccggacgtcagaagtcggaaatggctctcactgagttcaaatcaaggtgttgggaaggctccactcctttggggggctgtggaggaggatccatttctttgccttccccaacttatggactctgcattccctggcttgtggccccttcctccatcttcaaagccagcagcgtagcttcttcccatctccctcatattcctctaacgctgacctgccttcctcttacgaagaccctggcatgacatcggcccaccagataatccagcctgagcaacagagcgagactttgtctcagaaaaaaaaaaatcagcttataataagtgccataaagaaaataaaactgggagacatgnaagagactgactagggtggtagtctaacagatggggcagtcaggaagtctttcctgaggaggtgacatctgagctgagatctgaatgaggntaggntccagccacagattgatcttggggagaggcattctaggcagaagacgtggctagtgcaaag

SEQ ID NO: 168316 - DNA, 335 bp, Homo sapiens
gatcatgttgtttctggaaagtctggggaaggatctgcttccaaattcatctaggtggtggacagtgtcgctctgtgatgtttgggactgaagcctctgcttcaccattggctatcagtcctgctcatcctcagcttcaagaaatcacccgtatttcttgaatcatggttttttccttttttttttttttttttttttttttgaggcggagtctcactctgtcgcccaggctggagtgcagtggcgcgatctcagctcactgaaagctccgcctccttggttcacgccattctcctgcctcagcctcctgagtagctgggactacaggctcccgc

SEQ ID NO: 168317 - DNA, 348 bp, Homo sapiens
caggagactttttaaaaaatctttggagtagttgacataaatcaacttaaatgaaatggaaaaaagaagtttacatacaattttatggtttgtgatgtggtattggaacctcttttttgcccatgccaaagttatatacacacgcattgatacttattcagcagctgtttcattatatattttatgctaaggatggtgctaagaattggtccccttcctcaagaagtttatagttcagtgaagagacaaccaaactgcttttgcttggttgtgtctcatctttaccacctcaaaacattagagagccctgaggctcagtcttcaaatttcttttctatatttgctccc

SEQ ID NO: 168318 - DNA, 467 bp, Homo sapiens
ggcaactatcaatctatccaaacataactcagacctagagcatagttttctctgcaccacaaaaacagaagcaagcactgccaattagagatatatgtctacctcccaaggccacaaagtcattttagagctacctctgcctttcctttctcttcccaattaagcagcacatctcccttcctttatcactatattcaactgcagtctagttctttaacccctaacaggtataactgcatgagctggcactcttgtacttcctgagagtgacttaatacacttttcctcatcccagacgtttttaatggaaatggatatacttcctaataatctcctttcaaagatgggaaaggactcccttgaaaagtactaagttcctacatgctagccatgttcaagcaaagaccaccagggtattgtagaaagaataaagtaaggacctttaagttccattcctggccttgacc

SEQ ID NO: 168319 - DNA, 230 bp, Homo sapiens
tgatactttctttatctttcaagtaatcaatcagagcccctgctgaacttctctttcttctcccttcccccacatggtttctctgcattcctgtgggtatgccattctggagatgtcagattttctgagccctcaagaggtgaagaaaatattgtgaagtgtaagatgtagtagacagagcacttagcttgaggtcaggggactctaggctcagctctggcaccagatag

SEQ ID NO: 168320 - DNA, 234 bp, Homo sapiens
gagacagtagtagtgaccagagaaataggaggcgactgagatagccaagtgtcatggaagccaaagaggagggctagatgagcagtgtcaaatggtgctgagaaaccacggttatacctgagaagtgtctgttggatttactggattggagatattggcaaactcagcaggaacagtttcagtggagttcagtatagcagatgtggacaaagtcagactgcatagatgggaagt

SEQ ID NO: 168321 - DNA, 184 bp, Homo sapiens
attattttatttctatcattgtatttttcattacaaaattttcattttttttcaatagcttctattttctttgctgaaagtgtccatcttttcatttgtttcactattcactaatgttctctcccacttcatggagcttaattatatttgtgtgtgtgtggaggaggtgtgtatgtgtgtgtgt

SEQ ID NO: 168322 - DNA, 397 bp, Homo sapiens
cctgaggccaggagtttaagaccaggctcggcaacttatccagacctcatctccacaaaaaacaataattaaaaagtagccagacatggtgcatgcctgtagtcctagctactcattaggctgagtcaagaggaatgtttaaattcaggagtttgaggttacagtgagctatgatgggtccaaggcactccagcctaggtgacagagcaagaatctgtctcttaaagaaacaaaaaaacaataacaataaaactactacatgatccagcaatttaactagtttatccaaaggtaaataaatcagtatatcaaagggacacctgcactcccatgtttcttgcagggctattcaaaaagtaaagatataaaatcaacctaagtgtctatctgtgggtaa

SEQ ID NO: 168323 - DNA, 272 bp, Homo sapiens
accatgacataccactccctttttcctctgctgatttgagttaaaacccttatggatctcacccttaaatccttgcaatggcctcctacctgatctctgcctgcaccacgtcttcccagcagtcctataccggggtaatcttccttcagctcctgctcagaaaccatcaatagctcccagctgactactcaacagagtcagcaatcctgtctgttctaccttcaaaataaatccaaaatctgaccacttctctccgcctctactgcttcccc

SEQ ID NO: 168324 - DNA, 384 bp, Homo sapiens
gatgacaggtatgagccaccatgcccaccttgctcccttttttcccccaatttttattttattgtggcaaataaaacataaagctggagaggcatggtggctcacgcctgcgattccagaattttgggaggccaaatcaggcgaatcgcttgagctcaggagttcgaggccagttgggaggccaagtcaggtggatctcttgagcccaggagttcgaggccagcctaggtagcatggtgaaactcttgtctctacaaaagatacaaaattggctggatgtgggggctcacacctgtaatcctagcactttgggaggctgaggcaggcggatcacttgaggccaggaattcgagactaacttggccaacatggcaaaaccctctc

SEQ ID NO: 168325 - DNA, 312 bp, Homo sapiens
tggaaccatcatgcactgttggaaagtgatggctgcagtgggaaactggcagttcctcaatatgttaaaaataataggtcagacgcagtggctcacgcctgtaatcccaacactttgggaggccaaggcgggcagatcacttgaactcctgatctcagggaatccacctgcctcggcctcccaaagtgctgggattacaggtgtcagtcaccgtgtccaaccccaagtgcctactgacaatgtattgataagcaaaatgtggaatatatacacacaatggaatattactcagccttaacaaaggagggaaat

SEQ ID NO: 168326 - DNA, 108 bp, Homo sapiens
caaaactgtacccatttttccctgaagcacctcggatagttcacatcatctttctgatttttagtttctgatctataaaatgcaattattaaaaaactgtctttccta

SEQ ID NO: 168327 - DNA, 381 bp, Homo sapiens
tcaacccagtcaacccctgaacacatacctgtgattcatctcttaatgttcactgaccaaacctgggacttcagcatacccatgagacaaactgttttaaaattttgctttcaggatttccagtagcaagtgatatataaagatattaggtaggtatttaacagttatcacatccaggcctggcacggtggctcacgcctgtaatcccagcactttgggaggccgaggcgggcggatcacaaggtcaggagatcgagaccatcctggctaacatcatctctactaaaaatacaaaaaattagctgggcgtggtggcaggcacctgtaatcccagctactcgggaggctgaggcatgagaatggcgtgaacctgggaggcag

SEQ ID NO: 168328 - DNA, 281 bp, Homo sapiens
tatattgagttgtccggtgccatgttctacggatgtctgtgaggtccatttggcttatggtggtgttcacaccttctgtttccttgactctcctgtgtacttgttctacccattattgaaagtgcagtattaattagctgggcacagtggtgcaagcctgtagtcccagctactcaggaggctgaggcaggagaatcacttgaacctgggaggcagaggttgcagtgagtcgagatcgcaacactgcactccagcctggatgacagagcaagactccgtct

SEQ ID NO: 168329 - DNA, 703 bp, Homo sapiens
tcatttggctaaaagaaagaatttccaatattcataaagaaaacacaacttgtgggttctccaagcaggagaggaaaaatcatgttccagtctattcctgtaactaatgaagggctcaggtttcaaaggtaagttaattgtcagacccactttattgtacccagtgtccttgggaaacataattatttattggaaatatgtcacaactaacataagtcttaaaaatttgttaaattagaaacaaaatattgtatttgctgatatgttaaaacataagggcctaacatttagaattgcacttctcatactcacaacatgtactcaaaatgctgttaacatctactttgatgattgttttgggtttacttgaatctaatgtttccatttaataattccttttttttcccctttccttttttcaatcaatcctttctcttttctatgttctatattcatgttatcttagaattccattttggccttctaggttctttacttcttcctccagcctgtcattttcatgtcttcagtgatttctcagacttctcacagaaagttaaccatttttgtgcatcttgaaacttttaacctttgatttgaagataaatgctaataaataaatataattcttatgaatacattatgcacaatgttaaattcaaaatgactgacatgtttcatgctgtgtgctatagatatgcta

SEQ ID NO: 168330 - DNA, 456 bp, Homo sapiens
gatgggctgagtgccctccccgggacacacctggatgggctgagttccctcccaggaaaactggtcccagatccgcctcggcttcccgggctgggccaaatgcaatccacttccaacccctctgttcccagggccaggaggagctgtgggaggcccctgatgcccccaggctgggcctgtggcctttggagggggatcaccacactctcccagtgcccaggactctctcctcatatcctagccctgaagtcaggttcagaaatcctgcccctgcccctgcctgctgctctgtttgccaggcggtcctggtctccacccaggctccaccctaccagggtggaatggagttggggagttgggcctaacagcacgggtcctgtcctctttcagggctgtcccggggctccctcccagctgcagccccaggtacttcctcgtctgcactccaacccccat

SEQ ID NO: 168331 - DNA, 441 bp, Homo sapiens
gacgcatttctcacacaattcatttactctctccttatttcttcatcactcccttgtctttgcagaattattcaactcagactgccatgcagaagaaaaaccatgaacccgtaagtgttacattttgaagcaaaagtttattttttcaaagtccattttcccccttagaaagaaatatcagagtgagaaatagcgagtctcacattatctaaaaagcgactctctccggtttttgttccatttattgaaaactccaatttctttgcctcgggttctaatttattttgcaattcgcacagtgcactgtaaacataatgtaaagttttcaaagcttaattaacagctacaggataacggcaggccaagattttaaaggcatttaagcttggctccaagaaatgaagagacttccattcaggaagctgtgaacttgtacctctt

SEQ ID NO: 168332 - DNA, 294 bp, Homo sapiens
gaggggtggtggtggggggagataataacaaactcttctgtagcctgaactcattacttcttataacccataggtgtaggtaccattttctttattttatgaatgagaaaattgaggtccagcttcttggaaggtaagagaaatgagtcccatttcccctaatattaaccgagcaccatttatgtgccggccatttggacccatctaaggggcacaaaaccattgttttttgttgttgtcgttgttgttgaaaccactgtaatggcagcatctttttttgtttgttttagatga

SEQ ID NO: 168333 - DNA, 676 bp, Homo sapiens
gcattatgcagctctcgtctgggaaagctatataagactttcaatctgtgagagcttcttgggggactgagcccagcaaagccaaagaagccaggctgcctgaggccttgggggcccaactgctgttccagtgtgtcaggatgtgggatgtggaagcaaaggagattattcttcagctttaagacttaatgttgttttcccttttggattttggacttacttggaaccacttattcctttcttcttgcctagttttccctttgggaatgggaatgtttatcctgtgcttgtcccaccattgtattttggaagcatgtaactcgttaatttcacaggcacaactggagaggaatttgaatcaggatgaattgtgccttgagtcttatccgtatctgatttagttcacactctggacttggactttagagttgatcctggaaagagttaaaacttttaggggctattgggatggaatgaatgtattctgtatgtgagaagaacatgcatttggaggctatgggcagaatgctgtagtttgaatgtcccctccaaaactaatgttgaaatgtaattgccattgggacagtattaagaggtgggactcttaaaaggtgattaggccatgaggattccaccctcatgagtggataatgtgattatacaggaatgggctcct

SEQ ID NO: 168334 - DNA, 422 bp, Homo sapiens
taaaatcctcactaagacttttgtgaaaaataaatcagaaagagaaagactgaattctgcaaaaccagtcagaaggctgtagcagaaatgtatacaatatttatactgggagtctgggagatggtagtctggaagacaggggtggcagtggggctgaagaaatgtaactggatttgagctgggtttagagaaaaaaaatggacaggatttagtaaatgcagagtcaaagcaagagttaaagatgacacccaattctgactatataacaaagagaataaattgattggaatagggataaaaaagtaccagcagaaattctaaggaaaataaaatcaattgggtttgaatgtgttgagtttgagccatcttagagacattcaggtggagatatcaactaagttactgaatatataaatctggag

SEQ ID NO: 168335 - DNA, 182 bp, Homo sapiens
ggaacacacatttgaataatcagaggaagacagagctctaaaaatgaaactcattggtatccctaaagatgctgtttggtaccacctttgaataaagccatgcagagaattcttaagatgcaaaaagacggatgtgattgaaaaagactgatattataggcaaaaatattttttaatgctta

SEQ ID NO: 168336 - DNA, 335 bp, Homo sapiens
gttacatttcatactgtatacccaaacatactgtattgtgtgtatcaattattacataacaaaaaacttttcaccaataaaaatacatggatataatacagaagaaactcaaatggtggataaacacagattttcaatcttattagtaatacgaaatgcaaattaagaccccaataagataatatcttacacccatttgattggctagtgaattaagaagtctgagaatttcaagtttttgttgaagagctaaaagttaagaatctcatctattgctggtggaagtgtaaatttattttgctggaaaataatctgtcacttgtaatgtagtctac

SEQ ID NO: 168337 - DNA, 281 bp, Homo sapiens
aagtagttctattgtcagcatccatgcccggccgagagaagaatgacaagtctccagcatgcgagggcttcagctgtgacaaagaaggtccctggggccgagtggcaggtgctgcagaggcccaggaaggcagcacacacctggaggcacaggcagctacagagacagtaacatgtgtctccttgggacagccatgccaccaagaacaactggcccgggatcgggactcacagctcgtgccaagggctcaggaaaaccaagcccagcatatagtctggctg

SEQ ID NO: 168338 - DNA, 381 bp, Homo sapiens
cagaaatagtccaaaaaaagaataggtatcatcataaccctacgatcataatgatgaaacagcttgattctatgcattattaattaattggttaatttgtattctaccttattcaaaagatttgtggatacttacaaatatgcatgtagtgcaatagaatataataactgagaaatgagagcaaagggttaaatcgttgatcaaagccagtataaagttaatgtgcagaaatgcgtattagtacaactactcttataaattggtatatttcttcttagcctaagtctgtatattttccgtagctaattctgctccctgccccttaatcttatagcaacattttccacgtttctttcttaaccctgatagttaaggactgaa

SEQ ID NO: 168339 - DNA, 443 bp, Homo sapiens
ccacccccacctggctgcgggtcttggcaatgctgattcacctctctgagcctcgctttgctcatatgaaagagaaactggagtgctaagaggacctcatggggttgtcaccatgcctgggcgggatgaggcgtggaaagtgctccctcaacgcctggccctgtagggaatgggctgcggggctgtggtgctcgtttttatgattttcctgtcccccatggggaagctctctgccccaagcctctcttgtatgtggccttgggcgaagcagttttcccacttgtcaaggagattccggattctatctgggggctgttggagggacccaaggggcgctcagatagctgggaaggagctggttgggacttattcattgaacaaatatatatgaagcacctactgtgtgctggcccttttctaggcatttaatataatttgatgaa

SEQ ID NO: 168340 - DNA, 335 bp, Homo sapiens
aatatcatatatacccaactatgtaaaactttgtggtaaaaggctggaaagaaaaaggcaaaggtcaacatagttgtaatcagagtggtggaattatgccttaaaaatcctcttttaaaagaaaaaaacctaatgaaaagctgaagaagtactattataaaccatacctacactctggtcacctctctgctacagcactttggacaaactaccgttcttttacatatatgtctctccaacaggacaaggggcacagcttacgcatcttcacgtcaagggtctagcttggtgctggcagccagcaagcaccaaaaaaaattaaaaactgccccagt

SEQ ID NO: 168341 - DNA, 305 bp, Homo sapiens
cctgggttggtgccggctgtggtgggaggcctgcggtgggagcctccgggggccactggacctttcctgggtggcctgtggcctgggagctgcacttggttcggtgcagggaggttgtgacatccactctgtctgcagggatggccggggccctgcggctgggtgatgaggtgggatggaggtgtccggggctgccctgcctccttttgccaaaataacaaaaattatcttgtttgttgtgaaaaaacctgttttcccacattggggcatggagggtattaactgtgatgaccttctgagttcct

SEQ ID NO: 168342 - DNA, 550 bp, Homo sapiens
cccccaggaaacagtatgactagaaataggaggggagcaggaagtagggcacagggacacggacatacacacaacacacacaacacacacacacagacacacacatacagggacacagacacacacagggacacatacacacagaaacatggacacacacacacacacacacacacacacacaattttaggattgtctcttgcataatcattacccaatatacccaggttatttagatcccacataatgaagggcaggtcaccggtgattacattcaaaacaagacaaagactgcagcatgattaactttcacttccctgaatacagatggatatttaacaaaagctggctcatgattttttctttttctttcttcttcttcttctttttttttttttttttgagacagagtctgtctctgtcacctaggctggagtgcagtggcacgatctcagctcactgcaacctccgcctcccaggatcaagctattctcatagctgagattacaggtgtgtgccaccacgcctggctaacatttgtatttttagt

SEQ ID NO: 168343 - DNA, 125 bp, Homo sapiens
agagtgaaattataggaatgggaaagaatatgtctcctattctttttcaggagaagtgactatgtcagtttgtttggagtgcaaagttcatcacagtagatgaatgaatggttagaaaagaaagg

SEQ ID NO: 168344 - DNA, 270 bp, Homo sapiens
gttcagggataggttcaggaaactcattcaagtttcatatagcacttattatttctttttaaaaaacattttatttggctattaagaacactatgtacaaaagagctgtcaaaatgttgagtaaaagtggctacatcaaaacagccatgtcagagtatcatgtttcctattagacagatatttgttagtgacatatcctagtttaagagttaacagaaatgggacttcgtctttccttactataaatctggtaacttactagttgaaagg

SEQ ID NO: 168345 - DNA, 423 bp, Homo sapiens
ggagggagggagaagggggagggacagggagaagaaagagaaagaatagtattagtcgtggccaggcgtggtggtgggcgcctgtaatcccagctacttgggaggctgaggcaggagaatcacttgaacccaagaggtggaggttgtagtgagccaagattgtgccactgcactccagcctggcgatagagcaagactctgtctccaaaaaaaaaaaaaaaaaaaaaaaaattgggggctgggctagaaaagaattcctccaaatccatggctcagtgggataattttctcttcgttttgagtatgtgggtcatagacaagtattactattattttttattccgtgcgaggaagtgtataaatgtagagcatttggtgaccgtatgtcagggaagggctgtttacttttgcacctttgccaca

SEQ ID NO: 168346 - DNA, 984 bp, Homo sapiens
agaccagtaggagaggaggagattgactgcgaagaatcctgaggggaaaagctctaagtctggattgtagggggggttatgactgtgcatttgtcaaaactcatcaaacacttcaaagggagaaatgttgctatatgtcagttataccttaataaacctgactttttaaaaaatggagatttccaagccagagagagagagagagatcgtgtgactacaggattgctcctgcatctcttcctaatggcacagctttgaggtgcttaattgcttatttgcgataagtcaatcaagagaaatctggtatacaaaatgtctagtgattttggttttctgcttcctcatataagcagataccagaaactaggcctttttcttttcattcttattcaaaaattcatccaagggctgaagttgtcatcctccaagattccttatttgggtatttctgacaactcagggaaatttatctcagatcattggcagctttccagaacgcttttgtttggcagccttgtgacagctcacccatgtcattattagactgggtggcacaaagtccactgtctcaatcctcatgggctgtcatgcccagcaaggtcacatggagcactactctgtcccaggactgagcttagcatctttgtggttcaccttggctgagtaggggcagtaagaacccttagcctcccaacctgtttagcaagtccctcctttttgtttactcaccacccagctgacttcatgaagcctcattgccagtacatttcaagatcgatataattatagtgaaaggtatgtatttgcttatttttaagaccaatgccttagcaaaacagtctgaaagaccagaagtctctcccttgttggtgatgtggccaggcatacttttccttaacaatgccaagtggagatactaaaaccattggtagtgaaaaacataatcttaaaattgtaatgtattagcaacgacaaatacatagg

SEQ ID NO: 168347 - DNA, 217 bp, Homo sapiens
ccaccacgcccggcctctcttttcttctcattaaaatataactcttacagaaataataagaaaagtaatgaagtaatgagtctattattttgagcccatccaaaaaaaattgcttaactggcaacagatagaaaaataagatattgaattatccaaaagctgattagccaaattatttcttttttcaccatttttttgcttatagagaattcgagta

SEQ ID NO: 168348 - DNA, 409 bp, Homo sapiens
acaccttcaagtgttagatacgcactatcaccgtgcatcacgaggaaagagaagggcccacatggttttcatacttaggaaaattcagctttaatcaaactcagttaattattgactcaacaaggatgaaactacaataaaaccatttttgccagaggccaaactattaagaaacctcgtgtacttcatagacaaaaagccttcagaagtattccttgagccttcataatattccatcttaacaatcattattgtgcttatctctcaatgccaataaaggagagacaatcgaggaagttgcctatgtatttaaggaaaaaaaacagaccagtaacagtggctcctgcctgtattcctagcattttgggaggccaaggcaggaagactacttgaaaccaggagttcgaga

SEQ ID NO: 168349 - DNA, 358 bp, Homo sapiens
tgttatcatttattctagattgtatatagtgagtgatcatataacttatcacccaaaccagcacattgaagcagaaaggcgcaattaaatttataccagggcaacagaactaacaggcaaatgaagaggtatggtccctacatataatataaaggtcaaatggcttgttcaaagtaatgacagatgagtgccagagccaaagcacattgatattgtagcctaattagatgtcactcacagctttgctttccacagaactagttatatactttacatggctccttgcaatacgtaattctctttgcaaattagatcctaaaggcatttacggattctgagattatgagctgaaaattgc

SEQ ID NO: 168350 - DNA, 489 bp, Homo sapiens
caagcccctaacgatgctggatgtgctggccacactcaccagtgctgcctcctctgagactgtcagctttatatctgcttctttttatcaatacgggcaaataattctctagacatttatcattttaaactgtcacagtccagtgcctttcccgaggaccacaatcaatactgatctcggtttgaatacttttctgacaaggttcctatttgtagattcacaagtagaactaatgtgtgttaaagctattcagtttggcattttgcagctccattgacacattaaatataggcgttcaccacgacgattaaccttacaactattaagtaataaaaatcccacatacatatttattagctgaacatcctattccggcatgatgccttccccgacgaggtctttccatgatgggaaaccagagaaggtggaggtgctgctggagagatgagctcactctttgcagagaatgtcaggagggatgtgggatct

SEQ ID NO: 168351 - DNA, 121 bp, Homo sapiens
ctgttgtagctccaatagcttgaacgatagctaaagggcactgaatgtttactgtatgtgaacgcatgggagagacacttgaggataccatctcatagagtcctcccagtgattctaagag

SEQ ID NO: 168352 - DNA, 440 bp, Homo sapiens
acaggatcagaatcggaagaggtagagtttgtaataataagcatgtattacttttcttcctgacatagaaggttccactccacttctaccttcgatgagcttataaatcaatttaggaaattaagagaaaaccaaagaagttatgggttgcacaggatgcctaagtagattagaaaaatgaataaactgtcacttcaaaaaccattaggagggccatgacacaaggggacgtgggattctttatactgtggctaaaaaaaatagttaatagctcttagttccattctttttcctcctaaagttcctgaatgtggagactaaatgctgctgcagaagttaggcttcacacagtttgaaactgatcactttttacatgcatgtataatctcagagttgttattacacttaactggtgatgacgagaatactgataatgatgg

SEQ ID NO: 168353 - DNA, 550 bp, Homo sapiens
ctggaacttcaatacatacatctaaacttatgcaaacattaaatcaatatgaaccatagactgaaatctaaaatttaaaactataattcatgaattatataatatatagagaaaaatattcacagccatatattagaaaaaaggtctgttttgtgccacagtacccattacaagaaaaatatagataaattggacttattcaaaattagaacctattttttcatgaataagtgaactaaatcctgctaagtgaatgaaaagacaaaccatgcattgtctaataaaaggaatcaaagattcttgaagtggttgattcacctgatgattaggagtatcttctgctgtcggagaataaggaaatatccaaaaaagtctggagatatgcttaaatggcacagaaaacaacctaaaaaagctcctaagggctaacattagaacattttaagtaaaaataaataaataaataaatacattggattatgacccagaaatgttcattaggtagtgaatgaaaaaacaaattgtagaatacctaaataataaaatatta

SEQ ID NO: 168354 - DNA, 281 bp, Homo sapiens
gctaaacttcgaagaggaatttattgtttcctacagatgacaattaataatcaatcttgcaatgtttactgaggtcactatcctcagtgctatacgtgttctgtgtcccatagacttcagggtaactacatggtccttaaacttacaatctaaagtatttccatgagaccttccttaatagacgtttgttctcagccttctttcaatagcaacatcctttgttcacatgaggatgcataaagaaatacaatacgtaaaaacatgttatcaggaccgctctc

SEQ ID NO: 168355 - DNA, 397 bp, Homo sapiens
tgattttaaattcttagaatggttcaaagtttttcacattgagatccagctccccatctttcacctggaggaagaagctctgtggggggttagaaacagggggatggctgtgcatgctttgcttctgtttaaaaagggaattcagtctccagaagggaggggattgcactggatgcttggagcaggcatcagaacatgtagatggttttggataatcttcatatgaggttatcttcaataactcaaagagttgattgacaaaaaatagttgattagccaggcacagtagttcatcccctgtaatcctagcattttgggaggccgaggtagcaagattgcttgatcccagtagttcaagaccagcctgggcaacaaagtgagaccccatctctattta

SEQ ID NO: 168356 - DNA, 251 bp, Homo sapiens
aatttttcctcttagtaaaagtgttatcataaaaataattctgagatgggagccatgcctaggagaaaattaattcattgtcctatccaatgggcttacttagcttttacagctaggaatgtcactaaggacttcacagaggagctgatattgagctgagtctagaggatgaatgacagacctgaaaatccaagcagagtagaagggccagagatatgacaggatgtggaatatgagaaattgtgttcaaa

SEQ ID NO: 168357 - DNA, 207 bp, Homo sapiens
atgtgaaaaagataaaacaacttattagaggactgtaacctatataaacaaacatataaaaaaatgagaacttaaaagtacaataactcaaataatttaatatatgcattaaaggcatttgtatatgtccagaaagtggtttagtattccaaaagataaaaatttaatacgtgtaaaacaatacaatttgtagtgcatagaaaaaag

SEQ ID NO: 168358 - DNA, 463 bp, Homo sapiens
gagaccaaacaatgactcagacaagtccagtttggcaagtagatgagtttattaggacttatataggaggtactcccggacagcagcaggacagctttagaggcccatgctgcctcccatccctatgctgcttttaaactaattttctggctctttgcctactgtgtgtgttatgggacttttttcccaggtaggttctcagatactctctggaatgtttgggttctcagggacacctgctccttgacaggacagaacaagaccccatctctaaaaaaagaataaaaaggagtacctaaaataaggattttaactaacatttaataccatatgtttactttgtaacttttctaaattctaaatttcataaagttaaagaaagttgtttatttgaagaaacattgcctttccacttaggggaacatcatcttctcagctggctgagtttactctgaccaaacac

SEQ ID NO: 168359 - DNA, 307 bp, Homo sapiens
gtacaaacagaagtgttcctcacttgcgtaggctaggtgccacagtacaatgtgaagggtgcctccatatgtgtttatggttggctaacaatcactttactctctctctggaaatggactgtgcctgcacaaccttccagatgaaacaggcataaactaaatgatgatgggttaaaaaaatgctttaaagttgtaatcaccagggaaagaattccataaccatccattggttaatggacgggatattattgcatcgaatctcttggtatcagaaaactgggctggatttgagaggtgaccccatata

SEQ ID NO: 168360 - DNA, 386 bp, Homo sapiens
tgaggtttattttcctgtctcaactgtcaggcttctagagattaaggactaacaatacattgaaaaaaatgataacttactttattcttacgtgttgcatttgaggctgtttactattttatgcaatcatagaaatatgtatgattttgaatctgtttacaagtataattctctcagatttggaactattaccccagttttctaattggggaaacagaggcttactgtgcatatataacttgcccaagttctcactgctgatctgtagtgaggccaggattagaagccagagtttcactccagagcctgtattctttcctccatcacacactccctctgtaagctctacactttctcccctagcctcaacaacctcaacatttaac

SEQ ID NO: 168361 - DNA, 102 bp, Homo sapiens
tgtaggaccgtcgcacatcgcagcgggtcaaccccccggacactcctgcttggcccccattcacccaggagcacctttccactgggaaaagcaaaatgtcct

SEQ ID NO: 168362 - DNA, 493 bp, Homo sapiens
gaccattgctggcacacattcagagctgatataagtgtcttgctcttgcattgaataagatgcactttttcttgtcagccttcctttcttttcttatgaacaggttgcaacccagcgtggacagagattctgaaagtcagacagtctactgtgacgctgctttggagactgatggagcaacctgtgcttctgtggatggtgtcgggaggtcccggctcctcctggagctcagctgcatgctgtgtgctttggtaatttgcttcactccttgcaggatacaagggcaccatttagaaaattattactggtacagtcactggatggcaggaacctggaagaatgaatgcagtttccaaggctcctaattacaattccaagagtagctttctacagtacactagaacttattcctcctacccagctgtaattttatagttgttaactaactccagggtaagtattaagtatggttaacaataacttattgtgtatt

SEQ ID NO: 168363 - DNA, 444 bp, Homo sapiens
acctggcaggatgctgagagggctcggaaagtcagacttaacttttaaaatgccaaaaaaaccctcagagtaggcagttttcaagtttatcctggagctaatacagaaggtggaggtgtaaagctgtcttccctcaacctggagggccctgagaaggaaagaaggcacaaatcaggcatgagcctgacccgaaggtgtgctctgggggggtgaggccctggccacacaggggtaacaggttgtaactgggtcatgtggtcaaataacagttactcctgggaggcaagaccagcggggaaatggcaagtcaccctttaccagttattctcaagctgcctctttacaaccggagttcctcttcccatgggggtagaaatcaaactgatttgatgtctaacatcttgggaagaggtcattatacagggccatgtggcctctacagcc

SEQ ID NO: 168364 - DNA, 298 bp, Homo sapiens
tccagcctgggcaacaaaagcgaaacttagtctccaaaaaaaaaacaccaaaaaacaaaaattagctgggcgtggtggtgcatgcctgtaatctcagctactcagggaggctgaggcaggagaatcacctgaacccgggaggtggaggttgcagtgagccgagatcgtgccactgcgctccagcctgggcgacagagcaagactccatttcaaaaacaaacaaacaaacaaacaaaccaacaaacaaaccgaaatttgttttctggcctgggttcaagtgactctcatgtctcagcct

SEQ ID NO: 168365 - DNA, 354 bp, Homo sapiens
gacctgctggaggaggtgaggcgtcgggggggcaggcagtccagggtggacctgctggaggagatgaggcgtcggggggggaggcaggcagtccagggtggacctgctggaggaggtgagacgtcggcagggggcaggtcttcacaacagcagaggcccaggcccgggtacaggctccgtagtctcctgggacatggtcccgacccacggatggctgggggtggtctgaaaaggtcctggccctggggaggtggcttcctcgctgctgactgccgagggggccctggcctggatccatgctgggcagaagcagctggacactgaccaggaccccccagggccggaggaaccaag

SEQ ID NO: 168366 - DNA, 111 bp, Homo sapiens
aaaagaaaagaaaaagaaaaagaaaagccagaaactctggagacaaaaacataaataaggagaactggccctaccatctattaaaatatagaagttcaataattaaaacta

SEQ ID NO: 168367 - DNA, 519 bp, Homo sapiens
tttctccagtggggacaacagagtcatcagaagtgaatggacaatagcaagtcctataaataactgaaataacaaaggattttgaataagcagtaattgatggttaagctgctagtcagttcttagactttgaaatgccagtttgaagtttgtcccagcgaaatggacttggaaactttgtgtgagagaagagggactacaaatcctaccagaaattatttggttgccactcaggaaaagatacacctcctctgggtcttacgtcattcttcaaaatgctctgcaaaaataaaagctcaatctcagtgaattttacccctactccacttacataatgtcctgtccgctactcccactcttagtagaagtaaggaaaaatcatggacatacttggtaaggaaagaaacgcagtttttaataaaagctccaaaagtgattgatgcgcagccaagatgcagttcactggtcctcgggtgtatgagaatgatgcccacgactgtagtcaactctgatctctcc

SEQ ID NO: 168368 - DNA, 149 bp, Homo sapiens
tataaatttttttagcctgtttccttatctttagaatggcacctactatttatggtgcttcaaagactgattaagaaaatcttaaaacaggccagatacaatggctcacaccagtaatcccagcactttgggaagccaaagcaggcaga

SEQ ID NO: 168369 - DNA, 274 bp, Homo sapiens
tgaagaaacttgtgcacaaagaagttaaatgactcatccaagatctcataattaggttaacctatcatccagagcttttgcttcctagtccaaaatcattttgttttgttttgtttgagatggagttttgctcttgttgcccaggctggagtgcagtggtgcagtcttggctcactgcaatctctgcctcccaggttcaagcagttctcctgcttcagcctgctaagtagctgggattacaggcacttgccaccatgcacggctaatttttgta

SEQ ID NO: 168370 - DNA, 624 bp, Homo sapiens
caagaaagaaggacttgatgatgttttcctctgttttaatataaatctgctttcctgattataaaatatgtgcactgacaaaaatttagaaaatgtagaaaaacacataaaagaagaaaatcaacttaaagttactacccagggataacattgttattaacatagtggagtgttttttctagtcatttttctttcttgtttttgtttctcatcaatacaaataaacacgttatcgacactgagtatatgattctaattgaatcagaattgaaagacatttaaagggaaacataattggggtgagtttattcaatattttatacaatttttaatgcatctggtaattcaggcaggagccagcttcttcattgatttatctggtactttcatattttacaaatttgggttcattgtacatacaggttatcatgcttttaaatttaacattttaatgattattttccccatatgtaatcttcaaaatttgacttaactgctgtgtactatcccatcaaagagagagattgttatttattcaaccattcttctattgttacatatttagatcgtttccatttttattatcatcctgtattgcagttgactaaacatctagctataaat

SEQ ID NO: 168371 - DNA, 387 bp, Homo sapiens
tggcattccttgtagatgcatcactttaatctctgcctctgtcttcacacagcattctcctccatgtgtctctgtctctgtccaaattttcctcttctaaggacaccagtcatattggacttaggtttcaccccaatccagtatgatctcattttaacttgattacatctgcaaagaccctgtttccaagtaaggtcacattcacagattctaggtggacatgaatttggtgaggggagggggtaggggactggatactgtgcaacactatgtaccaggcactgtgctaagtactttgcatacattgtctcatttaaccttcacaatactcccctgagattcctttattattattattcccatttcacagatgaaactgaggcttag

SEQ ID NO: 168372 - DNA, 107 bp, Homo sapiens
ttgcttttcaatcctatcctttctagatggcaaaaagttctccacctaaggaatggtttctgggaaaaagataaaatccatggtggaattataaagtcatttgttaa

SEQ ID NO: 168373 - DNA, 217 bp, Homo sapiens
atccaaagaattcggcacgaggagagaactagtctcgagtttttgaaattttaatttgtgacatctgtttttaagtatttctgtagatacaaaattttcctcagttgaacacaaatactaattattttttccatgaagcaagaaaaactttcaattctttatgtactatgtgtatgtatatatgataaaatgtttagatattactaaatatacactt

SEQ ID NO: 168374 - DNA, 663 bp, Homo sapiens
gaaaggtgtaagagaacatgtggtgacttgagttgacaaaagaacatactggtgaaaacgtggcaccagagttctgaagagattggcactccgagctgtgcattaggaaatcatgttgccatagaggtggtaactgaagtcttgggatttttaagaacacgcttactgcctatatagaaactgaaaaggtaggtggtggataaatgtgtgtctggagttgtttaagaatgagttaacaaaaagacaacatgcttttgttcaagagtcaatatttcacagttttccagctcatggaaaagactgaaataaatagaaaaaggaatctagaaagaagtactccttattctcttgaatactctttgaagatgcagaaaatattctatctaagaacactcttacaccttaatgtatactttaaaattttaatctatgctgattagaaacacattcacactggaatcattgatttgcctttttttccctccacactatagtacatgctatattttgaagtttctttgagggccaagggcttttatttttagaccagaagacatgaaaactctcaagaaggaaatgcatagaagtgtagccacacatttggccatataaaacagtgtaaacagttttcctgttaagaactgctgtcaggaaaaccaaatc

SEQ ID NO: 168375 - DNA, 328 bp, Homo sapiens
ctgaccaacctctagaagtgatgggcctaaagaactcttggagctaaaattctttgtcacctgtaatgccagcgctttgggaggccaaggcaggcagattgcttaagcccaggagttcttgaccagcctgggcaacatggcgaaaccccggctctacaaaaaattagccaagcgtggtggtgtgtgcctatagtcccagctatttaggaggctgaggtgggaggatcacctgagtccaggaggtcgaggctgcagtgaactgtgatcatgccactgcaatccagcctggatgacagagcaagaccctgtcactaaataaataaataaa

SEQ ID NO: 168376 - DNA, 399 bp, Homo sapiens
gctggctggaacgcaacttccaaggatggagggaaagaggagggaggttcagttagtgggagtgctctttattatctggtattctctccctgttgaatgctccctccccctacacacacacacacacacacacacacacacacacacacagtgcacacaaatgctacacagtgaccgtgtcccagacgtttcaacaataggcagctgtctttctctggattcctgttcagacccgctcttactggctctctgggcccttccagttctatctcagacccttaaacaatcaggcatgaggattgtgaaaccagccatgtctctggggataagtggtaccagtgaactgcgtttctccagtaccccggcaggtgagatgtgatgaacagacctttggcttga

SEQ ID NO: 168377 - DNA, 332 bp, Homo sapiens
gccacatgtgactatcaaatgcttgaaatatggctagttcaaattgagataataaatcaagataagtgaaaaatacgcaccagattttgaaggcttattgtgaataaaagaataaaatatttcactagtaatttttatattgcttacatggagacagtattttttatcttttaggataaacaaaatatattaaaaataatttcactttttctttacttttttaatgtggttaccacaatatataaaatgacatatgtggcccccattgtttctactagacagcattgctctaaatttaaaactaaactagcagtcaattaattaaaaaggat

SEQ ID NO: 168378 - DNA, 266 bp, Homo sapiens
gaagcttcccctctgagccctgcacggtgctgtgctgatcgtttcagcgtgtcatctccctggagaggacagacagccttgtggttacacctgttatcatcctgccactgaaatctaagcttgggaggccagggcaccacctgtcttgttccatattctattcctagtgcccagcacggcacggcacatatagaagatgctcatgtgtacatcacaacggaatgaatccacatttcactgaggaggaaactgaggctcagagacag

SEQ ID NO: 168379 - DNA, 564 bp, Homo sapiens
ggtcattcatctgcaaaacgggtaaaataatcattctgccacattgactttttggaaggattaatacacataagctttcatcaaatggtagctacgtatatgatgattattattatgtttcagtctacctgtgaaccaagatttgctttctccttccctgtaagaccttcatcttcataaaaggaaaacacatcagtgtccgttaaactgtatgtttcagcccttccagaaaataatcaggaacacacggcagtcccggctaaatgagtagagaatgaactcctggtggatgggcgggggcgggggggtgcgggtgacacacctaattcaatgttgatttttctggccaccgaaaatattcctttttacggacctgctggagctccttagattaacaacctcggccggcactcatcgcccccaccctggcaaagcttcccagccagggagaaggtgtgacttcagacttcgtggtaaggatgggggttggggaggcggaatgcaggccggtgtgtgaggtgattgtaaccagaaacgcctaggcaggcatctcgcttctgtcct

SEQ ID NO: 168380 - DNA, 149 bp, Homo sapiens
ggagacaaacattgaatgccctaaagcaaaaactcaaaaactgcctagaactatgtccctatagagatgtatgatgttggagttggcctcctctgtcactctcagggtaagatgcttttgttagatatgcattcaaacaggtggattag

SEQ ID NO: 168381 - DNA, 178 bp, Homo sapiens
ccctcccttgcaaaaggaaccagctgccatgttgctgaaagtgggcccacacacaaccctcatttctcacgagagctaacagatgaaagctcagctatgcagtgttaaaattcatctctttctctgtggtttttaaaaaaatgcatttctaatcttacacttcacgtggcctccaaca

SEQ ID NO: 168382 - DNA, 405 bp, Homo sapiens
ctgttgaaactattctaggaaaacagctatggaaatatgcatgtttcagcattgttttcttagaaacaaactaaatgccaaacaataggaatcctagttaaataaattatagtttgggcatataatggaatactattttgccactaaaatatatactgtagatacatttttattgccatgaaaagctattaacagtacattaagttttaaaaggaaggttagtatagtatgagacttttttttataaaaactatatatcatatatagagaaagggcatgaaaagacatatatcaaaatgttgacagtaattgcgtctgggtgggaaaattacaggctttgtttttctttttgcttatttttattgcctactctttttgtcatgtccatgtattattttcataaaa

SEQ ID NO: 168383 - DNA, 555 bp, Homo sapiens
ttcaacccaggtcaactaccattctactttacttctctctgaatttgacttctatagataggtaccggggtataaatgaaatcatatagtatttatacttttgtgactggcttatttcacttagaatagtatcttcaaggtcattcatactgtagcattatgtcagactccttccttaaggctaaataatattctactatatgtacataccacattttgttgatccattcatccatccatggacacttgggttgcttccactgccatttttaagtatacattcagtagtgttaagtatgtcgccattgttgtacaaccaatctccagaactttttcatcttgcaaaacaaactctgtacccattaaataacattaaacattccattccctccagcctcagcaaccccattctactttctgtttctgtgagtttgactattccaagcacttcatatcagttaaatcatgaagtatttgtctgtctgtgactggcttatttctctgagcacagtgtcctcaagatgcgtctatgttgtagcatatgtcagaatttcc

SEQ ID NO: 168384 - DNA, 337 bp, Homo sapiens
agacggaggtttgctctgttgcccaggctggagtgcagtggcaccatctctactcactgtaacctccgtctcccgggttcaagtgattctcctgcctcagcctcctgagtagttgggattacaagtgcgtgccatcacgtccagctaatttttgtatatagagatgggttttcaccatgttggctaggctggtcttgaactcctggcctcaagtgatctgcacgccttggcctcccaaaatgctgggattgtatacaggcatgagccactgcacccggccttattgttattttaaatatttatttgaccatttttgtgttcttggggtaactactgt

SEQ ID NO: 168385 - DNA, 461 bp, Homo sapiens
cgtactggacatcacaggtctaaaataattattataatctggatgaaaaatatgtcacattcattctgtcacttttccttcttttgcctatggcaaaaaccactatgatcacaggactctttttcctttgaacatgggcaggctttcagaattctccatgcaaggcgaggcacggtggctcacacctgccaccctagcaccttgggaggctgaagtgggaggatccttggagcccaggagttggggaccagcttgggcaacatagtgagacctgtctctacaaaaagcaaacaaaattagctgggcatgggggtgcatgcgtgtagtcccagctactcagaaattgaggcaggaggactgtttgagccctggaggtagaagctacagtgagccatgatcgcggcagtgcgctccagcctgggtgacagagtaagactctgggaataaataaataaaataga

SEQ ID NO: 168386 - DNA, 321 bp, Homo sapiens
gttaggagttcagactttgggtctgaattccagccccactatgagactttgggcagtcacttggcctctctaagcttcagtctcctcttccacgtaccgtatttagctctatgctcagtaaatatccccaccattcagagtgtgaggcatgaggcctggtgctggccagacatgaaagaaccacactgctcttcactgtggttcttaaagtccactgaaagaactcaacagcctagcacaagggttggcaaactttacctgtaaagagatgggtagtaaatattttgggccttatagaccatacagtacccatctcaactt

SEQ ID NO: 168387 - DNA, 413 bp, Homo sapiens
agggtggttaagggaaggcttccttgaagaggtggcatttatgcggacacatgaattagttgagggagcaaatgatgtgtatatataggggaatattttttcagacaaaaggaaaagcaactggaaagaccctgaggcaaacatgagtttcacataatgcaaatatacatatttagctttttgaatctgcttagaatgtcttttccccccattttaagtagaatgtagaaaccttacatataggtctacttaacctgtaccccttacgttagagttgtcatgaattacgtctacatatgtttaaaaccccattagacaatggtacagttattttcaaccatcaaatatatttttaaagaacttagtacctgtcaatgatagactagatgtggcacatatacaccatggaacac

SEQ ID NO: 168388 - DNA, 287 bp, Homo sapiens
tcacaaagaccacacacggtatgattccatttatatgatgtaagttatatctcaataacgctatttttaaaagactagtcatctttaattgggtaggctggggggaggagtagagtgaagggtacatactctctcgtcataaagttaatctaagggagccaataaacatgtttcccaagagggcactatacaggcaaaataagtgatggctcatattactgctgggtgacaaggagcatccttcttacatccacatatgcacagtcttgcattgcagaatggtattt

SEQ ID NO: 168389 - DNA, 340 bp, Homo sapiens
ctttcttcatatgatgtcccttttgcagcaaatccccaactccaccccaggcaaccactgaccagcttcttgtcactataaattaagacttttatagaagctaaataattttaatcaactgaaggctaaaccaaaacagctgacatatagtgtcattatcaatataaataaaaatagtgaaaaaatatgacctcttctaaaggaaagataaaatgtttgtggagttgactattcatctttgaaatggaactgttacttcagaagtaacagcagagttgttaaccacgtcccagctgagtgacaaaatcattctgttgcaaaaatgaaataaaattcattt

SEQ ID NO: 168390 - DNA, 191 bp, Homo sapiens
cgtccacccggaccgcaggggagtaacaagtgcctgacttgtcccaaactcccagtcctgaccccccagggacgccccttcccgaggtccaaggaaggacccgggcttgcgaggggcagcaggagggagactctcccggccaagggaggaggcaccttccaaagcccttcctagcagcagccccggcgcgg

SEQ ID NO: 168391 - DNA, 402 bp, Homo sapiens
aatagctttcctcctctcccccaccccttatttcccaatgctggggtagccactgaaggctttgtgtcttatttaccatgaaggaatattttgaagctattaaaagtgatccttgattgttaccaaggttatatagagatctcgaaaatatttatgttatcatgttataaacgtggcaaaatataaaatgcactgtctgcaaccatgtagaaaatacatgtacatatggaaagcaacatgtaaaacaattatatagctatgttaggctaagtatattaatgtgagatgattttcaaaattacaaactaaagttttcacttactcattatttttgcattgataaattctgaagaaaatattatacatacaatagcgaaaatagtactcactgtaagtatactt

SEQ ID NO: 168392 - DNA, 126 bp, Homo sapiens
cctccctgccccctaccacagcctctttgaccttgtctcatactactgtctctctactaccgccgcccagctctgctggcctccttgctgttctttgaacatgtcaggcacattctcacctcaagg

SEQ ID NO: 168393 - DNA, 257 bp, Homo sapiens
tgtttttcatatttggtttgcccagagaatgtacattttggttcacatatggaaatcagccctttgtagatagttacagataggaatttccagatgatcctgtctaccttagtcttgtcttaatggaataaccatatttctgtttaggagtgggttaattcagctgcctttccaaggtaccatggaaaaattctctaagcctggattccaagaaatactactattgatgagaattagagcactggtgtttttcaaat

SEQ ID NO: 168394 - DNA, 733 bp, Homo sapiens
cagtggcacaatcaaggctcactgcaacctcaaccttctggtttcaagcgatcctcccacttcagcctttcgagtagctgggatgactacaggcatgggccaccacacccagctgatttttttttttctttttagtagaaatgaggtctcgccatattgctcagactggtcttgaaccaacacatttttagctttttaaaagacagccttggccagccatggcagctcacacttgtaatcactgcactttgggaagctgaggtgggcagatagcttgagctgaggagttcaagaccagcctgggcaacatggtgaaaccccatctctacaaaaaatacaaaaattagctgggtgtgatggtgcacatctgtggtcccagctactggggaggctgaggtgggaggattgcttgagcctgggaggtcgaggctgcagtgagctgtgattacctcactgcattccggcctgggcaacagagaccctgtctctatttaaaaaaaaaaagaaagaaagaaacctaaaaacagactggcacttaaaagagttgtgcttcattttttgactttctgtattaattttgtttgttcctttccttaaacaagctgccactgctgctgattcaacatgtttcattttatactttttttttttttttgagacagtttcgctcttgttgcccaggctgcagtacaatggcgtgacctcggctcactgcaacctctgcctcccaggt

SEQ ID NO: 168395 - DNA, 489 bp, Homo sapiens
tggcagtagtctccccaagcacttgaaatgtagcccttcggaaataatgtcagtactatgccacttgtcctaagacgtactcctctgaagtccctcactgcctgccatactcgatagggataaccagtaggcttgtaaccagcacagaaactgatacactgtgccgtgtttggaactcggaaaaacccagcttagaaacccgggaaaatcccaacattttttttcccatgctatctggaggccagggcctgctaaaagtgcaaagcacaagggaggcccaaatgggttcaactccgacactcgagaacgcaaaatcgagatgacgccactgcactccggcttgggcgacgcgacgccttagtcaaaaatagctccggagacacacaaaatcccactcctctccccgactttgttcccgggagacccgcccctgcttagcagcgttttcccgagccacgccccctaatagtgcaacagctcttttactga

SEQ ID NO: 168396 - DNA, 371 bp, Homo sapiens
ttataaatgaaattgctaggcatggttgtcacacctgtaatcccaacatttgagaggctgaggtggaaggattatttgaacgcctaggagtttgaggccagcctaggcaaggtctgtagagactcggtctctttaaaaaaataattaaaaaataaagatgctctaagaagtcaaaggcaacactcagaacgaacagtgtgagtggcagaatcctacactgcccctctccccaagatttcctgccctaatctctgggactataaattatcacacgctgattatgtcattgcctggaaaagaggattctgtagatgtaattaaggttactaaccagctgactcaagagttaatcaaaaggagtttatccaggt

SEQ ID NO: 168397 - DNA, 666 bp, Homo sapiens
ttttatgtcacgctgctcctactaggcaggacatttattgaattgaatggagttcactgagtttaatctcctacctgaggggtgataagacatgaccttcatttaaagatgaggaacttgagatccaaagaagtgaagagcttcactaagtgcaacagagactcagagcttaacttctttagaaccttttgatccagccatgctagggtgattgcatcctcgctcaaacagaagggttttccaggctgtgtttgaaaacctccaggagccaggaactcagtgttcccagaaccacacagcataccttggacagttagaaagcttctctttttggcttctctttaaccttcttatgggttctagctccgttaactgtgatcatggtgagcttgcctatttatttcacccacatgatgttccttcaggtatatacagctagagttctttgtctcctgtgagtgatgacggtggcaagatcatcattgctgtcatttacaagtactttcagtggctcaggccttgtgcttagaatggctgagtaactggctccatgtcaccagctgctaagtggcacagctaggtttgcaaaccaggtctggctgctctagaccagggattcatacattggcatttgctgcctgttctttatgtaaactttcatcagca

SEQ ID NO: 168398 - DNA, 428 bp, Homo sapiens
  misc_feature (22)..(22): n is a, c, g, or t
  misc_feature (64)..(65): n is a, c, g, or t
  misc_feature (78)..(78): n is a, c, g, or t
  misc_feature (135)..(135): n is a, c, g, or t
  misc_feature (138)..(138): n is a, c, g, or t
ttaccggcagctatccggtcanaggtattgaagtatggtatctactgcaaaaaataacttctgnnacaaggtaaagtngtagaaaaaaatatatatatatttttttgaaacacagtctcgctctgtcacccaggntgnagtgcagtggcataatctcggcttactgcaagctccatctccctgatctcaagcaatcctcctgtcctctcctcccaaagtgctgagattataggcgtgagcgtctgcacctggccagaatgctttctttatcaatttttgtgttagtcctgtaaaacctctccatcctctaaatgtatgtcatcatattaatagatgaattaatttacttacatttttggggccatatgctgtgtcatttttggaaagtgaggcattccagatgattgaaccggatagcttcctggagc

SEQ ID NO: 168399 - DNA, 166 bp, Homo sapiens
agattctagtcacacatggaattattattttgtacataataaaaataaaagactgtcaacagtactgggcttatcattgtggtttccctctcggtggaaggtgttacagtccaatagaagtaatcattgcctggacccagacaagagaagtcagtgacccagggat

SEQ ID NO: 168400 - DNA, 400 bp, Homo sapiens
taagtttagcccaagctaattgagtaatatgagactggatgtttgttacatctgaaggaaattctgctttaactccagtggcataggaaggcacagaaaagaaagcaagaaatgactagtacaaggctttgccaaccaaacaaggtagaggactttttcataaaagtcattgttcttatctttcctctaattttgcctgaatcagtggcaatgttgtcagggataaacacctgtccagggcccacacacaacacttggagcaaatgctgccactcacaaaatatggggtattacagtgctctcagtaggcccttggtggaaactagtgtctttcttctatcctgcgagggaaaggcagattttttttttatctctcccgtatatccccagaaaataaaaa

SEQ ID NO: 168401 - DNA, 645 bp, Homo sapiens
tttttcctctatgtaccttgcccatcttgataaataatacaactaaactcttaaatcaaaatcctgggagctatctttaactttttctgacatccaatcaataatcaactcctgttcatcctaactcataaatcctttccaaatccatgcttccttattaccattaccactgttcttattcgggcctaatcattttttttctggactttataaaaggcttgttttccccttgtctctagttgttccttctactcatctatttttcacagatattttcctaaagtatacacctgatcatgtcattcctcctctcaaatgttaactgaacctacgggatacaaaatatcaaaatttcttggcattgcacacacataactgtttatgataaggggcttagcttgttatgcattctccacccaaaatgaaaacaatgtactttaaaaatatcaaataacttacactttcccatagatgtcaagtgccttctcccatctccattttaaaaaatgtaatgctccctctaattgaatgcattctcctatcactattactcctaacaccatgaccaccaccaccacaatgtaagctattagaagcattaaaaaaaaaaagatagtagtaggcttaatcaaagacttgttaaga

SEQ ID NO: 168402 - DNA, 226 bp, Homo sapiens
taacacctgctggtgcccccatccccaagcaggaaccctggtgcctggtgcctgaggactgctgtccaccgtcccaccatccttcaggtttcttcccagcctctgactcggggcaaggttcagatatccagaacattcttggctggctcttggagctggggtgaggcagaacctccctcccatatttacagcaccagccaaggcttcggggtttggacaccatccc

SEQ ID NO: 168403 - DNA, 280 bp, Homo sapiens
tgctgggattacaggcgtgagccacagcacccggctgttaaaaagattttttagaggatggggtgggtgaagtggcttactattacattattacatacttggttcttaatgcatttcttatgacttcctctcaaatttggatttcctgagtgtgcattttgagaagaaacttaatatcattatatatatgaaaggtcattttaattttatgtagtaagtttatggctttttatacagttggtttcattctctgtcgtttttttttcaacaagtatttatt

SEQ ID NO: 168404 - DNA, 471 bp, Homo sapiens
ttgaaaaggctatccatatctgcaactgatgctaaatgcatagaacgtttctggaagaatccataacaaacttttaatgatggctgcctcttttggagagaggtctgggaatgaaagaaattttactatcttactgaaaggtctgaaacgtttatcctgagcttctattcctttgatgggttattttcccccaagtgagtagggagctggtggcaagcaaaacaagcagaaacaacacaaataaacagtaaacacttttgcaggaccaggaggccctgagttgttttgtgaattctctgaaaaaaagacagaaggagctttgaatgttactcattatatgcccaccccagctcctctcccactggcaactgaaaaatgaaagctgtgttaagtggccccttccacctctcaggaagcatatcaatgtctccaatttccttctgtttccccaagcccacaacatacctcctc

SEQ ID NO: 168405 - DNA, 547 bp, Homo sapiens
agtgcagtggtgcgatctccgctcactgcaacctccgtctcctgggttcaagcagttctacctcagcctcccgagtagctcggattacaggcgtccgccaccaggcccagctattttttgcatttttagtaaagacgggatttcactacgttggccacgatggtctggaactcctgacctcaggcgatctgcccaactcggcctcccaaaattctgggattacaggcgtgagccaccgcgcccagccgcacacattttctatttacagtcatacagaggagtttctccccccaagcccccattgggatcgcattttcttactattctgaaacttgctttttcagtttagagtacacatttggcggtcttgtattcctagaagatggacttcgatttaccggttgatggtcttctccactcttccgtggggtcagccccacttgtcccgtctccagtccaatgtcagtttgtgacttaatcttttacatcgtgtacagtctgagccctcagaccccctcacacatgcacaaattgagtttatgcacag

SEQ ID NO: 168406 - DNA, 384 bp, Homo sapiens
gttttattcattctctgaacataatacgacaaaactacaagcttttcatttaaaaaataagattactttaaattaatatttgggaatatttgctttaaagaaattgtatattaaaattcagtttcttttatacatctctaacaagtgccatttcctgcataataattacatttctagtcaattgaaaacaggagttttacctaaaataaccaagtaacaagaaaaacattcttttttttttctaggaaggatcatgtatcctttcttttcataatactgtatcattcagaaaataaaatcatcattttgactccctgttccatgcaaatgtcattttgtctttgatttgcaaagtatgtaagatttttccacactaggtaacga

SEQ ID NO: 168407 - DNA, 586 bp, Homo sapiens
tctggttgcaagtgtctagattttctatggcaaatgtctagctcatccagcccccatggtcccctaacggacattgggatgtctttctcctgtcagcacgtggagaaagcttctgaaactgagctccttttaataatagtttgtgctggaaagaatcagaaaaagcaactcatatatcctgatatattctgaagttggacagaacttatttacagattttacccttttttggattatctacaattgtgctccccatcttgaaaaaggacagcatttgctctgaatacaaaaacaaataatgaagatgaagtattatctcagaggtagatctgcttgtactctaaatgtctccattggagaaaggttgaggggcatggcaagcgactatgccatccccaacttcccagagcaatcatggggaaaaagaaagcagagtgaccccctggggcagaggctaaacaatggttactaactagattgttgcttcaagccaagaaccttacggctgggtgaaaattcaagactctgaagactctctgggttagcgttactgggaaaggtatgtgtattttggccaccaaatact

SEQ ID NO: 168408 - DNA, 180 bp, Homo sapiens
agaaagaaagaatcccgctaacacctcacaaagcacttttcaattggttcatagccaacacctcagttactgatgataagtaaatacagagaaacagagagagagagactgagacacaggggtgtttttaaaaggcagagcaagcctcagacagatgccatggcgtggactttctgacac

SEQ ID NO: 168409 - DNA, 382 bp, Homo sapiens
gggaagtagataaatagaacctacccaagccaaaacaagcagaaaaaatgctgaagaaaaatgaacagtatttcaatgaaatacactatattagtggcctaaaacaaactatcatcatatcactaaatacagaaaaggtatttgacaaaattttacatatatttctgataaaaacaaaaacaaaaaaacttgctggaaattagaaagaaactttctcaggtggacaaagtgcctttatgaaaaacttatagctacaccatgctaatgttaaagatttttttttcccctaaggttggaaacaaggcaaggatgtccactatcatccttctattaaacttctattcacgttattctaggagattctaatcagtgtaataagtca

SEQ ID NO: 168410 - DNA, 451 bp, Homo sapiens
tgccttggcttagcatggagtaggttgctcagacacacttctcccattgcctcagactcctgagcagagcacaggaagcaagggtctgcgaggctggctgggcttcctggtggtccttcttgggcctggccccagtctaggcttgctccttctccaaacccaacatgtatgcttatgctggtgtctctgtatctgggtcaagcacattgtcttccacagcaaatataaagaagaaaaaatagaaagatggaaaaagaagcagaaaaaatatctgcccacagggagagaccatactccagttgtccctgatcttcaaccctgggctcccttccattccaatatggttccttgaggaagaccctaggcacagcagtcacggtaacatgccttcagtgggcaccaaagactccttgcatttctatatttttacgtttataattgattaacatca

SEQ ID NO: 168411 - DNA, 184 bp, Homo sapiens
gctgtgccttgcaggtgcgtcccatttattacctggcagcattttccaggctgcaaggagggggatcccaaaatggcctggcagtcttaccattttgaactagaatttgcggggctgaataccagagaggatgatcctatattgacagttccagaggtctgcagaggggtccctttggctgaat

SEQ ID NO: 168412 - DNA, 191 bp, Homo sapiens
ttatgcccctttttagggctgtcttcaacagtatcgtttgaatacagggtatcccattgtagtgcagcagcagatgaaaggattcatgggctgtggactttttggaggattaacttctctgtgcagctctccacacatacaccaatgcagtgcttacaatgctaggttgtcacatgctccttggagtccat

SEQ ID NO: 168413 - DNA, 216 bp, Homo sapiens
cagacaccacaaatgacgtattcctgtctatcccacagacaccacgtgtaacgtggccacggaacctcagacagaccgcgttaagggcactgatacactctcaggacctctaatatatgaacactcttctctctattgagaatcactatattctgttgatgagagggattcctttgcactcctcctgatttctctctcctccccactaggaccatg

SEQ ID NO: 168414 - DNA, 346 bp, Homo sapiens
ctgctgctttaataaatctatttaaaacaataaaggatttttttgctgtccttggttgctgtatatttgtcttgttcatttatacatctcacacacggaatgtaacaggcacttatcaaatatttgttgaaaaaaagaattaaaaacactaacatagccagtggtgtgctaggtaatgtttcacagtgacttctctgggagaaggggcttacttgtaggatttgctggccaatttctgatttttgtggtataaaattcaccatgacagatatcaagctaccaaggcgacatcaattggctcacatttctgaaaatttatcgatcaactgtcataaactggtctaaa

SEQ ID NO: 168415 - DNA, 546 bp, Homo sapiens
aaaaaaaaaaaaaaaaaaaaggacctgggtttgagataaagaggctaaactgcttaattagccaaccctggagtctccacactctttcaaaccaccagggagggctctggtacatgcacttgaaggcacccgatgtgctggccacgcccctcactgtgattttatattcccactgccagctgatgctcttccctccacgcggaaagagcttctgtggaaatcccgtcatccttcaaacccacgtcaagcctctcctccaagaagctgcattcccatccctctcctgatggacctcatctacttctggacccaaacccggcaactggagctgctgtagagactgctctttctcagcctcgagttcaggaccacttgtcgtgtatgcggtccatcactgaacaaacttgttatacggcgcatgactaattacaaatgacctgcttcctttggctgtacagggctgctccagagccagttggcctgggtttgaaaactggccccaccacttgtgagctgtaccgctttgggcaaactactgaccttgcc

SEQ ID NO: 168416 - DNA, 521 bp, Homo sapiens
gtcaaaaaaaaaaaaaaaagtgatttgataaataatggcttcccatgaaaatgaagtagatcactaacatattttactgaagtcaacatgaattgatagttattgcatcctcataaatgggtgagagagaattccattcattttaattgagataaataacaacaggctttaaaacataaaattatggaaaatctaaaaactacaaaattatggaaaatctaaaaactacaaaaagcagacagaagagtataatgaaccctccagacacccatcagccagattcaacaatgctcaactcatggcctgtcagattttgtctttacccccaagtacttctcatcctttattacagtggagcaaatctcagacatatcatttcatccactaattttcctgtataaatctataaaaaaaaccatcactacatgaccattatatccgaaaattttaacaataatgccttaatatagtgtaaggagtaaggagtaagtgtttaagatccagacttacaatattgccaa

SEQ ID NO: 168417 - DNA, 236 bp, Homo sapiens
catcctgcagtctgtttcctggtcagcctgtccagctgccattgcgtgattggttacaatgacaggagaggataaacaggaccattcagacatactcagaactatcagaggtatcaataagaatggcttataaaaaaccaatcagtttgtttacataaatggttacttgtaggttaaggacatttgtaaatcacttattctctagataatttcaaaattttcccttggacacttgc

SEQ ID NO: 168418 - DNA, 396 bp, Homo sapiens
actccgaggatccccgacgagttgtccgagttacttgggaggctgaggtgggaggatggcttgagctggggaggcagacgttgcagtgagccaagatcatgccagtgtactccagcctgggccacagagtgagaccctgtctcaaaaagaaaaaaaaacagatctaggtaataaaaataactcaatagaaatactgaaagaacatgatggacaatattttcataatctaggaatgggaagatcttaggaagacaggaaactcagaaaccataaaggaagactgacatttatctacatataacaaaaaaatagatcagaactaaaatatggaccatactataaacaatggcaaatgattaactcggacaactcgtcgggaatcctgagagttaccac

SEQ ID NO: 168419 - DNA, 326 bp, Homo sapiens
ccacagctgtgccacattttttgtttgttttacctccagtggcatctcttttaatttgtttatgtcttgattgctcatcctggtttaccatgttctcatatgcttatataagccattttttaaattacctgttgatattatttgctcatttttctattacattatctttttcttgattacagtagtttgctaatgtacttgtttttggttttcaaaaaaaagcatgtgcatattgcttaagaagttagctaatgttaaactgcttgtaacaaaaagtaccacctccacctcccttcaaatattttagctctttcttctggtatttt

SEQ ID NO: 168420 - DNA, 493 bp, Homo sapiens
ttctgcttgtgcttcatctgcaggactgacccctttaggcagaaggagtgggtctgcattgggggttggaatcctcatgggcctcagaagtcttggcgccttctgccttgtggatggcctccctcctagccagctccccagaggggtctgggcagctctgctccacccgaaggctctggatgctcctatttctggtattcttggcacctttgattcccaagaccattagggaccttggcgcccatctcatctgatgcctgtcatacggatgacttatgccccatctacgctatccccatagagcaccttcccatgtgggcttgcatgcctccacggacaggctgctccctgcctccccagcagctccctctgtctagaaagttccacatcgtatggagcccagaaggatacctctcccctagttctcttctcaggaccttgcagaatgtggtgaattggtcctcaggaagtctcttccattctctgcctcaga

SEQ ID NO: 168421 - DNA, 309 bp, Homo sapiens
aaaggtttttctgttccctttcacataaaacttttagaaatagaaatagaagttagaaagcaagaaaaaaatgttggaaaacacataataatttgtttaaaaaatatggaactgtctctgataggatttactgacttgagccttttgcccaatttttttaaacaatcatatttaacttagagcaataaaaaatattttcaaagggaagaaaatgtttttaaaggttatttctatctatctatacagcacaaatcttacaaagaactttccttccctattcttctctatcagcccctgtcactggcatat

SEQ ID NO: 168422 - DNA, 317 bp, Homo sapiens
caataaaagcatctaggtaaactgtagtacattcatataacgaatagatatcacattattaaaattatatttatttaaaattgccatcttaattcagtgtcaagtcagtgctataaatgtaaatgtacactgagaacaagaaagaggcagaggcagaatgagacgaagttaacaaaacaaagggaggagagtcacaaaatagtaataaaagtgatttctggttaaataaaagtataattttttttccttaataatatctacatttttcaaatatgcaataagtatgtattaaataaagtaaataagaataagcttta

SEQ ID NO: 168423 - DNA, 413 bp, Homo sapiens
aagtatttgtagtctttggaactactttctttttctggttaaggaaatcaaaatataagtctcatctttagaacctggacattatttcatgcatgtggaaaatacccatcccaaacagtgctggatgagtcatctgaccccagagaagccggagataatgcctcttccagacttcctgtctctcttttgcaagactttccataattctgcccctgcatctctcccacatcatctcctctaattaccagacgccaagttttctaatagcctgccttggaaagaagagtttccacccactcatgcctccagattcgcctttcaagcactccctaatcacaagtcccgccccacctacacacacactctctctcccggaactgtgacaggaactgtagagaaattcaggaactcaa

SEQ ID NO: 168424 - DNA, 299 bp, Homo sapiens
aaaagtagacatgtctgggtaaagagggaaaaggacagaaggattactctgaagaaacagactctagtcagaatgttactacaactaatgctggaaccttggggcgctctgctctaaagagaaggttctttccaattctaatggtctagaattattcctgcatttaacaggtcaaatgaattactagcagaccagcaatgcacctgagatatgacatgctttggtgcctggggtaggtatgtggatttctggatgtaagagataggaggtggcctttctgctttagtacatatttaaga

SEQ ID NO: 168425 - DNA, 360 bp, Homo sapiens
gaaaactagtacttccgccacactcaagatggctacatcagaaatagacttttccatccacctgggtggccccgcccccttatgaagctgcttccgccactctctgcgggttgggacgaattttacacttcttcgcagcattcaagatggtccggcttcctcctactttttattggctgcatcgcttcgtcttcaggggaaggcgggacttatatttgatcgacagctacattgatcaatggacaaagggcaaaggccaatgaagcgctggaactggagagtctctcgcgtgtctgggagggtgttttgcgcggggcggggtggagcagagccggaagcgggaggggagcgtcaaacagg

SEQ ID NO: 168426 - DNA, 488 bp, Homo sapiens
gaataatatgaacccctgtgcccatctcccagattgagcaatgattaacatttttcaacacctgctttgcttatctccctcctcctttttttgtggctctaagattttaaagtaaatctctgatttcttgtcatttcaaacctaaattcttctgtgtgtacctctaagaaaaataaggacattctggctgggtgccatggctcacacctgtaatctgagcactttgggagttggaaggattacttgagcccaggagttccagaccagcctgggcaacatagggagaccctgtctctacaaaagaaaaaaaaaaaaaaattagccaggcatgtggtggcacatacttgtagtcccagctacttgggaagctgaagcaggaggatcctttgagctcaggaggttgaggttgcagtgagctgagatgacactagtgcacccagccttggtgacagagtgcgaccctgtcttgtctcaaccaaaaaaaaaaa

SEQ ID NO: 168427 - DNA, 372 bp, Homo sapiens
cacaccccagcatcttgcagagggattcccctcttgatcacagcgtgcccaggccattggcactgtggtgaccatgtcacggaacgtgtgagactgggaagctatgcgcctgaacttgtgacaaggtgtgttggtgtgtggatgcggctatttgtatgtggaagcccagtgccgagtgtgggtgtcgggggcacgacttgtgaggctgggcggggctctggtccggagtccggtggcggtagagccctcattttcgcacgattcccccgcagctttccagcgccccctgcccccgaagctggctggaaagaaggtgggagacacctgttggggagctgagagcggcagatcccacaggggcctctccccatg

SEQ ID NO: 168428 - DNA, 169 bp, Homo sapiens
atatgtgttatgaatatatatcgtggatgaaaaaaatttaaaaaggaaattatttttaaactaagattagcaatttcttttggagctaaggtggaggaagaaagtaatggaattgagaggcatgtacagaagacaattttattgataaagtattgtggagagttaaata

SEQ ID NO: 168429 - DNA, 367 bp, Homo sapiens
agattggatcttaccaaaggaattcttaatggaattaattattaggtgtttgttttacgcatggctttatgttgcatggggcatgaaagccagtgcccatcctggcattataagagcaggagacctggcattttaagtggcccgcagtgaatgagctggactaggacagggagctgtgggaatgagactcactcctcttggcttttgctgacttatattctaaaagacttcgatggcctgaaagttggcaatcaggttttccaagatgaacctgctttttatgcagtgattttttttttttttttaaacagtgcagagttcaaatagctcaacagtattagcagtgaatatccttccttccgggtag

SEQ ID NO: 168430 - DNA, 229 bp, Homo sapiens
agtttcctcagaaaattaaggaaaaaatagaattaccatatgatcgctgttctgtttctgggtgtgtacctcaaagaattgaaagcagggaatcaaggagatatttgtacaccagtgttcatagcagcactcttcgaaatagccaaaaggcagaagcaacctaagtgtctgtccattgatagttgaatggataaaaggaaggaaattctgacataggctctaatgtgga

SEQ ID NO: 168431 - DNA, 158 bp, Homo sapiens
ggaaatgactaacaggaatatagcttttcacttttttacattggtaaagatcttctctgactttggaaagcctgccacttactgagggccacctctactcatggctcccaggatgtagtctatcttattgacgtctttgacagttcataactcagttc

SEQ ID NO: 168432 - DNA, 359 bp, Homo sapiens
aaaaaagtaaaaacaaaactggaggttctcagtctagggtggcgttagggactttcatttccttccagaggacattctgctatccgcagggtagaagcctaatcctcaaggttcaaggtgacaagaatagctccaaccatcatacgcttattccaggaagcaggtcaaaggatggaacaactaagaaatgacattaaagatatgtgtcagtccatctgcgttgctataaaggaatacctgaggctggttatttatagaagagaggtttaattggctcacagttctgcaggctgtacaagcatggcaccagcatctgctcctggggaggcctcaggaagcttccaatcatggcagaaggt

SEQ ID NO: 168433 - DNA, 162 bp, Homo sapiens
caaacagttctggcacgtgttgccacattaaacatacaccagcaagacttgcaccatatgtgcaaaatcattttctattacatttctaaaaatctgtatatatgagctgtcaaaaattaacgcagatctgtactgtgaaatgacacagcactgaatgaggaa

SEQ ID NO: 168434 - DNA, 519 bp, Homo sapiens
ggaaaaggtacatggggtgaaacctggaggaaagcaggtgcaaaattctatgaggcttctccccattgaggcacataggatgcacttaatttcttcagcaatgaattgtgacaacacatgtgaaatgttgtctaccaaggaagctcattagagactgagtgcccaaagtttttcttgagggatggcacgtaggcatctgcctagaatgtaccaaaattccagactcccagaaagaaaataagtatacaacataaaccatattgtttgtataaacagtgtaggcagagtaagctgcccttatcatttgaggaaagtttcttatcaatgtagggaactgtttaccagctaaattcccaaatgccagccaagggccacccttgtaaggcggcctttctaccctctggtaactcttgtctgcacagctgatttttgcaggattaagttgaactatatgaatgccatttttataggtcagaattggtctggtatcagtaattctgtattgttaaacttaatagt

SEQ ID NO: 168435 - DNA, 732 bp, Homo sapiens
ggagaagcagtcaaaagccagattattcagggtcatgaagaataataaaaatttgaagtgttgtaacaatcagatctgggtctcttagagatcacctggctggagtagggggaaatggctggagggggattagagagaatacttaggaaaccagtgagagatgccaataaagtccagtgcaatgaaaagaagatgaattaaggcagacaggaagtaaaatctaaaggacttagttactaactaaaagctatgatcttagaagaggggattttttgctgggtggatgacagtataataaagataaggaaacaaagaattgagaagtcagggtttgagggagaggggaaaaatcagtttgagacatgttggatacaaggtatctgtgaaaatccaaagaaccaagtaggtaaatgaaaaattcaggtctcgggttcaggagtgatctgaagatacagtcagaaagataggaaagaccgggcgccatggctcacgcctgtaataccaacactttgagaggtcaaggtgggcggatcatctaaggtcaagagttcgagactagcctggccaacatggtgaaaccccgcctctactaaaaatacaaaaattagctgggggcatggtggtgcgtgcctgtaatcccagctactctggaggctgaggcaggagaactgcttgaatccaagacacggagggagcagtaagccgagacagaagcacagtactccagcttgg

SEQ ID NO: 168436 - DNA, 439 bp, Homo sapiens
ggtgtctagaggatcccgaaaactgaatagaggcaggtttgagggagaggggaaaaatcagtttgagacatgttggatacaaggtatctgtgaaaatccaaagaaccaagtaggtaaatgaaaaattcaggtctcgggttcaggagtgatctgaagatacagtcagaaagataggaaagaccgggcgccatggctcacgcctgtaataccaacactttgagaggtcaaggtgggcggatcatctaaggtcaagagttcgagactagcctggccaacatggtgaaaccccgcctctactaaaaatacaaaaattagctgggggcatggtggtgcgtgcctgtaatcccagctactctggaggctgaggcaggagaactgcttgaatccaagacacggagggagcagtaagccgagacagaagcacagtactccagcttgg

SEQ ID NO: 168437 - DNA, 492 bp, Homo sapiens
gtgggttgaccgtggcttgtgggttgaccgtggctttgctgggatatgggtgtaaagttgataaggaaacaaagaattgagaagtcagggtttgagggagaggggaaaaatcagtttgagacatgttggatacaaggtatctgtgaaaatccaaagaaccaagtaggtaaatgaaaaattcaggtctcgggttcaggagtgatctgaagatacagtcagaaagataggaaagaccgggcgccatggctcacgcctgtaataccaacactttgagaggtcaaggtgggcggatcatctaaggtcaagagttcgagactagcctggccaacatggtgaaaccccgcctctactaaaaatacaaaaattagctgggggcatggtggtgcgtgcctgtaatcccagctactctggaggctgaggcaggagaactgcttgaatccaagacacggagggagcagtaagccgagacagaagcacagtactccagcttgg

SEQ ID NO: 168438 - DNA, 514 bp, Homo sapiens
agagtaggtcatgtgaaaatattttccatacatactgaaaatagaggaatatttcagggaaaagaaggaagtgaaagctgttaaactgaattcaatatcctcatcagcgagttagtcattcattttcgacacttgcctttcaacagccttgtccctccattgttcacagggcagcctgcttatggttggctgccagcaacatatacgaattctctagctgcacactttatatgatagatgccaattgctaccaatgagatttggggctagactgcatatgaaatgaattgcatctatggaaagtagctgctattcagacctcaataattcaatcactgtgatttctacgaagaccagtatgcagcataatttatgaactgaagattgagctgggaaaattctttatgtatttaaatgcagctcattttgactttatagcaaagcggcaacgggatatcaaagaaatccaagggacttggccaaaattgaatccaaaacataaacacattgaaaa

SEQ ID NO: 168439 - DNA, 312 bp, Homo sapiens
tgcccacccggtgacttggcgagcattccagtgccaggaacgacggacagccacattacatgacgtgtgaaaaacatcctctaccaaaagatgtcagccgaccacctcacatgaggctggcaggatttggggcagctccttgcttcccagccctggagaacccactccatgcctcatgagtgtgaacatgggggaacgatggcacgtggccacaccccaagccccgtctctgtttggcacccacattctttctgcctaatgctgcagcggcagacacctgccctccccacatttttctgacaagtagctgag

SEQ ID NO: 168440 - DNA, 533 bp, Homo sapiens
ggcaggggaaacctggaggccatgtcactggctggttttatctgtttcccatagagttgggagcttcccttactttctgtattccaagcgaggagtcaatgccacatctaagcaactgggcctccatcacgccaagccctccaagaccaggctcttttcctaggactaggccactctcctgggatgcaaaatgaacacaaaaaatgacctggacagcccagcctagctcaaaggagctgctgcagtcgtagcgggcatgcctgctcaaaacctcccaggggactgcccagaaaggtcaggggcacagaagcctgtgctcagagatcaggaaggggcctcaagatgaactggtccacctacccacattctagagcaaactaagtcatgaggaatgaaaaagataaaatatattactttgacataatttgagatggctgtcacagggccagcagactgaggtggccctgcaaagctgtcctttgtgggggaaatttgcatctgtagagaatctcctttaatgcagccaaggcttc

SEQ ID NO: 168441 - DNA, 440 bp, Homo sapiens
agaaggtgtggaaggaggaagagcaagagtgagggatgagaaatgcctggtttacaaaaaccaatccacttctacaggccttaatcaaaagaaagacaaacgctcatgtaaaaatccacacctagaggctctcaggcacagagcgatcacaggagaggcagagtgtgcaaacaagctttcattaagagacctgtcagctctgtttcatttctccaggctgctctgcattctgctggcaatccagccggaaaaataatggaaggacaaacacgtctgaacaggcaaacaaaggtgggaacattccacctacagaacaggacagatcagaaagatgccagggaggggggatgagatggcttttttctgagcaaacaaccatagcccctccccttaactccaaactcatcggaaacatgattttctggctttttatgcagcaa

SEQ ID NO: 168442 - DNA, 206 bp, Homo sapiens
atgatttgaaatttgaaattttccccttagtaatctttgacctcatcaccctcttatctcttaacatatagaatcagatcctagattttgacaccattcattatttcaccatccccaacatttccattttaaataggctactctgcatattgttccagtttatttactttttctagtgagaccatctctgggttttatttatttgt

SEQ ID NO: 168443 - DNA, 310 bp, Homo sapiens
acttgcctcccctgcacacacacacacacggtggctgctccatttgccagcagacgtgtgtagaacctactgcatgctgggtagatcctggggatgcagaggtgactctaccctgccctctgggagaccccaccgaaggtgaaggcatgtggagaggagagggtatggatccatcacataggtacagaatggagggaatgccctgtgccctggaaacagaagcaggggagcccaggcccggcagctggtccgggagggctctgcagaatgccccgagggcaagtgcgaggacttcccatgtcgggggtgg

SEQ ID NO: 168444 - DNA, 417 bp, Homo sapiens
gggacaagcaagcagaagtagtagaggaaaaactcctgggaacagttctgggctagatttgtcctgggctagatttgtccttcatgacagaaagaagtttatctttatgacagtcacttccatttgagcactatgaaatcgttgacaactatgtagtaaaatttcagttcatcctagaaaagcatatgtcaaatcatgtatcataaattcagatgtccctgatcatataagttactactacttggaaaattgatggtaattttgagaaattgtgactgttttaggtccacgttaggacctcaattctagttgagactgaattccctgtaattctgattaagtcctgtactgtatcctctgccacttgatccacatgggagtgccttttacaactctgtgtgagtcttttaagttaat

SEQ ID NO: 168445 - DNA, 232 bp, Homo sapiens
agcccccacccaggacccgtaaggccccaccccctgctttgagtcgttctgccttcctgaacctgagcaatgtacacctcacatgtactaactgatgccgatgtctccctaaaaggtataaaaccaagctgtcacccaaccaccgggacacatgtgctcaagacataataagactgtacctcaggccatggccaccggtattaggctcagaataaaccctttaaatattgta

SEQ ID NO: 168446 - DNA, 159 bp, Homo sapiens
cccttggtgccacttggccttctaagggctgacgctacaatgcatttccttaggcctgtgtggtaaccaagtgcatgacaggtgcaaagctgtgctatggaataagctcagagaccattaagaatatcctaagaatctctaatttcacatgttatttaa

SEQ ID NO: 168447 - DNA, 139 bp, Homo sapiens
aataaaataaaataaattcaattatttagtaaatatatatacaactgattttattaagcaagtaatatcatattttctaaaaataataaaaaaactgaggaaaggaaaccaatgtatttccttaaggtaagggaagaat

SEQ ID NO: 168448 - DNA, 341 bp, Homo sapiens
atgtgttcagaagagagaaggttatggaggctgtggaggggtgtgtggagagaagagtctggagtatcagggaaccagtctgaagagggtggggccagattgtgggactttggatgttgctctacaggcaacggggaacaactagagatttgcagtcaggggtgacatgatcattctatcagcagtgaagggagtgcaacagcatggtaggacaacagcgggaagactggctaggacacaactgtcaacatgggtgaagtgaggaccaaattgagggacagcagctggggatggagaagaggaacaagagggacttcagagaccttcctcacatcaatccc

SEQ ID NO: 168449 - DNA, 385 bp, Homo sapiens
actttggacttttctttggactctgtgtttccgaggtatgaattgataagaaatgcctaccctttcttccttcttggtacctttccctcacctacagaaaattaaaggagtaacacaatggacatctacaccctcttcctccagttaaccaattgctaaagtttgccacctttgcattttctttctctctccataaatactttcttctctgaatcatttgaaagtaagtcacagagagtatgacatttcactcgaatacttcagcatttatcttttgtagataaggacattttcctgcataaccacaattctgttacctaactttgatataataatttaaattactgtacagtccatgttcacatttacccaataatccccagaa

SEQ ID NO: 168450 - DNA, 705 bp, Homo sapiens
caccttttaggaaaatataaaacatttttattaataaagtgtatcctatgatagagttaaactcagagcccaaatgtagcaagtagttacatttgagaatcactgagaacagctattccttctcctccgacttaggctggctcatgcttgacttagaatttttcttacttctgctttgctacattagtctttgctggagagcccctcagaggagcccacagtggtctacgtagaggcgccatgaacaaggttatttactctctgcactttcgggtgtggaaagaagagtccagagtggggagccaagtccaggtctgggtgtttagtgtcttccctgacggtgacatgctgagccttgatcctgcttgggcgtggcctccttctgaagcaggttcctgcggaagctcaaacaggctgctcatcctgcttgctgctggctcacactggctactgatcccaaagctgctcaaaggccctggccatcttttctcttactcgtgtgccatgacactgtgcacatcgaccaacagaagataaaccccatcagtccagggcagctcagaagactagcaccggaatagttcgggggcactcgttaatacactgactagaattccatatcacccaaatcctaagtagcacttcatgtcaccaagtgacatcatttttcttcatagatttcagtttttaaaagttgattattaa

SEQ ID NO: 168451 - DNA, 241 bp, Homo sapiens
agcccaggaggcagaggttgcagtgagcactattgcactccagcctgggtgacaagagcgagactccatctcaaaacaaataaataaaataaaataattcacaatgtcatgttttagctgacgttgtgaattttagtaatctttttttaacctttaactccatcctgagttacattgaccaaagaatcagtatctagaattatatcaggaactactaacagggttaataaaatgaataaag

SEQ ID NO: 168452 - DNA, 429 bp, Homo sapiens
tgacatagaggatccctgttatctcattctgcaacatctattttcatgttccctgctgcctggccactaagccaatggtacatattttaggtttcaagttatggcggcactctattttgaggtattcattagtgcacactatctcctgtaacaaatagaccccaaaatgcagaatgattaaaacaccacagagatgtgtttctcacataacaagccagagtgagagctcattagtggcacgtggcttttctcctgaaaagctgaatgcagtgattcggaaacccgtgttctttacagttagtagattcacccttcccaaggcctagtaaccaatggtattcagcggtggaacgggaaagagagagcctggagagagcccatatccatactccttgcagaatgagattacacagggtcctctagatgtgt

SEQ ID NO: 168453 - DNA, 525 bp, Homo sapiens
ggtgaacacgctgccagcacccacagctgccagagcccaggagttcaagaccagcctgggcaacatagcgagatgccccatctcacacagcacactgtcaggcttacacttgtgtgcccactcacactcattcacacccagccatctcatatcctcacactcaggttctttcatactcgtatacacacactcacacactcacactctgcccacacacgatcacactcacatgctcaagcattctcactcgagcacacttgcgtgctcaaacgctcccacacctcccaaagcactgggattccaggtgtgatccactgcacccagccagtattttcatacttacacccaaacatgatcccatgcatactcagatgtttccaggctcacatattctaacacaatcacatccacacaccagaacaccaccgcatgaatccactagtgtgttctcacactcacatttgaatacgtcgtgctcacatgctagggcgttttcacagtcacactcaaacatgaccacactca

SEQ ID NO: 168454 - DNA, 235 bp, Homo sapiens
ctctcagaagaaactgataaggggatagagaaagcagaacagggaatgtgcttcctagccaagcagaattgcaattgcatgtatcaaaagggtagcctcaacctgatcccaaaggtaaattctggagagtaaattgtggctcagagtttgctcctaactaaagtaagagagctgagcttccaaactcccatacccattacacatcagctagagtcttagggttgaggatgctcag

SEQ ID NO: 168455 - DNA, 499 bp, Homo sapiens
agagcactaatgaattagattggtgcctttataaaagagattccagagagcttgctcatctcttctgccttgtgaggacacagcaagaagtcaccatctgtgaaccaagaagtgggacctcatcagatgccaaatctgccaacacttcaatcttggacttcccattctccagaactgtgagcaatacatatctgttgtttataagccatctagtctatggtattttgttctagcagcccaaacggactaagacaatctccccattaatttaggtcttatttctttcaacagtgttttgtggttttctgtattgcaccatttcattgatggtattataaatgctagttttaaattttcaattttttagtgctagtatataaaattatttatatttatatataatttatatttgaccttgaatcctgcaaactttttatagttatctattcctgtaactttttggaatattctacataaacaaatcttatgctctgtatta

SEQ ID NO: 168456 - DNA, 210 bp, Homo sapiens
aagctgttaaaaaataattcacctcattattaaacaaacagatgcacagtaagaccaaatgccacttttcactcaccagacaggcaaaagttaacttgtctgactgtttttgacatgtgttctctgaagtggtatgtcttgttaaactaaactcttggtaagttatactgattacacttgtatgaaaagtatatgaagcagtttccaaat

SEQ ID NO: 168457 - DNA, 214 bp, Homo sapiens
cacaaagccaagatcaatagagctttggcaaacagtaataatctcctgcacattctatcaataggtactcagaaaacatagcttgatcttcatggacctgatgattgggcccttagcctgccttttgcctttctctgattgaatgtcaaaatgtcaagaaaatgcttcaatgggagtgaatttctctacagtctcctgaggaaccaaatcggcc

SEQ ID NO: 168458 - DNA, 558 bp, Homo sapiens
atagacaacatttcaaatggaaatatgcattttttcttttttcctttagtatttttgaaatgagaatatatgtggcatatctttatgttgtagagctcagtgatacaacaaatacctatgagcccagcccccagcccccagccccagaaccagagcatcaccagtcatttctaactgtcagtgtgttccttccacgttccatcctgcctcgcccttggggtcgtcactgtcctgaagttggggctcatcatcctttggcatttaaaaggagttttatcacaaatgtatgcatatcttaacaataaactggttaatcttgcttgtttttgagctttatatgaaatggcatatagaatggagttgtctgggcttgctttttcacttaacattataaatttctgacaagaaaatttgtggatctcattttaaggaagagaatggccccatatacaaatcatttttaacctctactatagatatgtgatacacaagaaatgtaagaaatacatgtagaagcttaatacgaaatatatcactttttttattagagtcagagat

SEQ ID NO: 168459 - DNA, 507 bp, Homo sapiens
gtccccgtccagtttctgaggacaagagccaccacctgtagcaaataaagacccagcaaccctttgactcatctttgtgagtctctggaatcagagggtagccacatcgctgagaggtggagtgaagcactcgggtgaaaaggtacaaggaagtcagggacaggagtgtggggacatcacctagacaatgacagagaagaggggcacagccgagtgaggggagaggggccggcagtcctacatcccctggcctgaagcacgctccagggcagaaggaaaaacactgtctttggggtccaagagacctgagttcaaattctggctccaccactgaccacctgtgtaaccttgaactgctgctgcctgaacctcaggttccccttctaaaaatagaggagaaaaggatgcatttctccttgcccctgtgagaacgaaatggtgcaagcaccaaggagcctcagcaaaggtcgggcctgcccccgcctggccaaacctttcctcttcagg

SEQ ID NO: 168460 - DNA, 332 bp, Homo sapiens
tctatcacggctttagaagccatccttgatagatggttttacaactcaatacaagttttagtattatccatagtggtagaagaaatacaatatatgctatcaggtgatgatgttttttccaagctggattgtaaaaaccatagggcaagggctgtcttattcatccttgtattcctgtttcagacacagaaccaggcttggaacagagtaagtaattgtgcccaaatggtgattagaggtgggtgaagtcagggtgtgctgtcgggaggaggaggagaccctggagcagggcttccagagaggaggagaagttggataatctgtgggagagg

SEQ ID NO: 168461 - DNA, 2745 bp, Homo sapiens
tgggcggactccccatggccagaggctgagctccactcccgccggccgctccctaggggaaggggaaggagaggggagagcagcgacaggcctccagcaagcaagcgcgggcggcatccgcagtctccagaagtttgagacttggccgtaagcggactcgtgcgccccaactctttgccgcgccagcgcctggagcggagagcagaggcggcccggccgcggcgcgccggctttgtcatgatggccagctaccccgagcccgaggacgcggcgggggccctgctggccccagagaccggtcgcacagtcaaggagccagaagggccgccgccgagcccaggcaagggcggtgggggtggcggcgggacagccccggagaagccggacccggcgcagaagcccccgtactcgtacgtggcgctcatcgccatggcgatccgcgagagcgcggagaagaggctcacgctgtccggcatctaccagtacatcatcgcgaagttcccgttctacgagaagaataagaagggctggcaaaatagcatccgccacaacctcagcctcaacgagtgcttcatcaaggtgccgcgcgagggcggcggcgagcgcaagggcaactactggacgctggacccggcctgcgaagacatgttcgagaagggcaactaccggcgccgccgccgcatgaagaggcccttccggccgccgcccgcgcacttccagcccggcaaggggctcttcggggccggaggcgccgcaggcgggtgcggcgtggcgggcgccggggccgacggctacggctacctggcgccccccaagtacctgcagtctggcttcctcaacaactcgtggccgctaccgcagcctccctcacccatgccctatgcctcctgccagatggcggcagccgcagcggctgcagcagctgcggctgcagccgcgggccccggtagccctggcgcggccgctgtggtcaaggggctggcgggcccggccgcctcgtacgggccgtacacacgcgtgcagagcatggcgctgccccccggcgtagtgaactcgtacaatggcctgggaggcccgccggccgcacccccgcctccgccgcacccccacccgcatccgcacgcacaccatctgcacgcggccgccgcaccgccgcctgccccaccgcaccacggggccgccgcgccgccgccgggccagctcagccctgccagcccagccaccgccgcgcccccggcgcccgcgcccaccagtgcgccgggcctgcagttcgcttgtgcccggcagcccgagctcgccatgatgcattgctcttactgggaccacgacagcaagaccggcgcgctgcattcgcgcctcgatctctgagagcccaccgcatgccggtgcagacggatgcgaggatgcagggacgcgcgacgccggccccggtcgcagccgacgacgccgccgccagcctgacctcacaccctctgggcccgcctctggagccagcgcccagggtccctctgtgctttttcgctttcctaagctcctgtcgctcctctttgtcccctcagtttatgtcctcctgtgctcacctccctgacctctgtgaccttgcactcccctggcctgaagctgcctctctgcgcgctttctactgggctcgtctctttccggagccccagcgtctcctgcccaaattcaccgcggaaagggcccggggcggaggtgcgaccgggcgtcggcagcgcagacctcttggccttctctcacaggtcggtgcgctcgctctccgcgttccccgcccgactgccgtgcagtccatggctagacgcgccggacaggactgatggcgggaccgcgctgcccgagaaagggacggaccaatacgtgtgtttgctccgcgaaccctcttgaagctgttcagaagccgcttgccgcggggcccactaggcggggcgggggttgggacccagcgggagccggggcagcctggctccacggcctgtactcggtttacaccgcgggcggcgcgagggaggctgcgtttcctccgctatcagtcccgtcgcttcgggcacctccggccccggcggctggctaatgttttgtttgaaagatcggtggaactttttaagagagtatttaaaaaaaaaaaaaaaaaacaaaaaaaattcaccgggcaaccggggaagtattgtggccttggagtttgctaaatccaaatatgaaaatcaaaagctttagtattcctcatcttctcttctggaagatttgcgttagagtttttgttgggccttcaaaaagctgtgttcagagttaggagaatatatccaataaaagatggtttcgtctaccaattggggaagtttcaccctctccctatctgaagaaaaaaatcaaaaacaaatgtccccggatctttcgatgcaagtcctggaggcagggagatcactgcctgcctggcccacgctgctgggacggctcgtcctccctgctttttgtttttcaaacctcctgcttctcccaccttgggaaggagaaatgtgaaacccggcagcggccgacctaggcggtcttgtggcccggagccggcccggcccgaaaaccatagacctggttgtactgtagcttgttgtttgggggaccaaattttctagagagaactagagcacttttgttgtgtttttttgttttgtttttgttttttgccttgtcgttcccgaataaattttgtgttccttcttttaaaaaaaaaaa

SEQ ID NO: 168462 - DNA, 560 bp, Homo sapiens
ctagcaccttaacaatatcccaattctttctgttgcgaaatagttttgttgacagattcactggtaatcttttaagaccacagttataaatgacacatcacttttattttgcagctcctaagatgtcgtttttgagtttgatttttgaaactttgcttatatatgtgctttgctgtaaatctgtgtgtgtaaccttgttgaagtttgttgagcttcttccgtttttatatccttttttaacttgaaaatttctgtctttattttgcatttttcaccttcatgatttgttttttgtttttaatgttttcattgatgttctcatttttctgattacatttagttgtacgtgtttccatttagctgattcagcattattcaggttacattttaaaaatttgtacatctttgtttttatggttgttttctgaaaaattttaaattgtttaattagaccatgttctaatattttgtatacattataatatttgcttgttatttgaacattaaccaaaagctatttatcacaacctttacaatgttgttttctcctgacatagtct

SEQ ID NO: 168463 - DNA, 341 bp, Homo sapiens
atattaaaccagaattcctggactgtagccatctcaagcaatattgaatgcatcaaaaatttgatatgttggaatgggcactgacattggatcgtaattcttgttctaccagtaactgggtgtctaggagcaaggcatgccttcactggcatcctccttatgtaaaacaaaacactagatctctttgtctcatttggttttgtttcagtggtgagtggctttggggtgttgaaggcatgctcctgctctcccactttggtggctctatcatgcttttgggtcagggaagcatttggatgcttttgcagaatgtggagggaagcgaatgagaagtattctgg

SEQ ID NO: 168464 - DNA, 402 bp, Homo sapiens
cagatatgtacagactgtaggagggaagaacgatacaggatgcagggaatacgtgcaaaagtgcagaggttggaaattgtaagcacctacattacaacaatggcttactttgaatgcctaacgatttggatatcttttcacattattttacccttaatttgtgaccactgcacccagccaggaatgagctttcaagatgtctttattgtagtagatatttttgaggagcagtaccttaaagtggttaagaacctttgctttggtgtcaaactcttttgctattcatttgctttgtttccttgagcaagttaactttgttacctcacctgcaaaatatgaatgatgataatcatacctccctcatgcgattatgttaggatttttaagagataggacatacac

SEQ ID NO: 168465 - DNA, 418 bp, Homo sapiens
tttcttttcttttctttttttttttttttgagacggagttttgctcttgttgcccaggctggagtgcaatggcacggtctcggctcaccgcaacctctgcttcccaggttcaagcgtttcgcctgcctcagccttcctgagtagctgggattgcagacatgtgccgccatgcctggctaattttgtgtttttagtagagacgggttttctccatgttggtcaggctggtctcgaactcccaacctcaggcgatccgcccgcctcggcctctcaaagtgctgggatttacaggcatgagccaccatgcccggcctatttgtccttctttttaaaaaacttctattataaagaaatttaagtatgcaaaagtagagaaaatagtttaatgaattctgatatacccatcaaccagttgaaa

SEQ ID NO: 168466 - DNA, 197 bp, Homo sapiens
ggtctaaatggagcacctgctgctcagggcagcctgtcagacagggagccattggcctttccaaagggccaagaaatgggaaacccaatctaggccttcaaaggtaggggaaaaagtcacatctgggcaaaccaatcacaaaagcccctctgtgcaatgggcagaatgtccttcagaaagctgtcctcctgggtcac

SEQ ID NO: 168467 - DNA, 221 bp, Homo sapiens
tggggatgaagagaaaggagtgcattcagaagaagcttgtgagtgctgatcaggcggggaagaggaaactgaagaagggaaaggacttaacgctgagaccacaggatgaggcagcaggagcacaccgtgcttcattcatatgatcttttttttttttttttttttgagacagagtctcgctccgtcgcccaggctggagtgcagtggtgggatctcggctc

SEQ ID NO: 168468 - DNA, 382 bp, Homo sapiens
acctctctgtgcttcagtttcccgtcttgaaatgggatatgtgacctaatctcatcaggttaccaggataactcagtgaattaatagagataagtcccataacatgtgtaagactctgtgtgtttggtaggtgctgggcatcagtgctgtcagtgaacagagcagaatctgctgccttcatcctcccgggatggctttcttctctgctgaggctttttcaagtagagcaaaggccttgggaggctgaaatgagatggtggctggaactggtgggttttcacaccccaaaggtgggtgtgtcaaggggcagaagaacaggggcagtttctgtccgatgtccctcctggaacttggcatgtctggtttcaagaagcaggaactg

SEQ ID NO: 168469 - DNA, 202 bp, Homo sapiens
cgcgcgacttagaggatcccctcccaaggatcagaaaatgtggctaggttttgaaggcattcactgttaggtttaagtgcagctgttcattatgcgtcacttacattgttttaattgtggcgtgtgagtttcagtgcagtttaagtagtgaacatgatttcggagctacggtcctcattttctgggcctgtgtgtcagtttc

SEQ ID NO: 168470 - DNA, 152 bp, Homo sapiens
aaaatgtaagcaacaataaaggataacagattttccgagttttaagaatttaaaagatcaaatagtccactataactcagtaattcctcaaaatcctacggcttggctttctcgggcctgatggtcacaagcagagagtagtgaagccctgg

SEQ ID NO: 168471 - DNA, 294 bp, Homo sapiens
gctggtcttgaactcctgacctcaggtgatccaccagcctcggcctcccaatgtgctgggattatgggcgtgagccaccgtgcctggtcacaatccaggaatttttttcttaagagcctaagagtcttgtctttgaaatgtaaacctggaggaaaatagtgtccctatcttcctgttgcctagggagtttagcctaggcaccttgagctgttactacctgcttgtcaaggagatgtgagaagttttattttttcattggatacaggtaattaactagcatggatggccacgttg

SEQ ID NO: 168472 - DNA, 1583 bp, Homo sapiens
gggtaactcttagggtggaggtctgataacaggccggccttcattaaccagccgttggtatccaatggaatctttatgccccctatcaccctcagtcctctggaaaagtagagaaagccaacggccttttaaaaacacacctcgctaaacttaccctccagcttcagaaagactggaccactcttctaccccttgcactcctcctaattcgagccacaccccaggaacccaccaggctagacataaaatctgccaagctgccaatttcctgttacctactccagagacccagtgatatgaagacaccctagctggactgtcagttctcgttaagaacctaacccctcaaactctacaacctctgtggacaggatcctacctggtcatctatagtaccccaacagtggtcagtctacagaatcctccccactggattcatcgctccaggataaaactatgcccatctgacgaccagcctagctcctccacctcctcctggaagtcacaagtactctctcctacttcccttaaacttacccgcattcctgaaaaagaacaataaccctgtataccttttatttacagtagacctttacacagtcaccccactatttaaactctgtctacttatgcccctaatcaccattctcacctacttctaaatgccctgctttgtctatactgccagttcacgcttttcctccagaccattgtagctgatacctcatggagtcaccctccagctgctacccttaactctctcttagagtggatagatgaccttctgtggcaaagtactctccaattcttccatcctgatgaagttcttttcttttatacttactctttgtcttactcccgttctcctgccaccctctatccctccctaattatctccagaataccatcaacctcacccactccctcttcaccatctccaatccttcctatgcatttccctctcttcctcctactatacaggtgtccctgccctgccagcccactgggcaacttcccccatctccctatacctccaaacctctttcagtgacccccaactttaccctcctgaacaacttctttacttcctagaaaaattcagcaaaaactcccctgatacctcatactaacaaagtgctgttctcctcaatacgtatctacgaaatctatctccctacgtcacttccacacctcctgttcttggacccctcactatacaaacaactatccccattgctgcccccttatgcatctccctacaattacctgctggaattcccttgggtacctcccatcttccttatgttcctttactctttacctccaaggccctgccacccacattaaccaaaatattggagcattccagcttcgtattacagaaaagccctccctcatcactaacactcttaaaaacatcagtagcaacttttgcctaggaagacatttaccctggctctcactccatccttggctatccttcccctgttcaatggattcccctccaaggccttctgcctgcctgtttatacctagtcttataaataacagtgaatggctacttacagataccaaattctttt

SEQ ID NO: 168473 - DNA, 888 bp, Homo sapiens
gacgcgaggacccgccttctctctcggcgtttccgctgtcagggccctgcggtgtgactcgcgggctcagctggtccggccgtagcacctccgcgccgtcgccatgtcgcggtttttcaccaccggttcggacagcgagtccgagtcgtccttgtccggggaggagctcgtcaccaaacctgtcggaggcaactatggcaaacagccattgttgctgagcgaggatgaagaagataccaagagagttgtccgcagtgccaaggacaagaggtttgaggagctgaccaaccttatccggaccatccgtaatgccatgaagattcgtgatgtcaccaagtgcctggaagagtttgagctcctgggaaaagcatatgggaaggccaaaagcattgtggacaaagaaggtgtcccccggttctatatccgcatcctggctgacctagaggactatcttaatgagcttgggaagataaggaagggaagaagaagatgaacaagaacaatgccaaggctctgagcaccttgcgtcaggaagatccgaaaatacaaccgtgatttcgagtcccatatcacaagctacaagcagaaccccgagcagtctgcggatgaagatgctgagaaaaatgaggaggattcagaaggctcttcagatgaggatgaggatgaggacggagtccgtgctgcaacttctgaagaagaaatcagaagctccttctggggagagtcgcaagttcctcaaaaaaggattggggtgactgaagattgagggactcccgaaagattccggagatgatgaagacctggggacaccggtccacatcttcgaatccgagtcaaagggcgccacgggaaaaaacccgcggcgcccaaattcttaaagggcccccc

SEQ ID NO: 168474 - DNA, 937 bp, Homo sapiens
gacgcgaggacccgccttctctctcggcgtttccgctgtcagggccctgcggtgtgactcgcgggctcagctggttggtattttttgggcctcgtgcttcgtggtgggagacccaggtcgaggtccggccgtagcacctccgcgccgtcgccatgtcgcggtttttcaccaccggttcggacagcgagtccgagtcgtccttgtccggggaggagctcgtcaccaaacctgtcggaggcaactatggcaaacagccattgttgctgagcgaggatgaagaagataccaagagagttgtccgcagtgccaaggacaagaggtttgaggagctgaccaaccttatccggaccatccgtaatgccatgaagattcgtgatgtcaccaagtgcctggaagagtttgagctcctgggaaaagcatatgggaaggccaaaagcattgtggacaaagaaggtgtcccccggttctatatccgcatcctggctgacctagaggactatcttaatgagcttgggaagataaggaagggaagaagaagatgaacaagaacaatgccaaggctctgagcaccttgcgtcaggaagatccgaaaatacaaccgtgatttcgagtcccatatcacaagctacaagcagaaccccgagcagtctgcggatgaagatgctgagaaaaatgaggaggattcagaaggctcttcagatgaggatgaggatgaggacggagtccgtgctgcaacttctgaagaagaaatcagaagctccttctggggagagtcgcaagttcctcaaaaaaggattggggtgactgaagattgagggactcccgaaagattccggagatgatgaagacctggggacaccggtccacatcttcgaatccgagtcaaagggcgccacgggaaaaaacccgcggcgcccaaattcttaaagggcccccc

SEQ ID NO: 168475 - DNA, 675 bp, Homo sapiens
gacgcgaggacccgccttctctctcggcgtttccgctgtcagggccctgcggtgtgactcgcgggctcagctggtccggccgtagcacctccgcgccgtcgccatgtcgcggtttttcaccaccggttcggacagcgagtccgagtcgtccttgtccggggaggagctcgtcaccaaacctgtcggaggcaactatggcaaacagccattgttgctgagcgaggatgaagaagataccaagagagttgtccgcagtgccaaggacaagaggtttgaggagctgaccaaccttatccggaccatccgtaatgccatgaagattcgtgatgtcaccaagtgcctggaagagtttgagctcctgggaaaagcatatgggaaggccaaaagcattgtggacaaagaaggtgtcccccggttctatatccgcatcctggctgacctagaggactatcttaatgagcttgggaagataaggaagggaagaagaagatgaacaagaacaatgccaaggctctgagcaccttgcgtcaggaagatccgaaaatacaaccgtgatttcgagtcccatatcacaagctacaagcagaaccccgagcagtctgcggatgaagatgctgagaaaaatgaggaggggatgataaagcattgttttaatggtgaaaacttcacagatca

SEQ ID NO: 168476 - DNA, 277 bp, Homo sapiens
cactcagttacattaaatttcttctgcacaaaattggtctaattccatacatatttttgttatataccgttcacctgttctgtagtttgtcaggcaaggtccacctcatcatttgatatccagctgtagcaattcctttccttaaagcccttcacccactgaagtcatcctttatgccagggtggtaggaagtatgttaaccgttgttacagtactcatcacactatatagctgctatttgtttttctttctgcctgccagacaaggagctccctaa

SEQ ID NO: 168477 - DNA, 733 bp, Homo sapiens
aactattagcagttgtacactccaagaccatgaattactaagttgtaaagttattaatcaggggtaggtgctgagaggccacagaatgcaaaaccatgtttaagtttaagtaatagaaagctgccttcgaagagattagaatctaatatttgagacttttgtgttattcttaatgaccttcttacttatcctgagtgttttccttctttggatagctctactaaaagattaaacatataaatgaaagcaaaacctcaaactccacgtttgatcagagtatgagaagcttccattttagttccatttctgattaattcccaattataaattcattacagagggacttgatagcttttgactaaatttagcaagggatatcaaaatatatctgagctcattttgaggttcaaactgctatcctaaaaagtataacatgccataatttttcagatgaaaataccttcctttagctgcatgagatttgaaagaaacttacgcatggtcaaacgggagtgtcaggcacaacttggtgtcaagtctctggtctgtgcttctggatccctgatctagctccattttttatcccattccatggatcaaacctgacctaaggcacaggtatacctgcccccaaaaccaatgttacaataggaaaaccaattggatctacccattttactcagtgtttcttccttggtccctattctcaagatcctagttacctagcctctgt

SEQ ID NO: 168478 - DNA, 312 bp, Homo sapiens
agagacttgcaaggccccttgaggccccagacgacagcacattcttctttcccccacagtctattggccaaagtaagcctcaggcccagcccagattcgaggagtgacgaaagagcctccatgtcttttggggggcaaagctgcaaggtgacaggacagagggtgtggaacctgggagacctttctgtcccccacagccgagtggctgcagtgggccccagagctgcatcccctggcctcaaaagcagaacagccattgctgccccgctgcctatcctggtgtctcttctccggaccacacgtctgagtctg

SEQ ID NO: 168479 - DNA, 573 bp, Homo sapiens
tatagacactcatccttcaggaccattccttgataactccttacaagcttctattactcactccccagttccttaaatcttcttcctcctgtctaataaaatctttttaaaaaatacactgtctcactgtgttgccaggctggagtgcaatgaaaatgtgatcataactcatgatagccttgaactcccgggttcaagtaattctcctgcctcatcctcccaagtagctgggattacaggcatcggtcaccacacctggctaattttttgtatttttaaaagaaacggggtttcatcatgttagccaggctggcctggaactcctaacctcaggtgatccgcccacctcggcctcccaaagtgctgggattacgagtggcatgagccaccgtgcctggccccatgtacttttcaacaatgaataatgacaataggaatggagaaaaaaatagactagtccagaaaatatttagcgagtgcctctcttgagctgggcacagtggctcacacctaaaatcccagcattttgggaggccaagatgagaggattgcttgagcccaagagtttgtgcc

SEQ ID NO: 168480 - DNA, 350 bp, Homo sapiens
aagggacaaattatgagctgctgtaaaggtacacacagtctagtgagaaaccattcaattttgagggggaaactctagggaaatagagtaagttaaaggagtagagtgtgccagtatgagaaggcaactctcctggagtttgagttccaaaactcagtgggctcataggtcatggtgtgatcttagaagtcataagtgaccaacaaggagtttaataacgccttttcttatactccctctttttacatagcctttataccaagttatcatctggcagtcattttagatataggtttctaagttagacggtagggtccaaatgaagtgtttggcaaagtcatcttaatttt

SEQ ID NO: 168481 - DNA, 601 bp, Homo sapiens
tgaattcagaaaaatccaggttcagacaccggtcctaccaggtcctagccatgtgaccttgggtaagttatatgacctccctcaacttcaatttcgtcatctgcaaaacagatatacacaatgactacctgcttcctagggagattcaaagctgtcattcggcttaggcacacagcctggggccagcactgggcacaggctcaggaactccagatacccagcggcaaagagcacagttggcctcccgaagcttcagtttggaacactgcattggcaatgggaccccagacagaaatgcagtcattagaaagggaaagggaaatgtgtttgtttagttattgcttcctcagtgaggtggctttactgtaggaatatttaaacagcagcgctttgaaattgaggcagccaagatataacctagtggagatatcttaggggctttgggaacaaaagaaacagaaacaaagacctggaattcaagtgaaagaggaggacaaaaaacacaccccaaggggaggcaggtgggttttgtgatgacagtggtctcccatctgccctgtcccctgcttccggctcggttcactgtcccctctgcatggca

SEQ ID NO: 168482 - DNA, 329 bp, Homo sapiens
ttcctacatacaacatcttatagcttctatatacctcatttcaaacaaaacagaatttcataaaagcctcatgtaacttctgtttctaccaatcattacgttacatgaaatagtatttgatcaataaggcaattctgtgtcaaattttatacacaatttgcttcttacaaaagaaagactaacatctagaatttattcaaaatgtgtcgtggtacaaattcctttaatgtcgccaacctaattcataacactgtcatgagaattactattaccttgtatgagttactccagggatcaacaaatgacaacctgtggactaaattgagccc

SEQ ID NO: 168483 - DNA, 327 bp, Homo sapiens
aaatctcagaaggatttttttttaaatgacaagctgattctacaattcatatggaaaatgcagaggacctagaatagcccaagcatcatgtaatttcaagacttactataaagctctagtaagtaagacagcagatgaatagaccattggaacaaaatagaaaatctggaaatatacatgtatgacagtggacttctgacaaaggtggaaagacaattaaatgtacaaaggaaagtcttttcaacaaatggtaccaaaactattagatatttatatgcaaaaaattgatccatacctcacatgatgtacataaattaactcaaagca

SEQ ID NO: 168484 - DNA, 178 bp, Homo sapiens
agcaggaccacctgctgttggctgactgaccttgctgttccctcagactcttagggacctcctcctgccccactccaatctggacaccacgaggcaaaatgtagccaggaccccaggaatcccgtttattaatgaatcagctgttagggcagatgtcaaagtcaggcttgctatttcc

SEQ ID NO: 168485 - DNA, 285 bp, Homo sapiens
ccccatgtcactttgtcacagtgtagtttgtgactggttttctccactctgtaggttgtttattctgctgatagtttcttttgctgtgtagaagcgctttagtttattaggtccctcctagcaatttttgttttcgttgcaattgtttttgctgacttagccaaaaattcttggccaaagccgatgttgagaacgatttctttttttttttctcttttttttttttcctttttggagacagtgtcttgctctgtgcgcgggctgaattgcagggtttggactctg

SEQ ID NO: 168486 - DNA, 483 bp, Homo sapiens
cttccacctctactctcccacctgcattgaccctcagaacacagcttccctcctgcaactgcctcataaacatacctcttagcaggggtcgactgcccacttgtgcattagtaacccactccagaaattctctgtcctgtatttcccatggccttcccactagagtcttccttctggcacattaacacatacacacacacacacacacacacacacacaacacacacatacacatatattatttcccccgtcttaaaaaagcaaaaccacccttggccccactcatccctctagctatcacctaactttaacttttctcatttcctcataagagttgctttgcccactgcctccaatttctctttttcttttctcttggacccagtcaaagggagctattgctcccaccacccttctcagctgctgctttcaggtaccagtgacttttgtgttgcactagacacagccaaccactccctcctc

SEQ ID NO: 168487 - DNA, 376 bp, Homo sapiens
catatcttaaaatctatttgccgccaccaatttttgattaatgaatgccaggcagtgaaattaagaacctacaaatgtaaaatattttctaaatacttagaaatttctgttataaattagtatttttaggattaattttctagaatattctaccacatcctctttactaagcacagtactaggttggtaactgaagaatatgagaaagattcatgttatttattttcaataaagcaggtattgctgtttctaagccagacctgatcacctgtctagagcaaggaaaagagccctggaatatgaagagacatgcgatggtagatcaacccccaggtaggtgagagtgaacacaacagacgacatgaatgagaggtcc

SEQ ID NO: 168488 - DNA, 2299 bp, Homo sapiens
tttttggcggggcctttgtccctcgctgtggcctgagctccaggtctcgtcttcagcgctctgtgtcctctgctcctagaggtccaggctctgtggccctgtgacctgcaggtattgggagatctacagctaagacgccaggaacccctggaagcctagaaatggagaacctgaagtctggagtgtatcctctcaaggaagcaagtggatgccctggggctgacaggaatcttctggtgtactctttttatgaaaaggggccattgacatttagggatgtggccatagaattttctctggaggagtggcaatgcctggacactgctcagcaggatttgtatagaaaagtgatgttagagaactacagaaacctggtcttcttggcaggtattgctgtttctaagccagacctgatcacctgtctagagcaaggaaaagagccctggaatatgaagagacatgcgatggtagatcaacccccagttacatattctcattttgcccaagacctttggccagagcagggcataaaagattctttccaagaagtcatattgagaagatatggaaaatgtggacatgaagatttacagttaagaacaggctgtagaagtgtggatgagtgtaatctgcacaaagaatgttatgatgaactaaaccagtgtttgacaactacccagagtgaaatatttcaatatgataaatatgtgaatgtcttttataaattttcaaatccaaatatacaaaagataagacatactggaaagaagcctttcaaatgtaaaaaatgtgacaaatcgttttgcatgcttttacacctaactcaacataaaagaattcatattagggaaaattcttaccaatgtgaagaatgtggtaaagtctttaactggttctcaacccttactagacacagaagaattcatactggagagaaaccctacaaatgtgaacaatgtggcaaagcttttaagcagtcctcaacccttactacacataagataattcatactggagagaaaccctacagatgtgaagaatgtggcaaaacctttaaccggtcctcacaccttactacacataaaagaattcatactggagagaaaccctacagatgtgaagaatgtggcagagcttttaaccggtcctcacaccttactacacataagattattcatactggagagaaaccctacaaatgtgaagaatgtggcaaagcttttaaccaatcctcaacccttactacacataagataattcatgctggagagaaaccttacaaatgtgaagaatgtggcaaagctttttaccgattctcataccttactaaacataagataattcatactggagagaaattctacaaatgtgaagaatgtggcaaaggctttaattggtcctcgacccttactaaacataaaagaattcatactggagagaaaccctacaaatgtgaacaatgtggcaaagcttttaatgagtcctcaaaccttactgcacataagataattcatactggagagaaaccctacaaatgtgaagaatgtggcaaagcctttaaccggtccccaaaacttactgcacataaggtaattcattctggagagaaaccctacaaatgtgaagaatgtggcaaagcttttaaccaattctcaaaccttactaaacataagataactcatattggagatacatcttacaaatacctagaatgtgataaagcctttagccagtcttcaactcttactaaacataaggtaattcatactggagagaaaccctacaactgtgaagaatacggcaaagctttcaaccagtcctcaaaccttattgaacaaagtaattcatactggagagaaaccctacaaatgtgaagattgtggcaaagcctctaacccgtcctgaattcttactaaacataagaacattcatactgaagaggaaccctatgagtgtgaagaatatggcaaagccttcaacaagtcctcaattcttaccagacataagataattctggctgggtgcggtggctcacacctgtaatcccagcactttgggaggctgagacgggtgaattacatgaggttgggagttcgagaccagcctgaccaacatggtgaaatcctgtctctactaaaaatacaaaattagccatgcgtagtggtgcatgcctgtaatcccagctactcgggaggctgaggcaggagaattgcttgaacccgggaggcagaggttgaagtgagctgagatcgcgccattgcactccagcctgggcaacaagagtggcactccatctcag

SEQ ID NO: 168489 - DNA, 561 bp, Homo sapiens
tttttggcggggcctttgtccctcgctgtggcctgagctccaggtctcgtcttcagcgctctgtgtcctctgctcctagaggtccaggctctgtggccctgtgacctgcaggtattgggagatctacagctaagacgccaggaacccctggaagcctagaaatggagaacctgaagtctggagtgtatcctctcaaggaagcaagtggatgccctggggctgacaggaatcttctggtgtactctttttatgaaaaggggccattgacatttagggatgtggccatagaattttctctggaggagtggcaatgcctggacactgctcagcaggatttgtatagaaaagtgatgttagagaactacagaaacctggtcttcttggcaggtattgctgtttctaagccagacctgatcacctgtctagagcaaggaaaagagccctggaatatgaagagacatgcgatggtagatcaacccccagatggagtttcactcttgctgccaaagctgagattgcactctagcctgggccacagagcaagactccatctaaaaagta

SEQ ID NO: 168490 - DNA, 741 bp, Homo sapiens
  misc_feature (460)..(460): n is a, c, g, or t
  misc_feature (566)..(566): n is a, c, g, or t
  misc_feature (735)..(735): n is a, c, g, or t
  misc_feature (737)..(737): n is a, c, g, or t
atagatcccccggtgatgcagatgtggctggtctgggaacactgctcttcccatccttgctctctgctgcatcacccagaaagcagcaacagtgggatgcagtcagaatgagctcctgctccccagctcatgcagctgcacccagtgttcctctacctcttcttggacacgcagcctgtggcgccccctgcttcagcaccagaccccacaccctcactttgcagggtgtggttcctctctccctcagcaattccactgacttatttccagcagcaaatacacatgctgttatttctcccatctttagaacacagctttcctagccccatatcccttaagcggctgctcaagttttcttgataaccagtcccccaattcttctccgatccttcctcttgtaactgctctgaagtctactgctgcagagtgccctaatcacaagcctgtggttccatccatntttacccagtgaacacacttatggaaaagcacttagtccacagcgcaaaaatgcctagcaccttggaagccccctgcacccccttccagtgttaccctcccaggancatcagatcctgccttccaaaaactgcaaggactttgcttgtttctgaacttccataaatgaaatctgacaaaatgtacttttgtgtgtctggattcttcaactcaatgttaggtctgtgccgttcactcataccattttgatactgtagtctgttcattctaagtctngnaatt

SEQ ID NO: 168491 - DNA, 242 bp, Homo sapiens
atatgaacgatttattaccgttttgtctttttgtttgctgtccctattgtttttatacccatgggttcaggttcagattgaatgagaggaaagaggttcccccttgccttcaggggctctctcccagttttagcaaagaggacacttggaaataaaaggtctgtaaatggatttccagaacactctctgccggcatcacttgaaatatcttcctgtttccccaaggatccatacctccagtg

SEQ ID NO: 168492 - DNA, 695 bp, Homo sapiens
gggcaggggtcactgtggcagaatattagtgatggcttcctggagtggcaggccacagccaccccacccttaaaaaggcagttgtactcattgaccccagtcctcggccctccctgttgcctcccagacaagatgtccctgcagattttttttttttttttttttttggaaaggggtttccgctctcggctcaccccgggcggtggcagtagtagggggtgatagacctcacgcatacactggacaagccccgaccaccggggttcccacgccatttcctccgtgccgtcagaacctcccgagataagaggggcataacgggcgaccaccatgtgcgccgagcaaaaataggatattacaacgaaaaagagggggtacccacccaggggctctcaaaatctccaacactcggagagtcccgccaccacatcggcccccccaaagggctgcgggaataacggggcaaataaccccacgcggggcccaagccgccccgtgaaaaatttaaaacgcaggaggaggacttccttcggcgcactggcaatctaaccactcgaggtcttggcatgcacagctggagggccgaacctggggatgagcccaggagggtccactgccccacaattggacagccaggtgccgaacccaacagaggacgggcccaccgtgacaaacgccctgaactacacaagggc

SEQ ID NO: 168493 - DNA, 1178 bp, Homo sapiens
tataggaatgtgcagtgtagataccagcatacctcaactagaaatgcatcattcatgaaaagccagcaagagcacttgtgaatttggaaatggcctggttcatagaaaatatgtgcttttttaaaaatataggactgattgattgattgataatagaatgtatacgtccatataaaatattccagcttcctgacaaccagttatttgcactgcttcctcggttgcaagttagaacagacataattgtctaatctacatctgcttaaaaagttaagctgttgtctttgcccagtttttagtatttgcaaaggatgacaatgcatgatttatgtaatgtatttttgagatgtaataagaatacgatcctagacaaatcagtttaggcatctgtttttatatttaaaaaggagtgtttggactatctttagggcgactactgtctttaacttctaatatacaagtagaacatgatgaataatgaataaattatttaggacaaaaaaaattttattagaagcatctcactagaaaattaattagtgaattcaaaaacaattcaagttttatattgaagagctaactgactcaaaggaaaggctattgtaaatggagataagtaagtcaccacacctatgaacagccagagagccctgtgataaatcaaatttttaaatactaatttaagggaaaatggtttgtattcagatgtaatttgtacacagtaaaatgtatcgattttaggattatagttactcacttttgataactctctacacccatgtaacccttacccaatccaggttaagaacccttccgtcattcctcaagggtcccttgtgccttttgcagtgaatttattcccctcttggtcccgtcccagcaaccattttctgatttctgttgtcttagatgattagttttgcctactcttgaattttatgtaaatgaaatacacagtgtgtcacctttgtgtctggcgttgttgctcagcgtctctgtgggactcactcatctacgttgtgccaggacccatagttttctttttgctactcggtagtgtttcattgcatgaatgtaccacaatttgtcctttctcctctttatggacatttgttcttttacagtttggggctgttgttaaataaagttataatgaacattctttgtggacttatgtt

SEQ ID NO: 168494 - DNA, 1196 bp, Homo sapiens
ccagaggatcccagtggaagatgtgctacaacaggatctagaagaatatgtcaaactataaacggttgtgatgtgaatgacttggttcttggcttgtgtttttcaatttcctataatgcacattcttccaaggcttttttaaaaatataggactgattgattgattgataatagaatgtatacgtccatataaaatattccagcttcctgacaaccagttatttgcactgcttcctcggttgcaagttagaacagacataattgtctaatctacatctgcttaaaaagttaagctgttgtctttgcccagtttttagtatttgcaaaggatgacaatgcatgatttatgtaatgtatttttgagatgtaataagaatacgatcctagacaaatcagtttaggcatctgtttttatatttaaaaaggagtgtttggactatctttagggcgactactgtctttaacttctaatatacaagtagaacatgatgaataatgaataaattatttaggacaaaaaaaattttattagaagcatctcactagaaaattaattagtgaattcaaaaacaattcaagttttatattgaagagctaactgactcaaaggaaaggctattgtaaatggagataagtaagtcaccacacctatgaacagccagagagccctgtgataaatcaaatttttaaatactaatttaagggaaaatggtttgtattcagatgtaatttgtacacagtaaaatgtatcgattttaggattatagttactcacttttgataactctctacacccatgtaacccttacccaatccaggttaagaacccttccgtcattcctcaagggtcccttgtgccttttgcagtgaatttattcccctcttggtcccgtcccagcaaccattttctgatttctgttgtcttagatgattagttttgcctactcttgaattttatgtaaatgaaatacacagtgtgtcacctttgtgtctggcgttgttgctcagcgtctctgtgggactcactcatctacgttgtgccaggacccatagttttctttttgctactcggtagtgtttcattgcatgaatgtaccacaatttgtcctttctcctctttatggacatttgttcttttacagtttggggctgttgttaaataaagttataatgaacattctttgtggacttatgtt

SEQ ID NO: 168495 - DNA, 369 bp, Homo sapiens
cggcgacctagaggatcccgtctgtccatctagagaatgctgactatacaggattgttttgactcttttcactttgtcatttgtgtatcagagtttttcttttgtggttactttgagacttgcataaaatatttgtaattgtaataatctattttaagttgatacaacttaacttcagtcacatacaaaaactctacactttacttccctctctcattctgtgttcttataatcagagtttgatactttttgtattgtgtattcattaacaacttttttaatttttaaaaagtttttattttttatttttttttgaacatttaccttcaggggcacatgtgcaggtttgttacataggtaaatgtgtgt

SEQ ID NO: 168496 - DNA, 143 bp, Homo sapiens
agtcagtgaagaaacataaaaacagtcgcatagaatgatgcacagagatttagaaatagcaccataaaagctctaaacagggagattccacctggagacatcagcaaggcttgcagaggagagagaactgaccatcgccgatc

SEQ ID NO: 168497 - DNA, 144 bp, Homo sapiens
gtggagagagagcctgcaagagaattagcacgcacctcgtggatcttagtaattgttttaaagccaaataaaactgtttcttgaataaaccaatacatttctgaagttgaaaagaatcccaaaggaaacgaatgaacatccttg

SEQ ID NO: 168498 - DNA, 631 bp, Homo sapiens
gtctgtatcctgttctttgatctgtgtgtctattgctcaccaatgccacatcgtcttgattactgaagctatgtagttaaccttaatattgagtagagtgactccttcaactttattattattttttggattgtttcagctaatctgtagcctctgcctttccatgtaaattttagattaaacttgtctatgtttactacaaattttgctgagattttgacaataattttatgaaatctatagattaatgggaaaaattgatatccttactatattgagtttcactttctttttaaaatatattttctccttaacgtccataccagtacacccatctgggtttctctcttttgctgctacctttatcttatccttctgcctcatcttcctctacctagattttaagtatcagtttcttgaagttcaatcctagaatcactttttcctctctatgtgctctcagactgaacacatcaacacccatctcttcaatgaccatcaaagcaaaaataatgacacacacaaagactcactcaagtttatatccacaagctacttctcttcagaaccctggacattatatgaaattgcctaactgaaatctctgcttgaatatcccagagacacctta

SEQ ID NO: 168499 - DNA, 494 bp, Homo sapiens
agatggagttttgctttgtcgccccagctggagtgcaatggtgggatcttggctcactacaaaccccaccttccgggttcaagcgattctcccacctcagcctcccgagtaactgggattacgggcacacatcaccatgtccggctaatttttgtagagacaaggtttcaccatgttggccaggctggtcttgaactcctgatctcaggtgattcgcccaccccggcctcccaaagtgctagaattacaggcgtgaaccaccgcatccggccaaatatcatcttcttactgaggccttacctagcctatttaacactgtaacctacccatactcttttggtaccccttagctaaatctttctccacaataatagttagtattacaaaatttttaaaacttctctcccccactcaactaaaatgttagccctacatgtgtaaggatacacgtttttgtgtatcttattcactgttatatctccagtgcctagaac

SEQ ID NO: 168500 - DNA, 361 bp, Homo sapiens
ggaatccattgtagacttggtttaaatgactgtctttggttatgaatattgtttctaaagagtaaagtcacatgagtacattcctggtaatataccagaggtcaaacagcccaacaaatgaagagtttgaaatgtagataatttaaagatgaagtactagcagtctgtaagcaagccagtattgaaagcgaacgtcactgaggttattgatgaattaaaactaatggataggggtgagaaataaattagataaaaatgcagcaccaaaaaggagagagatgttatctggaattcactgtcccttacatatttagttaattcttgttgatgttgctgttgctttagatgttgtggtatagat

SEQ ID NO: 168501 - DNA, 387 bp, Homo sapiens
agacagagtcttgctcttttgcccaggctgaagtgcaacggcacaatcttggttcaccgcaacctccacacctctacctacctaccaggttaaagctattctcctacctcagcctcctgagtagctggcattacaggcacatgacaccacgcctggctgatttttgtgtttttagtagagatggggttttgccatgttggccaggctggtcatgagctcctggcctcaggtgatccacccgcctcagcctcccaaagtgctgggattacaggtgtgagcctccacacccagccatccattcttgaaagacagtttcattggatacataattctaggttgacgagtatttcctttcactctttgaagaaatcattctggcctccattg

SEQ ID NO: 168502 - DNA, 378 bp, Homo sapiens
agggaaagaaggttctggtggaaggaaggtgcccatccactgtgatggtgtagtcttgtagatgataactttatggggaaccagcaaaaagtggaaggtgactgctgtttcaagcttgagttgagggaggaatattgagtagtgtgtttgaaacaaataagtaagtccagtagaatgtggagtgtgtgcgtttgcttcttaagaggagaggatgctatgaaattaattttaaacctgctgaggatgaaagaaatcaattgaaagtatagaatcaattaatagtagaggtcgtagggaacatgaagatttcccagttgtagagattgggagattggagcctgggaattggattggctgttctgttctgcactcagcccg

SEQ ID NO: 168503 - DNA, 249 bp, Homo sapiens
tccgagctcggtaccgggtgtcatgaaataagtaagtccagtagaatgtggagtgtgtgcgtttgcttcttaagaggagaggatgctatgaaattaattttaaacctgctgaggatgaaagaaatcaattgaaagtatagaatcaattaatagtagaggtcgtagggaacatgaagatttcccagttgtagagattgggagattggagcctgggaattggattggctgttctgttctgcactcagcccg

SEQ ID NO: 168504 - DNA, 396 bp, Homo sapiens
  misc_feature (18)..(18): n is a, c, g, or t
  misc_feature (26)..(27): n is a, c, g, or t
  misc_feature (31)..(31): n is a, c, g, or t
  misc_feature (42)..(43): n is a, c, g, or t
aagctgtatgtaactcangggcgagnngcangtgactcaggnncgagctgccagtccatggggattgtaaacctcatagaaactgccagaggttgaacatggaagggtttttctctgttctacaaaacgaatctatctgggcgctggctgccatccaggatcacagctcctaacctcgggttcattccgtaactgggaaaacctgcctgtccggctttgatggcctcgctggctacactggccctgtagaagcctgaaccttctctcttttcttccattccctcctttttctccttggcagtttaaatcttggttcagagtgtatctcacccttggaatgtttctctctttgattcagtatctccatgtaaatcgaccgctcctttacaaaggagg

SEQ ID NO: 168505 - DNA, 563 bp, Homo sapiens
tattctctatctcctaaataactgcatcacccctataagcttccattttccttcttcaaagccagtaatataattttattactgagttttgaataataattaaagcctttaaaatgttctatatccagagatggatgatgtttgattttcatgaggtcttctgggaatgttactgccagattgccaatgaaatgtcggccttttcatgaaaggtatcacattacttaatggattcaacctcttgtccctggcattcaatagattaattttgtttttattggtttctgaccaacaccatcctcaatacttgaagttacacactgcccataaaggattaattttacacaagaatatcaccaagattaaaaaatggggtgggtggggaaacaaaaaggaagtaagatatagagctccagctgaagtgatcaatagtaatctacatttcacttgtttttcttctcacttctctcactgtcctgtcatctctgcatatctctttttgcaaattatagcattgttttggtttacaggcaactcaaattttgaaggtgattttagctaaa

SEQ ID NO: 168506 - DNA, 536 bp, Homo sapiens
acttgaggtgtgaagtacttacactcctaaatgtacaggctgattaccccttatctgacatgcttaggatcagagatttttctgatttaggaatattttgcattacactggttgagcatccctaatctaaaaatctgaaatgcaaaatgttccaatgagcattcctttgaatgtcatgttggccctcaaaacgtttcaaattttggagcatttaggattttcagattacggatattctgcctgtattacctctcccccaaattgctacaacttaagacatattttaaaataattttataatttaataacaataaaaggtaccaaattagaaaccaagccttaaggttacagtgtcagtttttccatttaaattagtttccaagaagattgtttacattctatacttaattgcaagaatattaagtatgtttcctattcaattcaacctgtattaacagatacttcatgccattctatggtaaaacagttgaatttgtgaataagataaaccttaattaatcaccaaaagaactaaa

SEQ ID NO: 168507 - DNA, 478 bp, Homo sapiens
tgtttgggatggaattctgccagcatgctcctgatgtaaggaaaggaaaatttacctcttgccaagctcagcatttagaagtgtatctggtacatagtctgtggtgtgtgtttgttcggtagataagaaatgcttatgaccaaaggcatacttcagttgggtagatggtcagctagcaaacatgtctagtaccaaacatagtgaggcaagtgtctcgagaggttacagaggacttaggagagagactgaccagaacagacttcatggaggaggtagtgtctagggaccctggtgaaccagcggggaggattctagaacaagatatccaagcccttgtcacctctcttgagctgtggccacagcctccctcctagcttcccagcctctcgtccctctacagtcagactgattctccacacaaccttcagagtgagcccatggtttaaaacccccacagtgtccccattatggacagaaa

SEQ ID NO: 168508 - DNA, 428 bp, Homo sapiens
ctaggaagtatttcctgctattttacagatggagaaactgaggaacagaggtgctgagtcatcggctgaaggttactagctaggggagggaggatgaacgactgcaagtacatgctggagggggccagagccacagccagtgtgcctgcccttttaccacccaaaaaagcagctcttggaagaccagccaaggaaactggcttgctctgcttggagattagtcccatgtaatataaacagctgatcgcagagactttggaaaacaggactgggagtggagcggggtggggtgagtttttgagaacttggcttgttttcttgctggttttcttaccagtctgcaggagtcattgatttaatgtccagcctctggtcatggggaattaaaatggtcacagggaaaatagaattaaaatgcttggaaaatc

SEQ ID NO: 168509 - DNA, 1525 bp, Homo sapiens
  misc_feature (1384)..(1384): n is a, c, g, or t
aagtcggagggaggaggttgctcagagtggggtgttgccctctgcgaggatttggagtcccctggcctcccagcagggagtggagaggcattcccagaagcatcagcttcgggcatctccagaaccctggcttggtccctgaccaaggagtgtccccaactgctgaataggccaggagtcgcctttctctaaggcttacatctctccctctggggtgtgtcctgcccctccctgagtcaccccaaggggagagaggggaaaaaagggaagagaagagaggcattgactacagaggaaggaaaaggaagcagagcagaggggggagagaggccacacaggagtgggtgacagaggagactgcagagggcaggtctagggcagaagatcgagagagggcaggcccaggtcaggaggaggtagagagagggcagccggagcaccccaaggggtgcctcaagagcaggtgggggcggggagccgagggggcgggccggccatgtcccacgggacctactacgagtgtgagccccggggtggccagcagccactcgagttctcagggggccgagctgggcccggggagctaggggacatgtgtgagcatgaggcctccattgacctctccgcctacatcgagtctggggaagagcagcttctctccgatctctttgccgtgaagccagcgcctgaggccagaaggctcaagggccccggaacccctgccttcccccactacttgccgcctgaccctcggccctttgcctaccctccacataccttcggcccagacaggaaggcgctggggcctggcatctacagcagcccagggagctacgaccccagggctgtggcggtgaaggaggagccccgggggccagagggcagccgagctgccagccgaggcagctacaatcccctgcagtaccaagtggcacactgtgggcagacagccatgcacctgcccccaactctggcagcacccggccagcctctgcgcgttctcaaggcccctttggccactgccgcacccccctgcagtcccctcctgaaggcgccctccccggctggccccttacacaagggcaagaaggcagtgaacaaagatagccttgagtaccggctgaggcgggagcgcaacaacatcgccgtgcgcaagagccgagacaaggccaagaggcgcattctggagacgcagcagaaggtgctggagtacatggcagagaacgagcgcctccgcagccgcgtggagcagctcacccaggagctagacaccctccgcaacctcttccgccagattcctgaggcggccaacctcatcaagggcgtggggggttgcagctgaggctggctggtggattgtgggcaccaggctccctggcacggnctaactctgcggacccccatcctgctgggggcctagaaccctgagacatagaccatggataaatggcaaccggggtggcaaagagggcaggacccagcataatgattatatggctgaataaagttgcactgtgactgggtg

SEQ ID NO: 168510 - DNA, 418 bp, Homo sapiens
gcaggatcaaggatcaaactgagaaacttaaaaacctaaacaaataggcagagcacagtggctcacgctgtaatcccagcacttggggaggctgaagggggcaggtgacctgaggtcaggagctcaagaccagcctggtcaacatggtgaaaccccgtctctactaaaaatatgaaaattagctgagtgtggtggcacacgcctgtagtcccagctactcgggaggctgaggcaggagaatcgcttgaacccaggaggtagaggttgcaatgagcagagatcacgccactgcattccagcctgggcaatagagcgagactccgtctcaaagaaaaaaaaaacctgattttataaatatgtcactgcaaaatttacaacacactctcttcctcatataactctctcaataaccttgtag

SEQ ID NO: 168511 - DNA, 472 bp, Homo sapiens
tcaacagtggtggtcccatcaaattataatgctgtattttaccataccttttccgtgtgtagatatgtgtaggtacacacatacttccattgtgttacgtctccctacagtagtcagcacagtcccatgttgtacaggtatgtggcctaggagcaataggctacaccctatagcctaggtgtgtggtaggctataccatctaggtttgtgtaagtacactttatcaagtctgcacaaggacaaagtcacccaatgatgcatttctcagaatgtatctctagcgttatgcaacacgtaactgtgatggacatgttttaacttgaagcatatccactgtgctagatgttcacacagaattatggtccttttagcaactaaaatagaattctaaagaaagacaaccagctgggcgcggtggctcacgcctgtaatcccagaactttgggaggccgaggtgggcagatcacgaggt

SEQ ID NO: 168512 - DNA, 298 bp, Homo sapiens
aagaattttcttcttatgcagaaagaaatagatgggttgcaggtagtatttagggtacttctgaaacatgaacatagagagatgacatcttaatgatttcacattttaattttagcatcttttccacaatatgataaaatgcatatgtttttaacccaaatgattaatttgctttaaaactgattaattatctagaggaaggtttagaaacgattgacattttgggctgggtaattctttgttgtgaggggctgtcctgggtattgtaggatattcatcagcatccctggcctctgct

SEQ ID NO: 168513 - DNA, 326 bp, Homo sapiens
cggcaccagggaagccaatagtgtaactctcagtctgaaggcctaaaaaccaaagcagctgctggtgcaagttccagagtccaaaggccagataacctggagtccaaaggcaggagaagaagggggtgtcccagttccaggagagagagaaaattcaccttccctctaccttattctattcaggttgcccacattgagggcagatcttccccactcaattcactgactcacataccaatctccagaaataatgctttaccagctattcaggtatctcttaatccagccaagttgacacctaaagttaaccatcaggtcatcctttg

SEQ ID NO: 168514 - DNA, 269 bp, Homo sapiens
tggtagggaaaaaaagaataagaatagatttccagggaggagaacaagcatgcacaaaggcacagaggtgtctttggagcactagtgagcagccagtcaggctagagctatggggttaatgcagttcactgagtgaagatcagaccatcgctcccagttctctgctcgctgtcaggtgactgggcagtaacttcccccagaatgggtgaagcttatttccttgcttcacttacgttgggtttggccatgtgacttgctttgaccaaaag

SEQ ID NO: 168515 - DNA, 446 bp, Homo sapiens
caagctatccggttcaattgagacgagcaggcttagggaaatgattcatctgtaaacaaaatattaaaacctaagaagcctatgaatatacgatgtgattagatttcctttattatctgacattggcttgaacctccccttaccaggaagaacagttgcctctcccaaggcagccccctagtgcgacatgtctgtggtgtgctctccactaggtccttgtgtttgtagcactgcctcctctctgagccattgtcccatcagctctgttactactgacggctgccctgggcacagcgattcttcactgcatctacctaagctacctccattgtggcttcagaagagaccttcttccatggatggctcacaggacagttgatgccaggatgtcatgagccgcagaaagagaagaaacattgaaccggatagctcagcataagtcccac

SEQ ID NO: 168516 - DNA, 304 bp, Homo sapiens
tgatggccaaccaccattctgatttctatcactatacactagtttgatctgtgtttggacttcatgtaaatgaaatcatacagtatatattcctttgtaactggctttttttaacctaagaatgtttttcaggcttatccatatttttatgtgaatcagcagtttattcatttttattgttcagtaatatatcaatgtgtgaatatattatccattcgtctgttgaagtcatttgagttctttccagtttcgaactattatgaataaagctgctaaaaacatttttaaaacaagtcttgttgtg

SEQ ID NO: 168517 - DNA, 445 bp, Homo sapiens
caaagaagattcattcaagtctgatattaaaatatatggttacctcttaattcccatactgcatcattgtgtagctcatgtctcatgatgctgacatttcaggagcatgttaaggaggtgtcagagtgaaggaaggggcatgagacttctcgtggacaggtctttgtctctccacttctgttagctctccatctataagcagattagtcctttttcagttgtctgagctgcagatacaatttccaacattttcattggtcacttacttcggttatgattttaaaaacatgttattgtcaagcacaccgtttttataaatttgaatttgtcagtcttttatggcttatgtattgagttatgattaaagaagtcttacctacatgagataatataaaatgaatctatgctgtcttatactattaaattatttcatttgtaaacatgt

SEQ ID NO: 168518 - DNA, 277 bp, Homo sapiens
cggcgccgggcccgctgggaactgtagttttcgtgaagaaacacgcgtcttgttttgggtgtcatggcttggcagatccgccaaaacaggcaaatggcattacacaatgagtatttatgcttcctgccgccaccaaaaggaagttcactgccatgctaaaagtttaacaaagaactccataaagaaacacaagtctcacaacaaaaagccaacttcccacctcgttaccagagttggtttaaagtggtggcaccttatcatttctcatgaccagttt

SEQ ID NO: 168519 - DNA, 272 bp, Homo sapiens
agtttggttccaggaaatctaaatagttttgtggctgtggatgccagttacagagtcatcatgtaaaaagatgaagagtacagtgggagggtactgataaagtccaggggaatgagagtacccactaaagcagatgtgagctctgtgtcagagtgcaaatatgggccctgagccttctgggcactaagagctcaagggtatgcatgagggagtggcttggagtggaagttgagctaggaccaaggaaaagagggactacactaaagtcttat

SEQ ID NO: 168520 - DNA, 394 bp, Homo sapiens
taatttacactaatctccaacacattctattatctgaccaactacagctgtttaggaagttgtttcccaaacatggagctgtcaactgctattttttcacatgcttgtaatttcttttaattatcttcctctcttgactcaccggcttgacccatatagacatttaagcttgtggttcttgctttatttagagcagtagtttttcagattgtgggttgtgatctatttgtgtgatccgttagtgaataaaacaaaattttgtggagcataatcagcattccaagggaaaggaataaagaaaaagtagtatagaccattgtttctcagttgtgggccattttgcctgccctgccctgaggacatttggacatttgcagtgttggagatatttttg

SEQ ID NO: 168521 - DNA, 305 bp, Homo sapiens
acatattttaaaaagaaatcttgtatcataaatgaagcttaaatttatatttttaaaaaacattctgttttaaatgtttctctcttcccttcctttggaaaatgctgaccttggaaacaaaaatcagatgcagccacccaccctactgctgcccaagccaatcctaagtaaatcagttggcttgctgggaagtttccatgaccgaaaagaaaacagaattcacttcaatttcatcatcaaagtccacgaaagcttgcaaagcacttccatatccttctcaatccatcctcatagtctcctgaatt

SEQ ID NO: 168522 - DNA, 428 bp, Homo sapiens
agggtctcagcttactgatctgtaaataaggagggtgaggcccatcgcctctagctgtccatcctcgtgtccatggggctcctgcagggtgcctgcaaaacctgaacccttccgacaaagatcagcccaggcaggtgaggaatcccaaatatagctgcagaggccggggtgaccagccaaggggagggaagggaagactcagggtgaaaaagcagccttccagtgtctgcagggctcttagtggaaagaggggtgaaccttgttgaatgggggtaagtggggacgtgcgggccaagggtcaagactggaccgagcaatgcagttacagagattccagatgaaaacagcggtcagcttcgagcaaagttgtactacaataaaataggcatccatacaaggtaatgagctcactgtccccacaggtaacc

SEQ ID NO: 168523 - DNA, 364 bp, Homo sapiens
agacctagggcaggttgtggggaggcctccaaagctcaggctccatgactcagccaggatcccaagaagggcctggagatgcatattgtatcttgggagctctggttgagcttcagtgagaagggctctcaacagagaacttcttgttggtcagttaattcaagatgacgttgggaagcatcagttgccacttcccagcagaggagtagtttttattttcccagcaagatggaaccaggtttgaataccagtctccccatttcctagctgtgtgcctccatggacaagttacttaacctctctgttttcccatctgtacatcaaggacagctactcaaagaagggttgtgggtattaaataaga

SEQ ID NO: 168524 - DNA, 273 bp, Homo sapiens
cggcacgagggctggcagggctccaaggaccccacgttttccctcccaacacaatgtaggctcaataatacttccttctcagaaggaggctcccgggggtgagcagcggctgcagcagctccaaaactacccttggctacccttggtaaccccaacgcaggtccagctctatgccctctactgaaggctttgggggactggataggctagtcctgcccccacctccccaagtattacccctcctaagtcctgctaggggacgtattcagttca

SEQ ID NO: 168525 - DNA, 218 bp, Homo sapiens
tggcaatctgaggcacactccaaaccctaggtgtgcaatcttaggcacagcccaaactcaaacccaaggcctcaaggagataaaaaaggagtattccaggtcctgcacaaccaagttctgaaactgtgaaaacatccagtcacacctcacacctttagcaccaggcccagaaagggggtcagggtggtttcatggatgtgtgaccttgtgcagtctca

SEQ ID NO: 168526 - DNA, 855 bp, Homo sapiens
atctttacctgtattttatattcgtataacctctaaattttacaaattacccataatacatttcttatataattaaaaaaattctgagtacagaacaggaaatatgttcaatctttattccattagagttctacttggaaagtattaatatgtaaggtttttatttctccataagaaatagacctatatagtcaggcacagtgtctcatgcctgtaatcccagtgctttgggaggctgaggcttgaggattgcttgaggccaggagtttgagaccaacctgggcaacacagcaagacctggtctctacaaaaaaattcttaaaaaatttagctgggtgtggtggcatgctcctgtggtcctacctacttaggaggctaaggtaggaggattcccttgagcccaggagttcgaggttacagtgacctatgattgtgccactgcactccagcctgagtgagagagtgagacattgtctccaaaaaaaaaaaaaaaaaaaaaaaaaaaagaaaagaaagataaatagatctatgtctagttaattcgaggagatggtacacatttttagagcacatgagaacgaagtttatacttttctgattttctgggtttccttgatgattttttggcaaatccttgtctgtttagctgtctggcatatgtatgactgtggttgggcttctttgtactcaaccaatgaatgcataccaactgtaacacctgaaggtaggatcatgaataaatactctgtgatttggggttagtatagttttggttgttttcccttctcctgagatttcagaaataaaagattcctattcctgtgatttttttggcacacagtaagacatatttga

SEQ ID NO: 168527 - DNA, 217 bp, Homo sapiens
tatcagcctggagacaccatggacagagcttccacctctgtccttactgaaatccagcactctgagttatttttgccactgctttgtttctatctctgtcctctatgaggttattttttcccagaactttaatgaatcataattgttggtggctgctacatctatatgagctatgcctgatgttcctgcatatcttgttaagtttcttactaagaca

SEQ ID NO: 168528 - DNA, 425 bp, Homo sapiens
agcctgagcaaggtaagactccacctctacaaaaataaaaaacaaactaaaaacctggcatttttagaatgcttaagtcattcaaatattaaagaaaattgttaggccaggcgcggtggctcacacctataatcccagcactttgggaggccaaggcaggcagatcacctgaggtcaggagttcgagactagcttgaccaacatggtgaaacccagtctgtactaaaaatgcaaaaattagccaggcatggtggcacacacctgtaatctcagctactcaggaggctgaggcacgagaatcacttgaaccagggagatggaggttgcagtgagctgagatcgcactccagcctgggtgacagagtgagattctgtctcaaaagcaaactaacaaagaaaaacaatacttcctggggtttcggtgt

SEQ ID NO: 168529 - DNA, 484 bp, Homo sapiens
ggaagaggcatgttgggctgagttttagcggggggtcctgtataccagcggtcagcttgttctacctccagcccaaggacccctgtcttgggctgtttggccccaggcaagccagtcagtgtttctggaagctctccgagacagacatttactgcctttctccattcaccgcgtttctgccacttggccctcagagggaactggagagggatgtttccacctttcactcaccacacctctatttacagagtgacagaattgaaacagcctggccagcactggcttgggagctggggatggttaaaagtcaggaatcagcaaggttagccaggcctcccaagggctgagggcctcactccacttccctctggctctgctagaaaatgcttgtggtagagggctctgcccagcccaattctggccccttttgaatcttgttcagtcttcttcagggtgtgtcccttggctgcccattttgagagga

SEQ ID NO: 168530 - DNA, 415 bp, Homo sapiens
ctcctgcatctttatatttccttttcacatctgtttctctcattcccccatcttcaccctgtttcctgttcctttctctcttccaaaaattctactttactgtcaattgaacaaaaatattgaacatctacctagatccagatggcctaggttcaaatcctggcttcactacctgtgaactatatgacctttgcaagctctgtaacctctctgggccttagagaccttatctataaaatggagattacgacaacagtatgactgctaaatgtgaaatgtgtagcatcgttgttggcatgtagcaaaggctacataagtgttagctgttactatatataaacattgttatcatcacattacatcaacatgggtcagagaaaaggcttgccctcagagatggttgcaggtggagagt

SEQ ID NO: 168531 - DNA, 956 bp, Homo sapiens
taggagaggaatcaggattgagccttgaacacatatggccaattggagaaggatgagcctgcccaggagattattaagatgtgaccagagaggtggaacaaagactaagtgtggtgtcatagaagtaagtaaaagagtggtcagcagtgtctgttggctactgagaagccagttacagtggaacttagatttggcaacatggacatcattcactaaccttagggggagctgtcagtgggaagcttgaaacatgccaattagatggggttgagaaatgcaaggaaatggagacagctagcgtaggcagcttttaaaggtatttggggagagagacccagggtgagtctctttaaatggtaaagaaaacttaccttattcaagagttccagaagaaggtggcactagggttgtatattcagtggctcaacaatgtcatcagagacttagatttttccagcctcagtgtgtgacttggtcctcaggctgtcccctcagaatgtaggatggctgctgtaattcagacatctttagcagaagaaggacaactttgtcttatgtcctttaaaaaaaatcttaatacacatgctgaaaagtatacaagtgttaagtgcagctggaattttcagaagtcaaacaactgtaaccagcatgcagatcacaaccccagtaccccagaagttcctcttagtcatgaccctcctcctagtcatgatccatctcctcccccaggagaactaccatcctggcttccagtggttaattttgcctattttagtacaatgtaatgaaataatatactatgtgttcttttatgtttggttttcagcatcgtttttgagatccatattgttgcatgtagttgtaaagtgttcatctattgcatgaatataccacattttatccattctattgttgatgggcatttgggtagcttctcctatttggcttttacaggt

SEQ ID NO: 168532 - DNA, 519 bp, Homo sapiens
caggctgacacagttggctcatccctgtgatcccagcactttgggagactgagatgggtggatcgcttgacctcaggagttcaagaccagcctgggcaacatgacaaacctcatctctacaaaaaataaaaaaaatgtaaaatttaaaaaaacccctcagaatcctcaaatggtataaataatcccctctcaatatactctttggctttaaaagcttaaaactgatagttatattttggccattgcttaagtagctaattttgggagtggaaggtatcttctttccataaaagaaaaccagcaaacaacaatgtgagctgaattaatttttgtttataatgtaatttctctgtttgtttggagggctttttctgtgggtgcttcatagatttagccatgatgatttccattttagatttatgaactgtccgggaaggaattctgttttaatttgtcacaacaccacagtcccttgaaggcatggattcttaatgcatctgatgaggagaatgtaatttt

SEQ ID NO: 168533 - DNA, 360 bp, Homo sapiens
cttaaggcttgttcaatttcatttcttgttatcactcagtagtcaaggagaaggaagcatcaaatgtttaagaaaaaaatactaaagaacttacattcaacatatatcgacaaacttttaaaaaactgaattggaaagttgccataaccagtttcagtgaaggaaaacctcaagtcagcccccataataatggtgttttccaggaaattaggtttagggtaagtggtctgttagaaattctgaaaacatttttcctctttttaaaaaacaggtcacagtaaaaattaatggcttccttcaagtacccagtacactcctatatacatgtaggtagaccataaattaccagtgagctccaat

SEQ ID NO: 168534 - DNA, 622 bp, Homo sapiens
gaaaaaatggatttgatgagctagaagttagagagccccattccaagtttgataggcaggaaaaggtacatgaaagtactgtttcagaacaacaccgctacaagataggaagagagatgagagaaagggaacattgaaaagctcaaagagtgatgatgagaaacaacccagatgttgataaaaagtgagacctgaaaacaaattgattaaaggagacaaaagaaaaggaagaataaaagagctcaatatcttgagcaacagttgcctaattgtcgaaattaaattgtctggaaggaaattagtaattagaaacttggttctcatggtatgttgtatttctacacaaattagcccaagaattcgtaatatgaaaaatatcccagttagaactaatgtatgatttattaatggggtggtttgctgaatttttatttccaaatgaatgtttgctatttagagtagatgctaccttaatttaccagatgcagttctacaattagatgcatatggttagcagaggagtagaaactttgtcatggttctttatctgagatagtatgggactatggatgctggaaagctgcacttttctctgttcaaatcttatcaatagattaaactg

SEQ ID NO: 168535 - DNA, 311 bp, Homo sapiens
tagctcttcaaaacacagcccaacactgagagaaagcaaaatcagttttcaagtgctgacaataattgttataaagctcccgcaccaaagctgatgtatggttcttaactgttttccagccttccgtgtagatcagacaccatcagctgggagcaagatgagtagagattgttagggctgcatagtggaggcagcagtcagcaaagtccagcatcacacctgggctgggtatagttgctctttagagaggctagagttaccaaggcaaagatgaagtatgtttaggagtctctgttttaagaagataggga

SEQ ID NO: 168536 - DNA, 494 bp, Homo sapiens
ccacacacatgctgaggtggaggccaaccctgaacacatgcgctgcttctttaggaatgtaactatgaagtaaaaggaaacagtaaggaaggtgaactggaactctggggaaactgaaaaggtcatcaataggccttcaaaatatttgtgtgtaataagtagacacaagaggctggaggaagatgatcattcctagaataattatgcttactgggtgacaatatacagaagcaacaattacaataaaatgaaacagtttaatggactaggaagcagaagtctgagaataaaggaattaggttaatgagattaagcagagatggcattccacaggaggtgacttttgagttgaatttttaaaagatagctttatgtgttttatgaactgactgagggcagtcagaagaaggcattctaaatagagggaactggtatgtgctgaaacttagaagcaggaatgtacaagcaatatataaggaatttcaagcaagtac

SEQ ID NO: 168537 - DNA, 166 bp, Homo sapiens
cccaaaccagcagcatcatcatcaactgggaatttgttaaaaatgcaaatgctcaggtctcccctcagacctgctcaaacagaaatccgcccagtgggatccaatagtctgtgtttaacaaggcttccaggcaaggctgacacactcaaatatgaaaatcactgaa

SEQ ID NO: 168538 - DNA, 126 bp, Homo sapiens
taacaaaaaaggcagatccactggggattcagacccttcaggaataaaaatttgggtcactccaattggctaaagaaccttacacatactggctgggtgcagaggctaatgcctataatcccagca

SEQ ID NO: 168539 - DNA, 478 bp, Homo sapiens
ttaaatggttgcaggcaattaaaaaacactgaagatgtttgaatggaatctgaagaaagagtaatgagcaacaaatccctgcccaaaccttgaactaaggtatatggaggcagaaatggcattttgggaaaattgttgaaaagcaaaatgtcagaaaaattccgatgctcatgttccttcatgataattcaatctctgtttatttctgacttgattttatcaggtcagcttggcattatggaagaagtgaaggtattggagcaaaaaaaaaaatctaagtttaaattctaatttttttaaatttttaagtttttcattttaaaattctgattctgattgtgaaggtcagtttcatccataaaatggcagttgtaattaaaattcatttttatgggttgtaaggattactaattattagtaatatacataaaatatacagcaggaaacaggtattcataaaatcttaatccctttgctt

SEQ ID NO: 168540 - DNA, 236 bp, Homo sapiens
cagccatctttgaccagtttatagtttctttgctgtctttatgctgcttttgataaatggaatttttaatttaatggtagttgaatttacctatcttttatggtttgtgctttttgggtccttttctcctccaaggcataaaatattcttgtacatcgtcttctaaatggttatgtaggtttctaattcatttgcaattaattctgggaattgatgcgaggcaaaggtccaatttc

SEQ ID NO: 168541 - DNA, 295 bp, Homo sapiens
gggagtccttgcagtgtgtaaacgtaatgctagtaaaaagttgtgtgatctttagcttcaaaggagttaaggacttttaattgtagcctatatatcaaggtggttttgaaatctccatgatgctgctggttgtctcctttcaaaaggagctgtcttagagtgtctaggagagtaagaagagttaacttctgtttttaattctgccaaacttgtttagaaatgggtgtgctatttaacctcactgagatggggtttctaaattactttgaagtgttgtggtcaaaggaatggtgtt

SEQ ID NO: 168542 - DNA, 235 bp, Homo sapiens
ctagtcctgaacaactttcctagttggaccacagctgctaaccaacaaaggcccagatgtacttaggtgttaaattatctccaggctcaggatttatggatcttggaaaaacctcattgggattgggttcagactgatttaaccttgagcttgctgggggattctgttcccccttggcagctgaacctcacgctggtcctagtacaactgaggatccatgtggctatgccggaaa

SEQ ID NO: 168543 - DNA, 206 bp, Homo sapiens
ttctcagtgaactgcagggaggatggctttgaacaggaggcaaagcaggaaaggctgtgggcctcccataccctgcttcagtcagaacagctcccctcttccttgctatatttcctccaagaaaaagcttgtgctgtttctaaaaataagatccaaaaaacaacataagtgataatattgtaggcctgatattatattcagagcta

SEQ ID NO: 168544 - DNA, 454 bp, Homo sapiens
aatcccagctgtagcgttagaacatcgatgaaattctccactaatctactcctctccacctgaactgaaaaaggtcttctttcttttttctcagtgctagtgttctattaatagaagtagagacatactttaatatggagataaactttaataatagaaataaaaacatttatttggtcatgtcataatgaccaagacaaagttaactctgattccacagtatattttaagccaaaatatacttgctttctgaaccataaacatggctaaaatgacctttctttttttccaaagaagagaaaatcctaacaaatagtctataagaaaatatctaaaacactttgtatgaaacttgctttactttttcttaatctccaagattagataatactggaagaatattagatctttgaattcaagtcacactgaaataggcatggcaaaatgagtattt

SEQ ID NO: 168545 - DNA, 248 bp, Homo sapiens
catatatttggtctttcggtttagtcatcttggtgctccagagctgtatacccactgcctacttgacattcttcttacatgtctcaaaggcaccttggattccacgttttccaatttagtgtgtgatcttccctcctaaactcaaggctttctagtgttccctacctcattctgtggcaccattctccatccattcagtcgatgcgagtcaggagagtcgatgaatatgatagtgaaatggatttggg

SEQ ID NO: 168546 - DNA, 287 bp, Homo sapiens
ctttaatgaaattaggctcctgtctcatgagcatgctctcttccttcctggttcatgtttttgttagtgacaccccttctctgattaacctttcccttttaacagcaattgtttaaatcttgtccatcccttaaactttaaagccaaatctaaagtccacatccttttaagtaccctagctagaaggaatgtctcttgatctctcagtaggactccagtaacactttgttccttttagattgcaattatagagatctatcttgcattatagttgtgtggcattactg

SEQ ID NO: 168547 - DNA, 282 bp, Homo sapiens
ctttacataattacatggtctttacttttacatgactggcagtgtagtagggttgtttacgtgaacatcaccacagacacgtgagtaatgtgttggaatgtcacaaggcaataggaatttttcagctccattataatcttacaggaccaccgtcatatatgtgatctctgtcattgaagaaaatgtccttatgtagtacgtgactgtatatgaaagtttattatactattcttacagcttttttctaattttgagtttttctaataaaaagtttaaaatata

SEQ ID NO: 168548 - DNA, 583 bp, Homo sapiens
aatcatgcctctggtatgcaaagtgtcttgactaagagccttgtgccttctagctccaacttgacaacagaaaaggtactcttggtatgcaaaataagagcctaaagcatctgtggctgtaatttggtattcactttctataatcagtaagaccactgattaaagaccatgcagtcgactaccaatagctctaaacaaacatcctattgcagcatatacatagcaaatgccatctctgaccccggaagtttggttgtccaggtaacctgggcagggaaaggtctgagttcaaggtgaaaagtcttccctactgcaggatagaaacactatcatcaataataaatattcacagacctgtagtccctttctgctttggtggttacacagctcccaggtgaactggaagcctaaataacctgagccctaagagcaagcacttttggtccacaggtgtcatagtctctgcttctgcgcccaccctttgttccaccaccattgtagtgagatggtctagtgaagtcatctctgtctggcccaatccaaggctctctcttttgtccttcaccttattgacttctcagca

SEQ ID NO: 168549 - DNA, 316 bp, Homo sapiens
gtatagtgcctaaaataggacctggcattgaacagtcactcaatacatgttagttttcaactccactttccaagtacaatttctcttcctcgttcagttactcaacaatcatttcttcaaaacagtctgtgccaggcacatactgggcgctaagatataatagcaaggctgataagaacctgctttcatggtatagcaggagaaacagatattttacaaataactaaacttaatatttatgttcagttgtgataaacactgtgaagactgacctagggagatgttgaaaacagatttttaaaacttttaaactttt

SEQ ID NO: 168550 - DNA, 576 bp, Homo sapiens
ttaaacatctgggtttcttagctgaagttcattttacataaatatgtaattctatctcctctttgcttgtggagggtgtagcccaggaagctgagttacttgattcatccttttggaattgtaacagaacaactttagtaccctgaagcctcctcttgtcagagtctcagtaaatatgcgaggctgctgttgaagttggaacctgtatctgctctattagcagaaatttgacttcacattttctttatatagtttaattgaacaccttcttgttcatgttttttgtttatcattttaatgaataaaaatagttccatagctaataagtagggtttactaattaaaatgaacacagtggaaacacacttgtttctgactgtggagactagggcaagtggcttctgttttctgagccttggttgccccatctgtaagatggggattctgaggcttatgagacatgatctctgtaaataaagagcttggcacagggcctggccatttattgagtgcttactatttgccaagcattttacaaagttattttaggtgaggtatttaagtcattgacctggg

SEQ ID NO: 168551 - DNA, 432 bp, Homo sapiens
agatttaccataattcttaaggtccttggatattcagaatggctaatgagcagtagcttcaacttaaagtcatcagctacagtagcccctaatgagaggcagcctgtcctttgaagccaagtattgatttttctacagctataaaagcctagatggcattttcttccaataaactattttgtctacactaaaatgtttactgtagccacctttatcaattatcttagctagatctggataacttgctacagtttttccatcagcacttgctgcttcaccttgcacttttatgttttggagatggcttctttccttaaacctcatgaaccaacctctgctggcttcaaacttttcttctgcagctttctcacctctttcagcctccaaagaattgaatagagttactacggccttgctagattaggctttggc

SEQ ID NO: 168552 - DNA, 261 bp, Homo sapiens
tgtcatgcaaaaatgataaaaccttgatatcttcattcagtttatgtaaaactgataaacatggaaacagttcatattttgagaaaactgagtcttcccattcaaggaacccacctcgcgcttcccagtgtccctctaagaagctccagtaaagaacctgtctacctaggtggattcggatgtaaaaccgacacagggttttatctgagaactcttcgcctactgaaaaaggctcatggtatttttgacaggggaatgagt

SEQ ID NO: 168553 - DNA, 301 bp, Homo sapiens
cgatgtccaggaccttattaatttcccccatcaaaatcttagaacatgaataacatgaagcctttccaaatatagaataatcagacatgtctacagcacaaattattggaatctgcccatgttttttagattcccttcttcaatttatgaggggatattattttcttagccattattttaatagcatcaaagttatttattaggtgaaaagtgatctattcatgtatcagatattcaatttgctagctgcttctgttatggtggatgataccactaacatctaccacacactgacaaagtg

SEQ ID NO: 168554 - DNA, 274 bp, Homo sapiens
tgactgcagtagagcttcttagtgagcagtctatgttggagtgtactttcagagaagctcgtggtgggggaaatctggaatttgtctaaatatttcatttctttgataaattacattaaaaaatcaatgagagtatctatttggtgaaatcattttcctccatgtgaccaaatgagaaatttagtgaaagatttaaaatcatttctcagactttttccacattagtcgggaagcaaaccccttttttaaggcaatgtcagttattaagctttag

SEQ ID NO: 168555 - DNA, 136 bp, Homo sapiens
gtgactttcttctctgatgtccagactgatttgcagattgcaaagatccactcttataatagaaagagatgccattagattagaaaaaaagccacttatcacaggaattacgtgctaacacagtggttcaccttaa

SEQ ID NO: 168556 - DNA, 564 bp, Homo sapiens
ttgtagtacctcattcagtatcagttctctcaatcatctctcaaatagcaattttccactggaaaagaaaagaaatgaagaaacagggttcccagatagtgtaactttgtaaaacaccatacaggacaaagtatatttaaaaaactctcccaataccagtccaagctaagggcaacttttaagtctgagggcaattctacaggttccaaggacagaaggaaagacacatgaaagtaaatcccaacttttctcctctcagatgcgaccaggtacacctgcattgcaggcctcagcacggcaccggacgcagcccagagtgccttcacccaggccagctccccttacccccaaagaggcagtgagcctcagagagggcaagtggctcgcccactgctacacggcttcgaggtggtagagctgactccaaagctggtatttaatggattcactgacgtcttcatccactataggactagccttgctgaacaaaacttcataataaagaactctgtgaaaaaaacatggatttggacataacaaaccgactttcctcctctacccagc

SEQ ID NO: 168557 - DNA, 216 bp, Homo sapiens
ccatttccggccccgcccctttccctgccgctgtcacgcctcttttctgccctgccacaccccattcccggccccgaccctttccctgccgctgtcacgcctcttttctgccctgccacaccccattcccggccccgcccctttccctgccgctgtcacgcctcttttctgccctgccacaccccattcccggccccgcccctttccctgccgctg

SEQ ID NO: 168558 - DNA, 375 bp, Homo sapiens
tctcaggttagcccactctcctgtcccaggggctcatccagcctgccccttccttgacccttgacaccatggtgtcagcccctcctgctagccccatgttcttggtgacaagccagtaaggagctttgtcacacccatgatcccctcagatccttactagcccatatctcagcagtcagaagtgaagcctgaggcccagaggaagcaaatgatttgcccaagaccaccagccagtcagctaagagcggaggttcgagcatccgttcctgaagctcagtccaggcattttccgctgtgcttgtgcctattctcccaccatcaaaacctgttcctaggccgggcatggtgactcatgcctgtaagcctgaggcagat

SEQ ID NO: 168559 - DNA, 672 bp, Homo sapiens
cgggttcaagcgattctcctgcctcagcctcccgagtagctgggactacaggcgtgcgccacccacgcccagctaatttttttaatttttagtagagacggggtttcaccatgttggccaggatggtctcgatctcttgacctcgtgatccaccctcctcggcctcccaaagtgctgggattacaggcgtgagccacttctcctggccgagaaataatttttaaataaaattcaatgaaaaatatttttcccccaagtcatttctccaaagggaacccgtcgcgtgcctgggatggggaaagaaaggtcaccgtgaacatcctcgaccaaaacggctttgtcccctattccccaccttttttttcctgcgtgattcctctacaagaatctttgagaacctcgcatgttttaaagctatctaaaatatttttattttcaattaaaatagttgcaaagatacaaataccaacgtggaactttttaaaaatcaaaattctcacatcagtctcaaggtgccttttggaatatcaatatgatagtataatcaattcataaaatacatgaccaaatttttctttgtcaatgcgatgtttcagatgatttttttcctcctgaatgcctatttccattctccatttgccttacaatttcaccctaccataatatatctat

SEQ ID NO: 168560 - DNA, 506 bp, Homo sapiens
gggcattcagatccaacataattactgagcacctgtcctggcacatttcatgctttccctgaaccacgtgcataagtgttattatcattctcattatgcaggccatagatcgaggctcagacacatgtaggaactagcccagagtttcaaagctactttaagtggacaagtgtggactctcaacacgtctcctgacagaggctgtgttaatccatgactagaagatgggctatgtgtgtgacctgctcttcgtttagttaaaaatggcatacttgattcccagcttatgtataggctgggatgtgaacttccagtggaatatttctgttgctgaaatttgtcaccacctttctaaactggtgacagaatttttttgggtcatacacagactcattgcaagtaaggcaaacctactcttaaagtgacctaaacaatgaaagtgctgaaagtaaggataatcatgttcttgaagacagctgtgtgaatgggttaggagttttatagaa

SEQ ID NO: 168561 - DNA, 523 bp, Homo sapiens
atccttaaatgcttctaacactgaaaatgagatgaatatcacaactagaatggttatcacattatacataagtgggttgcaaaaactgattttattatacacgtatactttttaatttacatttggattcaaactttttttattatacactcctggcatatgtaacattcagatagttctctttctagcactatgataatctcatcagatcccaagagttggggaggaggacttgatttcagactatccagtttgcaaatccacatcacatatgcctttacgaattattttgaataggtagtatgcattacacaaacactatacagtgaagtctttttcaacctctctcagttaattatatcttctcaaaactattctacgcaaacacaaagacatatgtactatatgtttttgtttttgttttgagacagagtctcactctgtcacctaggcagagtgcggcagtgcgatctcagctcactgcaacctctgcctcctgagttcaagcaattctcctgcctca

SEQ ID NO: 168562 - DNA, 576 bp, Homo sapiens
caccatctgtcaccctgaacaagcagagactcctgtgtctgagatgccgtggacccccgctcttccagaggtacctccagctccctttctatgctaataccagaaaattctccccataccctgcagggataggacggccctccttttgagtttccggggagttcttcctcagagaatgagatctttgctcattcttgcctggtggtggtgagggttacagcggtgtcatgcttggaactctgtcagcttgtcacacttgactcaacaaagatggagtcagggttgccctgagccaaggaggagcgcagtcaggaacacgtggtgggtgatgattggccacctcagcccagcagtgactcgtgaaaaaggcacaaagcagacaatagccaccacgcatctcttgtggtacaaactgccataattctagtccccactgactggtcaaggggcaaggattctgtcttccatgagcagacgggccccgccaccctgcagcagctcccacactgggccagcatcctcctctgaggccacagtccctccgcaggccaggccagacagagtcagatcttctgt

SEQ ID NO: 168563 - DNA, 623 bp, Homo sapiens
ctcaaacaaacaaacaaacaaaaaaagggatgccacttaaagccttctacagtcaaatctcagtcttcccatccttaccaccagctctcctgaatcccagtaatgagacattgctctagccaaacgctcatactgtgtatcttaatataagtgcttatgaatttttcttcatggagtagctcttcctccttgggaagcagcagagcttagaggttaaaaatgcaaggtttggagtcaaacttgcaaggttgcctgggtttaaatcctggatctcttacttggtagagtagtttatttaactttctcgtgcttcagttttcccatctgtaaaatgtgaataatagtacagtttgtctcttagggatgctgtgaggattaaataggctaatatatgtaaagcattataaaggaacatgaaaatgctctaaaaatcggtgagctaagtatccatctcaagaagttttaaaagaagagcaaaataagcccaagaaaggaaggatataataaaataagagcagaaactaattaaatttaaaacaaatacacagtgaggtactttcaatgtcaaattcattgtaagagagaatagaatagtgtttgccagggactggggtagggggcag

SEQ ID NO: 168564 - DNA, 464 bp, Homo sapiens
ttaattgaagggtttttattgtaattgattcttgcaaggaactttgataaatggtctaatttaatatataagatgtcttaggatatatctatcaagggctattgctttctttggataggctaactttgattttactattgtttgtttcttattgcatgttattcagtatagtgatcctgtaggatacactttgaaaaagtatttggtgatttatgaagttgggatactgcatactctatgtatgaaaaataggggtgcacattagcactttagggctttagtagtcctacatgaaagtaacgttttaaattttgtgttaaaaccagtgtttctatacttaatttgattacagagaattttaaaaaatgtatataatgcatattaacattcatgagaagtagtattctatggctgtaatttgaacaatgttatgtagattttcttcagattaaaatcttgatcca

SEQ ID NO: 168565 - DNA, 445 bp, Homo sapiens
gacctgcaggtccttgagtggggtagagccccagagaatatggtgtcctgatttgccaaagagtcacaggcagcatgtcttgctggccatgggccactcgcacgggtatgggaagctggcatggcagggcctcttcgggtggggtgtctctcccagggcagtgctcccatctgcccgggaagccctggctgaggtctcagaggagagacaggatgctccgaggaacttgcttgccttcagaatccctatatcttgccaatgcttccctttcctcctccctttctcctcgcccaggcttagtgtgctggtctcctgctccgtgaaaagtgctcccagggaagacctgggcgatgggaacaatccccagggcctggaaggaagctcacgttagggcaaaggaggggggtgatgttggggatggcagcccagacctgagcaagccagg

SEQ ID NO: 168566 - DNA, 443 bp, Homo sapiens
ttcactttgagtataaaaatggaaataacagcacctacctcctagagttatggtgaggattaaatgagttaattcacattcatcattaggacagtgtatggcatatagcatatgctcagtaagtatagtcagattacgatctgctgagtaataagcagtttacatccattatctccttaaaacctcagaaacttctgaggtaggtaaatactattatgaagaggcttaataacttgaagagttacaataaatagccgggcgcagtggctctcgcctgtaatcctagcactttgggaggccgaggcaggccggatcacgaggtcaggagattgagaccatcctggctaacacggtgaaaccccatctctactaaaaatacaaaaaaaattagctgggcatggtggcgggcacttgtagtctcagctacttggggggctgaggca

SEQ ID NO: 168567 - DNA, 199 bp, Homo sapiens
ccagcaaggttcatgtaatgtggtcattatttgtgggcctgtctttgaaagcagcttataaatatacctccagatgatatttcagacaacaaagagtgctcagttgatctggtgacacacaaaggctcccaagttgttacacattaatgagaaagtggctgaggaatataccagagccctaggccacagtgtcaggtag

SEQ ID NO: 168568 - DNA, 409 bp, Homo sapiens
atttggtacatgggtgagaactgcaagtcctctgaaacccatagcattttgcttttaccacttttatggaattgaatccatcaagttctcctatgttttaagtgtatctgggcacaggtacaacttcattggcatcaccacattccctatagagtcatacctaactggtctcttgtatctgacatgtgttcaacaaatttggttggggacatggtttcatgaaaatataaatgttggattatgcaggaacttaactcttatgctttttttttaagtagcatgatgtcaaactaactgtttgaagaacttctccatcccctgtaagactgtaacagtgttatattgaaaaagagttctggaaagaaccgaccttaacgtccctgtcttaaaaagccatgtcaatctagga

SEQ ID NO: 168569 - DNA, 144 bp, Homo sapiens
tagccaggacaagagagtgaagaaaggaaaaggaatcaaaagaagaaatactcaaaccccacaaaaaaaaatgaatgaaggccacgatgtggaaatgagcagtggataaggaagaacaaacagtacagcatggggagcaaagga

SEQ ID NO: 168570 - DNA, 466 bp, Homo sapiens
acacacacacacacaccacacaggctgtcacgtgtcctcagcacaaagtgccttgagaaaggccattgctggccccacacttatcctgactgtgatcttgctgtgatcagcacatcccatcagtgtggcaacaggtgtggccagagtgggaaccaggccttttcttcagatttgctctttgttcctgaatagccaccgtcagaacagacaccctcctaggagtcacttgattaaaaatttccttttggatatttaggttgatgttttatccatcggttaaagtataaatgtatatttattataaaagtgtaattatggctctaattaatgattatggtgaattttactaactatagctatgaaaatattccaatagataaaaacagtgctaaaaatgtacagttaatccaagagtggtaactttaagtcttgtaatttttgatctaataaatcttcataaaatata

SEQ ID NO: 168571 - DNA, 579 bp, Homo sapiens
tcaatccaatcaagttgacactcagtattaaccatcatgcccaccatggtgaaggcatgcgggggtggctggtgttagactaattggagccttggaggatagtcgaggaaacggttcctgaacggtgtgtggatgagaatgttggagcagggtgctaaggaggcacagaggagaggcagagggtatggggttggagtggggagagccttaaggaggtgacatggaaggagagacctgaaagatgggtgaggccagtgcttctggaagtgtggttcctggaccagcagcatcagcagcatctgggaactccgggtgaatgtgatgcgcacgctcgagtataagaaccactgcattagaaaacaggtgacagtgccttgcggaggagcggtggctggtgtggaaagtactctaacagagcagagggaacacatacccagaggcctgcagcaggcatatttgaggcttgatcaggacacagccacccacacccactggttacaaattatctgtggttgctttcagcctgcagaggtagagctgagtaatggccacagaggtgtatggcccgcaaagccacac

SEQ ID NO: 168572 - DNA, 270 bp, Homo sapiens
ctcatttagtccatagcagaaatactgttattccagtgtgtcactaagaaagtaaggaacagagaggttaagtaacttggttatatagctgagaagcagtgaagccaaaattcaaacgaggcaatctggctgcaaagcctatgaattcaatcatgacataggaatataaattctcaaaatcacatagatgtacatgcctgcacatttcgataatgttacatataaataaacacctattactagacatatgcctaggcctttgtatacagt

SEQ ID NO: 168573 - DNA, 146 bp, Homo sapiens
ttttgggattacaggcatgagccactacgcctggcctctcttattaaatgttaatgccacagaaaacagaaccttttggccatgaaaaagcagattgtgctggaaagcattcattcatttattcaatatcctgatggcttattatg

SEQ ID NO: 168574 - DNA, 487 bp, Homo sapiens
ctgggctttctcgtaatatttctgagttggtgagcatgaagggagaaaaaagccagtccaagcttgtgtttcagactctgtaatcaggaaaaggcaaaaaaaaaaaaaaaaaaaaggtaaagacacagtatctttcccttccttctcaagcagtaaacactgggggacacttctagtgagtgcatctgacatcaatttctattcttcagcatcggaatgtcaatgaagtagaacaggggatgatgatttagcacagaaataattcaaagaaaatgatcaaggtgttatcagtctactgacactttatgcattttttgctctagagcatacatttgatttttttaaattatagatctcaggtatctggtgaattttgcttggtcctctgtttctgaacataccaatcaaaattattttaaagtctttgtctgaaaactttaatttctgtattacctgcaaatctacttttattgggggtaccgagctc

SEQ ID NO: 168575 - DNA, 600 bp, Homo sapiens
gttcactattcattcttctgaaatatctactgtgatagcagtctcctccagtgtgttttcataacaggtttatttacctgctttattacatgactggtaatatttgattggatgttcgacattgtggaatctatgtcattgacacctgggcatttttgtactttgaattgcaaaaaactactttaaacttcatatggaaccaaaaaagagcccgcatagccaagtcaatcctaagccaaaagaacaaagctggaggcatcacactacctgacttcaaactatactacaaggctacagtaaccaaaacagcatgctactggtaccaaaacagagatatagaccaatggaacagaacagagccctcagaaataatgccgcatatctacaactatctgatctttgacaaacctgagaaaaacaagcaatggggaaaggattccctatttaataaatggtgctgggaaaactggctagccatatgtagaaagctgaaactggatcccttccttacaccttatacaaaaatcaattcaagatggattaaagattcaaacgttagacctaaaaccataaaaaccgtagaagaaaacctaggcatta

SEQ ID NO: 168576 - DNA, 397 bp, Homo sapiens
gcgcccacgctgtcgcggcccagagcagcataatgctgcaggccgttgcaagagccgtcctgatggacggggaggtgggagacataggcggcagggtcggaggcgcgcacagtgttcgccacctccatacagcaggccagcgtctgccagggttcctccgcgcccatccaccactttcggcccgtcaagggttggtccgcggagtccaagatgtcatccatcacctcctccgcaaaggccaggcgcttccgcagaggctcccgcttcttcaaccccgtgaggttgaccaggtggatcttgagccaatccaggccgcgcgggccgagcgggcggccctgggcgaactccagcagggcccgcgccacgtcgctgcccaggtggttgaagtgcggcgggc

SEQ ID NO: 168577 - DNA, 241 bp, Homo sapiens
ggtcccattttttctccttgtctctctctcaataacttcttccatattaattattaacaaagtaaaattaatttttccccattataaaacacagagggaaaacggtctgaaaattaaaagggagcttcaaacaaaatcacacacaatcttgccaccatgacataaccattcttcgcattttgtgtaatttctttcacccctttttctaagtaattttgtatctcgccctcacaggagagtg

SEQ ID NO: 168578 - DNA, 115 bp, Homo sapiens
ggctggagctgccagggggcacttgactgccacttcgtagcaccttgtgctacctggttagtgtaatctgttaagtgctattatccttgccagttttacatatttttagttattt

SEQ ID NO: 168579 - DNA, 601 bp, Homo sapiens
ctcagagtctcgctcaaggcccacggcatgtactaccttggctactgctgctgatcatttagggcctaagcgctcttaagtcagcaggtgatgaatcctgacaggactgggtgcttctcttcaaggcagtgggctcacttctgacccaggatatgtctagaaatgtcatccagggaattagggcctggaatggggacctcaggactctctctggtgccctatcctcctgtgactgagctggtatccaagttataagtcaaagtcctctttactggtgcctttcctctcctcaagaagaaggaaagggccacttttgttgctgtgagctgtgctgcctggagttgggtaagcatggtgcatacgctcctttagcctccttggctggtgtgtcactaggtcatgtgtccccccaaatgtgctggctctgagcccagcacggcactaggacttgcctaggaattgttgtccttgtggcctagacagcctttcaagttaatttagaactgtgggggtaaagcttgtgaaagttccaggctactggtatgggcagttcccctgtggctagtgctggtctcaatgccttcttcatgggcatcacctg

SEQ ID NO: 168580 - DNA, 407 bp, Homo sapiens
ttttctaatcttcttagaagtttagatggccaaatatgaaggatggaactatataacattttgatttcttatagtgccttatggtgctttgtgtttgggaagtatttatttttattttttaaaaacaacttcaggccaggcatggttgctcacacctgtaatcccagcaagttgagaggccgaggcgggaggattgtttgagcccaggagttcaaaaccagtctttgcaacatggcaaaaccccacctctacaaaaattagttgggcatggtgtcatgcgcctgtagtcttagctacttgggggctgaggtgggaggatcacttgagcctgggaagtcaaaactgcagtgaactctaatcatgccactatcctccagcctgggtgaaagggtgagaccttgtctcaa

SEQ ID NO: 168581 - DNA, 1630 bp, Homo sapiens
tttgttgtttttgggagatgcgaaggctccccgaatgagaaagaatactcggaatcagcggtgaattgcagtgatctttcagagaaagcgcctgttcaactttgtcctctctcagagactcagagccttggggcactgagggatgccagttctgcctgttcatctggaacctggatctaaggagggaagaggcgttgcccctgctggcatagtcaggtaccagcccagccaggtattgaacgggctgagcttttcatgatggttcctgctgacctggaaacatcttaaatggaaggttagcttctatgagtcactgatactctttttattgctatttctaaatttccttggcttgaaaattacttctgctttgcagaaattatctgcttgcagctgtggataatttataacaatctctggtgaaacctcagaaaagagatatgcttttgtcttagatggatgtcagcagctgctgcagaacccggtgaaaacaccccccgggtagcacgaggctctgcgagccgtaactccgacaaacgcagaacttcttgaggctttcttcttctaaggagtatgacacagttaaaaaggaaaaaagaaccacaagcaaaacagttgccagtgaaataggagagggagctctttaaacaaggctggctgcagctggcctccgccgctcatctgcagggcgtgagcgcttggtccatgcagtgaagctcttccaacctgggtcaacgaaaacggagaagaaatggcccaagaaatagatctgagtgctctcaaggagttagaacgcgaggccattctccaggtcctgtaccgagaccaggcggttcaaaacacagaggaggagaggacacggaaactgaaaacacacctgcagcatctccggtggaaaggagcgaagaacacggactgggagcacaaagagaagtgctgtgcgcgctgccagcaggtgctggggttcctgctgcaccggggcgccgtgtgccggggctgcagccaccgcgtgtgtgcccagtgccgagtgttcctgagggggacccatgcctggaagtgcacggtgtgcttcgaggacaggaatgtcaaaataaaaactggagaatggttctatgaggaacgagccaagaaatttccaactggaggcaaacatgagacagttggagggcagctcttgcaatcttatcagaagctgagcaaaatttctgtggttcctcctactccacctcctgtcagcgagagccagtgcagccgcagtcctggcaggttacaggaatttggtcagtttagaggatttaataagtccgtggaaaatttgtttctgtctcttgctacccacgtgaaaaagctctccaaatcccagaatgatatgacttctgagaagcatcttctcgccacgggccccaggcagtgtgtgggacagacagagagacggagccagtctgacactgcggtcaacgtcaccaccaggaaggtcagtgcaccagatattctgaaacctctcaatcaagaggatcccaaatgctctactaaccctattttgaagcaacagaatctcccatccagtccggcacccagtaccatattctctggaggttttagacacgtgagtctcattccaatgctcttt

SEQ ID NO: 168582 - DNA, 1034 bp, Homo sapiens
tttgttgtttttgggagatgcgaaggctccccgaatgagaaagaatactcggaatcagcggtgaattgcagtgatctttcagagaaagcgcctgttcaactttgtcctctctcagagactcagagccttggggcactgagggatgccagttctgcctgttcatctggaacctggatctaaggagggaagaggcgttgcccctgctggcatagtcaggtaccagcccagccaggtattgaacgggctgagcttttcatgatggttcctgctgacctggaaacatcttaaatggaagggcgtgagcgcttggtccatgcagtgaagctcttccaacctgggtcaacgaaaacggagaagaaatggcccaagaaatagatctgagtgctctcaaggagttagaacgcgaggccattctccaggtcctgtaccgagaccaggcggttcaaaacacagaggaggagaggacacggaaactgaaaacacacctgcagcatctccggtggaaaggagcgaagaacacggactgggagcacaaagagaagtgctgtgcgcgctgccagcaggtgctggggttcctgctgcaccggggcgccgtgtgccggggctgcagccaccgcgtgtgtgcccagtgccgagtgttcctgagggggacccatgcctggaagtgcacggtgtgcttcgaggacaggaatgtcaaaataaaaactggagaatggttctatgaggaacgagccaagaaatttccaactggaggcaaacatgagacagttggagggcagctcttgcaatcttatcagaagctgagcaaaatttctgtggttcctcctactccacctcctgtcagcgagagccagtgcagccgcagtcctggcaggaaggtcagtgcaccagatattctgaaacctctcaatcaagaggatcccaaatgctctactaaccctattttgaagcaacagaatctcccatccagtccggcacccagtaccatattctctggaggttttagacacgtgagtctcattccaatgctcttt

SEQ ID NO: 168583 - DNA, 1489 bp, Homo sapiens
tttgttgtttttgggagatgcgaaggctccccgaatgagaaagaatactcggaatcagcggtgaattgcagtgatctttcagagaaagcgcctgttcaactttgtcctctctcagagactcagagccttggggcactgagggatgccagttctgcctgttcatctggaacctggatctaaggagggaagaggcgttgcccctgctggcatagtcaggtaccagcccagccaggtattgaacgggctgagcttttcatgatggttcctgctgacctggaaacatcttaaatggaagagatatgcttttgtcttagatggatgtcagcagctgctgcagaacccggtgaaaacaccccccgggtagcacgaggctctgcgagccgtaactccgacaaacgcagaacttcttgaggctttcttcttctaaggagtatgacacagttaaaaaggaaaaaagaaccacaagcaaaacagttgccagtgaaataggagagggagctctttaaacaaggctggctgcagctggcctccgccgctcatctgcagggcgtgagcgcttggtccatgcagtgaagctcttccaacctgggtcaacgaaaacggagaagaaatggcccaagaaatagatctgagtgctctcaaggagttagaacgcgaggccattctccaggtcctgtaccgagaccaggcggttcaaaacacagaggaggagaggacacggaaactgaaaacacacctgcagcatctccggtggaaaggagcgaagaacacggactgggagcacaaagagaagtgctgtgcgcgctgccagcaggtgctggggttcctgctgcaccggggcgccgtgtgccggggctgcagccaccgcgtgtgtgcccagtgccgagtgttcctgagggggacccatgcctggaagtgcacggtgtgcttcgaggacaggaatgtcaaaataaaaactggagaatggttctatgaggaacgagccaagaaatttccaactggaggcaaacatgagacagttggagggcagctcttgcaatcttatcagaagctgagcaaaatttctgtggttcctcctactccacctcctgtcagcgagagccagtgcagccgcagtcctggcaggttacaggaatttggtcagtttagaggatttaataagtccgtggaaaatttgtttctgtctcttgctacccacgtgaaaaagctctccaaatcccagaatgatatgacttctgagaagcatcttctcgccacgggccccaggcagtgtgtgggacagacagagagacggagccagtctgacactgcggtcaacgtcaccaccaggaaggtcagtgcaccagatattctgaaacctctcaatcaagaggatcccaaatgctctactaaccctattttgaagcaacagaatctcccatccagtccggcacccagtaccatattctctggaggttttagacacgtgagtctcattccaatgctcttt

SEQ ID NO: 168584 - DNA, 120 bp, Homo sapiens
gaatggctcttgttcagcaaggtcatccctgataaccctataaaagcagctccccttgcctcttccctatcacattctaccagttgccccgttactgttttcttcctagcttacagttct

SEQ ID NO: 168585 - DNA, 314 bp, Homo sapiens
ctggagacttgttttcctagactggatcttttaacatggtagttaactagggtataataggagtatgtcttatttttaaatttttctggcattctttagttcaacaaacgttttagtacctcctatgtgctgagttctttggatacaagggtggttaaacacagacttgtattattattattattattgttaatttatttttgggacagtcttgctctgtcacccaggctggagtgcagtggtgtgatcatggttcattgcagcgctgactgtgtatctcctccaactcttaaattattcacgtctcctatctg

SEQ ID NO: 168586 - DNA, 432 bp, Homo sapiens
agacactttggttgccacactaggtggggaggggggacactactggcatctggtgggtggaagccagggaagctgctaaacatcctttagggcacaggacagccccaacacaaagaatgatccagcccaaatgtcaatggatcgaggttgggaaacccggatcagagggcattggtgaagtcctctggggatctatagcagacgctggcctgttaatgcagggttgtgtcaccattactagtcacaggaatacaaagaccaaagccattgccactggtttccatggcagacaccaggctacaagtatctaaagaaactgcattctgctacagtacttgtttttgtgcctctccccgctagactgtgggggcagagaccacgacctacttgtgtctgtatctgcaccacctggcccagcatccgcaatacagg

SEQ ID NO: 168587 - DNA, 371 bp, Homo sapiens
cacccctcagtctcccgagtagctgggactacaggcatgcgccaccatgcccagctaatttttgcgttttttgtagagatgagatttcaccatgttgcccaggctgctctcaaattcctaggctaaagcgatcctcccacctcagcctcccaaatgctgggattacaggtataagccaccatgccaggccccaaatttacccttttatcaggagcccactgccaccatcactaactatacccttgataactaacctgctgcgcaataacagcattaatccatctacgacggcagagccctcataacatgatcacctcttaaaggtcccatctcccaacactgttgcactgggaatttttccaacacatgaa

SEQ ID NO: 168588 - DNA, 501 bp, Homo sapiens
gacatgggatttgtaaacttacagcatgtgcctcttttttctatctctcctctttgtagatggatcctacctggtatgctgtaaaacaccttaacaggctgtagaacttctctcatactttttgcttgtgattttgccttcaaacttcaacaggccccatgtgcttctgcctcaggagtgtttctttcagctttcctgccccatctccatctatatagccatagatagtcactgtttcataatcagtagacatggtttagcgtgtccacaaggttctctaatttctaagtctataccctcagacttcagcaggccctgtgaacctgtttcataggtggctagggagatgtagtggtactctcagctctcctctttcttccccagtgacagccaatagcttctaggtattcatggtaaatactggattacccatagggtttttctaaatttcaagccccaccttcagatattaggaagccacatactttacctttgtctcag

SEQ ID NO: 168589 - DNA, 358 bp, Homo sapiens
ttttcaggcaggtgtgatggctctaaatggaggttataggaaagttaagttttaaatccccaataattttcagggacagtgagtatttctcttacaacttaactttgaatgactttattattgtcccctagtccatagatgttttcatccaaagaagatagaggtctgtgatccaagaaatttgaagcagtgacttagagcagaaatagggatcatgatactttgaataatgcataaagaaggaaacctttctaaacaaaagggacacaaatgttgcttttttggcaacgggatgcatacggtctgtggaataccatttgcttcaggtccagggatgtagaaaactccccttggttta

SEQ ID NO: 168590 - DNA, 364 bp, Homo sapiens
ggctgggccagctgggtagcacagctttaagatgcgtcttggatgtggccgcccactccagattccacattttagcgggcaggacagcccttctgtgctgctgcagtggccagtaacattcccccagcagaggtccatgctggcgtctgtcgtgtgtctccctcctgctagacttcaccatccttaggaggagaaactgggccctcttggtaatcctatggcctggcaccaagcgggtgacccgtaaatgtgtgtggatgaactggacaaacagcccctcccattgatggagcagctgttagcttagcattaaaccagccggaaccctgccgcaatcgcaggcaggcgagcatggcccctttgg

SEQ ID NO: 168591 - DNA, 528 bp, Homo sapiens
aaagcactacaaatacacacttgcaaatagtactaaaagagtatttctaaactgctctatcaaaaggaaggttcaactctgtgagttgaatgcacacatcacaaggaagtttcttggaatgcttctgtccagtttgtatgtgaacatattcccgtttccaacgaaggctcctctccactaaaaatacccacttgcagattgaacaaaaagagtgtttccaaattgctctatcaaaaggaaggttgaactctctgatttgagtgcacacatcacaaagaagtttctgagaattcaactgtctaatttttatatgaagatatagccttttccaatgaagacttcaaattactctaattagctacttgcagattctacaaaaagagtgtttcaaaactgctctatcaaaaggaaggttcaactctgtgagttgaatggacagatcacaatgaagtttctgagaattattctgtctagttttcatgtgaatatattcccgttttcaacgaaggcttcaaagcactccaaata

SEQ ID NO: 168592 - DNA, 500 bp, Homo sapiens
atggaccgaagtgatgtatagggtcttagaaaacatcaccagctgcatcattaatacttaggcctaactgggacattccagagaggtaaattactcctttgcaattattcttgtagtatttttcaccatgatgttagatatttctgactcaaatgagtatttctgggaagaattgttgtttgcggaaataaaaatgtcagcctcttcaatctttgctcatttgaaaacctttcttatatgaaactgaattgagagaggaagacagcaaaattaaggcatttgctctgctcaggaccaacgtagagataagttgcccttcgcattactatcacttctcttccaaaggttggttttcaagggtagtatgggagcaggaaaaaaaaaagtcatctgccccagtttcgggaacacgtagggggcccagggcagggggatctaatgtgagacatgaaggatgaggctgacttagccaggcatagaggggtgtgggacacatgttc

SEQ ID NO: 168593 - DNA, 171 bp, Homo sapiens
gtcctttgttgcctgcatccctagtgatcctatccaaacacattccccacgtcatcactcacagagtattttctgtggcttataaccttgaagtcaaagactggatttgtaggaaaacagaacatgaattatgctgctcaagtttttgtgtgaatgtatgccttcacttct

SEQ ID NO: 168594 - DNA, 234 bp, Homo sapiens
gacagaagaggactcccaggccatgagtacctgtgtgccaggcacttctcatggattacctgtgcaaggtagatgctcttacccgcactttacaggtgaacacatcgaaagttcagagatccgcctgaaatcagccagccagtatgtggccaaatgagggtttgaaaccaggactgtcttatttcaaaacttgtgctctttctaatacatgctactgtttcctgatgagattgc

SEQ ID NO: 168595 - DNA, 216 bp, Homo sapiens
tgtggaaattgcctcaggactggtctcctttagttgaaaacacatatgggcaaagaaaatgcagggccaaatgaacttttctgcacagatctctttcaaactgcaggaaagtttgctttctttaggtgttagagaagccaacaagagcggatgtgcagggatgataggcatctcgtggtgaatgcagaatcaaccaagcatttcacggtagccagt

SEQ ID NO: 168596 - DNA, 200 bp, Homo sapiens
tttatttttagttaactaagacaaagtgaataattcactgtgagccaaattctttcttgattcctctttttggagcagtccatctttatgggaaaaccagcctagaatggtgatttcagtttcaggtgatttcgatagaattgtatttggctcagaaatgataagactggggccaagaaaaattttaaactttttttttt

SEQ ID NO: 168597 - DNA, 752 bp, Homo sapiens
gggtcagggcagagctggtggtggcccccagaggtgggagggctttgctgcaatcctggaaggccagggctagaaaggcaccctttacccattgtgcagacagggcacctagggttcaaaaggcagcacctaccccctgtttggacttcccacattaatgtgggagcttccctgagcccccagctccatgaggtcctctggtgactctttaagacggcatttcttggggccagcagcatgggctgtgactgtcctaggtaccattcagaagtgactgagccctgacctttgaccttctctgactatcccttcgcgaggaagcaggagaaatggggatattcttggtcctcgttagaggaacagagaaggaatctgaaacatcgctgtcctcacagaccccagcactggaggagcagaggcgaatggcttcctccccagagcctcagtcctcctatctggatcatgggcatagggagaggagggagggatgctggggcacccccattctggtttttggcatgtggtctagagtgtcttatgtcccacgaggttacactcagggggctggagaccccttcttgggcaggcagccctctcccctccagaggccctcccttgcccaggcagccccgaggactccagcctttgctgctccctcctcccccgacaggtcccctggggcctgggaggaagcgagcccggctggacagcccgaactgtctggttcccacagtctcagagctggggtggag

SEQ ID NO: 168598 - DNA, 186 bp, Homo sapiens
aactcctgacctcaagcgatctacccaccttggcctcccaaagtgttgggattataggagtgagccaccactcctggcttctcccattttttcacatctatttagtgactacttgtggtcttttcagctacatcatctctttgctaaaagccatcagtgacttagtctgtagctgccagctatcac

SEQ ID NO: 168599 - DNA, 614 bp, Homo sapiens
aagtgagtgtacatgaaagaagaaaaggtggccaatgactaacccctgggtactacaggctagtaagaggtcagggagatggaggggacagagttgggaggagacaatgaggcaggagaaaaattagaagagcgcgtatcctggcagctaagtgaagggagtctttcaaagaggatataccagtgagccacatcaaatactatagatggatttagcaacaagtcagaatagctggtcacaatggtggtgacactttgttctgatcagcaggaaaaatgcagactaggagacactgcacagaaaaggaaaactgggggttgcatttgtcccacaccactcctttctgtttcactttctccactgcaaaagggaaaacaaagaaaattaacagccatatcacttgcacaatacatacttataaaaacgaagcaggtctgtgagatgttttgagtaccttagtaaaaagtataggaaattccactttcaagagagtccactaacacatttaccgttacctactgccatcttctatctactgcttcttagcaaaatacttcctaggcaaaatagagaaaaatagctacttctgctgttctcagtaaagcagatactat

SEQ ID NO: 168600 - DNA, 535 bp, Homo sapiens
gtctgaagctcaaaagagaagtcagggccagagaggtaaaacagagaggcttggcatcactttatggaaagccatgaaaatggcagcggtcatttacagagagaatgtgtacagggaagggagaaccctggggcgagctcctggatgtggaagtcagttagaggagaaggctggccaggaagtgggtggatggatggaagcatggatagagcatggaccgatgaatgaatggatgcaaggatttacatacaaacgaccctaaacaactattcactttcctccccatggaatgtttggtttccacttacctacaaacaatataacccctttcctgttcctccaaggagagcaataaactacaactacccaccagaccttgaagaagctatagtaaaaaaaagggaccattacagttaggatgcttgtatttcttacttagtaattgaaaaaataaataaatcatactggaaaacccagtaaggaaaagcgaatgagatgggtttccctcattctcatgagcagttggtagtgacaa

SEQ ID NO: 168601 - DNA, 711 bp, Homo sapiens
ataaaataaacggttcatactgtctcaaaacacactgaatgagaatacagtaaaaggtagaaagcagtctaaaaaatgaacaataagtgtaaaaactcaaaaaagccatacaattaccaacacaaccttttttcctgattcctgagcaacattatttcccactccttggtatctctcagtaatacctaggttgtgattccttatgaagaaatctccatccataaggaattactgagagataccaagaagcctatcacagaaaagaggagccttaggcttcagccagacaagctaaagcaaacaccacagaatctaaatacataaatcaactatttaatcagacaacttttactaacaagtgacaaagtattaattttaaaataccttttcagcattaactgcctgtcctctcgagtccctatatctcagttattttcctaagatgtcccacctttgagccactgctaatattttttcctccaccttaagggtacttaccttcccctcccatcttcatctgcttacatcctgtcctctttcaagtctcagcccttctacctattgtgtgttaattagaaaatccccggccaggtgcggtggctcccgccagtaatccctaggaggccaaggcgggtggattgctgagctcagtcaagacagccgggcacatggtgaatccgtctcggtaaatacaaaattagcggcgtggaa

SEQ ID NO: 168602 - DNA, 313 bp, Homo sapiens
tggattactgatgctacacctgagatcaaataagaaattgtggtgcagtaatggaagtgtaaaattttcagagtttttaaaaaattaaacaatcagattgttttcaaattgagctattttcatcatattgcaggcatattcttgtttctattgctaggctgatttgctgctgggcttcttggtacctctgttcccagattaaaatgggaaaaaaaaaacacaaggaagtgagaatgcagtttaatttttaaagcaaacatttctggagttttgttaggtattttacataataaagaaaattcattcattctct

SEQ ID NO: 168603 - DNA, 326 bp, Homo sapiens
cagttatttctatgactcacatcttattaacacaccacttacttcagcaatatccattctaaagtactgctaacccaatgtgaaatgaatacaactaatgccagaaatgagtaatgaaatttaatttctccattaggtatcatgtcacaacaaatgagacttctattttttaatcaaacttttttccctttaatatgagaatagatcaatccatttgaacagctttcccaagaaactgaaaaggaattgcagaggttatagctgctgaaagtatcttttgagacttttgcttactcatcatgcccaaaccagcccattttctcagg

SEQ ID NO: 168604 - DNA, 246 bp, Homo sapiens
gtactttaccactgctgctcctcagcatcttccctgcacatcgctccaaatgtcatttccatttaactgctttgcaagccagtttgcccccatcctaatgcaatttgctgaggacagtgagggagcagagagggtaatctgcattgccctccctttatcagcaggtccctgaagacgatcggctgcggagtggagggaaatagctcctttaggtaatgctggttggtggcagcaggggcaagttct

SEQ ID NO: 168605 - DNA, 537 bp, Homo sapiens
cctggatgtccggaactttattgtacagtcttgtcctgaatttgcagctcttgactttattcttgtgacttcatttccgaataaagagctaacagatgaaagcctgacactgctagaagcagatattcttaacactgtgttactccatcaactaaaataatattgttcctatccatgcagtaccatgtgggaacagatgatgtgtcgtattaataaggacaatacctccagcattaaaaaaaaaaaacaaattatttttattatttttacagataaatttgggttttattgttattctgtcttccaacctgaatatagacaaatctggattaggaatagaccttaagataagtatgtttgagtttttagttgaaggactggcttatgttgatagttttgggatttgtaggcaaatcagtttgttacatacttagtgttaatgtttggtttgcagaaaaaaatgaaaacccctttttgataaatgcatttggtaaaatttgcactaaagttccgttgagccgtcagcattgactaaca

SEQ ID NO: 168606 - DNA, 607 bp, Homo sapiens
caggctggaggacagaaacagataataggtgaaagaattttaagcgacaggaatggcaatttgtaaaggcacaggccttagtgagacaaaagaatatcgtatttgagaaactaagaggtttagaattttccttatgaaaaacatgggatgttacaatttaaagttataattactagaccataaagtttgagaatacaagtggtaaactggcaaaggcaagtcaaatacaggagagtcttactataaagagtctcatacccaaattgaaggaagtaaaacttactgctttaaagctggatcacaagcctaaaatttgtctctctatattctataggttgagtatccctaatctgaaaacctgaaatccaaaatactccaaaatctgaaagcttttgagcatcaacataatgttcaacattcaaaggaaatgctcaacggagcatttctaaaccagagaagattaaagatattacaagaacgtgagattctaaacattcagtcactgttttcaaatgcaccttcatgaaaggaaaggagaataaccctggcaacattgctgcattgcctgtatggttatggctgcagaagtagaactgtgaggggctca

SEQ ID NO: 168607 - DNA, 161 bp, Homo sapiens
cccttcttataagggcactaaccttatgttagtcagggtgccacctaaccttaatatcttccaagatcctgtctccaaacactatcgcactgggggttagggcttcaacatataaatctggggaagaggggaacatgaacattcagtccataacaaatgat

SEQ ID NO: 168608 - DNA, 608 bp, Homo sapiens
ggtgattctgatgggccctgtctaaccactgtatttttctgaagcccaaggtgcagcgacttgccaagggtcacatagcaagtctgtgacttaagaagccccagtcacaccaaggaagacatggagagggtctgtcgatgctgaggctctggggcagcaggaatgaggggaggggatgtgtgagctgagggtagcaggcagtgggagaagagccagtggaggaggtgcttctggacctggaagacttcaggaattcacggatagctagcaaagaactcaaggatcttcctctcccatttcatagcagggaagactgaagcacagagtcacagaggacttggttggaaaggcatcagtctgctgggtcacttgttagtacccaggatttctggagactggtgggtcagaggctagcccaagagggtggccctggtctctttctctttgacaagccttaggactggtttctctccaggcttacttggactcttcatgaaggccttgcaaatgttgataaccacagcagccactggaccagaatcagactttgttttgaatcctggtcccccagggaggcaagcaacttacccataaccattctggcttca

SEQ ID NO: 168609 - DNA, 419 bp, Homo sapiens
caggaaggaaagtagatacagagatgtaaagtctctaaagaggcagaatgactaatggacttggaagccttggccactttcctgattgactatattgatgcagctaaagaaagaatttgtccggccggacatggtggctcacgcctgtaatcccagcactttgggaggccgaggcgggcagatcacgaggtcagcagatcgagaccatcctggccaacatggtgaaaccctgtctttactaaaatacaaaaaattagccgggcatggtggcacatgcctctagtcccagctactcgggagactgaggcagggggaattgcttgaacctggaaggtggaggttgcagtgagccgagattgcgccactgcactccagcctcgcgacagagtgagactctgtccccccgcaaaaaaaaaaaa

SEQ ID NO: 168610 - DNA, 480 bp, Homo sapiens
gtagcatgacagagggagaggagacagatgagctaatgtattcccatgtgcagcacaccaagcctctcatcttccaaacatattttaaaaataaaaaactagtactgagtgagcaaggccagcacgtatatagaacaattacacaaaccacaccagtgaaaaaaaatcacttctcacctcaaaagtctggcaatctacagctaggggttaataaaacatgtcttacgtctctgtttgacattagctgtatgtcgtaatggaaccctggaaatgattgacatttaaggatcgacttgaaggaggagggaagattggtctgaaaagtttgtgactgccagtagataatgtccaatgagaatgtgacagggaggtctagtacagtaagtgctgtacaatgcactctgaatttggcactcccgtcactagtggctccactgaagacatttcagtaaagctgtgacggtagaagccagattgttc

SEQ ID NO: 168611 - DNA, 469 bp, Homo sapiens
tctttgattgttagatggcatctttcccttcatacacccttatggaattctctcattttctttggatttgtttctttgctttgttctctttcagcttggaagattttctcaaatttgtaatcatctatggctgtaagagtatttctaagaacaagacactaaaacaactgcaaatgctgtgtcctgattaggcagcacataccgtctggtgagctgaaccatagggtgatcgaaggtgatctggccttttcattggtgggatcgcaatagtcaatattcgtaggtgttcgctcttggtttctccagtttctctagcgaacaatctattggtttcctgcctgggagatttatgccaggcttgactttctggacataaggcagaagaatagagagaggttaccacattgcagaaaccacatttttgtggaagagaacaaataaatgcttttgataaaccaaagcctcttga

SEQ ID NO: 168612 - DNA, 307 bp, Homo sapiens
ctaaccccaccaaaacaatgtgtggcttctatgggacagtgcatggaaagtgctgagtgtaggtccaggtacttagtaactgcatgatatatgtgagcctctgtcgtcattgtcatcactattaaaactattggaactcagatttgtagttcagactttagttttggggtagaggagagtctggcccagatgtctctggttctccaagtcttgtcctttaggggtctaccaggtcctgggcagggaagagtgagagtggggtaggggtcagtcccctgggtgtggtctcatctgtgggactccactc

SEQ ID NO: 168613 - DNA, 468 bp, Homo sapiens
gacctgctgcggtgtccttacactcattgagaaccattgatgttatgcaaatgctattaaactttgcgtctaagacttcttatttgtcctgtgacctttgattattagaaagcaagcataggttggtagtgaggcagaggtaatgcctatagaggcagtgctgctcctgtatcatactggatggataaaagctcacgtctcatcctatctggagagaattttcagagaccatctatatgcttcttgggaggtttaagtagattgataccctgttatctttagggatgacattgatagttactactccttatattggcttttcttccatccccatcttaactcttcctgctcctgtaggtcattctctagacagactgcttttactcaggttcttacctcagccattgcttttgggagaacccaaactaagacagcagtcattagagtacttagtatttaaaaggtaga

SEQ ID NO: 168614 - DNA, 461 bp, Homo sapiens
aataaaattagagaagaacaagagaaagagacgaaattccagtcccagtttgcagcctgaagaaaatcacttaactttcaaatgtgtgcgtcaatcacagattctgtgtggagacgtgagaaatctgagcagcagtggccctgaaagatccttttaccatgctatagatggaatcagtgtgtcaggcagaaaggtcaggacagaagatctctcgggtctcttttaaatgtgagcttctgggattctccttataaaagagttagattgttgttatgctcaaacaaaattacagagaatccctcaactataagatattaggtatgtacaatggtgtgctgaatggagctggcttgtaccagctcactagagaccactgttaaattttcaggaattttataagccagctgtcaaacacaataacgagagaatgttcaggtcagtggaactcctctgtaaactac

SEQ ID NO: 168615 - DNA, 505 bp, Homo sapiens
gattctaggcctgcatcagtcctgacttgtcctgggagggtgcatatagcctagcctatttagtgcctgagggaagggaaattttggccatttctgcgcagggcaggaccagtgatgaggtgcagcaaaatgaacccaaggcctgagtcaggaagtctgcatcattgaactggcagggcaagggcactggactgagagtcttgagttttattcctggtactatggctaacttgtatgtccttaggtaagtcctgtgcctctctgagcttcagtttcctcttctataaaattaggaggttggattattattattattgagacagagtctcactctgtcacccaggctggagtgcagtggcgagatctcagttcactacaagctccgcctcccgagttcacaccattctcctgcctcaacctcccgagtagctgggactacaggcgcccaccaccatgcccggctaattttttgcatttttagtagagatggggtttcaccgtttca

SEQ ID NO: 168616 - DNA, 401 bp, Homo sapiens
ccaggcattctaaattaacaatgctaactcttgtttgttcttcaaaattcaacatgtgcctgctcctttaggttagtgcccctcaatatgtaatttatggatggtgctgtctgtaaaatgttaccgattgatatgctttggatgtgtccccacccaaatctcatcttgaattgtaactcccacaattcccacctttcatgggaggaacccagtgggaggtgattgaattatggggcgggtctttcctgcactgttcttgtgatagtgaatggatctcacgagatctgatggttttcaaaaggggagttccccgcacaagctcccactttgcctgctgccatccacataagatgtgactcgctcctccttgccttatgccatgactgtgaggcctctctagc

SEQ ID NO: 168617 - DNA, 451 bp, Homo sapiens
gccctgccccacctttgagaggtctccagtgtcttcttttcaaggttgcttttcagacctcataatgttgagagaggtgtcacaaggagaattcccaacccctgagcaaatgggcaaagttgcaagtacccagcagagctgctcaaatattgctgcaaccagaaatccttcataattgagtgggaagcttctagtaaccaggaacaaaaagctgaggaattattacaggtttcttgaaaattattggatttttttttttttttagagatgggggtctcagtcacccatgctggagtgcagtggcacagtcacagttcactgcagcctcagactcctaagctcaagtgatcctcctgcctcagcctcctgagtagctgaggctatgggagctacatgcctggctaacttaaaaaacatttttttttttttttgtagagacaaggccttgctt

SEQ ID NO: 168618 - DNA, 379 bp, Homo sapiens
accttaaatacatacaattttatttgtcaactttagctccataaagctgaaaatgtaagtcttataataaaaaagcatacttatatttctacatattttatcaatatgtgagaatataaacagaaaaacttgcacaaaaatagttataacagtttgcttataatatttatgttggaaacaaatttaaatttcatcaacaggaaaacaaatatacatatcgtcattatttcacataataaactgatttatttacttaataaactgtcatttactgatgttatggattgattcagatatgaaatattcatatgtgtattagtacatacatatgtatatatacaatgacaaaaccttgagacatgaaattacataaataaac

SEQ ID NO: 168619 - DNA, 383 bp, Homo sapiens
aatcagtgtcatttctggattagtttgtattgattcatttttattctcgttaagtaagagtcattattcctctgcttatctgcatgcctggtaatttttgactatatgtaagagattataattttacatcattgggtaaaataaattactttttttaaattttattattattatactttaagttttagggtacatgtgcacaatgtgcaggtttgttacatatgtatacatgtgcgatgttggtgtgaataaattacttttcaatacctatgaatattattgaatttttcctgggatatggttaagttacatggaaatgatttgatctttctggatcacattttgttaggcagtaccagagtagcatttactctcagacttat

SEQ ID NO: 168620 - DNA, 556 bp, Homo sapiens
tcggctctgcctctctggatcaccggctagtactcccagttctcaatgtcccggtcctctggttgtcccagtcgctccagttgccccggtttccagcctcctcggtccctccagtctctcccgtccgcccagttttccctccatcggggttctaacctctcagatcctttaggaccaccccgctcccaaggccataggaggctggggcgcgttcggagtgcgttttttcgagacaatctccgtagcgctcacccctggccaccccgacccgcgctcctacctcgaggctgcggcgggctccgggcacggctggctggtgcgctactgacggtcgctcataggccctgtgcgccggcgagctctccagcggtaaggggcaggagcccagggcgagccagacccggcggctggcggcaggcggcaggcggcggaggtgagcgctggcgagagggcggaggacggagggcgggcaggagccagcgagcgaacaaggccagctccgcccgtgactcacccgcgctctctgccttcatcctctccccagcgctgctttttc

SEQ ID NO: 168621 - DNA, 107 bp, Homo sapiens
atatctgatgttgactatgactcttaccgtgatcctccctgcagtggtcacagtggcttggagtgcagggctctgatagctggtctgggatcacatgctgtcttgga

SEQ ID NO: 168622 - DNA, 206 bp, Homo sapiens
ttgttaaatgaatgaccagtaaatcagtgaaacaaaataaagatctcagaaatagaccataaatatcatcaactgatcttgggtaaagaaacaaaagcaacataatggagcaaagatagtcttttcaacaaacggaactggaacacttggacatccatatgcataaaaataaatctagatataggctttacgctcttcacaaaaaa

SEQ ID NO: 168623 - DNA, 294 bp, Homo sapiens
tgacccaagcacttcttaaaggcctcacatctcaatactgccacattggggattatgttccaacatgagttttggaggggacaaacattcgaaccacagcagttggctaataagaaaagacagttaataaatataggcaaggacagagaaattggaattcttatacattgctgatgggagtgtaaaatgatacagccactgtagaaaaatgtttggcagttcctcaaaaggtaacacatagagttatcatatgatccagtaattctactcctaggtatccacacaagagaaata

SEQ ID NO: 168624 - DNA, 908 bp, Homo sapiens
ccctgaagcagttgcaccaactttgttcaacatcagaaatttatattggagaaaaatccagcaagtgtaataaatttggaaaaacttttttttccccaaaaactatacctcaggaaacaatggagagtttatattaacatatttttgcatatggccatatgtataaaaatatttaattcaaaattgaatttaaaaagtctacataaatatcatacatagatatgtatgatattgaatacatgtattaaatacatagaatatgatatttaatacatagaaaagtctacatgaatatcagaatttacagtagaaacaactaagacacaaacacttgagacattacactaaagtgctgagtatagaaaataaaactaaagttgttaaattatttgtatataacttttaaaagagtggaagatattttgcaaagttatattcaaagtgtacttcttatttatttttttgagatggagtctcactttgttgcctacgttggagttcagtggcacgatttcagcttgctgccaacttcgacctttgggttcaagcagttctcctgccacggcctcctgagtagctgggaatacaggcatacaccagcatgtctggctattttttttttttttggtattttaagtagagatgagatttcaccatttggtccagggtggtctcgaactcttcatctcaagtgatctgcctaccttggcctcccagagtgctgggattgcagccatgagccattgcacccagcccaaagttatgcttttaaaataaattgttttattatttaacaattttggaaaagcaaattatgatataattcaagtatcaaattacttcatgctgtttcattgttcctattcacatgtgaaagcatgtgatcaattattgctgcatcacatata

SEQ ID NO: 168625 - DNA, 471 bp, Homo sapiens
ggatgacctgagcccaggagttagaggctgcagtgagctatgatagtgccactgcactccagcctaggcgacagagcaagagcctatctcaaaacaaaaacaaaaacaaaaaactcatttcctcctcaccccagcccctggcagccaccattttactttctgtttctgagtttatatacaactcatacccaagtttagatgcctcatatacagcatgtctttttgtgactggcttatacagcatgtctttttgtgactctcttagcacgatgtcctcaagattcagccatgttttgtggcatgtgtcagaatttccttccttttcaaggctgaataatattccattgcatgtacatctcgccttttgtgtattcattcatctgctgatgggcatttgggttccttctaccctttggttactatgaatagtgctgctaagaatatgggtatagatacctcttggagaccctg

SEQ ID NO: 168626 - DNA, 473 bp, Homo sapiens
ttggaagatgtgttggttgagagaaagattctgatttgttggttgaaaatagactcatcaagatcaactgctgtagtagtaaatattttgacattttgtctgtattcctgtgctgccctcacaagctgcatcaccttgagtgagtcattcatacttttttgtttgtttttgttttggagatggagtcttactctgttgcctaggctggagtgcggtggcgtgatcttggctcactgcgacctccatctcctgggttcaagtgatcctcctgcctcagcctcccgagtagctgggattacaggcacatgccaccatccctgctaatttttgcattttcagtagagacggagtttcaccatgttggtcaggttggtcttgaactcctgacctcaggtgatccgcccacctcagcctccccaagtgctgggattacaggtgtgagccaccgtgcccagcccagccatcatttttga

SEQ ID NO: 168627 - DNA, 346 bp, Homo sapiens
attttatagaggaggaaactgactttcaattaaaccatttgtcaagctctcttaaggtaatgagtcagacctttccagcactcagagcacagcagatctctgatgggggccccccaaatctcttcctccctgagtcagatcaggctgtgacatggtgttagcaagcgggtgtgcacgggaggatgtatggctttcagcttttaaagctcatctccctccatggctaagccaggcctagtgagatgtagatacataaatatctcctttatgccctgtcccaggggaaagatagaaccaaataaatccgattagcttcccaggatgctggctgctctctctttgaagt

SEQ ID NO: 168628 - DNA, 211 bp, Homo sapiens
aaaatcagagatggaaaggagatactgcaactgatgctacagaaattcaaaggatcattagtggctgctatgagtaactatatgccaataaattggaaaatctagaagaaatagataaattcctagacctacaacccaccaagattgaaccatgaagaaatccaaatcctgaagagaccaataataagtgatgaggttgaagctgaagtaa

SEQ ID NO: 168629 - DNA, 217 bp, Homo sapiens
ttgactgaatatcatggcctagcgaagtgggcacataaacataaccatcacaacccactctcgaaaattaacaggcagccctccgaatcccatcactgagacttgagtctctacaaatgacctcaggcaaaagagctaaggaagttcctgtctctgtaccattgatagggcagaaatgtcctatagcaacacagcctcctaaaccatatgtgtattt

SEQ ID NO: 168630 - DNA, 151 bp, Homo sapiens
caccgtaggaaatcccagctcagcttcctcagtttttgccgagccacgcactcaagggaaaaccagcaatcacggaaacatccattttaattattagcaaaattaaagacgtacaggcatgactttcagaaaccaggaactttttccctct

SEQ ID NO: 168631 - DNA, 315 bp, Homo sapiens
gatagctagaaagttgcctttgaaatagtttatggcttccctcatcttgcacatgatatagcaagcatgtggtggtcagggttatttaaaaaatatgtaaacattattattatttttttgaaacggagtctcactctgtcacccaggctggagtgcagtggtgcgaccttggctcactgcaacctctgcctcctgggttcaagtgattctcctgcctcagcctcccgagtagctgggactacaggtgcctgccgccacaaccagctaatttttgtatttttagtagagatggggtttcaccatattggccaggct

SEQ ID NO: 168632 - DNA, 151 bp, Homo sapiens
tgtatatattaatagtgtaaagaagttatctttacactattaagttattctaaccaggaaattaaatggttttttgactcagtcaaattattttacgctcttctgtaaattcttttttttttttttttagtttaggagtggaaagtttaat

SEQ ID NO: 168633 - DNA, 179 bp, Homo sapiens
tctagagttacacaagagtatacatcccacatctgcctctaggcatatattaccctggacaagatattaaataaatacctctgagctgcaagacattggacaataatagaacatcttcatagggttgttgcaaagattgagttaatgactgaaggtacttagcttagtaagaactcagt

SEQ ID NO: 168634 - DNA, 249 bp, Homo sapiens
tttagacgggcatctgccacactctaaaaatcgtcataacaaaagtcatttggcagatacctgacaaagcacttctccgtattattatcctcttgggtggtcccaatacccctgtgcagtcgatgtctctgtcacacgtgtccgtgtgaagagaccaccaaacaggctttgtgtgaggaacaaggctgtttatttcacctgggtgcaggcgggctgagtcctaaaagagagtcagcgaagggagatacc

SEQ ID NO: 168635 - DNA, 204 bp, Homo sapiens
tggactgcctttcttcaaattccttattaagaaaaacaacctctgtcttgactgatatgcttttatttgtttttttgtttgtttgttttttggttccctgcagttgaatttaattcccaactgatataattatgtttagtgcaaaggctcaactgggtatgattgtcatgagatcacttcagccaataaacagaaattatgata

SEQ ID NO: 168636 - DNA, 333 bp, Homo sapiens
agccaagcctcatctgcagcctgagatcctcaaaatgtcacagtctctttgctcttgggcagtatgatgccgcaggctctgcctggaagattattttcttgattacgggcgtgcacctggctaatttttgtgtttttagtggagatggggtttcactatactggccagtctggtcttttaactcctgacctcagatgctccacctgccttggcctcccaaagagctggaattacaggcgtgcagctccacccagcctggaagatttttttttttttttttgagacagagtctagctctgtcgcccaggctggagtgcagcggctcgatctcgg

SEQ ID NO: 168637 - DNA, 424 bp, Homo sapiens
tgggagtctggacatgccttctttctgggtgctagttacacagatatgttctgtttgtgaaaatgcagcttgctgtacacgtatgaagatgcacacttttctgtacggaggcgacacttcagtgtaaaaaggttttttaaaaatgacaccccagtgtagcgtcagacacatgcctcagtcccacctcacgtccccatccgtgagtccagcaacgacccaccagccgcataaatcagaggccagggaagtcgagctggcggctgggtttggaacatgcttcggtgactcagagcagcagctggaaataatctgctgctgttgacttcaccgccctcctgttcggcagctcgggggacctgccacggcccactgagtattccagtgccagagagctggggaaacctgtcctgaagttggcggccgc

SEQ ID NO: 168638 - DNA, 845 bp, Homo sapiens
tccgtccatccaccattattccatgaaagaaacaggaatagagggaaaaaaaccacctagataatttccatgtactgacagatgcagattatgaaattaaaatatcaatgacatttcttttcaatcatcatcacataaaaacaaaaattaaaaacaaaccaaaagcctcccagtgccacctcagcataaattgagcaacagctctccccatctctgccttacataataaactacaagctaattaaactgtgaatgaatgtgataacttgttacccttaaagatattcacagagatagatgaacttcattttggaagctggaaggtaaaattcccctccctgggaacccctacaggagtcggcctaagcttcccttcctgcatccatgtgtgtgttggttccttctgcactgcacaatccccaaggctggagagaaaggctgtttccctctgctctgtattccctacagcaccaggccagggccaggctgaatgaaagtcaagtgcaatcctcgctatgctaccgggagagccctaacattccttttggatatttgtatccagcacacagtattataagcacttgacagctgaatcctgcctctttgaggctatatttattttatttattacatgccattttgtaccttactgaagaaacaaaggcgggggcagagaggggagaccagaaaaatctcccagcaaaaaacaaatgagtattgtaatgaactataatcattaaattgcactccatatgtctgatccaggaaccaataagtaaaggggagggttaattctaaatgaccatcaatgtcgacgcggccgcgaatttagtagtagtaggcgg

SEQ ID NO: 168639 - DNA, 261 bp, Homo sapiens
agaaagacctgccccagagccccctggctttaggggtaggaattggataaggtgctattggaaggaaagtcttctggatcttggtgtgatctaagtaaggggtaaatgattggtaaacgatttttgagtgtgtaaaatgacgtagctttcatagcctgattttatggaatacattcttgatagcttcagtccggtagtttcctatcaagagatgtgaagctccatattttcccctcaagaggggggtgatcttaagactct

SEQ ID NO: 168640 - DNA, 191 bp, Homo sapiens
ctccagcttctggaccccatccaaagtggcagctccctctgctcttccacaccacccgctccaggccctggcggctcccgcctcaccagcctccctctgccccagccagctggctatgagctctcgggcccatgctcagttctggtgtcggtccatggctccccagctgcaggggggccaaagggcagcaa

SEQ ID NO: 168641 - DNA, 252 bp, Homo sapiens
ggatagtttgatagcaattggggaggggaatcatatcttaatttaacatcataaacctacacaaattgttgatgaataaaagattaattataaatacaaaaccataaagctggaagaaaatatgaagattgagaggactttctaaagattaaagaaaggaagaaaccacaaaacaaaatcaatagatttgactgcataaaattaagaacctctgtgctttaaaacaaaaaatgccaaaagaaaattaaaagg

SEQ ID NO: 168642 - DNA, 185 bp, Homo sapiens
aacgacggtttcgggtagattgttggttaagaagaaagctgggaaagtgaaggagagggggaagaaaggaagtgaaaagactttggctgttggaatctcagatctggaataggctgtataggctatttataatctctaattgccgaggaacctgaagttcagagttaaccagtgactgactcagg

SEQ ID NO: 168643 - DNA, 330 bp, Homo sapiens
cggctggctctgggtttccttgtgagtgatcctgtccgtggcattagtaccacctagtggacttcgcaggaagaactgcatgttgaaaccatgcggacagtcatttaccagagcggcggcggtgagcgcagcagaagggccagggtcctccgagcgaatcagcatgaaagaaaccataataatgagtaaactcaaagcttgaagcataaactcaaagcttcagggggacaatgagacagaggcaggggcgctggtcttgctttctcaggccgcccagttctgtttgactgagcctgtggtccgagcggatggaatccgcccctccagcac

SEQ ID NO: 168644 - DNA, 398 bp, Homo sapiens
cggagcttgcagtgagccaagatcgcgccactgcactccatccagcctgggtgacagcgagacaccgtctcaaaaaaaaaaaaaaaaaaaaaaatgcctccaaagttgatggcccaagtaactggcaggttgctcatgccattggtgtgaatagaaaacactgggaaagaaccagtttaggagagttttaggagaaagattgcaggttcaattttagacaaattgagctagaggtgcttctaaaatgttcaaatggtcatgtcaaggcaataaatgggtctggagtttagagaaggaatctgagctggagttaatttaacagtcatcggcatatggaagaaaactgaggccactggtatggagcaagtatggagttaggaaagaagaggccctggagc

SEQ ID NO: 168645 - DNA, 478 bp, Homo sapiens
gaagaaactccgaaaacatcttaacatcagaaggaacaaattccagacgcgccatcttaagagctgtaacactcaccgcgaggggcgtggcttcatgcttgaagtcagtgagaccaagaacccaccaattctggacacattatgacctttgtttcctgccatggaagaaaatttaaattcccaggctgaagaagcaaattaggcctctcaagcagaaaccaacagctttggagaccagaagccccaaatcaagctatcagcagggaagtactacctctggaagatgcaatgaagaatgcttttttccctcttctggcttctggcggctctgtattacttggcttccttggcttgtggctacatcactccaatctctgtctcagtcttcacattgccttttcctctatgagtttataggaatgaatgcaggaggaaatgacacctgagttgagcagtaagaggtgagtggaatagtgtg

SEQ ID NO: 168646 - DNA, 228 bp, Homo sapiens
ttccagccctacctggcacaatcccgtatgtgttgcagcctcaagtctaggcttccactatccttacagtatctccccacctctcaaccccaaagtacagtctgaaattcttgtcctggttacatgcctcatgtctttgggttgattgtttttccttgtttcaaaaaaaataaaaatcaggaaacatctcttgtatggtctaggtttcctcagtgtcatggtcacttt

SEQ ID NO: 168647 - DNA, 176 bp, Homo sapiens
catgtggaatgaatggccagaaatatgagccagcttgtgtggttgggacactgctaatagtggtgggctatgactttggaacaaggtgcaagatgagagaatggagattagcttggatgtgtacaaataaaaccatcggtaagtatgaaagagaagctgagagtcatagaggccag

SEQ ID NO: 168648 - DNA, 186 bp, Homo sapiens
ctccagagagaaaatctgaagtagttaagacgggttaagtaatgtctttggacttcttgggaacaactggcacagaggaccatgtcttacttggctctgtcttttgcagtttcatttcactctctctttaaatctttgaaaaccatatgtctgctctggttttattatctgcttctatccaaggca

SEQ ID NO: 168649 - DNA, 132 bp, Homo sapiens
tatttattgtgactgtgcatgtatggatacaaagcacacaagtgacattaagaccttaagggaaaatccaggaatgagctactccttcaaagcgtgatgtgcatgcaagctcttttagatcctcaaccatgt

SEQ ID NO: 168650 - DNA, 172 bp, Homo sapiens
tagtatcttattgtatggacataccatattttgttcatacacttaccagctgaagatcatgtgagttatctcctgtttttggagatcatgaataaagccactggagcaggagatttaagggtggggaatgtgtctcttttctgaaaggtctccagcacatcttttttttttt

SEQ ID NO: 168651 - DNA, 446 bp, Homo sapiens
ctcaacctcccaggctcaattgattgtaccctagcctgcccagtacctgggactacagccatgcgtcaccacactcagctaatttttgtatttttagtagagatggggttttgccatattggtcaggctgatctcgaactcctggctccaaatgattctcccatctcggcctcccaaagttgtgggattacaggtgccaaaattacctttagaaaatgtttcttgactattctgcttaattacttttttataatctttattggagcggatagcttgcggcaagctatccggttcaatgctgctgattattctccaggaggctcttctagctccaatcacattcttatatgcaacagataggaggtttctttcttcaactgtcagctccacatccatccctgctactttcttcattgactccaccattccgtcgtatcgctcagcct

SEQ ID NO: 168652 - DNA, 403 bp, Homo sapiens
tagctgggattacatgcgtgtgacattgcgcccagctaatttttgtatttttagtagagatggggttttgccatattggtcaggctgatctcgaactcctggctccaaatgattctcccatctcggcctcccaaagttgtgggattacaggtgccaaaattacctttagaaaatgtttcttgactattctgcttaattacttttttataatctttattggagcggatagcttgcggcaagctatccggttcaatgctgctgattattctccaggaggctcttctagctccaatcacattcttatatgcaacagataggaggtttctttcttcaactgtcagctccacatccatccctgctactttcttcattgactccaccattccgtcgtatcgctcagcct

SEQ ID NO: 168653 - DNA, 2506 bp, Homo sapiens
  misc_feature (790)..(790): n is a, c, g, or t
  misc_feature (1904)..(1904): n is a, c, g, or t
  misc_feature (1915)..(1915): n is a, c, g, or t
  misc_feature (1917)..(1918): n is a, c, g, or t
  misc_feature (1924)..(1924): n is a, c, g, or t
tgacacagaataacctccatctcctgggtcccagcgattctcctgcctcagcctcttcctatttcacaagtagggaaactgaagcccaggtaggcaagcctgacttgctggagtcacacaggaagttggcagctctgctccatccctgggatctggagcccctgctctggggaaggagaggtggggcgctgccttcccagagtcccctcaagctggcagggacggctgtacccccagggtcagaggagaactaaaaggagcggaagctggcctgggtccagggagagacctcgtgtttgcccaaaagggagctggagaggggcagctgggcccatatgcagggaggagctgcagggagctggtggcggggcagcaaagagaagtggatttggtgggtagaggggcccctccttggttctagtcctccccgcagccccttgcaaacaggcggggctctcctgtccttctctcctgcagcaagccctacatgaagaggcctctttggtgagtggcagctcaacctctgctaaatgcctccagtgatggggagttcactaccttccaaagtttttaaaagatgttaaccactgctattcaagaacaattctagaatttttttttttttgaaagacaaggtctcattctgtctcgcaggccagagtgcagtggtgtgatcatagctcactgcagctttgacttcctgggctcaagcaatcctccctcctcagcctcctgagtacctgagactacagatgtgcaccaccacacggggaggcttccatgtctacanaaatttttttaaaaaattagttgaatgtgatggtgcattcctgtggtcctagctattcaggaggctaaggtgggaggatcacttgagcctgggaggtgaggctgcagtgagccatgatcctgctactctactctagcctggactaacagagtgagaccctgtcaaaaaaaaaaaaaaatctttggtaacaaaaataaataaaaatcactagtttagacaaattatgagaaagctaggaaggttccagatttttgtgagccttgtgtacttactaaaggattttgactcaagggcaatggggagtcaatggaagtgttgttgttgttgttgttgttgtttgagacaggatctcactctgtcgcccaggctggaatgtagcagcataatcatagttcactgtagccttgatctcccaggcacaagcagtcctcccacctcagctgcccaagtagctgggaccaagggcgcacactccaccacccccagctaatttttaaaaaatatttttgtagagatgggggtctccctctgttgcttaggctggtcaattgaagtttttgagcaggagtgtgaccgaagggctcagtctagtgggttactctgatggctatttgtaggctggatggagtggggaggttaattctggggtaggagcagtagtccaggggtgaggtgatacagatctggacataggaatggaaaatggaaagtcagtggcagggagactgaaaaagcagcagtcaggctgaatgattgatagcagcgggaatgatgttggcctggtttcatccctgggaggagaattgacatgaggagactgaagaaaggcctgggtgtggggagagagctgtggcattcaattgaatgaagggtgacagctggtcatgaaggtgaggcactctagcaggcagaatccagacaaaatctgggaactgactgtgggtcctaggaaccacttgaggggaaaccatttttagggaggccttgagtttaaaaaaaaatcattgaggccgggtgcagtggctcacgcctgtaatctcagcactttgggaggccgaggtgggaggatcgtttgagtccaggagttcgagaccagtctgggcaacatggcganactccatctcnannaaaaanaaaacaaaacctcattggttttagatcagttggaagatgagttggaagtttgtgcagggagttagatgcacacacacacgcacacacacacacacacacacacacacacacagcctcatgactgcctctgacattgagaagctgcagagagagtaggaggaccaggtcgggggacacaaactatagctgaaggccaggatgaactcagaaacaagagattaaatgcggatgctatctccattccccaggctgaaaattggagggtagttttgtttgtttgtttgtttgtttttgctggggaaagtgatagtctaagagaaagaaacatagattgtgatatttgggaggccgaggcaggtggatcatgaagtcaggagtttgagaccagcctgaccaacgtggagaaaccccgtctctcctaaaaatacaaaattagccaggcatggtggcacacgcctgtaatcccagctactggagaggctgaggcaggagaatcgcttgaacccgggaggcggaggttgccgtgagctgagatcgcgccactgcactccagcctgggcaacaagagcgaaactctgtctc

SEQ ID NO: 168654 - DNA, 553 bp, Homo sapiens
aggcgctcggcgcagacagcccgtgggtttgtgtttgtggggtgtgtgtctgtgagcgcgggcgcttccgaagctctcgctccgcagcctcacaccccagaacttcgggttgcaagagcagattttagctctgaggctcacaacagagggcggccaccgtgcagggggagtggccagagccagcttttcccagcgccagggtcgctctcccgggtcccgccggactccatgccgccccgcggggccgcaggagccacccgggccctcgcgccccaaagtctttgtgccggtggcggcgcgggaagaccggccccgggggcctgggctgcggcccaaaggccaaaaatgcgggagaggcgtgggcgcgaggcgggacaagctccgcacagtcgccgtcccgcaaggggcaaaaaagtagaaaaagccgtttggggccaaactctcgggtctgagaaaccacgtttccgaggacgaactcgcggtgggaggacacatggggtacaggggacattgttcgcggcgcctgcccggcgcgccgtgggtgcgcggccgc

SEQ ID NO: 168655 - DNA, 458 bp, Homo sapiens
ttgcatcatctattttattttttggaagtattttaaggtgaggtctagacatcctgacatgctgctacttaagagactaatgcagctcctaaaaagaagggaattttcctatgcaagcacaatccattatcacatctaacagaatttacagtaattccataatatcacctagtatctagcccatattcaaagttccccaattaaaaaatgtctttcccagcagattgctctgatctcatcagggttgtctcttggggtttacaacaggtgctgttttcacttcctcctttctcctctacgttttctgcaaactggaagctagatctcaagctgtgctggccagtacagtagtcaccaggcacatataaatttaaattaattgaactgaagtaaaattcagctcctcagtcatgcaaaccacatgtcaagtgctcagtagctgcttgtggccactggct

SEQ ID NO: 168656 - DNA, 487 bp, Homo sapiens
aggtttttgtttctgagacagggtctcactctatcgctcaggctgcagtgcagaggcatgatctcagcctcccaagtagctgagactacaggcgcgtgcaccaccaggcttagctaatttattttttaagttttgtaaagatggggtctacctatgttgtccaggctggtctcaaactcctgggctcaagtgatcctctgccttggcttcttaaagtgttgggattacaggcttgagccactgtacctggctgggggttttatttattacatgcacaagattgtcagaatgagatctgtgtatatctttttcaaagtttaatcacactactgacattccttaccattaatttgcttgctaattatgatcaacttaatttaaattataaacatatttgaaatgctgacatgcacagcttagatttgtttctgctattataatctctttgttaaaaatgtacataagatattaataaatactttgatat

SEQ ID NO: 168657 - DNA, 436 bp, Homo sapiens
ctgaaaatacaagtcccataattcttatcacacaattatagatttttttcttctatcacgaaaaagatgaagttatgcaactgagcttaagtcacatcacactagaaactgtaatcaccttttctagaagataaattttacaaggagaatacaaaatgcatgcaaaatcccaacaaaaataactttaagattttacatattgcattagaaaaagactctgaaaaaatatatatgtacttattgtttaatacaaatactattgaatactaatactaaagagcagagagaactgcctactgaatccatttcaaatgaggcaaattagatcttaaaatcatttctttctcaacggaggtaataaaaagtatcaatcatgcctcactgtgaagcaggtgctgctgtaagacaaatctccatgtctgctccacctccgagt

SEQ ID NO: 168658 - DNA, 267 bp, Homo sapiens
ctaccttccaagggaccctgttacaaaatacactgaactcagacctcaatgcagcctatagtgacgccatcagtcccatggcactggctacctgcaatcttccctggctagcctttggacacgggactcatggtgcctaactgttagagggagtttctggaaagaaaacactggttttcctcccagctaggaagatcagacttcaactaagcaatgtgactactgtagatggtatccaagacttatttgatttctgagttctcttgt

SEQ ID NO: 168659 - DNA, 458 bp, Homo sapiens
aagtctgacaaggaaaatgtgctgtgatcatcctacgggggacagagcagctgctccaaggtggagtctattgtcaaggtcctcctggtaacaaaaagaggaaaaggtctatcaaagcatttcctgcccgcgggagccatgtgcttccattaattcttttccctgagtcagtctgtctccctcagctcatgtctctccatgtccactgtccagagaaaagaacaggcatttttagcagttgatttaaaaacctttccacaaagtgaggttaacgagaggaacaagctcagatattcagtggtatgcatctatatatttcataaggaagctggcactaagaaagggtggtttacggcagttatgatttttcagaaatctgctcatgcccttcaactgctttggcactgccatgggtacctgaggataagagagatgtctctgccatctctgcaccatca

SEQ ID NO: 168660 - DNA, 457 bp, Homo sapiens
gctccaaccacctgcaaccctgagctgaaataagtgcgtaaatgattatcttgttttcattaatctctctttaatgtatgtatagctcacatttatttcaatgtttaatattagaagtgttttggcctttatttagaagtttggtgatgtttttgtgacaagaaatatgccttaagaactgaactcttgtttatattaattctcctatggtaaaattggttttattttatgttgttctatttaaagtagcagtttctaggagcctatctatgacattagttgaggatttattgtatttactcatgcattgtttatcagtgacagatcactttgtatcttcttcctttggtcttttgtttctgtctctgctggctcttcctaccttcctcccttgaatattctccatagccatcacccactatggactgcacattgtccagctaccaccctgtctcat

SEQ ID NO: 168661 - DNA, 308 bp, Homo sapiens
aacgtccttgaaaacttccataaatgatggtgaataaattaaaaaggtggaaacaattttccaggtctctgagccatattcaatataatgaatcctgaataggagttcaatgaaaagattaggtagattttttttaaaaaaaacccatatcccatgggatcctgctgtaaggtacttttataaattatactgattatactgtctcatttctctgtctatttgccatgtgttatatactttggtgatctttgagaaagcatttaacctattacaggcatttttttcccctaaagtacaagtaggtaggt

SEQ ID NO: 168662 - DNA, 680 bp, Homo sapiens
agctctttcatacagtctgtaaatttttggtaaatgttattgaattatacattcacaaaagtacacgaatcataagtaaacagctcaatgaattttcacaaagcaaacagtgtagccagctctcagaccaagaatcagaacaccaccagcatgagaatcagaacatcactggcactcaaaaatgctccctcttactctcttccagttattgcccgaccgctgcccccatgtgcacagtgtgaatagtatcttgtcttctatcatcagagattagtttcactcgtgcctgtttttgaactttttataaatgtaatcattcagtaagtaccactttgctgtctggctcctttcctcatattatgtttgtgaaattcatctatgaattatttagtttgttcacattgctgaatgatattttgcattttgaacaaccacagcttatccgttctactatgatagatgtggtttcagtttggggctgttatgagtaatgctgcaattaaaactctcctatatgacttttggtgaataaatgtcaagtactgggttgggtacatacctaggagtgggatttataggtcttaggatatgccttcatcagctttagttaacactatcagttttctaaaatggttgtacctttttcacatccattagcaaagtagaagagttccttcctc

SEQ ID NO: 168663 - DNA, 437 bp, Homo sapiens
taacagaggggtccccaccccatgccgaccgaggtcgctctcctccacgtctcccagtcgcccacaaaggcggccacgcgcaggccggcgcatcccgagtgcggggcgcccatcccgactcagcccgccgcgcccaccgaggagaggagaggcgaccccgccccgccgtccccgcagcccgcccggtcgcccccgctgcgtcagtgcctcaggcagggcctgcgcgtcctcctcgcgaccccaaaggaacgtctggtccctagaagggtcgctgccgcgttaccgcctctttgcgcggggaagaggcagtcactgcccgaacctcggcccgaagccacgagagggagtccggggcggggagcggggccgggcgtccgattcccgcggcgctcccgcgctgtcccgcgtggctgcgggaccgtggggagggcggccgc

SEQ ID NO: 168664 - DNA, 311 bp, Homo sapiens
cagacacacacatgcagccgctgctccacagtcactccggacctccctgtgacaacacagggtgcccttctgtctctgggagtgcccctttcactcttatgtgctgtttggacggggattgtatgatcactgtgattatgagggggccccaggcattgggcgttctttctcctctggagcttatctgcccctacatttgctgtcctggtccccgccatcccacagaccatattcaggccccatgctctggtcccacgggcctctggtggacttggggaggggccaggctgctcaccctcaaggggcagcgc

SEQ ID NO: 168665 - DNA, 425 bp, Homo sapiens
tgggcccttattcacgcgtagatactgggaatgagcccgcacagagaaaaagagcactgcctgcaagccaggagaggcttgggagaaatcagctcagccctgccggttcgcggatcatggacgtccagcctcccagccggaagaaacccacctctgcggcttaagccacccggcttgaggtcttttgctcttccacctcattagatgccgggcaacaaaccaacccatatgccttacattgggttggtttgttgcccggcatctaatgaggtggaagagcagctcccccatcgttactgggatgcactggccctcaggatcatggacttgggctgaagggtggggcccagccggcttggttccctggggcccccccggccacacagggtctttctgttgggccaaagctgagtttccagggacgg

SEQ ID NO: 168666 - DNA, 358 bp, Homo sapiens
cctctgaacaaagcagtctgcttagttttacccatattaattcagcagctcccaactctcctgactcaggattcatcaagtactcacatcctagactctaggagccagctaccctattttctcatagcacctgtgtgagtttatcttcttactaaaacataaaagctccttaagggcagaagctatgcaagctttgctcatcactgaatcccaaggattcattggcaaacaacaggtgtttgtttgtcttagccccttctgtaacaaaagctcagagtgagtggctcaagtaacaacaagaaggcaaattgaactggagtttgaacaagctttggctggggttagctgcaagatgagg

SEQ ID NO: 168667 - DNA, 229 bp, Homo sapiens
gatttttttttcctcctctttcttcagagatgtcaataagatttaaaacatagcctgttaaaagattgcctaaagaaggcgtggacagtcaagaaagagaaattcaaagaactcctggtgccccaagcttaccagcgcaaggcataaaaacaagggtcagccacttggcaccctgtttcgggaccatcgccagcctctggttcagtccaaagaccagtgtggatttcct

SEQ ID NO: 168668 - DNA, 316 bp, Homo sapiens
gtgcctgtgttgtggtgcactgtgtcgtggtgcactgtgtcgtggtgcactgtgtcgtggtgttccagtcttcagtctactcagacccactctctacacagctaccagcaagtggattttaggaggaaatctaaatgcatctctccctgcacccactactccacagatcctctgtcactagcggtgacctacgctccttactacagcaagcagagccctcctcgccagcctcacgacacctgcctccaaacctcaaaggactttatcgcctcagacaccttcctatttcttatctctacccccccaccacccacta

SEQ ID NO: 168669 - DNA, 162 bp, Homo sapiens
attcagctataacataacttattttctgaacatttaaattatccgtgtggaaagcctcaaattattaccatgtactaaatctggaagtcattttgaaaattcagtgccttccaatcaatacttctgggactgagtaactgtgatgggagaatacctcctctt

SEQ ID NO: 168670 - DNA, 188 bp, Homo sapiens
gcccagcagtgcatcccctttcttctctgagttctccccagtacaaatctggtgcttggatctctttctgactcctcagtttatctgtcaaatggttccaaacttgagtagggtgagaggatcatcccccgtcaaatgtacattattcatacactgtaatggcgtaaaagaaccctagacacatggac

SEQ ID NO: 168671 - DNA, 112 bp, Homo sapiens
acccgcttcacgaccttttgtcgctcgtgcccactcttacgctcgtccccgcagtgtagtttcttcttccctccggtgcaagcaaaagccggcctggaggtccccactacag

SEQ ID NO: 168672 - DNA, 493 bp, Homo sapiens
gggtgaggacacaaatccaaaccatatcagtttataaagtctattaattagaaaaacttacaaaaacttaaaaataaagtcaatttattttaaaaaattaaataaatgaaccgccaacaaatattataaatttaagtaatagatgtactgtagttcattatatttttctctatttttctgtatgtttgaaattttcatttagaaatgtttttattaaatttatttattttgaggacagggtctcactgtgttgcccacactggagtgcagtggcttgatcttggctcactgcaaccttgacttcctagtctcaggtgatcctcccacctcacctcctgagtagctgggactacaggcatgagccatcatgcctggctatatgtttccatttctatttatttaatttaaaaaattctttctttccttaatttttgagacagggtcttgctctgttgtccaggctggagtgcagtggtgtgaatatggctcactg

SEQ ID NO: 168673 - DNA, 434 bp, Homo sapiens
tgaagaccaaaggcaggtctttgccctttctccaaaccaagcagagacctctgcctcacacacaatcagactgatgatttggtgctcctttagctatgcttacagtcagttgtctaccaaaagaaaagtaccatgtatttggaagccaaataacagaatgtcaggctcgaagatctgttgtgatgactaggctaaatgcctcaccacacctgtgttggtcaactttgtgccctatggttagttaagagcccctgtctacagtggtttcccacattaggcaaagctatagatcccacatttataagtctcaatgagttctgaaggtgtttgaggagttgcaagttccaggatcattccagattgaaatgatatgagaaagtcacaggtatgtgtcttctttttcccatgtggaatggccataacttgcctctgaa

SEQ ID NO: 168674 - DNA, 449 bp, Homo sapiens
tcctgggttcaagcgatcctccctcctcagcctcttgagtaactgggactacaggtgcacacctggatgattttaaaatatttttttagagatggcctctccctgtgttgcccaagctggtctcaaactcctgggctcaagagatcctcccacctcagcttcccaaagcattaggattacaggtgtgagccaccgtgcctggtctgaatttcttgctttacatgttagctgggaagtagatgccctcaagaatggtggagcatatgagctgtccctctaggtcagtcccatggccacccagctccagccctgtctctaggtgtgtgaatcccttttgcacaacagagagcctggggaggtggaaggtcttggtgacaccttgtgagttattcacactggctgtgggtgacagagccagaggtgggagcacagagctctcacagcacaga

SEQ ID NO: 168675 - DNA, 550 bp, Homo sapiens
ttttaaaaatatttttattggggtaaattatacacaacataacttttatcattttagtcatatttaagtgtacagttcagtagcattaagtgcattaatattgttgtggaatgatcaccatcatttatctctagaacattttcatcttcctaaacagaaacactgtacccattaaacaatagctcccagtagaccccttcccctggcaactaccattcaactttctgtctctgtaagttcgactactctagctttctcatgtaattggaatcatacaatatttgtccttttgtgtctggcttatttcaatcagccttatgtcctcaaggttaatccatgttgtaacatgtatgagaatttcaatcctttttaagactgagtaatattccaccacaatttatttatccattcacctgtccatgaacatttgggttgtttttacgttttggttattgaaggtaatgctgctgttaacattagcatacaaaaatagtcttttaaacacattgttaaccactacatatacaaacattgaaatcgggaacactgg

SEQ ID NO: 168676 - DNA, 273 bp, Homo sapiens
caatttacaacctaaagtacgcccgcgagagaactgtctcccacccggaggggatcttgaggcaatggccactttacgacttgcaatggcatcagcttgaccacttggtagatacggcaccaaagtcagtcacttagaccttgcacctgctcattccctcccatgcatgccattcatgccaaatcccctttaaaattccctgctttctgccccaaaagtgaagcaatacccttaaaggcgttcaggcggccgtgaatttagtagtagtcgacc

SEQ ID NO: 168677 - DNA, 123 bp, Homo sapiens
cagtaacctggcaaagtattttaaatgtgatttgcagaagcttataggagttaatgcctcacagatagtaagtagcagagttaggggtcagcctggcttcatttacttcccacaccctgtgtt

SEQ ID NO: 168678 - DNA, 229 bp, Homo sapiens
ggacaccatggtccatatcattttgatcaaactattcaacaagtctctgtgaagttgcaaactttcccacattttcctgacttctgagccctccaaaatgttccaacctctgcctgttacccagttccaaagttagttccacatttttgagtgtcttcacagcagtgccccactctctgtggtaccaatttactgtattagtttgttctcaagctgctatagaaaactg

SEQ ID NO: 168679 - DNA, 409 bp, Homo sapiens
tctcagaaatgtcacatgatttttgtctaatgattttaaacaaacaaaccatgggaatgcccaaggttgactaggatgcaataaaactggaaatcgcttaggcttctagtggcaaagtagattggtaaagcacttttgaaatgttgacgttatacgttaatgatatgggagcaggcagggaagtgctgcttacataaaggcatggtccccggtgagggttccaccctcgggcctgggcccatggatctaagtgaggacaagcatttctgctttcgctcccaaatgctgcattttctaagaccactctggcccgccatatccccacctaacaggcagacacacacaagtagctggacatcgagaggaacacacaggaagaagaatacaccggcggatgctgacaggtcat

SEQ ID NO: 168680 - DNA, 439 bp, Homo sapiens
aaaaatacgtttagctatcagcaatcaatctattgactattgtccccaggtagcatttgctaccagtgggaaaatactccttatattttaactactattgcacacttcataattgctaattagtacttaattttccctttgctcagtgaataatgattattgctttcacctaatacaacaaagggctacctttcacaatcaattttttaaaattagccaatgatcaataggtactacccatcccgcatgaatgccttacatagtctatcaggatatactgtgttaaccactacaatttttcaagcactgttggaggtagttaactttaatgctaacataaatacaggttagctactttgattattttaagaactataaaactttgaacactttgacctatggtaagaaaatttccatcattgaacagttttaaacttgc

SEQ ID NO: 168681 - DNA, 288 bp, Homo sapiens
cttcctcctgcattcctgttttacagtgagccacagaagtctggccacagttctcactggtcccttactttattggccacttcatctgcatttcccaccctcacttacccgtatgtcattgccaaatgaggccattcacatccaggtttcattaccttccttcctggtgtaagatcccccccatgattttatcaaataaggccaaattcccccacttatttttgaagggcatttattttcctgcctttatttgaaattcctccctaatacgccttgcaggttctatga

SEQ ID NO: 168682 - DNA, 490 bp, Homo sapiens
tctcttcctgagaagttctcctgcctgcataaccattcattagggagtactttacaagcatgaaggatattagggtaagtggctaattataaatctactctagagacatataatcatacagattattcataaaatttttcagtgctgtccttccacatttaattgcattttgctcaaactgtagaatgccctacattccccccaccccaatttgctatttccttattaaaatagaaaattataggcaagatacaattatatgcgttcctcttcctgaaattataacatttctaaacttacccacgtaggtactactgaatccaactgccaacaataaaaagacttttatttagtagaggctacctttcccaccagtgactctttttctacaactgccttgtcagtttggtaattcacttatgattttctaatgttctcttggtgaattttattatcttgtaccctctttttttttttttttttttttaaa

SEQ ID NO: 168683 - DNA, 336 bp, Homo sapiens
agtgccaatcagacagcggcgatatggtgagttatatttgttctgacctcgtgagactctgtccagccccactaagaatgaaaagaacattcctacctggttcctgatatgactgctcctcactagagatcagtgtattcagaatgccaaagctctactcccagtgtcatggggaagctccaagtggcccagtcaaacgtggcaggttatcactaaccaataagagcgaccaactatctgtgatcaaggctaaatgccagagaagaaaatctaatggctgcaggggaagagaagtcactatattggaaatgaacacttccaagacaaagaaacact

SEQ ID NO: 168684 - DNA, 173 bp, Homo sapiens
aaaagaggatcaccagaggctgaagtgcgggggcctcatgagaaccgaggtacaccaggagctcagaggtggggccagcatgttctgggggtgtctacaaaggcttccggcagctcagagttcagcctgagcaaactcttgctcattcattcactcattcattcagccaaggt

SEQ ID NO: 168685 - DNA, 387 bp, Homo sapiens
gagagaatggtggaggaaggagggagtttcaggaaggagggaggttcaggaaggagggagtgggcaactggggtgactgctgctgagaaaggagaggcaaggacagagacgtgaccatgtgctcctcagtgcagagggtgtgggtgacctcgacaggagcagtctctgtcttaagagggcacaggagctcggctgaagccaagggagtagataacatccatagcaatggacaggtggggaaccagcttagtgagggcctgaaaatatcgacccactgttctttttgaaacttgatattctctaagccactgttatattataatcaaatttgctctattctcatcctttggaagtattgtgtagtcattcaattttcttttttttttc

SEQ ID NO: 168686 - DNA, 388 bp, Homo sapiens
ctcagtttcagctacaagtcctgggggctcaaggaaaagagcagttccaaaaaaaaaaaaaaaaacaaacaaaaaaacggatacttacttttatcatcatagatttactgctgttggagaaaaggattgtatgggtaaaaatacaaagtgctgcaacaatgtggtccccagcaccagtgcagtgtggtcctcctgtggggcaggtgatggataaactatgtacaccgctagaaaaggcagtgccaatttgagggagctctgagtgccacaggtgggaaacagtgctgtggcagtggtggtataaaaacagcagcttccaggagtaccaaacactaatgcaacgtcatcccctagggacttctggattggaatgagaaacttgacggga

SEQ ID NO: 168687 - DNA, 1168 bp, Homo sapiens
  misc_feature (47)..(47): n is a, c, g, or t
ggttttcccttgtagtgcctgcacagtacaaaatgaaagcatctcangagttaaccatgtctccaactgctccagaaaaaatggaaagtaatagcaccttcacaagttttgagaacactacagtctggttcttgggaacaatcaactgtatcactgtggctcttgtgttctctaaaggaaaaccatttagacagccaacttatacaaactatatatttgtccttgtgctgataatacagcttggtgtatgtctattcattctatttgctgatataccagaattatatagacgtttggatctgctctgcactcccgtcctgtggagggcctccattgtcatcatgctcagcttgaatttcattgtgtcccttgtggccgaggaggctgttattgaaaatcgagccctgtggatgatgattaaaagatgtttcggctatcagtcaaaaagccagtatcggatatggcagagggacttggcaaatgaccctagttggcccccgctaaaccaaacctcccactctgacatgccggagtgtggcagaggagtgtcttacagcaatccagtatttgagagcaatgaagaacaactctgaaggacatgtgatatccaagttgatattacagagaaacaatgacaaaagggaccagtttcattgattttaagaaatgagaccttgtaacatcagctggagttttggggctacctatcaaatcatggtgacaaactaaagtctgtttgataaaatactgtctacagagaagaacattgacccagaagagtgctttcctcttggcttctgaaggtattagaggcattcagtgaaggcaagaatgggccaagaatttctatgggccaagagacaagcaggctaaaggggaaaaatatgtgatctttcctcttaggacaggacaatactttcctttttataaaaatgagttgaggggaagtagtactgtgtatactcacggagttgtaatttttgaatttttacttcatcgatggaaaaactaatgcgtgggaaacattacaccaatctttactgtctgggttccttttctctgtagtacttttcagatttgaggctttttcttctgtttctggccttacccaacatattgttaaggataagcttagcctatgctgcaataaaaaacaactctcagatat

SEQ ID NO: 168688 - DNA, 538 bp, Homo sapiens
aagcgtcgggatgggagaacctggcgtccattgtcatcatgcattgaatttcatgtgtccctgtggccgaggaggctgttattgaaaatcgagccctgtggatgatgattaaaagatgtttcggctatcagtcaaaaagccagtatcggatatggcagagggacttggcaaatgaccctagttggcccccgctaaaccaaacctcccactctgacatgccggagtgtggcagaggagtgtcttacagcaatccagtatttgagagcaatgaagaacaactctgaaggacatgtgatatccaagttgatattacagagaaacaatgacaaaagggaccagtttcattgattttaagaaatgagaccttgtaacatcagctggagttttggggctacctatcaaatcatggtgacaaactaaagtctgtttgataaaatactgtctacagagaagaacattgacccagaagagtgctttcctcttggcttctgaaggtattagaggcattcagtgaaggcaagaatgggccaagaatttc

SEQ ID NO: 168689 - DNA, 655 bp, Homo sapiens
  misc_feature (47)..(47): n is a, c, g, or t
ggttttcccttgtagtgcctgcacagtacaaaatgaaagcatctcangagttaaccatgtctccaactgctccagaaaaaatggaaagtaatagcaccttcacaagttttgagaacactacagtctggttcttgggaacaatcaactgtatcactgtggctcttgtgttctctaaaggaaaaccatttagacagccaacttatacaaactatatatttgtccttgtgctgataatacagcttggtgtatgtctattcattctatttgctgatataccagaattatatagacgtttggatctgctctgcactcccgtcctgtggagggcctccattgtcatcatgctcagcttgaatttcattgtgtcccttgtggccgagctctaagaagaactactgttttcacgtcaattaaggaggacaaaaaaaccttgctgcaggaaagtagaataactcatctggctaagtttccaagaggctgagacggttatatggatctttaacagccccgcagccagcagatggtcagttatcacaggaataatgcagactggctgttctctatcctttcatgggcagtggaacctaaatggcaaaaatgggtagattttaggaaaactactatatctggcaaagttccttatagaatctcacag

SEQ ID NO: 168690 - DNA, 340 bp, Homo sapiens
ctgtgggctccaagaacagctccccagtgcactggccatcaactgtgtttagccaatgggaggcaccagcaggaggtcagagggcagaagaagggagagttcacagcaggagtgacaggtccctctccacatggcagcggctgggtaccccacactgcagccaatcctccccagccctggcaacactgtaccacccccatgatccatgttggctccttaaccttctctgacaccttccctaacacctctgtccacagtctcttccttaaacctcccttcctcagctgagccattagaccctgactgatgcacgggctcatgacccatctgggtgtttcgt

SEQ ID NO: 168691 - DNA, 528 bp, Homo sapiens
tgatgaagcagcctgagagacctcagagaggtagagaatctcctgctcagcagctgactctaaggctcaaagcctgtgtcactgaagaccaggagaaatataaaccaagtgcattcctatgaagtggagtgaggaaacagagtctgcactgtgtctatgctgaaagctacaaatgcagatgccctggaaggaccagaatgtgggcaagataacagcttcttacaagggcaactttatgcaacaagttccatggtggccaacagagatgcacttacctgaacaattcagggcaggcctgtagtttatccatgaaatatatacagcagttcttgcctacttcacaaggttgctagagagcaacctgagaaaacactaagtgatacttataaatgtaaagttattatttatgctcatctctctaggggctttgatctcttgcctatattcctcctttcatcaaaccaatactccctgactgcaagatgaaaacaaggatgctactgtcatgttcttacctcaaaatcatgc

SEQ ID NO: 168692 - DNA, 632 bp, Homo sapiens
ttgagccaggatgagccaggaaaaggactttcacaaggtaatgtcatcagttaaggcaaggaccggccatttacacttcttttgtggtggaatgtcatcagttaaggtggggcaaggcatattcacttcttttgtgattcttcagttacttcaggccatctgggggtatacatgcaagtcacaggggatgcgatggcttggcttgggctcagaggcctgacacaaactatatcagctggggagggttattggatcttctacaagtatgaaaagagattcaaagtagtcttagctagacaacaacgtggagtgaacccaatgacacaaaatcattcctagtgtttcgcatctaaacctagtgctagtgtctgggatgcttcaaactgacaggcttgtttcttttccttggtgtaccagtgtcctggattctcccctcccccattccaactctattcaatgcttgagcagtgtcttcctctccctcctttccaaaccttttaaataccgtgttctctgtgctccagaaaggttggagcaggtgattgttacacttgtcaaggatagatgaaaaatctgttaaattttcttctgcctcttggattggctcttctgtccaggtggttgtgtttaca

SEQ ID NO: 168693 - DNA, 134 bp, Homo sapiens
ctgacccctgcactccaggaatcctgcccatgatgatggccacactctcccttacttgggttttaacctacttcttgctcatcttccttctctcccttcccttatttctactcctctgctttcctcatgttcta

SEQ ID NO: 168694 - DNA, 114 bp, Homo sapiens
agcactgagcaaaaataatgtggttatgcagtaagtgtaatggaagggaattggtatgcatggggtagtcaagaaaggctgcatggaggaggaagacatgaacacctccttcaa

SEQ ID NO: 168695 - DNA, 206 bp, Homo sapiens
ttaaaataataacagtaggggactcactgcaacaactttagtatggatgcaatgtgcaattgcctcatgttatgctactggaatggatgatagttgaggtcagataaagtcatggacaaccaattggatcaggaaactgattataaggattaatgatggacagatgtggatctgatggggtcagggtgggcagctgttattaaggg

SEQ ID NO: 168696 - DNA, 520 bp, Homo sapiens
cgatctagagtatccctcattagagaaatgcgaagtcaaagacacaatgagataccatttcacacccagtaggatggttatagtaaaaaagacaataataagtgatggcaaggatacggaaaagctggaactctcatacactgctgatgggaatgtaaaatggtacaggccagctggaaaagtttggcagtacctcaaaaagctaaacatagatttaccatatgactcagcaattctactcctaggtatatatccaagaaaactggaaacatgtgttcacataaaaacttaatacgaatgttcacagcagcattattcataatagaaaaatgttaggagggagggagccgctgggggtgtgacaggagagactttccagggacagatttgtaaaaactgcttcaaagtcctctccaaggactttcaaggcctccactgccccctactgacaggtcacggctcgggcagagaaagctggggatggagctggcggggggaggggtggccagcacccgcaagg

SEQ ID NO: 168697 - DNA, 413 bp, Homo sapiens
attacaggtgcctgccaccacacttggctaatttttatatctttagtaaacacgagttttcaccatgttggccatgctggtgttgaactcctgacctcaagtgaaccgcctgcctcgagctcccaaagtgctgggaatacaggcatgagccaccacacccggcagagaatttcttttctaaaaaagagtaaggttcagttaccaagcccagtaactgcagaaagcaacatttctcaacaggctgagcatgaagccttaatgccctaagatatcctctacatagaacgaatgacctttttcatgcattgagaacggtactaatgtgcaccatcattagaaaaactgagaaatagtcacgccaatcatttccatgttctgcaattcagatgaggagctaagctaagaaatgctgg

SEQ ID NO: 168698 - DNA, 417 bp, Homo sapiens
actcttaactgtaaagagtttcatgacctgctgaagaaatcatcttcagaaagggagaaaatgttctcaagagttttaaaaagagcactgaatcaaggaagggcattctttttgataaacccatgtttaatcaccaactctttcacttaatagagaaagctacctcttcagagcctcagtttcataatctgcaaaacggggatgatagtacccacctcaaagcattgctctagggctagaagatggacaatgccagttgcccatgttcttatgaggcagatggtgccaaaaattaaaggaatcttctagattgcttataccaaccaatgattccacagatgaacaaactgaggccaagatagaggaagccctctgcccaagaagatttggctactacatgggaacagcaggtctcca

SEQ ID NO: 168699 - DNA, 144 bp, Homo sapiens
ctacttcatttctaatacagtgacgtagtaacagagtggatgtgaatgttaaatgagtgagtataagaaaacattgttttcctggctcagacttaaggcaagaattgtgcttttaacatatgtgtaaataaatatttctaaata

SEQ ID NO: 168700 - DNA, 161 bp, Homo sapiens
tatgcaaatagcatggtaggactaaggaggaggttagaaagatgctgccaaagaattttcagacttcaaaagggcgttttctgcgttaagttctcttagggcctgagaagataccattagctccttactgaaagtccttcatctgtcaggctaatccaagt

SEQ ID NO: 168701 - DNA, 182 bp, Homo sapiens
acacagagacattttttcccctcaaattatcaaaagaatcacgctgcatttgttaagagagcaactggcaatccaggaagcagagttttgaacatatcagaagttaggaatctgcatcagagacaaatgcagtcatggttgtttgctgcataccagccctagggatcatctcgagaagcctc

SEQ ID NO: 168702 - DNA, 411 bp, Homo sapiens
gttttgagggaaaattttgaaaaatgttgaagaagtagagcctgtaaatgctttgtagagactgtcacagagccaaggaacagatggacaacagcctgtgtgtgtcacaaagttgatatagctttgttctcaaatgctgacagtgcagaaaaccacactacttagaaacgttggtgtaaaagtctaatatagaatacttgaaaattaaatctaacactatgataaacggtaatgtgccataaacaagtaaaggatgtattcccaaaaatgcatgggtggcttaccctttataactcatcaacataagacgtcagaggtggctgggcgtggtggttcacgcctgtaatcccagcactttgggaggccgaggcgggcagatcatctgaggtcaggagtttgagaccagcctgg

SEQ ID NO: 168703 - DNA, 137 bp, Homo sapiens
agacaacaggtgtggtctggccgaggttgggcaccactcttttgtggctgcgatgaaggagctgaagcctgcgttcactgctgggttttttgccccagaacttgttaaaaatgtaatgcttctgtttggccgggcgc

SEQ ID NO: 168704 - DNA, 242 bp, Homo sapiens
ttttgaaatctagcacctggtccttggtatgtgttctctaagtgccgattcccttgatagaagacttgggtctagaccccagatctcttttgacccctgccttttctgttgcactcatagtaccataaacatttcacttttaaagcacttctctctcaaagctctttctaaaccattatctcattggacaatcataacaactttgggagacagcactagcatcagttttcccatttgtgagg

SEQ ID NO: 168705 - DNA, 228 bp, Homo sapiens
atcccaaatctgaaaatccaaaatgttccagtgagcatttccctttggtgtaacatgaacactgaaaaagtttcagtttttgtagcatttctgattttttgtgttttacgtatgtatatgtatatctgtatcttgtttttttgtttggttgtttgagacagaatcttgctctgtcacccaggctggagtgcagtggtgcgatctcagctcactgcaacactcggctcc

SEQ ID NO: 168706 - DNA, 359 bp, Homo sapiens
ctaatggtttggggattcataggcaggtagcaaagcccctcccttacatgccatacatgtatgccaggtgagggctgcaggagctgtggccagcgcttatgtatattgatctctagttgaattctcaagcccctttgatttcctccctcattgtgttttcatcggtgactttgcttctcaatgacacactgtcaccagcggtgctgggaattgtggcagagtcctttttgttagaaagcataaactcattaaatcacttcagtcaaatcacttttgactgactttcattaaatacccctaacgtccatttaatcgtccattctaaagagccttgccccacccctcaccctttttgttat

SEQ ID NO: 168707 - DNA, 124 bp, Homo sapiens
aggggaatccaatgcctgtggtcccatgaagggaagccccaggtgtcactgaccaccctggccacagcagatggccccaggaatggtctgtggggccagcgaggttctccttcccgtgaattta

SEQ ID NO: 168708 - DNA, 642 bp, Homo sapiens
ttcagggtgaggtatattcatatagccgatagagactgtattatgtatgttgtagatcagagaatcagcagaattaatgactatgaaaaatttcaaagcacaagaaccttaagagatattccaaaccccttatatcagggattgtcaatggtgacttttaaatatatatgtatcgtgagccaggtgtggtggcttatgcctgcaatcccaacatttggggaggttaaggtgggaggatcacttgagcccaggagttcaaaaccagcctgggcagcataacgagaccctgtctctacagaaaattaaaaacaaaaaaattagctgggcatggtggtgcacacctgtagtcccagctagttgggaggctaaggtggtaggatgacttgagcccaggaggtcgaggctacagtgagccatgatcacgccactgcactccaggctgggcaactcaccctttctcaaaaaaagtactgtgcactgttctcatctccaggagattctgatgggcagctattgtaggaaaacactgcctaaaatcagatttttctaacagatggaacatcttatacctataatagaagcggtagtaaacctaaatttagcgtcgtttaataaaatggtactgacgtgtctctagttgta

SEQ ID NO: 168709 - DNA, 227 bp, Homo sapiens
gtcttgcccaggccatcctctctggcttcctaagttgctcgggctgcctgcctccctcggatgacacccacacaaagcaaatatctagtgagtaccgcagggccaggttacttccccttccatttcttggtatttgccccaccccatgtcccaattccttagggaggccttcttgacctcactgcatgaagcacccacccagctattctggagtgtctcctcttctt

SEQ ID NO: 168710 - DNA, 295 bp, Homo sapiens
ctaatttttgtaattttagtagagacgggggtttcgccatgttggccaggctggtcttgaacttctgacttcaggtgatctgcccacctcggcctcccaaagtgattacaggtgtgagccaccatgcctggcctgtttactatttatttttatttgttcctgctctattttagattttggactgataatttagaatctagaatctttataatgtaagtgaaccagtggacagagaagtagtatgaagttctggcagagtgcagtggctcacacctgtaatcctagcactttggga

SEQ ID NO: 168711 - DNA, 502 bp, Homo sapiens
tcagagttgctgtattgaattgtattaggacatcattcatttatgtaatatttgtttacttaattttgtataacctgatgtgatgtaagtgaggattgcattcttcagtgcttgactcatatactttgttgaatatggttacaaattgactattttaagttgaagataaaactgtttcttccgtgggttagttgtataaaatgggttttatttcttacaaatttattgtatacccctcaaaaattccaaaatttatcgcaggaataaaatagaatattattttaaacattaacaacgaaagtcaaagttatgatgaaaatgttcttaagggtgcctttctttttgtgaattgtatggaagtgtgactctggtaatatttggactgaaacaagcatggctattcttcattcttccactagtggtttttaaccttatctgcacattagaatcacttgagaaacttttaaaagtcccagtataaaggctgtattgaactaatatc

SEQ ID NO: 168712 - DNA, 238 bp, Homo sapiens
tggtccctggtggtggggtgatgatatatgtttatgtttctttgaaggaaaagacacccattgaacattgaacctggaacaatttcaaaacagcctttgaccagaggacttatggaaaaggaagaagtaccacctggaaaattatgagacagctataaaaatcactgtattcataacagttctagagacatacatgtacaccatcaaagagaaattattccgacacttgttaaaatgg

SEQ ID NO: 168713 - DNA, 239 bp, Homo sapiens
cattatgtatatgttgtaacttacttaaccacttctactgttgggcattaatctttttctttccttatatcctgtaaaatgctgcaacatccttgtaacctttgcctcctcagctcctactagttccttaggctaaatttctctaagtgggcttaagagctggtcaaaagatacgaactactttaaggctcactatacactgctatgaaactgatttccaaaataactgttttcattta

SEQ ID NO: 168714 - DNA, 575 bp, Homo sapiens
ctagggctcacactggggctcacacaaagaccctcatgctcactccgattcacacttatattctgggactccgagttagtcagactcgcatggggaacatggggctcacatttgaactcaaggactcgctgaggacactggggttcatagtcagattcacatttccaagctggggatcacattgactcacacggggaccctggagctcactcagattcacactaggacctttgggttcacacttagattcatatgggaactttgggggttagacctccatgggtaacctggagctcacacatagactcataccaggatcttggtaggactcacttgaagtcctgtgactcactcagattcatattgggatctcagagctcacactcagactcacagtaggattctgatgttcacacttagacttacaagggtactttgggactcacactcagacttaaaaagggataccagtgctcacactaggactccatataagccaccttagctcatactcagaagcccttatgaccagggtctcacactcagacttacactagaactctaatgcttatgct

SEQ ID NO: 168715 - DNA, 238 bp, Homo sapiens
acatcctgtctgttgcggcagggcacagagcctggccggtgataagaggtcaatgaatacttgatccgcagtgtcctcatctaaactttgggttaaatcagagaagagattcgtaacctcagtccatcgatacaggagtgagcttcacagtcaagaaacctactgaaatgtctgtgtattcttccagggagagggtctgcagttgtcagcagattctcaaagggtctatgccaagccc

SEQ ID NO: 168716 - DNA, 324 bp, Homo sapiens
gaaatccaatgcttgttcaacattagaaaatccatcaatgctgtttatcaaaagaagggaagtaataagtttatttcaatagattcagaaaatgcatttgtcaaattcaccatccattcagattaaaaacaaaacaatacaaaaaaccgtgtgtaactcaactaagaattaaaggggacttccgcaaactgacaaaggacatctaaggaagatctaccactaacgtcaaactgaatagtggaaggataatgttttccctctaagatgaaaaacaaggcaaggatttgtgacgggagccctagttatgcaacaaggcaaaaagta

SEQ ID NO: 168717 - DNA, 591 bp, Homo sapiens
atggtttcattcttatggtctcccactgccatgcaaagtaagaattttcctgttttaagtgccaagcataagaagacatggtccctaccctcatggtggtcttacggcaacaattaattctaaaaatctgtgattgttctatttaataagggtgctagcctagctcaaggcactcataaagcctgtagaggagttgtgggaagtaaatttggtaggggatatggagaaagtagcaaaggaagtactgatgggggtgagctccaactctgaggaaaatgcaaatctctccagtccagcaagtttacctcctcacctccagaggcggggtggggagtgactccaggctggtttttaaactggctgccaactgctcagctgtaatgccagatacatattaattgccaacagaaagcagagacacaggttcaagttccttctcaaaagtaatacagaaacttgaaatgctaacaagtgccaccttcagccaacttaggtgaataaactttcttaaaatcagtacaaaatgtttggatgcaagtctcttagtccccagagccacagaaatgcaaagaagcatcaggggctgtgaca

SEQ ID NO: 168718 - DNA, 421 bp, Homo sapiens
cctaattactagatcagttgaagaatgaaggaagtaaaactgttgacaaaaagtactgacagctcttataagcagtttagctgtgagggaaaggagagacagaggtggttaaaggaggaaggcgcaaagtcaggaagctaccagtggaaagggaaaaggaggggaacagacatgatgggtgaagtggggacttgaagctttagagatggggtccaaagtagaaggctggggttagttttaaacaacagagaccttctgagacaacatggaaagggttaaggatgaggtaagcaagtttgcagacatggcatcttttccttacatctactggtggtcatctactaggagtgagagaatgggcttgaggagatgtgtgaaggtttaaaatagctgatgtggagagagaggtggccaggataag

SEQ ID NO: 168719 - DNA, 415 bp, Homo sapiens
ggcgactctagacgatcccatttcgacatgtcaggatatttagtagcatgcaataatgaagatgattaaaatatcaaatgtacatattccttcttatgtacctggtgttcattgatatgctttacatatacacttggttctcattatttgtggattctgtatttgtgaattcactgacttactaacgttaatttgtaacccccaaatcaatactcatggtgcttgtgtggccattcctggacatgtgcagagtgggcaaaatattttgagtcattagatgcttatgtttctagctgagctcaaacaagatggcactgtgccatactgtaaatgggtttcttctcatggacccattgtttgcattttgtgctttttgttggtgatgtcactgttaaaaatagccccaggcatagtg

SEQ ID NO: 168720 - DNA, 455 bp, Homo sapiens
ccccaagatagaataggtgtcccaacgtaaggttatcctggcagcacggtcaaagagggttgattgggagccccactgacaataagcagctaaaggaaccacttcctttccctaacaggcctgagactcccctttcccattgagacacacaaggtgactaggtggcattaacagggttgtcccatcaaaataagcagccctgcctgggaagtgctcattctccctgcaggactcttttgccctaacctagatttgccaggtggtttggcctagggaaaactcctcacacccctcaggcagcatcagcagaagcaagttggggccccagaagcaacagataaattaagcagactgaaatcgcagcataaagatcctaaggaaaattaaattgtcattggaaccacggcccacaaaagtagaccaggacctgcctcctaacataaacaagatgactc

SEQ ID NO: 168721 - DNA, 356 bp, Homo sapiens
gccaagtgtctgattccgaggtacactcttgattagccacctcatctatcattggcccaggggatggtttttccaggctcgactagcccagtttgaaaacagaaggacatggagctatgtgagcatagaccatagttgcattctttgcacctacaggaagtaaacaacatgccaatccaagtcctaatgcaaataagagcctatttgttttctgagtcaatccttcaggtattatctgtaacagatctgtggctcctctggttagactgggccttgattgaatgtgatgttgccgtcagtctagatttgtgcttacatatgtgactggtccccagatgccatacaacacttaaatg

SEQ ID NO: 168722 - DNA, 88 bp, Homo sapiens
acttgaaacccgggaggtggagacggcattgagccgagatctcgccattgcattccagcctgggctagtaagagcaatacttcatctc

SEQ ID NO: 168723 - DNA, 347 bp, Homo sapiens
atgtccttctcaggatgttggagacatgatgaaataaagacggtgatattagccccctaacggtaatcactcatgctgctcccacccatgtctacccactggaacagggagtggtggcattggggtggtacagggcttgccgaggatgttggcttatagctgtatctccaaacatccagagcatgtcttctttttcacctctcctttagaatctgcttcctcgaaccatccctttaagtgcaggaagaaagctatttttaatatgaaaattactgttccagttatctcatggtggaaattcttaatgggctcttactttgggcatctgtctggctctcagtgccagt

SEQ ID NO: 168724 - DNA, 522 bp, Homo sapiens
ggaaggaatgaacaactccagacgcgtcacttgaagagctgtaacacttaccgcgaaggtctgcagcttcactcctgaagccagcgagaccatgaatccaccagatggaagaaactcccaacatgtctgaacatcagaaggaacaacctccggatgcactgtctttagaaactgtaacagtcactgtgagggtccccggcttcattcttgaagtcagagagtccaagaacccaccaattctggacatagcagcatattgaatatactctctgtagtgggtagtattgtccatgggcatccacaagtgagggagaaggtggcacattaaatatactgtttgtggtgggcagtgttgtttacaggcatccacatgcgggagatggtagcaaattggcatttacttcccatagaaatattttaggagagaagttattagggtttttgaaatagtgtttatgttttagtgcatgccctttaacatcttcctcctagcaaaaataaaaaatgaaataaaataaaata

SEQ ID NO: 168725 - DNA, 577 bp, Homo sapiens
caagactgtgtctcaaagataaactggcacactgaatagtcctataaatcctttgcattcatcctggtgctcatgttgttctctttatataaatatatatcactgcaacctccacctcctgtgttcaagtgattctcctgcctcagcctcctgagtagctgggaatacaggcactcaccacgatgcccagctgatttttatatttttagtagagacgggggtttcgccatgttggccagtctggtctcaaactcctgatctcaagtgatctgcccgccttagcctctcaaagtgctgggaatacagtttgtaagtcaccacggccggccactctttatattttttataaaaatgaaataaaaacaaaaaatgttcaaacctaatcattaatgttttagtgagaaaacacttattggtagtacttccctgcacaagatgtatagctctgtgctgtaacaaacgagttaagacaggctcagcacttacaatgaaaaccattttgacatatgttagaatgtgaatgtggacatgtaacaaggaagagcagcctgatctcatttttattgtaaagtgtttg

SEQ ID NO: 168726 - DNA, 540 bp, Homo sapiens
ttgaaggcatttgtattggtgcattaattcctggttcataactaaattatggaaaggagacactgactgataggaagctggttctggatagatgagggatgattatgccaatatttttcagagtcccaagatgatcaaggccagctttgatctcagtctactgagtcatgctggacgtatatatggctcggtcactccattgctgcagccattggaatgctcctgtcgggggtaacagtgtccagccttacggagcaggcctgaccaccctccgatggtgtggtgggcactgggccaggagggaagctggtggggtgtggggcaagtaccaggcaaaagaagtaccaggctctaggggcagactgctggattatgactcaagttgacgcaggaagataacaaatccagtcctctccccagaggaattgagacctaggagtggccttctcacaacttcagggtgcagggtggagaataagtaaggatcagatgcaccacacataccagcagcttgtgccaggcaatgtgcctaagatgagg

SEQ ID NO: 168727 - DNA, 271 bp, Homo sapiens
gtctgcaccacgttcccatccgcagagggagaggtctggcgaggcaggggtggaggccagggatctccaataaggattaaatcaagttttgaggatgacagattccatccagggaggaagtagccctggggtgacagtggctgcgttctccccaggagttccctttcgatttcggttttgctttctcctctgtccttcggcagtggctgctttggagtcaggggcacatgctgtccctgagtctctacaaaaagcttctggtgcggggcat

SEQ ID NO: 168728 - DNA, 467 bp, Homo sapiens
ctgctttttggccctaggcagggactacgggactcagagccgccacaggcagaagccacaggctgcccgggcccataaaatttgcgtatttccttgaggttgccattccagcaagaggccatcctcctttacccttgaacacctttccctgcttttcttagataggtagagggaggcccagcgggtggggatgggcccggggtcacccagcaagtcggggcagaaggtttcctgttccagcctgagccctgttacccggtttggcgcccaggctctgaagccaggcagccaggctgcaccctttcctggctgggagcccgtgagcaggtggcttcgcctctgtgccttgggttttcctcgcccgcaagatggggttctagcgggcctcacctcaccgcacgtggtgagatgctgaggagggaacgcccgtaaggcgctcagaacagtgcctgccactaaggaggccg

SEQ ID NO: 168729 - DNA, 527 bp, Homo sapiens
tacggagatcttgaagttctgggttatgcaacattacgtttataaatttgacaccaggtgattctacactctgaagtacttctatgggtaaacatgcaacattttagaatgttcgtagcaaatggttctgtttacaagatgcttgccaaattttatgagaatgatttgtcccttttgaaggaatgggtgaattttggagacataggcaagtatatgtataaacctcaagttaaacatgttgaagatttaggacttacatcattatttctgaaattgttctgatttttaggtttgagaccactcagcataggattgtcatttaaatttagctcttctgtcacctttcctggctcatattggctcttgtttaaactgttaacaagccaggcttgtggctcacacctgtaatccctcctgcttgaggggccaaggcaagaggatcgcttgagcccagatgttcaaagctgcaatgcactgtgattgcaccactgcattccaacatgggcagtagagtgagactctctctt

SEQ ID NO: 168730 - DNA, 382 bp, Homo sapiens
tccccaaaccagtagaagcaaatattttgtcctcagccaacaagaattcctgcaagtcaatatttggaccatcaggatgcttaataataaggctagggaaaaaaaaaaaaagctttgttagatcattgtatattagcatagatgcaggagtcaaattttcagtaccctaaagattattaatactttcaggtaacgtttccaggaggagatagcaaagcctttgagtagaaggatggactaacatgcggttggccaccattctcaggatgtcagtaatctttcaaaccacaaaacctgggaaggtaaactacttgtatatcccaggaatagtcacgtgacttatagacagccttaccatgacccttcagatcttaaaacctct

SEQ ID NO: 168731 - DNA, 450 bp, Homo sapiens
tttatgaatattgtggcagacaggactagctacttatcaaaaaccaggatcccccttccataatacagaggcagtgctggaaatggctgttcagccagagaatacctttctcagccatttgtactgttctcacaatggaatgtgagtggaagtgatgtgttcatttccaggttgagattttttttaataagtggatgaaacttctcatcttttcttccccctttgctggatacattcagagaatgacaaagctctagggcagagaatggcaaactgaggcctgtgtgcctgcagcctgtttttgtaaataaagttttattggaacatagtcatgcctatttgtttacttactgcccatggcaaccttcctgctacaacatcagagttgagtagtgacaggggcagtctcaagtatttattatctgctcccttaagaaaaagtgccaccct

SEQ ID NO: 168732 - DNA, 545 bp, Homo sapiens
tccttctcctcacccaacaccaatatttaattagtcaccaatttctatgaattccacctgctaaagctttctggcatctgcccctcttcaagttatctcctatctggactatatatagccttctaagtggtctctccattccaaaatatctttcatactactcttgaaaccatcttcttaaaataaaatattagccatgttaatctcctggtgagaatccttcaagagctcccaatcaaaaccctttgatacagcttacaggtaggtactttgtgatctggcctttccctgcaaactgtccccacatatcatttattccaaccatgccaaaaaacaggacttatactcatggtggttatgaatacatagttttctctctgcctagaaagtgttgtctcttgttatgaatactaagtacgtttttgtccattaatttaacagttttagaacacttagtagggccaggcgcggtggttcatgcctgtaatcccagcactttgggaggccgatggtggaggatcacgaggtcaggagatcaaggccat

SEQ ID NO: 168733 - DNA, 359 bp, Homo sapiens
cgggctcattgtgagagttgatgaaatgatgcgtgtaaagcatctggtgcacagaaagtgctcaataaatgtatactctgattaaggcaagaacgaggcctagtctacgatgagagtcccctggggtccccttcgggtcaacccttctggatggggaaaataaacaacttcctccactcaaaaatcaagttcacaaaaattaaaaaaattaaatcattaaataatttaaaacaaatcaagttcagctgaaagccatacttcaaggccacatggtagttcctttgctgtgcttgcaattgtccctaggcctgaaattaatttttaaaaattgcgttccttttttttttgagacagggtct

SEQ ID NO: 168734 - DNA, 507 bp, Homo sapiens
aagaactcataggtgcagccatgttcatgtagtagttttatacaactggcatcaaatccaaagcatagcttgtaactccttgatgttgagaaggtgcagctgggcattttaacaatttaacagtagaatagaaaagcaaagatttcaaaaactataattatgtttttacaactttagttttaggagcattgctcattagttgctaattaatccatatatctggtgaaacagatgaatagcatgtatttggttatcatataagcattgtgaatccaagttaacatgttactttcattctttctaatgtaattattatgctattatcaatttgttaccatgcagtaatcatgcagttttaagttactgcttaaaacccagagtgaggcatagaaatttatgtcgagctggacagagctgaatgtcagccacatggtagcaagatagatgctttgcatcagggtcatttctactattataaagcttgaaaaaggatagaacaagaagagt

SEQ ID NO: 168735 - DNA, 309 bp, Homo sapiens
tcactcagagatcagctatccatctgcccccaggatcatgtggcagggaataggtcgcttggtgaatcatacccgggcttttaaccctgccacccagaagtcacacatcacttgcgttcacatttcattgggccaagcaagcgtgatggtggaactattcaggcttgaatagagaacaacaaagccacatcgttaaaccagatggtggtggtcaaagttcatggttgggttatcaagccatggttagaaacacagctgccgatatctggggctgtaacaactgcaggtctaatgatccaaggccaggaa

SEQ ID NO: 168736 - DNA, 422 bp, Homo sapiens
tccctttatccccaacacttagcacagtgctgatgctgaatgcacttcgtcagatagttgagtgaatgatagaaagttctctagcccaaggctgccgcctcccagacaggactgagcagtctggcctgcctgtccgtggcctcccagtctagggccaggtttactgtatttttcccacaattgcagaaggtcttgggagcctcttacttcccaacctggagagtcctagattaacaaccctctgagaatcaaaaccaagtcagcctcagcctgcagcccacccgaggtgggccgatgcaccctcatgaagtggccagtgtgagttttctctgcaacttacaaatcatcatcttagagagaaaacacctgctcagaatccaacatttaaaacaataacatcttggcttttatttttttgtata

SEQ ID NO: 168737 - DNA, 299 bp, Homo sapiens
tctgcccccacctgggcaagaccaaaaagaaaaactaagcagttagtgacatgcagtgcaaccggacggaaatggactgtagaatcgaaattgtagagagatggagaagaaaatgtttggggctaggataagtgttcagaatcttaaagtgaagttgtctttgtaaacctctaggcaaaaacgagctgagttgaaaattgagtaagaaaattaagctgttaggtctcctagatctacctggagggccaggctgcgaaagattggtagtgatttttgtaagtaatactcagagcaagaat

SEQ ID NO: 168738 - DNA, 187 bp, Homo sapiens
atctttaattctatttattaaataacaggatgaccttgataaataatgctgttttctcattggtgacatactattagactaagtagttcactttatatttaatcagccattatcctgagtattattagtgtgaataagaaatacttgttagaacattgggcagtggtaatcaaaatgaatttcgaag

SEQ ID NO: 168739 - DNA, 512 bp, Homo sapiens
ttggagatcccacctgatctttactaacagatgagtacttagaaagtgcagatgttaagaaatgcacaaaccaagtttcttttggagtgtagactagaaagtatgtaatttttgttttttcacaaaggacccagccttattgtttttctgtttataaaagatagtcttattaccaaaaagaagagataagtacaaagtaatagagacatataataaataccatcttaaatccaccactgagatttagtccctgttcacatttcctttatattcttccaggattttgtctaagtagcaagtcactcaaaggcttttgtctgtgccagagatggggaaaatgaaagagaagctaaaaggttcaaaaataggagaagcaatctcctatttttgctgtggcagcaaacattaggaatgaggtcccagagccatgcatagtactgcctaatgtaattaggaagccaaacctgtctgttgccttctgccactgggaatcctcaaactatgcagcttaa

SEQ ID NO: 168740 - DNA, 426 bp, Homo sapiens
gaggaggggacatatatttcaccccaaatgctttcagccttggtgtttatgttcatgaaaagctcgtgcatagcaaacaaatagtggtaagattatggtaattggtaatggagtaaaaagaaaatggtatgtaattattagagtgggcatctttgtgcctcagtttcttctttaatgataggggtcatcatactttgcattatctgctctataaatttaaaaaagacagttgactcctaaacaatgtgggtttaggagtgcccatctcagcacagtcaaaaatccacataaaacttttgactcccccaaacttaactactggttgtctgctgttgaccaaaaggcttactgataatatattcagttgattaacatgtattttatatgttacatgtattgtatgttgtattcttacagtaaattagt

SEQ ID NO: 168741 - DNA, 217 bp, Homo sapiens
tgggctcaagcgatcctctcaactcagcctcctgagcagctgacactacaggcgcacaccaccattcctggccttgtcactcgttttattgtacttaggtgaaaatgtcccattgttgaagtagttagtaagtgtgtgtgtgtgtttttcttgagagctttttcagtctgaagtcatctgagaaagaagaattttttctttttttactgggagaata

SEQ ID NO: 168742 - DNA, 425 bp, Homo sapiens
gtgaaactaaccctggctgcccgtcctgtcaagagcttcttaccccaggacttgtcactgtgatacaacttgtcatgcatatgtttcatctttggtggaaaaggctcaaaatattcctttcattccccactagcttttatttggctccttctgcaggctgaagttgcctattttaatatatgactcttcatttattcattttcagccagcaaacaatttttaattagcctgctctttattaaggacatagagcatgttattaactaggtgcatctttgggtctttaaaaggagtgaaagagacataatcaatttgcatgtgatgtgtaggggttaaagtggtgttagtcaacatatttagagcaaatctcatcaagctccatttttaagccctgactcaacttgacgatcccacaaggcagaagg

SEQ ID NO: 168743 - DNA, 624 bp, Homo sapiens
ctcaaaaaaaaaaaaaaaaaatcaaacatagaattaccctgtggtccagcaatcccacttctgggcacatatgcaaaattattgacagcagggtctcagagagatccttacacccctgtccatagcagcctcattcacagcagccagaaggtggaacaacccaagtgtccagctacagatgaacggacttgtgaattacggcatagacatacaaatgctattccatctccagagagggttgaagttccgacacacgccacacaaaaatgaacctcgaagacatgctgagtgaaacaggtcagacacaaaaggacaaatattgtatgatcccacttagacgagcgacctagaacaggcaaattcagagacgcaaaggagtctttctgcccatgttcgcctcatctaacccctgcctgcagggtctgggggaggtcagaacgggcagttagggttgaaagtatacagagtttcaatctgggaagatgaaagagttctgagatgaagggtggtgatggttgcaaacagtgtaaatgtgtttgatgccactgacctgtacagttaaaaatggctacagtgataacttccgtgttgtgcaaattttcacaataaaaacttaatgaaagg

SEQ ID NO: 168744 - DNA, 780 bp, Homo sapiens
ctcaaaaaaaaaaaaaaaaaatcaaacatagaattaccctgtggtccagcaatcccacttctgggcacatatgcaaaattattgacagcagggtctcagagagatccttacacccctgtccatagcagcctcattcacagcagccagaaggtggaacaacccaagtgtccagctacagatgaacggacttgtgaattacggcatagacatacaaatgctattccatctccagagagggttgaagttccgacacacgccacacaaaaatgaacctcgaagacatgctgagtgaaacagagtcactgtggtctccaaggttacgatcctggttctcctcctccgcctgagcggagactcagcagcaagacacacatggccgagtccttcaccagagcccctttgcatggaccccatggtgctttcctggggaatgaggctggatgccagaaacccagcccgactcctgtgctccaaggctcaagaacactcagaacacccctctgaagaccccccttgagcagatgccctcaaggtctaaccggctcaggagggtccccagagctcggtgatgctggctcagagaacctgggtaacggaaaggagaggcagcttttcccactcactgtctctgacacaagctcattctccacagtcatgtgagtttcccaaacaccttcctccctctggcgtgtctctctcaagcctcagtccagtgaatgtgatttatgaaaggccgtgaggtcaggcccacccatggcaacagcctcagccccttccccg

SEQ ID NO: 168745 - DNA, 172 bp, Homo sapiens
ctccagtggccctcctcattcaagaatgccaaggcccctctttgtctaaaggctgactccctaccagcttcccatagagtgaagcctgacaatcaacatattccaccctcaaacacagagctcaagtcagccttccttttatagcagatacccagaaggaagaccatctaag

SEQ ID NO: 168746 - DNA, 944 bp, Homo sapiens
cagtgcctggtatcacatcacacaaaaggaacaaaagcaaaacacacaaaccagcttcaacttacacttggttactcaaaagaacaagagtcaatggtacttgtcctagcgttttggaagaggaaaacaggaacccatcaaaccaaccaatcaaccaaacaaagaataaattccacaatgaaagcacgtattttgtctttttgcattttggtgtataagccatcaatattcagcaaaatgatttctttctttaaaaaaaagtggaggaaagtagaaatttaccaaggttgttggcccggggcgttaaatttacagatttttttaacgagaaaaacacacaaaaaaagctacctcaggtgttttttacctcagcaccttgctcttgtgtttcccttagagattttgtaaaactgatagttggagcatttttttttatttttttaataaaaatgagttggaaaaaaaaaagatatcaactgccagcctggagaaggtgatagtccaagtgtgcaacagctgttctgaattgtcttccgctagccaagaacctatatggccttcttttggacaaaccttgaaaatgtttctttaaaaaaaaaaaaaaaaaagatgacaaagaaaaacagagataatattggagatgtcctgaattttaatagggtacatgccattagggctttttgcactaaaggatgaacatgtactggtttatgtggacaagccattataccaccagactgcaatgccagtttcctctacggtgaaaccccgtctctactaaaaatacaaaaaatcttagccgggcgtggtggcgggcgcctgtagtcccagctactcgggaggctaaggcaggagaatggcgtgaacccgggaggtggagcttgcagtgagccgagatagcgccactgcactccagcctgggtgacagagcaagactccgtctc

SEQ ID NO: 168747 - DNA, 741 bp, Homo sapiens
gcacgaggagagagagagagagagagagagagagagagagagagagagagagaaaaagtggaggaaagtagaaatttaccaaggttgttggcccggggcgttaaatttacagatttttttaacgagaaaaacacacaaaaaaagctacctcaggtgttttttacctcagcaccttgctcttgtgtttcccttagagattttgtaaaactgatagttggagcatttttttttatttttttaataaaaatgagttggaaaaaaaaaagatatcaactgccagcctggagaaggtgatagtccaagtgtgcaacagctgttctgaattgtcttccgctagccaagaacctatatggccttcttttggacaaaccttgaaaatgtttctttaaaaaaaaaaaaaaaaaagatgacaaagaaaaacagagataatattggagatgtcctgaattttaatagggtacatgccattagggctttttgcactaaaggatgaacatgtactggtttatgtggacaagccattataccaccagactgcaatgccagtttcctctacggtgaaaccccgtctctactaaaaatacaaaaaatcttagccgggcgtggtggcgggcgcctgtagtcccagctactcgggaggctaaggcaggagaatggcgtgaacccgggaggtggagcttgcagtgagccgagatagcgccactgcactccagcctgggtgacagagcaagactccgtctc

SEQ ID NO: 168748 - DNA, 592 bp, Homo sapiens
aacgccagggtttttcccattcccgagggttgtaaaaccgccggccagtgaatttgtaatccgcctcactataggggaattgggagctcccccgcggggggggccgttctagaactaggggatcccccgggttgcaggaattcaagcgtccaagtgtgcaacagctgttctgaattgtcttccgctagccaagaacctatatggccttcttttggacaaaccttgaaaatgtttctttaaaaaaaaaaaaaaaaaagatgacaaagaaaaacagagataatattggagatgtcctgaattttaatagggtacatgccattagggctttttgcactaaaggatgaacatgtactggtttatgtggacaagccattataccaccagactgcaatgccagtttcctctacggtgaaaccccgtctctactaaaaatacaaaaaatcttagccgggcgtggtggcgggcgcctgtagtcccagctactcgggaggctaaggcaggagaatggcgtgaacccgggaggtggagcttgcagtgagccgagatagcgccactgcactccagcctgggtgacagagcaagactccgtctc

SEQ ID NO: 168749 - DNA, 216 bp, Homo sapiens
ctttttatttcggaggaaatattcttttttctaaacttcccaatttctgaggtattgatgttagtattttggagctagattcgatataaaaattgtattgctgttagtaactgcttcggtatgttggttttgccagatgtgttcacagtcttcatgatactgttaataaatatggaggtttgtgctcttattcttttttttttatttgagacggcg

SEQ ID NO: 168750 - DNA, 410 bp, Homo sapiens
tggaaagccccattcactgactacatcttatactttgttggacacactatgccaagatgaccaacactatctgcaaaaaaaaagctgggatatcaagtattttaactgaacatatagttgcctcaaacaaaattgaagtcctgtcacaaaggaggaagaagagactccagctgtatctgccacatgatattgggagagttgttgaagagattccctgagataattcatgccaaactcttggcccaatgcctgacatgtggtgactattattattagctgggactctccccattgtcttctcagaggatcctccagcaaggtgacaaatgtaaatgcagcctcctcagtgttcagggactcccccttccaccagccactttctgtctgaatctgagtcatgctcatgactc

SEQ ID NO: 168751 - DNA, 372 bp, Homo sapiens
agcggggatagcacccagggagacagggaacaggaggcccaagctacagccaccactgctgggttgcgagggcagagcagctgagcaggctccagggccccagagtgcccgaggaaaggggagagacagtgacgttatgatctgggtctccgccgtggaggcttggggggctgtgggctgtgaggtctggcagtgagagtgccccctgcagcctggcctcctgccagggaagcagccaggagcacgaaacctacttgaaggccaagctcgaggggccctgccaccaagtcccactatcggccgagggctcctgctgcactaggctccatgctggcctgccgcggccaggcagctctcccaggctccagacct

SEQ ID NO: 168752 - DNA, 626 bp, Homo sapiens
atttagcctatcctacgtgattacacagagagaatatttggaagctggtgactggttccctgtagatcaaatgtagttaagtatgacaaaagactaataaaagagattttaccaactaaatagaaaaaattgtaactttctactgggtaatgtcgaaggagaaagaaaagaagaggacagactgcaaatgttcttagacagaattcagtgtcagctttcatgaatatcaattatattccataaatctcaacagcagacatttaataatcaataacattacataaaccaatttttatagaagtcataaatgtctaaagatgcttaaaaaaaaccttctcatcaagaaagtagacagctttacaaaaacaaacagaagatttaaaactgtaatttttcacatcccatactattaacagagagaaaaagatacataaacaggaaagtgaaaaatgatagaaaagccttgtattgttttttctttggccccatctctgcccatctcattgccagtcctgaagacagcagagttcccagtgtagaactctgatcaccacagagtgtacagatcacattttgtttccacattattgcctttgtatttttgaatcagtctggggactaaccga

SEQ ID NO: 168753 - DNA, 417 bp, Homo sapiens
ttttcagatagggtctcgctctgtcacctaggctggaatgcagtggcacgatcacggctcactgtagtctctgcctcttgggtttataagatcctcccgcctcagctttccaagcagctgggactacaggtacgtgccaccatgcttggctaatttttgtattttttgtagagacaagttcccactatgatgcccaggctggtctcaaactcctaagctcaagtgacctgcccaactcagcctcctaaagtgctgggattacacgtgcgagccactgtgctcagccaagtcagtaattttggaagctgcattacacattttaggtgaaaagcaataattactgataattattcagtagctgttctttccatttctagaactatcataacagttcacatccttggacacccatgggcc

SEQ ID NO: 168754 - DNA, 397 bp, Homo sapiens
agtttccccacctgaaaagtgaaacgctcacgttggggatgtcttgggggccctctggcagtcccactcacggggtgcaagctctccatcgatgctccctgccctgaccaccaggccatgcatggccacctctggtagtcccatgtagacacagccaccccagttagggactctgcggttggcctgtgccacagtgaggttatcacacttccttttatttataccccgtaatgcagtccatcaatcaaagatggaattgtccttttctgtttctttccattaaaaggggcatttctcagctgcgtgacaaaatgagttaggagctccatttcaaacttcagtttctggagcaggttcatttaggagcatccccactgcgaaatgaaaccggaggagg

SEQ ID NO: 168755 - DNA, 251 bp, Homo sapiens
ggagtttcctcaaaaaactgtaaagtcagaccaggtatggtggtttccaccttgtaatcccagagcttggggaggccaaggtggggagatcacttggagccaggagttcaagaccattttaagcaacacatcatgaccctgtctctacaaaacatttttaagccaggcatgatatagtgtgcctatagtcttgttacttaggggcttaggtgtgaggatggcctgagcccaggagttcaaggctacagaga

SEQ ID NO: 168756 - DNA, 170 bp, Homo sapiens
aacctcctgggtagctgagactacaagcgcacaccaccatgcctggctcttgtacctttctaaatcattgtaaaagtaataacagttttcatacagaaaagccttgagccaaatataaatcatggccaaaaagtttagtctttgatcagaagccatttttgactgttcgt

SEQ ID NO: 168757 - DNA, 224 bp, Homo sapiens
gtaaactgtaaaccaacattctccaaactgcattctgcagaccctgctctcaggagaggtgttcataaactatttaggaaaacaaaaaagttttaggtcaagtttgaggaaggctagcctaaacaaagcaaactagatttcctcactctagaatttctcagagactaacttgccaatgtgcatagcaaatctccaagagcagggtagaaaacatggctttatgt

SEQ ID NO: 168758 - DNA, 533 bp, Homo sapiens
ccccttttcagaggctgcagttgcttttattgaacccgttaaaggagatgtccaatattaatcatccagatattcgactcaagcagttagaatgcgtgttgcagattctgcagagtcagggagacagtcttgggcctggatggccattagtgcttggagtcatgggagcaatcagaaatgatcaaggagaatccttgatacgaactgcattccagtgtcttcagttggttgtgacagattttctaccaacaatgccttgtacttgcctgcaaatagttgtagatgttgcaggtagctttggcctccataaccaagaactcaatattagtttaacttcaataggtttattgtggaatatttcagattattttttccaaagaggggaaactattgaaaaagaactaaataaggaagaggcagcacagcaaaagcaggcagaagagaaaggagttgttttaaatcggccattccaccctgcaccgccatttgattgcttgtggttatgtctttatgcaaaattgggtgaactatgt

SEQ ID NO: 168759 - DNA, 271 bp, Homo sapiens
gatggagaaggctgtccccaaagtccaggcctagaatctttgactggaaagactgtcctgagagtccaggcctcctctctctgactggaaagactgtcctgagagtccaggcctcctctctctgactggaaagcctgtcctcagagtccagacctcctctctctgactggaaagactgtcctgagagtccaggcctcctctctctgactggaaagcctgtcctcagagtccagacctcctctctctgactggaaagattgtcctgagagtc

SEQ ID NO: 168760 - DNA, 353 bp, Homo sapiens
cgtggtcttatgaggttggagtgtcggggtgcaacttcaaatgatcgactgtctcggcctcccaaagtgctgggattacaagcatgagccaccatgcccgaccctgttgttatttttgaactgggacataagcctttggcagttgtgatgccactgtctccctcccctgctttatttttttccaaggcacattccatgtatttcactcatttattttcactccctcactcccttagtagaataacatctttaagaagattttttttccttttttttttgttttttgttttttttgagacagagtttcgctcttgttgcccaggctgaagtgcagtggcgtgatctcagctcac

SEQ ID NO: 168761 - DNA, 143 bp, Homo sapiens
gcaacctaacaataacaaaagtaataaatcgagactggtccttcatatcctgcgtatatgacttttctgactctgacctagggaaggcaccattatccccattttactgctaaggggaactctgctatgagatgttggaaggg

SEQ ID NO: 168762 - DNA, 227 bp, Homo sapiens
tcttctggacacacctctcagaataggacaggtagggggatggtttctatttcacattcagggctagagacttcagatcctctggggtgtcactggttctgtagggactgtttgggtcattctttttttccaggctagaccagggaagcagggagagattctttttgctagtgttatgtagggagggagaccttagagatgcctctgtgagctgtgttctggatgtc

SEQ ID NO: 168763 - DNA, 240 bp, Homo sapiens
agcgcctgtgcaggtgcatggaggaggaggagctgctgagcacagacaggatgcactccaggtagagaagctgcagctgctggctgtcactgcagaagagcagaaccgacacaaatgcagacaaaagacaaggcaaaattaaagaggtgatgtgtggaaacacgctcggaaaaatggtaggcgttactaaagtgctagttttagggggacggttagtgttatgggttgaactgtgtctct

SEQ ID NO: 168764 - DNA, 299 bp, Homo sapiens
tgacaaaaagcctatacgatatgcaagaattgtattttctcaatatcaaccatcacatttagaaaaccttcagaaagcatatgtacatagtatcttatgtgtaagtgaatgagaattttatgaataaactttttaagggaattaagacaatacaatcgtctgtatctgaaataaagcagagacaaaggcaaagattatagctatggatgaggtgaactgagtatcaatacattctaagataacatagagttaatgaaatttattaaatgatcaataccagtataataaatatcctggca

SEQ ID NO: 168765 - DNA, 543 bp, Homo sapiens
ataaaacttagctgggtgtggtttcaggcagctgtaatcccagctgtttgggaggctgaggcaggagaattgcttgaacccaggaggcggaagttgcagtgagccgagatggcaccactgcattccagcctgggcaacagagcaagacccgtctcaaaaaaaaaaaaaaatgttttatttgctgctctctttcctgattttgttttagaaaaaagccagtcttttacattatcaattacataccaatcacaatattaaatatacatactttttcttgttgattccactttttagtctgcttttatgaaacctaacttttttggagttttccttttgggatggtatgtgagcttatgaaatttgagctatttttttatatttatcaagacagtctttgatttgatttaaatatgtacttaaaagtttttccattgtagtgctagctttgagttaaaaagatacctgtgttcagattcaggaaaaaatcagtatatttaaaaacctaacatttgtgcatcagtttacaacattctgagtttttaa

SEQ ID NO: 168766 - DNA, 485 bp, Homo sapiens
tggcaacccgctcgggtccccttccacactgtggaagctttgttcttttgctctttgcaataaatcttgctactgctcactctttgggtccacgctgcttttatgagctgtaacactcaccgcgaagatctgcagcttcactcctgagcccagcaagaccacgagcccaccgggaggaatgaacaactccagacacgctaccttaagagctgtaccactcaccgcgaaggtctgcagcttcactcctgagccagcgagaccacgaacccaccagaaggaagaaactccgaacacatctgaacatcagaagggacagactccagacacgccaccttaagagctgtaacactcaccgcgagggtccacggcttcattcttgaagtcagtgagaccaagaacccaccaattccggacacagtgctgagaatcatgccttgaaatctagcagctctgttaaaaactgagcaaggtgtacttcggggttg

SEQ ID NO: 168767 - DNA, 402 bp, Homo sapiens
agctctcaatctgtgtattcaactgcaatttagacatctccacctatgtcccatggtcaccttaaaaaaaaaaacttggcctcataaggtcatcatttcccctctgctccagccaaccagcacccccagcttgtggtcaccctctcacctcagtgaacagcacctcctagccagaaaccagtgtcacactgggtttcttttatttctcttatcaagtcttatcagttctccctcccaaatacagtagttcttgaaccccactcaaatcatcctccatatagggatctgcaaagctttctgaccactcacctttatcagcaaaaaaattctaggcatacctgtacccaaaataaatgcaatttataaattcagatacatgtacttctacagcaatatagtaag

SEQ ID NO: 168768 - DNA, 182 bp, Homo sapiens
ctgaaacagttcaagaggaacgtgtgcctctagccaccaggagttccagctgaagggacataccaggctcacagatctcaggctgcgggacagaagatggatgggccaccgggcagagctcccaaggggaggcaggaggggaacctggacggggcagggctcctccagcactgcagagtggc

SEQ ID NO: 168769 - DNA, 130 bp, Homo sapiens
aggaggctcacgaggatgaatctccacaaagtcaagtctgatgtgtttgacagttcctgggatgtctctacagtagctcctcttgaaatctaaagcaacatgtccacattctaaaccactttcaaagata

SEQ ID NO: 168770 - DNA, 1048 bp, Homo sapiens
catgatggcgtgcgcctatggtcccaagtactcaggaggctgaggtgggaggatcgcttgagcccaagcggtggagttacagtgagctgagatcatgccactgtactctagcctgggtgacaaagcgagacaggcgggcggtggaaggagggaaggagagagggagggaaggaaggaaggaaggaagagtaaggaaggaagggtaaggaaggaaggagcacaacaaatgtaatatgcttgaatcatctcaaaaccatcccttcccctcccaccaccaccacccatggaaaaagtgtcttctacgaaaccagtccctggtgccaaaaaggttggggaccactgccctaattcacttggtggtgtttggcaattaaatatggaactgggccaggcgcggtggctcccacctgtaatcctagcactttgggaggccgaggcaagccgatcatttgaggtcaggagttcaagatcagcctggacaacaagagtaaaaccccgtctccgctaaaaatacaaaaattagccgggcatggtggcacgcacctatacacctataatcccagctactcgggaggctgagacacgagaatcgcttgaacctggcacctggcaggtggaggttgcagtgagctgagatcctgccactgcactccagcgtgagtaacagagcaagactctgtctccaaaaaaaaaagaaaagaaaagaaacgtggaattgtggtcattcccccaacaacaaacattttctttagaaacagcaaatggacaccccacctcctgtttccattcctctctgtatacaaagtaacacttgctttcattgctgaatctaagtgtaattgtttggaaggcatttaaaatggcaactaattttaacactgtagcactcaactgaaggggtgattacatgaacaggtataaccaggttcacacctaaacaggaaatgacaactatgtcacaactgccacctggccaacggtgattacaccatctatttataagaagcatcccggcccagcgcgttggatcacgcctgtaatcccagca

SEQ ID NO: 168771 - DNA, 351 bp, Homo sapiens
cttagttaccaattacagactctaccactacttttacccccaccctttgaaaaggttttagggctactgcatagccacaaaataaggcaggaggataagttaatcacccatctaactcaccaaacacaacataggttcactgtgaatagttatagagaatcagaacattaaaattaagagtaaaaatcaaggtgtacgtcagttttgagacatggaaaatactgtttcttaaaatgaaacggtaaaaaataaaaacaatcccagcgtaaaacaaaacccctaacttcagataatcaatgtttcttcataagacacgctttgaagaaatatttgtatttttgaatggggttc

SEQ ID NO: 168772 - DNA, 423 bp, Homo sapiens
tttggtgaagcccattagcttactggttaatagtaaaagtgcatttctggcttcatattcatatacccagatgtgtattttggaggaaaatctagtttataaggtcacagacacagcaggaaaacaaaaagaaccttttattttgactatgatcattcttctaaaggagatcttagaagaacaaatgaaaatgtgaaaacaagagtacaaactcaacatgcagagctatctgtatgataagaaccagttgccaggcacctgaaaatgtcaagtcctctgaacctgaaagggttgtgagaagagtaaagagagtgggcaaggatgtgtgtcaaatggcataagataaaaccgtatcagagggagcttcatcatactctctgaggacagtacccagtgagaaacctcagactctcaatttctaac

SEQ ID NO: 168773 - DNA, 467 bp, Homo sapiens
attcacatcttgaaaataaaaatctttacatatgattttcaatgaactaaaagttcattttactcagaatggttgaagtaagtgagtgatgtcttagacttcccggattttattttgtaactatttagattgtattgagcactctggaagatgagaaatgtaattttggaattgctccagagtgagcccactcaatgctttatatgtgacagaatcagtggattcaaaggctttcactgtgtgaggtatgggaatgattaagaaaaccattagcaaaacctgctcaaggcataattcacttgtgctctttgtcaatgctccctgcacaggtgtctgcagctcttcccatcccagactcaacagtgaggagacagctctcatcttatcatgtcctattttttccacctggattacaaagccgaatgctttacaaagagcctctataatactcttgtgttctcattcac

SEQ ID NO: 168774 - DNA, 422 bp, Homo sapiens
aatattttctcccaatcaacaggttgtccctttactctgtttactgtctttgctgtgcagaagatttttagcttaatatcttaatatagttctatcagtttttcttgttttggttttttttttgtttgtttttttgtctgcacttttgatcttttagccatgagatctttgcctatactaatgtcctgaagtgattacgctatgttttcttctagtagttttgtagtttcaggtcttatatttaagtctttcatctgtcttgagtttatttttgtatacagcaaaagataggagtctggtttcatttttctgcatatggatatccaatttccccagcatcatttattgaagaaggagtccttttcctgatgtatgttcttatagctttaatttaaaatcagttgattgggaagccaagacag

SEQ ID NO: 168775 - DNA, 214 bp, Homo sapiens
aaaatgaatatatttgtctccctaccttatgaccttattacatatcatagatcttcactcttgctttagattctaaacagaaatcaatttatgtgcttgaaatcacataaaggtaatctgattgtgtcatctactgcttacagtccattggctgttcacaattatgggtagaatcttgattatttgagtagaagccttttcaggctgacattgc

SEQ ID NO: 168776 - DNA, 840 bp, Homo sapiens
caggttcaggaggctttctgtctgggttcaagtctcattaactccccttgatagttttgtgactttgagaaggtcactttatacttcaattttctcatctatgaaatagaaatatagtcgtatgtttacttcacagggttgctatgaagacaaaatgacatagccacgtagaatgctttgtacacagtcagcatcaaatgaatggtagcttccttagtcctatgtttagtacttagtatgcacacaaaataatcactgttatgatttaattggcagagacgggagcatatgtgagtctcttcattcggtcatccacgtaaatccatttatccttaagcctttcttccattaaaccactcagtaattagactatccatccattttccatccatctatccatctattcatccttccattcatctacccaaccttctaacctaccaccatccatacatccatctaacaaactgattatctatgcaacaaatggatatctatccatcaatccaacattcttcaatttagctgtttatccattcatctggccattcattcaatcatccaactatccatctgttcattcatccatctatttatctcatctattcagctatccatccatccatccatccatccatccatccatccatccatccaaacatccaaccatccaaccatccaatcaaccatcctctttattatctatcttttcatccatccatctatttatccatccatccattgttctatcccccctgccccctgccatccatcccatttatctaaccatctgttgtttcacctttccattcaaccagccatccattcaccctataaata

SEQ ID NO: 168777 - DNA, 104 bp, Homo sapiens
ataatacccacccacccatcagcttgccggggacactcacagctctgtaaagagctctcgataaggaaaatgagcctgcactgggcctccacagcctcgtcttc

SEQ ID NO: 168778 - DNA, 279 bp, Homo sapiens
ctctaccctcccatctttcatcatctggctgccgaatctgtgcgtggctgggtctccttcagggttttgtctgctttgggaaaggttggccagtttccttgggtggaaagaagccaatgatttgcatggaggaagggatcctggtggcctgggctgttctctgacctgaattggggcttctttggtttacaagggatactagttcctggagggacgaaggaggctctgtttgcattctctggcccctcccggaactagtatcccttgtaaaaaaaaaaa

SEQ ID NO: 168779 - DNA, 318 bp, Homo sapiens
agtgttggtgctggcccagggtgaagagagacagtgagagacggcctgggagcggggagaccccgacctgctttctatcttaaacagactgggaagttgctcattacagctagcttccttgaaaacaatggcaaagaatcaggcctgccttggttccaccataggagggtggaggaggtgctgtcttactcacctgcatcctggctgggcagctggcacccgtggcactgcccatggagccgtccctccctggcagctgggagggagatgaggcagctaggcacaagggtgtggccttgagaaagaaggcaagggggg

SEQ ID NO: 168780 - DNA, 365 bp, Homo sapiens
attcccgaacctccccaaaccccgccctactgtctcttcctgtttgttccctcggaccttcagctgcttcttcactgttgaaaccatgccctggaagacatattttgaactcctgaacaagacctgctcagaggggctctcctgagtggaagccactcacatgcctggccacatgctgccccctcccccgtggacaccagctgttcccaggagttgacatatcagtggctgagcagctccgtgcatatttgttctcttattttgcaagtgtctgaggttttatgacttggcattttagaaaatcctcactgtccaggttcctcaagtagaataggtcattaaacatcagcatttgcagaagcttc

SEQ ID NO: 168781 - DNA, 508 bp, Homo sapiens
gagggtcaagggcagagcaacaaggagagccagtatttagggagtgggcggagcaacaggagccaggagagaggaaggagaacctggcttcctggggtcacaggagccaagggagggcagcttcaggagagatcaggggagtgcgtgtggaagagcaccataagaatgcagaagatgctaaggccctgagctgctgggtgacctccgagtcaatccgagtgatgggaggggctgtcagcctgcagtggatgaaggaggatggcagggaagactcaaggacccttggtgtttaaggggaggaggaggaggatgtcaacttgcagaaggagctggaaggggacaagctggaagtcctaggacagaaataaatgatgaggtgcaggtacggtggctcacacctgtaatcctagcactttgggaggtccaggcgggcaggtcacctggggtcagatgttcgaaaccagcctggccacatggcaaaaatccatctctactaaaaatacaaaaa

SEQ ID NO: 168782 - DNA, 270 bp, Homo sapiens
gtggacatttccacgagtcacataaaagccctggtgtcaattcccaagagaggccatgaactctgtcaacagaggctgatcagaaacagggatccatgcctctgcctgcacagagccggaggctgcacctgatgctgcagcctggaatacctcgggccctgccgtgccctgggccacagagtacaccatgggctcaaccttcctcaaccaaactaagtcctccaggagccaggagaactggaacaagtccctgggcgactcgtggaaatg

SEQ ID NO: 168783 - DNA, 493 bp, Homo sapiens
cacccagcctggtcttaagctatcctcctgccttggcctcctaaagtgctgggattagagacatgagccaccacgcccggcctacaccattttatataaggcacttgagtattgcagattttgggatccgatgggggccctaacttagagatatgactgtacaggcattttttaaagttagaagttaccaaatttttaatccttttctttaaagtttcttcctttggtttgtttttgttttttttgtttgtttgtttgtgtgttttgttttgttttttttttttgagacaaggtcttactctgttacccaggctggagtgcagcagcacgatctcggctcactacatactccgtctcccaggttgaagtgattctcctgcctcagcctccagagtacctggaattacaggcgcgtgccaccatgcccggcttttttttttttttttttttttttttctcgagacggaatctcagtctgtcacccaggctggag

SEQ ID NO: 168784 - DNA, 351 bp, Homo sapiens
taggggcttgagagatggggactttaaggtgaggttgtttttcaatgggtacagaatttcagtttttcaggataaaaaagttctagagatgtgttgcacaacaatgtacacatagtaaacattacaatacacttaaaaacgtttaagatcataaatttcatgttttttaacacaataaaaaaagacaaacccataaaacagaaaaaaaaggaacaaactattgatacataaacctatcgatacaaaaacctaaataaatctccagacaatatactgagtagaaaagctaatcccagattcctagctgattgccattttggttttcccagtaaacaccctttctaccccact

SEQ ID NO: 168785 - DNA, 256 bp, Homo sapiens
aaataccctcaaaggtatttcctataattgaaaagtttgcccactttcctgtgttcagtataaaatctagaaatcctgcatcagaagacctggccacaaccatcacaaaaataaggcggttatctgagaggtaagctctgagtcacaaaacctccgtactgaattcaagtaattgaagacacgagtgaagaatccatccttaactacacaggaacaattcccaggagcaaacgtagattttttttttttttttttt

SEQ ID NO: 168786 - DNA, 336 bp, Homo sapiens
atttttttgtatttttagtagagacaggttttcaccattagccaggatggtctcgatctcctgaccccgcgatctggccgccccagcctcccaaagtgctaggactacaggcgtgagccaccgcgcccggcctcaacaatcttttaaaaagttcactgcatggaaacgagaccccctgtcagttactgtggaagaggccccctgtcagttactgtggaagacacaatgctgaaaagacatggtttcggccctccaagagctcatgtgttactattccttttaaagaaaaaagaaacaggcagcccgtaaatgccaaataaatgctgtctgcaaggt

SEQ ID NO: 168787 - DNA, 213 bp, Homo sapiens
cgagactagcatgaataagaacttgccttccctgcacagcccccagctgtaagccttgggaagcctggagtttgcatggggaacacagaatcaattgttggcatggcaatatccataaagtggaccttcctgtaaactgtgatgctagtttacaagatcatttcacatgcattttttatggtcaaccttcagttagcagtaacccttaacacg

SEQ ID NO: 168788 - DNA, 339 bp, Homo sapiens
cttaacaatctctttttttggatggaacactgaaatcactggcaacaaatgcaaatataaacatgagagactaagtacaacattagagctgctgcacaggacagaacaaacgaacccaaagagaaggcatcttagactaggcatggtggctcacgaggtcaggagtttgacaccagcctggccaacatggtgaaaccccgtctctagtaatacaaaaattagctgggcacggtggtgcgtgcctgtaatcccagctactcaagaggctgaggccggagaattgcttgaacctgggaggcggaagttgcagtgagctgagatcatgctactgcactccag

SEQ ID NO: 168789 - DNA, 229 bp, Homo sapiens
gactgagatgggaagattgcttgagcctggaaggtcaaggttgcagtaagtggtgattgtactccagcatgggcgacagagcaaggccctgtctcaaaaaaaaagaaagaaatggcaacttcttcattgaaaatacaagattatttaaaacagaaatgctaaaaaattgcttctaagactataatctgaaagagggaaagactgagacagatataaaaaattcattctc

SEQ ID NO: 168790 - DNA, 321 bp, Homo sapiens
tccttaattagaagatagaactgacatctcattttctaaaaaagatcttgaaaatccctttcaggtttaaagttccgtaaagtcaaaattttagtaaatactgaaaacaataggttctcctttacaagtgaagaaaagaaatcaagcctaatgtctcatctacaactctccagaacaaagatgtttaaaactacccctatttaatgtttaaggagaacaagtgattatactcttttctattctcctgcaaaatcactcaagaattataccttacttgtgaaaatgtactctaagacttggaaatactaggaaaggatgatg

SEQ ID NO: 168791 - DNA, 555 bp, Homo sapiens
aacaatgtacataaattggccaacgtcaggcaaccatgagaggagtaaaggatccaaacttgggcagctcctgaacagccctggttctccagtactgtgtcaccctgcagcagccacaatgtttcagaatgaggaacggcccacccacaaacacactgatttatccagccccaacagagacaggaagagactgtgaatgaatggacacatgaatacattttctctccaggcaaaatccctaaaagtaaaacaattattctctattgcaggcaattaactacaggcatgtgctcccacctttacccaaaacagacgcgctgaagccagagccatggtttttataggctgattccaactttgttggacaaagagactttagggttttaccttcttccctgtcaaatatttaccaaagacctttattgccagggccctaatttgaacaaacagatgccatccttgaccatctcaaggacaaatgttaacactactatcacttgactttgagatgaaaataattatttttaaaagagaaaaaagaatgttaactacatg

SEQ ID NO: 168792 - DNA, 180 bp, Homo sapiens
gaatagaaaagacagttccgggtggggaaaaaccactactgatattagagataggagatgaccatgatatgtgcagtattttgaggaattctgatacttccatctaaaatgctgatttttttaaatttcaaaactgatgccatctactagcttcttgcaaactaatgattcaaccaattc

SEQ ID NO: 168793 - DNA, 167 bp, Homo sapiens
gagccaccaagcccggctgtgatgatcattctgctatttgatgtctcactcatgccgtcttctgccatgtgatgctgggctcctcagggttgtgtcacaagccgtctcacccttgccaggctcacctctggcccgatgcactgcacatggcccagctgcccacctga

SEQ ID NO: 168794 - DNA, 401 bp, Homo sapiens
atgatcttgctgcaatccttccattttagtaaatcttaacagtgtgattccattgttttgtccccatttcactccagaagcaaaacaagtatgaaaaccaattctacttctgtttctttcaaaacacatctaacaattaagagatgaaaaaaagaaaatgagttcactgttttagagagtattcgaattttgacaacgtgaggccaggcggagtagctctcgcctgtaatcccagcactttggaaggccgagatggatcacctgaggttgggagttcgagactagcctgataaacacggagaaaccccgtctctattaaaaatacaaaattatccgggtgtggtagtgcatgcctgtaatctcagccactcgggaagctgaggcaggagaattgcttgaac

SEQ ID NO: 168795 - DNA, 380 bp, Homo sapiens
ggacttcaacatattttggagggagcacagttcaacctaaaacagcttgacttctggagtagcccatgaaagaaaaccctggcccacttctcctcctgccctctttagccaaattatgtctgtgataaagtcagaagccgcactgtaaagacctcgggtaagccagtgagcccagctgagggagaaggcagagcgccctgtgcacacggcctctatagtgactcaagaaaacgccgcggctctgttgtgatggttcttatgcaggagaggcttataaactgatgtaagagatgcttcaaattttttcttataaataatgtccccatcttctaaagcctcctagttttaaaaaacagctctgccccagctgggtgtactaa

SEQ ID NO: 168796 - DNA, 390 bp, Homo sapiens
ggagtcgtcacttcatactcatgatcaatatcatcagtatctataattgcccagatccaggaagcataactggacagtaaaagcagcatcaggttaggctgggcatggtggcttatacctgtattcccagcattttgggaggccgaggcaggtggatcacgaggtcaggagatcaagaccatcctggctaacatggagaaaccccgtctctaccaaaaatacctaaaatttagccgggtatggtggcaaacgcctatagtcccagctacagtcccagctactcggaggctgaggcaggagaatctctagaaccaggaaggcggaggttgcagtgagccaagattgtgccactgcactccagcctgggcgacagagcaagaccccgtgtca

SEQ ID NO: 168797 - DNA, 181 bp, Homo sapiens
aagttcataactactccacgcctcagtttccccatcaaatgggagcggtgacgtgcgttagctagtgcagtaggtttaggcttaggtcctggagtcccggagggagagggcaggaggcctgggtgcgagccacagcctccaccagctgagatggcttccaggccggggcatccccgcgccc

SEQ ID NO: 168798 - DNA, 563 bp, Homo sapiens
ctaatgctttttcctttccagggtgcatcaccacccatggacctctgcttatcggattagtgatgctcactgatgtagcagtcctgcatcccttttcctgcctttcttgaccacaaagaaagggatccgggctgctggattccagtggtcctttaccagtgtgtccaacattgcgtttgtgctcaggggtgagtcctagagctgggctgggttcctgagtatttcatagcaacccagctgccccgtcaagatgcattcccataaacaacagttcttatgcaaattcgtttcagagagagtgtaggtaacatggtaccatgttctaagcaaaaagccgtctcttccctaggtgatccttaatggctctggagaggatagccttggttaaaactttgttacattaataaaaggagccaatattaaaagatattcccaaatgtcttgttttccttgttaaaattgtttttaattgtgacaaaatacacataacaaaatttaccattttaaccattgttaagcatacagttcagcggcatttaacaccttcatattgtgcaacctgg

SEQ ID NO: 168799 - DNA, 221 bp, Homo sapiens
aaaaaactctaataggaatgacagaatcagagaataaagagagcaggggtaaaccaataatcaaaaggatactggctggaaattttcagatttgaaaacagacatagttcctcgtattctaaaagcatgagccacagcaagaatcaataaaactgaatcacaggggaaccggcgcaggtcaacaaagaaaaggggaaagatcttaaaatcaaccagaaaga

SEQ ID NO: 168800 - DNA, 156 bp, Homo sapiens
agcaccactcatagatcagtggaacagaagagagaacccagaaacaaacccacatatttacatccaactgattttcaataaagacactaagaacaatcattggctgggcacagtggctcatgcctgtaatcccagcactttgggaggctgaggcag

SEQ ID NO: 168801 - DNA, 333 bp, Homo sapiens
aaactttctgtagcttgttcctgaagtatcaattttataagaaaatgtatatgtaaagaattattttgctttttaaacaagcatggatttcatagagcagcagttctcaaagtatggccttgcagaccccagggttctctgagaccctttccacggaacatgtgaagtcaagactatttcataatagtagtaaaacattatttgcatttttcactgcgttagcatttacactgatggcaccggcaacagtagataaaactctgcaccttagcaccattcaagacattggaaccaatagtagtaatgatcatagttttcattaccatgtgcatg

SEQ ID NO: 168802 - DNA, 478 bp, Homo sapiens
taaggctatcttgctgggagtttgagtcacacaaatgtatgcatttgtaaaaactcattagatgtgcatgtggtaggctgaataattgctctccaagagggtcacatcctgattcctggaagctgtgaatatgttgtttcacatggcaaaaaggactctgcagatgcgattaaactaagaatcttgagatgggagattatcctgcgttatccatgtggaactgatgtaatcacagtctttataagaagaaggcaggggatcagagtgagtaggagaggtaactatgaaagcaagaggttggtgatgtgaggaaggggtcatgagccaaggaatgctttcgaaggtgaaaaaggcaaggaaacagattgtcccttcagagataccagaagaagccagccctgattacaccttgactttggcccagccagactgattttggacttccaagagaataaatgtatgtcatttaaagacacta

SEQ ID NO: 168803 - DNA, 498 bp, Homo sapiens
gagttttgaaatgattggtatcagtactttgattttagtaaactttatattgggcaatcagaaaacaagatttccaggcttgatagaattctgattttatatctgtaaactacaaatatggaaatccctgatcttgagctcagagtatgtatatgattgttaacatttgaaaggatggaatttttattagaaaatatgcatcatattttgtgcaagatattctggctgtcttttttaacagattgcttcttagagcagtttttcttaaggaacttattacacacattcttatgtttcttgaataatttaaagcattctagaaattattttgggtaatatcagctataatagaactatataggagagtttattcttatgaagtgcagtgtaaaagttatttgagctggaggaattaggtaacttgaaatcaaaaaaaggtaagcacgttaggagaggaaagtatcaaataggttgctcttctcctaacaagtagactgg

SEQ ID NO: 168804 - DNA, 276 bp, Homo sapiens
gatgggggaggtcacctcatgtcggggtgatgaagggggacttcatggaggagtgggacttgagatacactgtgaaagttgatgccagaaacttcacagaccttgctgcgtggtgcctgtgcattgtggatactctctgtagggagttctggttatgagacaagcttggggtctagtatggtcagagcaagatataattagccagaagagaagggcttgacattgaatctgatagttagtattgctgtctaaatggtgtcacctgagtcagcagta

SEQ ID NO: 168805 - DNA, 113 bp, Homo sapiens
cccccttggcctcaggataacatccatgttcttagctccacttatgaagtcctctgtgaccaggcctcactcacatcctgacctcttctcttctctcatcccctggccacccc

SEQ ID NO: 168806 - DNA, 372 bp, Homo sapiens
ctagccccaccccaccagcccaactcgaccactactctgctctctgtctctctgaatgtgcctcgtggacatttcacatcaatggaatgccacagtgtgtgatcctctgctacagtcttctctcactcagcatcatgttttcaagggtgatccatgttgtggcacacgtcggtacttgaaaaaacagtgaaagacaattttccctaagtagtaaaaggcaacttccctaaatgatccatttgctgaaaattcaacacccttcggttggtacattcattgagtttccaaaagtaaaaactaaaattttaaaaaatcattaagcactaaacaatgaaaattttaagtaaactttttttttaggacgatgtctca

SEQ ID NO: 168807 - DNA, 274 bp, Homo sapiens
gtaacaccaaagagattaagcacagaaagtgatattgattaaaaagttgaaagtaaaatctaccttggctggaactgaacattcagatccatctctagaggaaaatctaacatgaatcatatggttcctattttgactagttcatagcatatcaattagcaacttatgacttgaaaatactttttctcagctgcatttgactacctaaaatcctaccgagcacgctgtttggcatgtcttactcctctgaaatcatcatctactttctaaaaac

SEQ ID NO: 168808 - DNA, 522 bp, Homo sapiens
tccctaatatttgggcaccggtatccactgtttgcggcaaataaacattcaacagtcttgatgctgaatgccagttttaagggaaatttgtgtctatttatggctatgaagtgtgggtaggtgggagatgattccatggcaagtcaaacttgcccaaaattcattgagaaaaagctcttgatcactgtgtctcaacaatcagaagatgtctgagttggaaagtatctattttttgtttattttcacagataaaaggtatagaatcagccccatggaaacaccttctgtgcctaaatatattctatgcctcctgcaagtaaacaaacaaatacacaaagaaatacatgaacatgttccaggaaacaaaccaaaccaaacaactattttccatatactcctggcttttccatatactccagaacttcgcttctggaggcgaatgttctcaacagctacacagagttctgtaaaacccccaaatgtgacatgtgcctgtggctgctggcatcccttttccctcca

SEQ ID NO: 168809 - DNA, 356 bp, Homo sapiens
tgtcaaaacttagttctttgaaagaataataaaactaacatctaacaaaagcaaacaaaaagaactacaaaaaaaagcaagagagacaacagatgttatatagattaatcatacatgaatttattatgagttactttatgctaacaaattcggacatagggatgaaatgaacaaattcctttaaaaaatgaaactgaaaaaaacagaatcaagaagaaatagaaaacctgaatagttttgtaagcaataaagaaactatcagtagttaaaatgccacaaccatatgcttttatgggcttgttcaaccagtcaagaaataaatattacaccaacaattccagagtctagaaaatgtg

SEQ ID NO: 168810 - DNA, 391 bp, Homo sapiens
gtgggtgtgctgggtatgatctgtgggtgtgctgggtgtgatctgtgtgtgtgctgggtgtgatctgtgggtgtgctaggtgtaatgtgtgtgtgctgagtgtgatctgtgctgggtgtgctggatgtgatccatgctcggtgtgatctgtgggtgtgctgggtgtgatctgtgtgtgatctgtgcatgtgctgggtgtgatctgtgtgtgtgctgggtgtgagctgtgtgtgctgggtgtgatctgtgtgtggtgggtgtgatctgtgcatgtgctgggtgtgatgtgtgtgtgctgggtgtgagctgtgtgtgctgggtgtgatctgtgtgtgtgctgggtgtgatctgtgtgtgctgactgtgatctgtgtgtgtgctgggtgtgatc

SEQ ID NO: 168811 - DNA, 207 bp, Homo sapiens
ttcatgattacaatggcctttactttcattcttctctatttttctatggtcatacttgttctttacatcaactggagatgttctgcagcagaaactagtatgctgttttctgatcatagcctcttctccctttaactctgttattcgtaagatgtcactttaagcaaatgaagtttactagtccctctgcaactgccttttttgccc

SEQ ID NO: 168812 - DNA, 525 bp, Homo sapiens
  misc_feature (431)..(431): n is a, c, g, or t
aaaaatgtttctttctctgtgtgtgcagcccactttaaaggaaagggtgctcagagcacacaattataaacagatgagtatgaacttaacattttgccactctccttattccacattcacccaagttaaagcaaattatatattaacctcaatcccacagttttctgccagctccacaaccttgggccgtagtgaggaatcgacaacagtccacagcagcccagttgcaactgcaacaacaccctcgcctgcccgctccacaacctcaggcctcgttgaagaatctacgacctaccacagcagcccgggctcaactcaaacaatgcactttccctgaaagcgacacaacttcaggccgtggtgaagaatcaacaacttcccacagcagcacaacacaacacaatatcttcagctcctaagcacatatctgnccttgttgaagaactaccagctacacagcagcccgggctcaaatgaacaacaacttccctgaagctccaaactcaggcatagcaaggaggtcac

SEQ ID NO: 168813 - DNA, 236 bp, Homo sapiens
ccgtagcctacaagactgcaagaatcctagcccgccacacagcctgccaggtggtgcctggtctgactgctgcggtgtgaggcaggtgtgttgctgccgcccctgtaggtgtgagtcccagcctctgtgtgcagcagcgtgcaggtactagccagtgtttcccagtttatttttgtcagaagtagtaatctgccgcagcaaggcccggccagagccagaatccgagcttcccctag

SEQ ID NO: 168814 - DNA, 521 bp, Homo sapiens
agccatctcccttactggtcagggcttaagacaatccatgcttgatagttccctggcaactattggcacagtgttgggcatgagaactcatgggtcaaataagactgaagagaaggatttttgttctatggttgggagagtttttgtcccttgctcactgaacatgaacaagaaaaaatgtagctctagatgctgttgacagtcaatttgcaatcgtgaggaaagccagcctggtacaacaccagcacatgcagaagggccaagctgggaacatttcagagcaacagagcccaggctatgatgtgcctagactttctgctatgtggggtaatacatttttttttattgtttgcacctctgtgggtctaacacatcttaattgacacagaaccttaaagaaaataagaatcctgtggtcttgccaggtatagtagagcttctgaggtaggtttgcatggggaaaactcagattttcaatgttggctgtatttgtataatgcagttaaagtgtttacttctta

SEQ ID NO: 168815 - DNA, 220 bp, Homo sapiens
tatgcagggggaggagcatgcagggggaggagctatgcagggggaggagctatgcaggggggaggagcttggtctcatgttcggggtggaacttgggattctatctgggaggcgagaaaccagctagcgggactctctctcgctttgctgagagtccctgtttccctttttttccttcttgcccaataaattccatttttctcactcttcaaagtgtctg

SEQ ID NO: 168816 - DNA, 604 bp, Homo sapiens
  misc_feature (506)..(506): n is a, c, g, or t
  misc_feature (541)..(542): n is a, c, g, or t
tccccaccaatgaggaactgtgagtcaattaaatctctttcctttataagttacccagtctcagatatttctatatagcagtgtaagaatggactaatacagtctgaatggacatttcttcaaagatgatacaaaaatggcccatgcacatataaaaagatgctcaagaatgttgaatgttggcccccactctcttctggcttgtagggtttctgccgagagatccactgttagtctgatgggcttccctttgagggtaacccgacctttctctctggctgcccttaacattttttccttcatttcaactttggtgaatctgacaattatgtgtcttggagttgctcttctcgaggagtatctctgtggtgttctctgtatttcctgaatctggatatgaaatcctggtttgaaaattcttttctttaagaatgttgaatgttggtccccactctcttctggcttgtagagtttcttctgagagatcagctgttagtctgattggnttccctttgtgggtaacccgatccttctctctggnntgccttatcattttttccttcatttcaactttgatgaatctgacaattcctcatcctgggta

SEQ ID NO: 168817 - DNA, 331 bp, Homo sapiens
atctggggtaaacacacggatacccagagccaagaatggggctgtgggataaacacatgctgaggccagctttaatgcaatcagtcccagtgtccaggaaaggggtttgtgacaagacataattagtcctagcatgcagccaaggagcatgtcatgggcacagcttgtcctagcacttaggaaggcacctgtctagcaaagggaatagatctcagtgtcccaccgtgggtttggagagaggccacccgagcacggggctcctgcaagcatccccggtgatgtgcctgctacttgttgaagaagaagattgaaaacatctctagttctcagc

SEQ ID NO: 168818 - DNA, 269 bp, Homo sapiens
ttgcactccagcctgggtgacaagagtgaaactccatctcaaaacaaacaacaaaccacccatatctagtgaacgtacatataagtggaccatacacaatacatttttttttttttttgagatggagtcttgctctgtagccaggctgtagtgcagtggcatgatcttggctcactgcaacctctgcctctccagttcaagcgattctcctgcctcagcctcccaagtagctgggatttcaggcgcgccaccattcccagctaattttt

SEQ ID NO: 168819 - DNA, 137 bp, Homo sapiens
acaaacatttgttaaaagatattattttgctttacactttttctctcagaaataaacagatgcttgaattcccacagtgctgcttgagcctcacaccatgtcatcctgccaggcacccagatccagttctagagttt

SEQ ID NO: 168820 - DNA, 844 bp, Homo sapiens
agtgaatctgtctctctagtgtgagcaggatgttcctctttccttgcaaagctgtaagagttagaggcccctgcatggccaggggctggccgtcttgctgcctgcccactttagggtgtgactgtcttgttccccgcccactttgggggtgtggccgtcttactccccacccactggggggtgtggccatcctgctccccgcccactggggcatggccatcctgttccctgccctctggggagtggccatcctacctcctgcccactggggcatggccacctgctccccacctactggggttgaccatcctgctccctgcccactggggctggccatactgctccctgcccaccgggggtgtggccatcctgctccctgcccactggggctggccatactgttccccacccactagggctggccatcttgctccccgcccactgggagcatggctgtcctgctccccatggagcagaacaggtggggcctggagagggatgggcccaggggctgcacaggctgccaacaggtccaccgttgctggcttctgtgtggcgctaactcacgatctctcacagggatgcagccaagatgctggccaggtggggctgccatcctctgaaggcttggctggggctggagctgtgtggacagcacatggtgtctgtctctcctggcagccttggcctctgtgctgagcccaggtctctgtcacaggctgctgggctctgccccgtgggccccagctttcttctggagggctgtggttagagagacttggcctgccctggacctacagaacttctcttctatggggtagaggtggatctaaaaacgtgacca

SEQ ID NO: 168821 - DNA, 245 bp, Homo sapiens
aaaaaactataaaatacttagcaataagcttattataagatgtaagatctctacactaaaactgaataacattgatgatgaaatttaaatggtgagatatactatgttcatgaatttgaagatctgctttgctaagatggtaattctgaactgatctatagattcaatgaaatcccaatcataaccccactaggtttttgttgttgtttttaaagaaatagacaagctaatgataatttatatgg

SEQ ID NO: 168822 - DNA, 360 bp, Homo sapiens
tatggtgatacttgacattttccattctccctctaaaacatactatttaagcatctcatgttactatattcccactagaaaattatctacaacttgggtgatttttgacaaaagctttaggaaaaccagggaaatggctccatgtcctaaggccaatttgacttttattcccttttagctaaacctttccccaaaatgtaggttttggaacatattttgctacatacacatagacttatatttttagtttaacatggactagatactgcaaaactggttttgaacaggatgtttttattacataatcttttaagtaaccttaaattttgtgtcgaattaaaagtaaagggcctagagcag

SEQ ID NO: 168823 - DNA, 204 bp, Homo sapiens
ggaagctagggtgacctttaaaggcaaattcatgacctagtgcacatataagctaagctaaacttggccaagtctcctaacatggtgtttatacaagtcttttctgttacatgggagtgtaaaaataagtccttcatgaaatacaaaatatttcttaatgagaatgttctttgtttcaaaattattgatggtcataactgactt

SEQ ID NO: 168824 - DNA, 342 bp, Homo sapiens
ccatttctcccatccaagtactaaccaggcccaaccctgcttggcttccaagatcagaggagatcgggcacatccaggatggtatgtctgtagagtgttctgctatttctttcccactattccatccatttttttctaagagaagcaatgtctatagatacaccaacatctcctaagtctctcgtcttctgtcctactttcccaaaaataatagtcttatcttccttaaaaagggaaaggtcaaataagtagaaaggtgaggattttggtccctcccacagtggcagaccggagccctctgtctatatcctgggcaaactgggcagggccattcagtgccta

SEQ ID NO: 168825 - DNA, 134 bp, Homo sapiens
agctccaacttgaaaatcttcataaccatagtatggatcttcatatccaccacgatagttatggtaatcataaccataataatcataataatcttcatatccataataatctggaggatatccataaccacctc

SEQ ID NO: 168826 - DNA, 411 bp, Homo sapiens
agagtgtcgtggtccattcagggacagccaatgtcctgtgacctcagggcacttggtgggagactgctctaggggctcggacctccagcgtctcccctctggggtcccctaaagctgtgggatgggcctcccctgcccctcctccccgtcttgcccagcaggtgagcttttcccgctccttggagcctcgaggggccgggaggcaggggaccagcttgcatgggccaggctgaggagcctccagccccggctttgatgaccgagcgccctctgtcctgtacccaccccctgccgacttcagcggctgggaaagcaaaaagggccttttctccaagcaggagctgtggccaactcccgcctgacaatggggcatttatgtggagggagggcgcccctcctgtggccacagcc

SEQ ID NO: 168827 - DNA, 168 bp, Homo sapiens
aggtaattaaatatgtaccaaagatctatgtcttggcctttggcaaatttaacagtaccagtctaaagaaagagaaacaaataatatggtaggttagatgtcattcaaaataaagtttcataactgttctgttgtaagtataaactacattccactataagaaattta

SEQ ID NO: 168828 - DNA, 550 bp, Homo sapiens
atttgtttgttttgtagagatggggtctcactctgttgcccaggctgctcttaaactcctgggctcaagcgatgctcccaaagtgctgagattccaggtgtgagccactgcacctggcccctgtcctgcattttacagatgaagaaaacaagacactggtaggttaggaacttacccctcccaacaaatgacagagccaggattcagacccaggtgatctatgtgcttatgtttttgaccattatgttttatgctttcttacttttctggaagtgacaggaatttgctagaagggtagggccagaatcacatgtagactcctaagaacctggtattgaatcattgatattttgaagcaagggcataatttgatcatggtcatgttttagaaagagaaccatggcagtggtgtgtaggaaagaaagagatggaggggaaggaggctggaggctggaggctgggaggccagttagaaagcagttactacagacctacatggagtttggagtttgaaagcagacggagggggaataaagacgagagaacaaaa

SEQ ID NO: 168829 - DNA, 480 bp, Homo sapiens
accacgcctctattaaaagtacaaaaattagccaggcggtagttgcgcacgcctgtaatcccagctactcagggggctgtggcaggagaagcgcttgagcctggggaggcagaggttgcagggagccgacatcactgcaactccagactgggtggcagagaccctgtctcaaaaaaaaaagagttctcagtgaatgttgcatggttacaagttggagaacagaatattctgttattggaggaagaaatacactgatgcgcataatcacaaagcaatgacataggtgtttgctgtgttctcaggtataccactccgtgttctgataaactttctcagttttgctaatctggtttaaataaaagggactaaaatctgagatttgtaatgaaaggagggggtatgccctcaaaatctctgaacatatttatctgatcttacaaatttgtcaaaattgagctaagtttgtactacttggagttt

SEQ ID NO: 168830 - DNA, 356 bp, Homo sapiens
cagggccccgtgtggccctgagcaagtcatcctgggcacaggctccagcccagggcacctgctggggcctcacctctccagggcctggggctgctgtccagccttggcagcaatgacccctgtcctgccaccagctggggcccttccttctcacccttcagcccgggcaggcatctgcagcccccgcccatcacgcctcggtcccctgactctcccagcagctttttattggctgcgggtggttggagggggcaggcaggggtgcccggccagtgccttggcagctccctaaggcccccaagaccctgccctggcctcccaaatccgccaatattagaaaggatttgtgtccccga

SEQ ID NO: 168831 - DNA, 325 bp, Homo sapiens
acctcctccctggggagagccacggtcagagcggcctcctcccaggacgaagtgttgggctttggggctcagtgagagggatgtgcccaagggagggaaccggatagggtgccaggaaacccttcagagcgcatgtccttatgagctggagacgaagctgagcaaagtgtccacacacacgtgcaccctcgcacacgcatacacatatgggcagccccacgcggcggctacccccacggtgcacgctcacactctgtgtgtgaaggcgcacctggggtctaggccacagaggccggccgggtgcctgcagacaaaaggtggccgt

SEQ ID NO: 168832 - DNA, 230 bp, Homo sapiens
cagctttatgatacacgcagggaacaacagatcagaagaaagggggacaaggagagaggggtagattcagagagtgaggatacacagagggctcaaaacatgctgctttacttcatagttcagcctctgtccctgcttctaacccagtgcctagcacagagtaggtaccaaataatgagtgattcattgattaactgatcaatgttaaggaacaagacagggtggtatga

SEQ ID NO: 168833 - DNA, 543 bp, Homo sapiens
taggtcggtacctcacttatgccggggcagatggtgtttttaatctcaagataaactaattttcacctatttccttatcttccatatacgcctcaagaaaaacccatgtgtattgagtggcctctctatcccacagcagctctgggtattttgcaaaggatattacctgagtccccacagtcccctatgaggcagatggtgccatctgcagtttacatatgaaggagggtgttagggtgaggttaaggatgttgcctgatgtcccagagctggaatgggggcccagcatccccagacagagcgctcagatctccagacattgccaggtgccatgccttcaacatggcagctggcagatctggactctcccttcctcatcttcctggcggtgcctcctccaggcaggcttgtgctccacctttgctggagctgttgggcagagcttgctagtgatgtcctgtatctggtctgggggcccttggcttcatctggaaacttggcttcccctgatctcccatccacgtgccacatcgactctcttcc

SEQ ID NO: 168834 - DNA, 160 bp, Homo sapiens
taatactgtattttttctgcaccttttctatatttaggtatgtttaggtacacacaaatactcctcattatgttacaattgactgcagcattcagtacagcaacatgctatacagatttgcaacttaggcacacacaagcggctataccatacagtttag

SEQ ID NO: 168835 - DNA, 286 bp, Homo sapiens
acatgttttcaggttcacattaattttgacatttagggaatgctgctgacataggaaagtctcatacacctataaagttattttgccattactgtagattaagttgtaaaacaagggtagagccatcacattgaaattaatttagacaggaagaatctatataaatttgatgcatagcaaactctgacataatttggtttattttgaagtctggcatatttttcatcactttttattttacgggtaaatcataatatatcatatttttcaataaaagtattttctt

SEQ ID NO: 168836 - DNA, 405 bp, Homo sapiens
cttatagggccagactgtacatattttaggcttgtaggtatatgatgttggtcacaattattccacctcagctgtttactgtgcaagcagccataggcaatgcataaacaaaagggactggctatgtaaaaataaagctttacttataaacaggtggcctaggggccatagttggttgacccctactgtagaaggttttggtagtgatagtttttttggactcaaattattttgcatgcacattagacaacagagttaattcaatattatatactaaccaaagtgaaataataactcacaagaaaaacacctttgataaaaaaatcagaatgacacatcaaacaatctgaatacgaagaattaatgtgagctctatgactatctctagcatcataaaactttcaa

SEQ ID NO: 168837 - DNA, 321 bp, Homo sapiens
tgaggcaggagaatcacttgaacctgggaggcagaagttgaagtgagctggattgcgccactgcactccagcccgagcaacagtgtgggactccatctcaaaaaaaaaaaaaaagagagaaattatccagtctgaacaacagagagaaaatattctgtaagcacaaacatagcctcagggacctgtgggggtataaaaaagagctaacattcatgtcactggagttacagaaggagagaagaaagagggaggggcccaaaaagtacttgaataaataacggctaagaactttttaaatgtggcaagagacccaaaactgca

SEQ ID NO: 168838 - DNA, 480 bp, Homo sapiens
ctacactgtcagctgtgctggttaaagactaacagcctacttaatgccgagcctgcctttatccatcagtccagtagacaggttcttcccgacagactgcgcaagccaggaggggagaattccacatctggcctcctggaggggtgttgggagcaacgtgcatttgccttggttgaatccacccccaacaacacacagacacaccacaagaggctggagagtgagatttagtcattatttccattgcaaaccatttctgagcatcattaaaaatcttcacttgagtttgtgcaaggagggcaggtgcaccagaccgtgaacaagcacattgtcagcctggccttgtctgcccagtcggcctcaacaggagacaagctagaatatgcatgagacagcccgacttccccaggggagctcgaaagtgacgcgaaccccgcctgggctcacccagggctctgcctgcctcgacaacccttccct

SEQ ID NO: 168839 - DNA, 313 bp, Homo sapiens
tgtgagctccttgatgccatcactggcctcaggatttcatcaaacctccgaaccccctcatgattctcgatttggctgataatcttgatgagcactgtaagctcctggagggcattgattatatttatcttcttcactagtgtaaatccagtgtctataagtcttactacataggaggttctcaatgaatgaagtgttttttgaatgtatgaatgaaaataaattattggaaaatgaatgaagggtaagagttggaaaagctttcagagaacatttagtctctctcctttttttaacagtgtggaaactgagt

SEQ ID NO: 168840 - DNA, 547 bp, Homo sapiens
cagaatcacttccatcttagcccagcagtaggcatactccaggatgccaggcaatcaggcagagctttccaagcaacttcctggggcaccctggggtgctgggtagaccaaggaatgggcaagggcccctgtgggaggctcagttgacatccacggatggcctgcacagcagggccgggaggaccagcactgacttgctatcctagaacatacacacagctacacctggattctcccctgaccaacagcccccgaccacccacaaccacttctttctacttccttttcctcagctgacttgagcagagggtgtgtgcacatatgcagcccacttccactccttcccctggggccacctgcacccaccctgccctcgtgcccacctccttctcagacactcccatctcagccccgtggagagtcctccctccaccttcctcaccaggacccagccggagcagtgaggtactggcctctttcccaacaccaccaggccctgcgcccccagacccatgcccctgttttgcgtttcttggcaggatttccc

SEQ ID NO: 168841 - DNA, 357 bp, Homo sapiens
cagaatcacttccatcttagcccagcagtaggcatactccaggatgccaggcaatcaggcagagctttccaagcaacttcctggggcaccctggggtgctgggtagaccaaggaatgggcaagggcccctgtgggaggctcagttgacatccacggatggcctgcacagcagggccgggaggaccagcactgacttgctatcctagaacatacacacagctacacctggattctcccctgaccaacagcccccgaccacccacaaccacttctttctacttccttttcctcagctgacttgagcagagggtgtgtgataaatacagagcctacagacccatgccgcaaatcctgtgg

SEQ ID NO: 168842 - DNA, 329 bp, Homo sapiens
ggtcggtcatggaacccgagcgtgcatggacccccgaccacccacaaccacttctttctacttccttttcctcagctgacttgagcagagggtgtgtgcacatatgcagcccacttccactccttcccctggggccacctgcacccaccctgccctcgtgcccacctccttctcagacactcccatctcagccccgtggagagtcctccctccaccttcctcaccaggacccagccggagcagtgaggtactggcctctttcccaacaccaccaggccctgcgcccccagacccatgcccctgttttgcgtttcttggcaggatttccc

SEQ ID NO: 168843 - DNA, 239 bp, Homo sapiens
agttaagaacatcaattgaaattacttcaaatgtcctgaaaattcttaatttctcagattaatgttttaattaaatggttgatctttggtaacgtgcaagagtactataaaaccactttctttattttactagctacagtttttctaagtactacagttaatgcttgatgcctgtatttggaacacagagcttccctggaggaaaagattggctttgtcctattttctctctttttttt

SEQ ID NO: 168844 - DNA, 440 bp, Homo sapiens
ccatcaccatcaccatccaaagtcactcagcccatcaccatcactatccaaagtcaccagcctcttcaccatcactatcaccaggcccttcaccatcatccgaagtcacccagacccatgaccatcaccatccaaagtcttccagacccatcatcatcaccatttgaggtcacccagacccatcaccatcaccatccaaagtcacccagcccatcaccatcactatccaaagtgaccagcccctttaccatcactatccaaagtcacccagacccatcaccatcaccacccaaagtcacccagccccttcaccatctccatccaaagtcacccaacctgtcaccatcagcacatcactggcttcctcccctcagtgtgcgcctcagtctgaagtgatctcacttacttgtttgaggttctcactgctgctggccccgctg

SEQ ID NO: 168845 - DNA, 312 bp, Homo sapiens
aacttggttgggcttaggaaggtaccaggagagtgcaccttctagtacttgaaatgtccctccattttgaggacacaggagtggcctacctttcatctaacaaagacaagagaattgaacgctgattgtctttgtctttgaagggtttattgctttacctcttcacttcacctggctttggcacctctgtcatttcttcatttactgttttttctagcatacttttaacttctttctgtactttctctttccaactgctgtccacatgccacctgtgtatagaatcccaagaaaacataacccaccagatcg

SEQ ID NO: 168846 - DNA, 329 bp, Homo sapiens
agaaatgaggatgccagagaccagcctgacggagccgccccagaggaagggaaccccacagagctcccgggagtgggaagagctgttgacccggctggggcccagggacccagtgcagcagcagcagcagcaggcagaacctcgcagggcggaaaggatgccggctgtctcagctcagttcggtgaacacctggaccaggtggaatggtgaaattagaggcagatggagttaggagacatccaaatgtgggattggtaggacatggaaacgggctcacagcctgcttcggttatgtctgagtgcaaatcatggcgaatcttcacagccg

SEQ ID NO: 168847 - DNA, 487 bp, Homo sapiens
cactaacggctcatttttctcagttcctattacctaatacagcatgtatggctgtcaacaaaaaagtacaaggtataccaaaaggcaagagaaaacactctgaaaagacaaattgatgatcagaaccagactcagataggacatagacagggaatttaaagaagaagacattgatgcagccaagaaacaggaaacaaagctcaacatcactgatcattagagaaatgcaaatcaaaaccaccgtgagataccatgtgttgagggcccaaatggaaaaaaaatagacagtatgtaagaacagatggataaagtaagcagacaaatggaaactgtatgaaggaatcagaaggacatgctagaaataaaaatcacagagtagaaaggaagaatgccttcaatgagttcatcagtagactgcacatggccaaggagagaatcagtgagcttgaatacagatgaatataatgtcccaaactgaaatgtaaag

SEQ ID NO: 168848 - DNA, 398 bp, Homo sapiens
ttataaattgaatcagtttaatggggttggacatacccagacctttaaggaatttcaggaatgaagggctgaggaataccaggctgaggaataccaaacatttttagagaagtttagagacagaaacgtattttaaaaagttgtcgttctcttggcattaaaactaagcaaggcaaaaagatccccagattctgaattgattaaaaggcaaactttaagtcccatttttttcttctcatgaatttttagcatttattggaacatcatctgagcctgcaactgtggataagctaaaacttgctgagcatatataaaaactcacaatatggttcaaggtagaaacaacaataaaatgaaattcaaattaatcaattttccccagtgtctatggaggtggg

SEQ ID NO: 168849 - DNA, 568 bp, Homo sapiens
agagcaatgcatggtccaaaatgtaatttagtgattcatttaagtaggagatggtcaaatatattgtaaatgtgcaataaagagtggcttttaatttttttaatgtctgaataaagtattgttataaataggcttatcgattttagaaagaaaacctgacatttttaattacagtaatcattaatttttttcattattaaaatttaaaaataagagaactgaatcattagaacatggaattggggcaggtaacccaattcaaaaaaggaaaaactggagcagagacttaagcttatttattcagttattctggtggtctttgtgaaacctgggacaaagtttttattatgaattactaatccagtattactacactatgatgtcatatatctggtaattcaataagcaaacttttacataaaataggtgactctctcgtggcactaaaaatactaccactatccaaaaacattgggatcaactgggctttaacagtttcaatctatgaaaagccaaaatttaagctaattgctactaactgtatttcaataaaagcacttgactgttg

SEQ ID NO: 168850 - DNA, 388 bp, Homo sapiens
tgccttcttcattaagcgcacacacacaccccttagttgacttttaagatatttccaaggctgtaacacttgtagactcatatagtatgaataaagtatgcaattacagtgagtagacagaacagaatgacgaggtcggctttggatggatttttttcttcagagtcgagaagtttggaactggatttagaatgaggtgacaggtgtgaattgtcagcaagcagtcaggaggagggatgtggcctggaggattgcttaagcttgggaggggaggttgcagtgagctgtgatcgtgccactgtactccggcctgggtgacagagtaagactgtgtctcaaaaaaaaagaaaaagtaaaaaggtcaaaactttgtttcatgcacaacttg

SEQ ID NO: 168851 - DNA, 534 bp, Homo sapiens
aggttagaagtgtaaataatagtcctattttatagagtagagatctcagtgcacacagtggttaaatgatttcttctggtagcagtggtgggagtgtcacctgatagttgtaataacaataccaaaaggaaatcttaagtagggtctttgctgtcaggccagaccaactttacaaaccaggctttaacaggtgaatggaattgtggaaagtggaagaccttgagtcaactctgacttcagctgtcttgatagttgtgaggtctcattgcatcagtagatatgggaagacagcatataatctgcatttagccattcagcattcatttccgataaattatttactgatttattttgcttattttctgtttagcaaataaacacaaaaagtatcgagaatgaaagctccttgaggtcagagacttatttattaggcactgaacaaatacatgttaaatgaattatgaatttattgagaacccccttttggtcccttgccgggttttggggacaagacgaaaactcttttttcaaaaa

SEQ ID NO: 168852 - DNA, 638 bp, Homo sapiens
agcaaccctgagacactttacagccctagaacctaaaaggtcaaaaggcagtcttattctcaaaatacattttattacccaatctgctcccgacattaaataaaactccaaaaattaaattccggccctcaaaccccacaacaggatttaattaacctcgccttcaaggtgtacaataatagaaaaaagttgcaattccttgcctccactgtgagacaaaccccagccacatctccagcacacaagaacttccaaacgcctaaactgcacagcggccaggcattcctccagaacctcctcccccaggagcttgctacatgtgctggaaatctggccactgggccaaggaatgcccgcagcccgggattcctcctaagccacgtcccatctgtgtgggaccccactgaaaattggactgttcaactcacctggcagccactcccagagcccctggaactctggcccaaggctctctgactgactccttcccagatcttctcggcttagcggctaaagactgactgcccgatcgcctcggaagccccctagaccatcacggacgccgagctttaggtaactctcacagtggagggtaagtccgtccccttcttaatcaatacggaggctacccactccac

SEQ ID NO: 168853 - DNA, 465 bp, Homo sapiens
cttaaaagaaactgagtctccttatagagaaatcgttatacatcttgtaaacctgagtttgcaaatgttgatacttggaggccctcaatggaatgaaatggagaagcaaaattttttaagtagcaaagtgccttgtccaaacattagtcttttccagagacttctataagagggaaccccaggacagactgcccccttaggaccccggggacggtttttctgataaggatacgatttctctgctagggacacaactacatctccctcccacattctgaagggccaggaagcctttgccacgcttggtgcttcttcctccatcaaatgctttctgaatcaactggatctgccgctgagcacggtaaggcggatgatctggaagctttccaggtgctttaggaaagaagcggcatttcagccacggtttttggccttcataatcaatgtcagcctctaatgctgtct

SEQ ID NO: 168854 - DNA, 157 bp, Homo sapiens
atgaggaaactgaggtgcagaaagggctactagagtagtaaggccaggattggaatccaggctggctgactacagaacctgcaaaatcaacctctccattaccctgctaagaatagaagatactactccacagccatccttatattaaatccaatcc

SEQ ID NO: 168855 - DNA, 675 bp, Homo sapiens
  misc_feature (181)..(181): n is a, c, g, or t
aggatcaggaactttgtactatggccgagtcccatcagttttccctgacagccagtattagataatcatttacagccatagccaccatgcatctgtatgcaaaaccctcacattataacattggaattggctttatatgaaagctacaattacagcctctcatctcctctcactctatatnaagagtgggatctacaaagccatacacggaaactggtcatttcaaccttgcctaacaggggttcttttctcatgctttttaaggaaggagcaggaatagaaattctcggagtccttatcagtaagtaatgatcaggaatgttccattgatgctgctataaacctctagcataacagcaaggtgacaaagaattttctaaaatcaggcccaaatagcaggaaagaaacacttagctcgggatgagttcaagaaccaaaaatgggctaagttgtgctgatttaggtcagaaacagggtcaaagttgcctctttcagagatgagaattagatataacaagtaattggccgggcacagtagctcacgcctgtaaccccagcactttgggaggccgaggcgggtggatcacttgaggtcaggagcttgagaccagcctggtcaatatggtgaaatcccatccctactaaaaatacaaaaattagccaggtgtggtggtg

SEQ ID NO: 168856 - DNA, 630 bp, Homo sapiens
aggatcaggaactttgtactatggccgagtcccatcagttttccctgacagccagtattagataatcatttacagccatagccaccatgcatctgtatgcaaaaccctcacattataacattggaattggctttatatgaaagctacaattacagcctctcatctcctctcactctttcaaccttgcctaacaggggttcttttctcatgctttttaaggaaggagcaggaatagaaattctcggagtccttatcagtaagtaatgatcaggaatgttccattgatgctgctataaacctctagcataacagcaaggtgacaaagaattttctaaaatcaggcccaaatagcaggaaagaaacacttagctcgggatgagttcaagaaccaaaaatgggctaagttgtgctgatttaggtcagaaacagggtcaaagttgcctctttcagagatgagaattagatataacaagtaattggccgggcacagtagctcacgcctgtaaccccagcactttgggaggccgaggcgggtggatcacttgaggtcaggagcttgagaccagcctggtcaatatggtgaaatcccatccctactaaaaatacaaaaattagccaggtgtggtggtg

SEQ ID NO: 168857 - DNA, 251 bp, Homo sapiens
catgactggaaacttccttcccatccactgcctggatccatccacctccccacaaaggcttcctgagcatctcctccgtgtgagcactggctcaatgcacaggacgatgtagttcctgcccatatggaacttaggttttgagtgacacgtgggacattggaagaggagagcaggtggctaaagagcatcatacagaacagggctcagggaagtcccaggtgatagaatctcaaagagaagggctgagggtg

SEQ ID NO: 168858 - DNA, 835 bp, Homo sapiens
gatgatgattggttacaaagactctctgttggtgatggtttctgagaactggaagatggagtctagctctgttgcccaggctggagtataatggcacgatctcggctcactgtaacctccgcctcccgggttcaagcgattcttttgcctcagcctcccaagtagctgggagtacaggcgcccaacaccacgcctagccaatttttgtattatagagatggggtttcactgtgttaaccagaatggtcttgatctcctgacctcgtgatccacctgcctcggcctcccaaagtgctgggattacaggcgtgagccactgcacccggccaagtacttacctttgtaagaaatcataagattctcatttttttctccattaactacataaagcaggacaatggttggcaccattgcttcctcactgaactgtggatgggtctcagcatgcaaaggaagtagaaagtgaatgggaggacggcggctgttgctcagaagttccttccataatttgatttattaacactatttgggttgttcatggcttggttttccctccctttttcctccagtgaacggtgacttgacagaggtacataggaggctacttgttctcttgttggctgcttgtatttgctttctggaaggttattgttttcaaggatcttaagcacctggattaggacagttaaaaaccatttgttagcttggaaaatgtcatcttcctctttatcctgctgtcctggctgtgtgcttccttctctcccttcctgtatctctcttccttacagattgcttgcgttacgtatctatgagatgtccgtctgtcagagtgttt

SEQ ID NO: 168859 - DNA, 222 bp, Homo sapiens
ccagcctttagatctatgagacaagaaatataatgtttggccaccttatttttggtactttattacagcagccctaggaaactaatatagcctactatttattaggctatgttcaggtgcttggaatacatcattcaacaaaatacagtttttagcctcattctagtggagagtaatcgaccaggagccaaaatacctgttagaatgtaatatatattgtgg

SEQ ID NO: 168860 - DNA, 373 bp, Homo sapiens
tgttatctatgttaaaaacaacgatgatgttatctatattttaaaaagcaacctaagaaacaatgactggttataattcaactatagctacatcttagcagaaaagcaagctaagagataatgactggttatggtttatgcctacagcttgacagaaaggtgtgcggggggtgagacaatcaattcttagtgaccaccttctatcgaactgactatatgcaggcaatcatgcatctacgaagagaaggacaaaggaaaaggaaaataagtaaaacaaatgattttactacacctgtatcctagcagagtccaggcctctgtctcagttgttaccttgtggccttttattaactttacaaagtcagttttagtc

SEQ ID NO: 168861 - DNA, 282 bp, Homo sapiens
gtcaaaatttttgccaaatatatccaaaatcaaagaattataatgcattccatccaaggaccaataacagtcctccactggcacaagtaagtgagaactaacattctctaaagaatatagcacgtgatgggaaatgtagcttaccagcttatgtttgctccttcctcaaaatattactgggttatctgtcaggaatgggcataggctaccttggtcccaaaaatgtcaatcttaacattaaaatccaatgctatcaggccaggagtgttcctaaaattctgg

SEQ ID NO: 168862 - DNA, 386 bp, Homo sapiens
ttaaagggaaaatcttggaactgagactcccaatattatagctggcatataattttttaaacaactgattaagttcaaaaattttattttgacctctgaatttgttatacactcactttgcctactcttagaaagtgaaaatttccagattgttgaagattctctactataataatctaatatccataatctacggatgtgacagaaggatggaaaaattgctatgaatgtgattccctctggaggcaaaaggcggaaatgtctttaggaaacaaatcataaatttccttagctggagaaagcgtgaaatataaaatctaaacatgaaaaatttccacatagttgatgtaaagttaacttgatggggaagagacagctgcaaacta

SEQ ID NO: 168863 - DNA, 587 bp, Homo sapiens
ataaacagtattcacatttaaatccactagtgtcaagaagcagcatattaaatcaaggagatatgcttttttgcctttatgatgaacaaaaactgaaaacatccaaacacttttacccagaaattccatctctaggaacttatcataaggcaaaaatcacaactagccataaaacatgttcatctcagtttgttaactaaatattgggaaccacctaacagctggtagctggttaaataatttagaatagatctatgaaatttcatgctattatcagtgatgtggtaagaaatatgtttaatgacttggacatatgcttgcaatgtattaactgaaaaactcagagcactcaggagtatttctaatacatatagtttgtcaatagacaaagacaccataatgtttaaagttgttatttcttgatggcatgattcctggtgacatttcccctgcacccaatattttgcattctctgtgttttaaaggttttctcttgacatgtattacttatcataaactttacacatttaaaacaaaccctgcatataataatacaaaaattataaattaatgtaatataaatataa

SEQ ID NO: 168864 - DNA, 132 bp, Homo sapiens
gacgttaacactgaggcaaactgggtaaagtttcaaaataaaaagctttaaaagagagacagacagatttccctagataaaccccagtattccatcaagttctgtaattctacaaccctacgaaaattactt

SEQ ID NO: 168865 - DNA, 960 bp, Homo sapiens
tgacccagcatttctactaggtctacacccaacatccactcaaaaacgtgtacacgatgttcatggcagcattaacctaacagtgaaaggtggaaacaacccagatgtacatcagctgatgaaaaggatggacaaaacgtggcgtgtggtgcatttacacagcaggacaaggctctgccacaggaaggaaggaggcactccacaggctacgacacagagaaactcagccgaagaattcggacgccaaagatcacatgtcgtaggttccactgttaggaaatgtctataaaagacaaattcacagagacactggagacatggctgccagggcgggggtgctggggagagtaaagagtgagttcttaaacacagggttcctttggaggcaatgaaaatgttcggaaattaaattatggcaatagttgcgcaactctgtaaatatataaaaaccacttaaccgtacacttaaatgagtgcattttatggcatgtaaattagatcgcaataaagaggtctaaacattaaagaagtctggaaaaaaataagcagagacattaaaaaaaagaactgcaggctctaaaagctctccccatacatcaaaatgccaagtgcaaagcggtcacttcagacgccaccacagctccacactgggaagacgtgaggccaccacatctcaggtgtctttattttggacagaatcaagtctctgtggtgaggccctctcaggatgggcccccactctatcctgtacagacatcctttccttcctgccctcagagggcactgccagccacacccagggactctccccaccaaacacagacagggctgcgtgtggccacggcacaagagctggtctggggcagtgcccctgcatctgccatgctgtgccctctgtccccaccccactgctggccactgcagagctcccctggccctccaccccagttcccaccctgg

SEQ ID NO: 168866 - DNA, 176 bp, Homo sapiens
gtaggctctgaggctacataacttcacttccactgcattctcttggtcaaagcagcagacaaggctgctcggacacaaagagtggagagacgccttcgttgctcttgtcccatctgtgtccagttcattcctacgaagacagccactctctaggagagccccgaccaggaaagaag

SEQ ID NO: 168867 - DNA, 376 bp, Homo sapiens
  misc_feature (31)..(32): n is a, c, g, or t
  misc_feature (35)..(35): n is a, c, g, or t
ggtcgactactactactaaattcgcggccgnntcnacgtacccctgaagcaaccagtatccttctctggcactttctttcttgactttatgcattgccttttttgtttgtttgttttgctttttgagatggagtcttgatcttgtcgcccaggctagagtgcaatggcacgatctcagatcacagcaacctccacttcccgggttcaagcgattctcctgccccagcctcccgagtagctgggattacaggcatgcgccaccacgcctggctaattttatgcattgcctcttatccctcataagctgtatccagctctgtaccaagacaagagaccccttagctcaaaggtacatctgataggcatcactgttaaa

SEQ ID NO: 168868 - DNA, 601 bp, Homo sapiens
tttctacacatttcaggttaagaaagaaaaacatgcgtttattttgtcttaaacatgaaataatgttttaagcattctaaaaagtacttacaaatggattaaacacattggcgttctttatagttttactctggttcttttttttgtgacttgttattcatagtctttgcaatgccgccctctagtgatcgatttccaaaaatgcattaattaacttgtaagcctgttacagtctttctcttttgactctactgatcctttgccacagcctttgtttggtgttctcttttattgctcttccattagttattcttattctcctttaatggcattagggaaagatcagaagtttcaggagcaaaaaaaaaaaaaaaaatacatatatatacacatttgactatgaatccttaaaacttgtccatttaccagtctgggcatagggcaagttacctgtccagagttcttactgggaatgaatgagaatgtctttttgtggcacctgacacagacagcaaagagcaggcattcaacatataccagctgtctcttccaccctcttctccccaacattgctgagagtagggatcagtactgttttttt

SEQ ID NO: 168869 - DNA, 463 bp, Homo sapiens
caaaaaaaaaaaaaaaaaattaattgcacatgaagtatacaagttcgatctgtgaaaccaccatcacagtgaagataattaacacatccatcattccacaaaatttccttacactttcttgtaatcccttctccctcccattcctgctttctttaaactatagtttagtttgaattttctataattttatataaataaaatcatataacatgtatacttttgagtctggcttctttcattctgcacgactgtattaaggttcactcatgttgttgtttgtatcaatagttcattccttttcgttgccaagtaatattcctttgtagggattaactatattttgtgtatttattcacttgttgatagacatttgtattatttcccattggggctattacaaataaagctactgtaaacttttatgtgcccacatctttataaagacagatgcttttactttatt

SEQ ID NO: 168870 - DNA, 223 bp, Homo sapiens
ggatgatgaggaaaggagagaaagaaagaagtcatggactcagtaagggaggaggggctccatgaatatcaaaaagtgtttatgttggaagtcactggaaaagcaggataaatattacttaatggggcaatactggaggcattcccattgaggtcagaaacaggccggatgcccagtatcatttatctctatttaacactgcattaaaggttctaaccagttc

SEQ ID NO: 168871 - DNA, 121 bp, Homo sapiens
agtgttttttttctcctcctctatttgtgttgacttttagctacttgtgctattcattttccagaatgattcactcattccatcctgtctctcccagtttaactttctttggtgggttttc

SEQ ID NO: 168872 - DNA, 163 bp, Homo sapiens
tgggcaggctaaagctaattgtatccttttttcttttttctttcttctttctttttttctttctttctttcttcctttctttcttcctttctttctttcttctttcttctttctttcagagtcttgctctatcaaccaggctggagtgcagtgtcaagatctc

SEQ ID NO: 168873 - DNA, 161 bp, Homo sapiens
acttactcttcttgcacattgtctaccctcatcgtcagcaccaggatgtagactgggtgaagaaaagagtctttgttgttcacttctgcatcccccatacctgcagtgctgcctggcgtgcactcgatgctaagtgagctgaaggaggtgcaggtgcatga

SEQ ID NO: 168874 - DNA, 425 bp, Homo sapiens
ctccctccttctcccgaggccacaccaagtctcaagtccccttgtatttcctgctaaataaatattttcacatctgtttcctcctgtttatctctgactctgctgctttgtttagatctttgcaattactaactggaaataatgaagcctctccggtcccttacgtttctgtctttctccctccaatattatcttactctctgccagagtttctaaagcccaaatttgataatgttactcttttggaaaaaaaactatcagtgacttttcattgcttgctggataaagttcttagtacttagcaaggcacgcaagatcgtttacaatctgacggcagcctagcttcctgccttatgttccttagcccttgaacaggctgcccctggcctggactgcctgcccccctccgcccgcccccactctct

SEQ ID NO: 168875 - DNA, 432 bp, Homo sapiens
aatgccagataaagacagaagaaagaaagaaaacaaaagcttcaggccaatatctctgataaacatagttgtgaatattctcaaaaaatactagccaactaaatttgacaatacatcaaaaagttatacaccatgatcaagtgggatatattcttagaatgcaagtttggtttaaaatatataggtaaatgtgataaaggacattaacagaataagttcaacatcctttcataataaaaattctcaaccaaatttgtgtagaatttttttcaacaccataaaagccatgtatgaaagactcccagataatataatcaatggggataaactgaaagctttttctcaaagatctggtagaaggcaaggaggcccacccacctcacttctattctacctagcactggaagtactagcaagagtaactagacaaga

SEQ ID NO: 168876 - DNA, 297 bp, Homo sapiens
agtcactgagggaagagatgggggcaaaaggggtgcaactgtggctaatgccagatccaaagatcaggaagaggaaggagaactgaggtggagcagggctttcaaattcctcaacgctatgctgttcccttcctgaaatcttgctcatgctgttcatttgtatgcagtagaagagacgagatgtgcaggagaaggggcgagatgcctatatgaagagacttcagtgctaaaagtgaatgaatggcagaatagcttttagataaacttatacagatttttttaaacttcatgcatatg

SEQ ID NO: 168877 - DNA, 583 bp, Homo sapiens
tgctatctttatgttcacgagtacccaatgtttagctcccacttataagtgaaaacatgtggcatttggtccagcaatcccattactgtgcatataactaaaaaaatgtataaatcgttcacccaaaaagacacatgtacttgtatgttcatcacagcactattcacaatagcaaagacatggaatccagttaggtgcccatcaaaggtggactggataaagaaaatgtggtacatatacaccatggaatactatgcagccataaaaaagaatgaaatcatgtcctttgcagtaacacggatgcagctggaggccattatcttaaacaaatcaacacaggaacatctctgaactttcagtcagcctccccaaattctcttacagtgaccattctcaagcctcagcatcacacaatatattcatgtaacaaacctgcacaggtactgcctgaatcaagaataaaagttgaaattattaaaaaatgtccagggatggtactaaaaaggaaacataaattagggagagagactgagaggccagtgtacccagagcaataataaattaagctagaaaccaaatagat

SEQ ID NO: 168878 - DNA, 186 bp, Homo sapiens
aatttttaggcagtttatattcctgttgactagggttttttgcctttttcttaacttaagaaagttgagtgataaactgataattttttaaaaaaagaagacaattcacagagatttagtaaactttctgactctaaaaaatggtagtataaaaggtaatcaaaaactgttccctatgtgtgataa

SEQ ID NO: 168879 - DNA, 172 bp, Homo sapiens
caaataatgacaacagcaatacccacgttgtagtgctgttctgaggattcacttaaaataatccttgtaaaagcacagtgcctggttcaaggtaagcaatgaatgtcagccagcatcctccccaacctgcccctcctctgctctcactcctagtacttcctgcaggactgtg

SEQ ID NO: 168880 - DNA, 1031 bp, Homo sapiens
ctgagatgacagtcggcgctgagatgacggccattaagagggctgagcagaggcgacgtggtcgggggatgatgcaggcgctcagcttcctcagaggaagagcaactgctgtcggagtttgcagagatgggagagctggaagagctaggagagcttgcagacactgtaaccaaggggctgcatcccagaggctcctggctcctgcctttcccttggaatgacggccattaagagggctgagcagaggcgacgtggtcgggggatgatgcagtcgctcagcttcctcagaggaagagcaactgctgtcggagtttgcagagatgggagagctggaagagctaggagagcttgcagacagggcagaatgtcagcagctgccatctcgtctcccgttaggtggaatctcagagccctcatctgagtaaggattgtggtaggattcagtgcgaactcacacaaaccactcagcagaggctgctaccacctaaaggaaacaggaggacagacggtaccagacaacgagacggcctgattaagacaacacacccactcccagcctgtccccacgttttcagcagcacaaaggcagaaagaaaaacacaaagtgtcaccgtcttcaacgaccgaaaagggaaagaacatgaatctgaaattcaaatgcccgtctgtgatctcggtaagcctggagccatgcaaagaataagactttcagcaagagcctcaccaaagccaagaaacacgtccccacctgcttgttcctgtgtccaccctccagaaaggccaagggtgccccatgaaatcttagctccacaaagcctgcattgagatggcccagcccctgctttctgatgctctgatgaaggtctgaatggttacaaatagggatatctgcgtctgaagccctcgctggcaggtgctgaatgccgtctgcccacggagcgcatctgtagctaggacctggagggtacctgtctgggctcactcaagtggagcctgagtgtgtccagatcagagaaggccagggaacaaat

SEQ ID NO: 168881 - DNA, 103 bp, Homo sapiens
gctaagatggaggctccagagctactttgagaattcctctattgaataagctccaatactcctggcctcagatgaatacagcctaggatgactttgctcacac

SEQ ID NO: 168882 - DNA, 355 bp, Homo sapiens
ccggtacatctaaaaagcaagaagcaataagatatctttgtcagataaaactaagttccttttcttttcggcttttgtttttgtggggttttttggtggctgctgttgttgtatttttttccttgagacaggtctcactctatccatcaggctggagtgcggtaccacaatcagggctcactgcagcctcaatcacctaggctcaggtgatcctcccacctctgcctcccaaagtgctgggattacaggcgtgagccaccgtgcccaggctagtaaccactgtttatctaataatttgtactcagggtgttaatagagcacgttaattgattttttgaatattgaaccaggcttg

SEQ ID NO: 168883 - DNA, 400 bp, Homo sapiens
aggctgcatcatgcctttctttgagaaacgccctgaggcatctatttgctgcctgcctcttcgctgtgacgttctgtctcatgtagcagcgatggcgtcttttggaccattgccctgaatcgggaataggatgggtgtttgggtgtttgctcctggcgccctgtggggatgcacacagcatagccgggcaggttgccggctgcttgtagacttgcggcttttcaggacacactggcacctgccgtctgaccttatctgcagggtattttattgctcaagttaactgaagcagagatgagtgacagtactaagaccacccaggcctctcgcccctggacagttcccagttagctctaaagatgctcatttggtcagcccatatctgcggagaactgctcgg

SEQ ID NO: 168884 - DNA, 382 bp, Homo sapiens
agcttactgcaacctctgcctcccacgttcaagcaattctcctgcctcagcctcccaagtagtgggattacaggcgagagccactgtgcctggcctacagaagtactttctatatcataatctggcaaccatttgtgtgtatttttttcagttgtgatgtacaaacaataaagtgcttaagtgaattttttttttaaccaatgtatctactaagattaagttatggaaagtttccagcattcttgaaggctccctcgtgtcccttctcccttaataaccaatcctccatatctgttctgactctttaccataaataatttttgcatgtaattgtttttattgttttttaagattatctttgattgacccctccatatctatg

SEQ ID NO: 168885 - DNA, 597 bp, Homo sapiens
tgcttgctgatgtgtaggagacagaaataattagtgttctccttggctggcttcttatgtagttggtgagtgaatttaaaacatataacaagttaaacaatgtcaagcattaggtgagtgagaattaagaagttcaaaatgtaaaagctcggagaatatatgtatgtggacatgagagtgtaggaagaacctgatgcagccgcatgagagtctaagaggatccagacagaatggttagagataaaagcataaggtatactgtcaacgagcatgagcattactgtagaagcagaacataatgaactatcagtaactggggcatttatgaaggtgtgaagatgctttcacctggtactaaaaggcctggcaaactgtaaccccaactagatcttcaaagatttcctgttacttccacatatagaattcatatatcctaagcactaattataattacctgaaaacacacttttagagatttcttatcctcacttttttgtttgtttttgatcttttctacactccattttcacctattgaaatactatcactcttctaaaatttaactcaaataatgccttcatgcatgtttcagttcaa

SEQ ID NO: 168886 - DNA, 197 bp, Homo sapiens
attggcgttgtaggtgggatcattcatgcattgcaggatgcttagcatctctagcacccagagtgcaagtatgggtagcacaacaatcagaagatgccctctgtttgtagagaggagtggtatcacagcttccactagagatgagaactgttaaagtttgagagacctctagagcactaacagataggaactaaagt

SEQ ID NO: 168887 - DNA, 393 bp, Homo sapiens
tcccatgtgtgctagaagagacctgggggaaggtaattgaattgtgggggtggggcttccctgtgctattctcatgatactgaataagtctcacaagacctgatggtttttaaaggggagttcccctgcacaagctctcttgcctgctgccatgtaagacgtgtcttgcttccccttcatttgctgctatgattgtgtggactccccagtcatgtggaactatgagtccattaagcctctttcctttaaaattacccagtctcaggtattagcagtgtgagaagagactaatacagtgacctagctctccctcttgctttttctcaactctttcttcttgtctttatcttccttctggtactttgactctttcctttcctctttttctttctt

SEQ ID NO: 168888 - DNA, 618 bp, Homo sapiens
ccggggtgctgggcctgtgtgggcaaggatagggggaaaggggctagccctgggcttgctcctatcagagggcgctcaccatgctagaatgggtatgctactacttgctcaggagacctctaagggtaaggacggtcagaatgggctccaaatggtttaggcttcaatgttgatctcccagacctagacctgcactcgggccctgcttgagagagtgaaggattggagatgcacataggcctgagccctggggtgctgaccaaaggcacagctacctccgtacttccagagggaggttcgattttctagatctaggctgctttgaccaccttgaaatcctactctttctggtcaactcctagtttaagagtcttcttaggagctgggcacagtggcatgtacctgtaatgccagctactttcagatgaaggtttgaggccagaagttcgaggctatagtgcactatgattgcacctgtgaatagccactgcattccagcctgggcaacatagcaagaccctgcctcaaaaggaaaaaaaaaaaagtctcctcaaacacaaggctttctggaagcctcccctcattcctgatctctcctgcccactcccagcctgttgg

SEQ ID NO: 168889 - DNA, 424 bp, Homo sapiens
attaacttgcatgaaaggagagatccaaacccaggcagtcggagccaaagcctgtgttcttacctcccaaactttccttctcatcagcttcattcaatagcaaacaaactcctagtcttggtcctgcgccaggtctgctttttctcagaccagtggcgcctaccttcagcacagaccagtgccaagaagggagatggtacaactgagttggaaattaggctgtgtacaatgaagtggctcagacatggggataagggtggggtgctgacagtgtctgataaaagcacccattgggccaggcgcagtggctcagccctgtaatcctatactttgggaggccaaggcgggtggattgcctgagctcaggagttcgagacgagcctgggcaacagtgacacacccatctctactaaaatacaaaaaa

SEQ ID NO: 168890 - DNA, 349 bp, Homo sapiens
caacgagccggctgggacacagagagtggtgggtttccctgtgctcagagagtccttcaacatcccggtggcaggcggggaagcaggtcccacagtcagccctagccggcagggatggcgggcaggagtcctgagtgtcccccacacccaagcatcaccagggtctgtgagtacatggggcctccctaaggcgctctcaccaaaactgtctcattcaaagctcaggacactgcagggaggtggctgtggccctggggatgggatgtgaggaggtgaggactgtggttccactttgctgatgggaaaacgagacacagagcatcagaacactggccacagtgcaaatcca

SEQ ID NO: 168891 - DNA, 458 bp, Homo sapiens
tgctaacatctggaggctgctgtccagtttacgtaatctcttgctgcagaggaggaacacgggatccccagccagatggtccgtgggtgacttcacagcacatgtgctacctccaagagtaagatgctgacggggttaaaagagtgggatgcaaaaccttccttgtattcttacagggtgagaggcagtggtttgggtgctcccagggatctgttttcttttgaaagcatcttttttttttctgtccagcctaggatcaaatgtttctatgtctctctcattctgtcattcattcattcaacatttatttagcacttatttatgtgttaggttcttcattcccatggtccacatgaagaaaatggaccccaaaggaacaaaagcaacaaagataaaaattccttctcctcccatgggggtgggaggtgaagaacgaagcaagcaaacactcatagaga

SEQ ID NO: 168892 - DNA, 518 bp, Homo sapiens
atggaaatgggatattcatccaactcagagccaacatgatgtcaaaatataaagttataaagaaagaggtaaaaatctatgcctgcttcattccttaggaaaccattactgacttcaacaaatctccaggttcttgagactctaatgggtgattaacctatgaattgctaggaacactcatgaagttagaaaatagcttcctcactaaatatggaaaggaaaaactggtacaagccactgcaaaaacacaccaaaatataaagaccaatgacactatgatgaaactgcatcaactagcgtgtgctagctagcatcatgatgacaggatcaaattcacacataacaatattaaccttaaatgtaaatgggctaaatgctccgattaaaagacacagactggcaaattagataaacaggcaagacccactggtgcactgtattcagggacccatctcacatgtaaagacacacacaggctcaaaagagatggaggaaaatttaccaagcaaatggaaagc

SEQ ID NO: 168893 - DNA, 270 bp, Homo sapiens
gttaaactattcgaggtttcatttatatttgggaaaactcttgttaaataaaacaggtagaagagccctcttaaaatccctgaagaatgtatgacacaaatttctatcattaatatataataaagattcttttttttgtattttgtttgttgttgttttttcctgtattatattttgcttaatctccctggctgcataattgagttacctttatttttaacttttactttaggttcagagatacatgtgcaggtttggtatataggtagg

SEQ ID NO: 168894 - DNA, 506 bp, Homo sapiens
gtttaagaagcctgagattttcacaagaaccagcaaaaccaggagtggagagttggggagatagagaagtaggcctaaaactccctcttcttgagtcttttttgacttaatacaccattgggtctgtcctggtgctatggcctatcacaaaggactgttttaagagagaagcaagccacagccttgccagataagtctccaacaccagcagaaaagcacggaccctgatctgtgggaggcaagggtctccccattatttctggaggcaaatggtgccttctagtgaaatggtgccaccatttgctgatgggggtgcctgttctcaggatgtgtggaaactcaggcctgagggtttctacatggtttattcaatctaactgcatacctagcttggcagaatggaggtggacaaaagtgctgaaaggatgagggtaggcttttagggcaaatcaagtcacaaagcagatgattgagggaggttacaaagcttaggcagagttaaagtt

SEQ ID NO: 168895 - DNA, 183 bp, Homo sapiens
cagagatctaaacagggtccgcctcccccatgcttggctctgattgacatctttgatgtccaaattatgtgctgaattctaaggatggaaaaaaggctgagattctattttaggcagataatgaacatggaagacatcaatttccccgccccacgctttttctgttccgttgcatttcttctt

SEQ ID NO: 168896 - DNA, 460 bp, Homo sapiens
gtctgtggtcccactgcagcgaaggaaactgtcctcttacaggataaagagtgttatatgaagaaaggaaacaggaccaaaagcaagtaaataggggtggcataaacttagagatagaaatatgttcaggtttgcaaaaattcgaggaacaataaataaaacttttaaagtgtatttaacaaagagaaacaaagatgcagcagcctactgggtgtagtttagtcagcagtgatctattactgaaagattacttagaaaaaaccaagctcctcaacctcagttttacttgtgtctttttgcagaggagagtagggagaggagtaggagggaaggagagactccttagcaagagaaagagaagcccaaagtgggagaacataattatattctaaatagtttcccaactctgataacttgcatcccagtgttctgtggaagatgttcaaattgcattgctgat

SEQ ID NO: 168897 - DNA, 270 bp, Homo sapiens
tccataaattacactgaattctcccaacacacactttaaatgttttgctcttttctctcagtctctatatttttatgagatcatctggaaaaaaaaaagacctgatttgtggcgtgttgttgctttgttaaggtaaagttttactacaaacccctcataatagagtttgtatttgttttgagggaaactttgtatttgaggaaataatagtctagtttgtgctatagaactagagacagaaagtattttcaagtgttgggcgataaatgt

SEQ ID NO: 168898 - DNA, 558 bp, Homo sapiens
tcactcaacttcttacaccaattttgttttatttaaacctcttttctgccccccaatacttgattattttgaagcagatctcagatatcatatttcatggtaatatttatatagagagatatatattagtatttatctctaaaaggtaagaactcttttaaaaaaaaacagcactatgattgtatctgaaaaaattaactgatttattggaaggtatattttaaataaatctataaataaaaaccttgggtccagttaacaaataccataaggccttttccctccagattctactgacccttgccttctccatgcagattctgacaagatttgatctgcctaattaagttaacctactgacagacttgatatgcctaagtataattattaagtagtaatttatttttactgtttttattaattcaaggaatatcctggctatcaggactctttggcaaccagattttccaatagatgcttccaaacaaaagtctaattagcctttataaccttgacatagacagatgaattcttttagatgttttagatattaacata

SEQ ID NO: 168899 - DNA, 405 bp, Homo sapiens
agttattttgtagaaggtctctcagtttaggtctgtctgatgtttcctcctgatcagattcaggttattcacttttgacaggaataccactgaaatgatgctgagttcttctcagtgtaacgagatctagagacacacactgtcagtttgttccttattggcagtgtgaaccttgaggatttcattgtagtggcatttggcattactccattatagttactattttaccattttaaattaaaactatctggccgggcgtagtagctcatgtctgtaatcccagcactttaggaggctgaggcgggcaaattgcttgaggtcagaagtttgaaaccatcctagccaacataacatggtgaaacgccatctctataaaaaatacaaaaaattagcctggcgtggtgg

SEQ ID NO: 168900 - DNA, 548 bp, Homo sapiens
tatttccaagtaaggtcgcattcacagataccaggggttaggccttcagcatgtcttttgggagggcacaattcaacctgcaacacttggtctggaaggaagatcatgtaaaggattactcggtcaaccttgagctggtgatgctggcagagatggtagggactagaaaggcagattcacacccacagtgggtatggtgaacatagatgggtgctcctccatggtggaaggtgtccaatgccattgacctttcgccaagtgactagttggtctcctcaaggcacaatgccactgagggccccgcattggcccttgctactgacaagttgggtgttctgctataactgcagctggttgagactttatgatgaagagttcatgcctttgagctcacacaaagctactcacgttgctatcatggcatccccatcatggggagccatagagcagcaagcatgcctaggagagatactggctggcatggcagtaggaacagtccagtccagctgtggttcagcagctcttctggtggcatcaacacacagcac

SEQ ID NO: 168901 - DNA, 201 bp, Homo sapiens
gtcaagtggtctgggctcccttccccctaatggtggatcgagaaactgcgcccgaaactagcagtagggacattccgcaggtgcagcgagtgcgacaggctggggccctgcctccagcgctcgaccactgggatcctcaaccccgcgcccgggtcactgagccaccccctccccacgccgctcagcgtctgattgcggccg

SEQ ID NO: 168902 - DNA, 201 bp, Homo sapiens
ctttagagtatagcccgcagtgaaaatttcatgcatgttatcaaatattgttaatttttattctcctcagacctcagtttcctcatctgtaagctcatgaaaggggaggggaattgtgctggattacatgactggggtcatagtttacccgtaaagtttttcattctagtatgtctgctctctgtttacaagtgtgtaaac

SEQ ID NO: 168903 - DNA, 167 bp, Homo sapiens
ggagctaccacaaggacctgctgccaccagtcgtcactctctgaataacagacacatggtatgcatcagagtcattactgccttacccacagggagagaagcagcaggcctctgttgctccattcacttcaagggtaggttatgagcatctaccatgcatcaggcac

SEQ ID NO: 168904 - DNA, 285 bp, Homo sapiens
agagtcttttgtgccccactctgacttcaatctgaatacctttgattttcgtaaattgactaattttcattccacataggacattgttttacaaaagttttacgataaaagtgacatttccaaagcctgaaatcagtgtaagccataaattctattactctttcaaagataagtccccccaatgatacagtattatttgaaaaaatctgaaagtcactgctttaagaattgtaattcaaaatgtgtcatatctacgggcttcatttaaacaccaaccaacaaact

SEQ ID NO: 168905 - DNA, 161 bp, Homo sapiens
atcctcatgtcggaattgaaaacaaaacttagaaagtaaatagcacaacaaaatttgaacatagatctacctgaagcctgagcttttctccattcttttttttctgcctatctttccttccttctctctctcttttttggacttcatcacacgattattcc

SEQ ID NO: 168906 - DNA, 320 bp, Homo sapiens
agaatgcaagtttcacacaaacttttaagataaaacaggaaacgaatgacatttcatgcctgagattgacccccgtggaccacacctgcaggctggggatatatgtccataatctcccaccttccgggagatttggcagagtcctggtcatggtggaaggcgatgccttccttgtcccttccctccctgtgtttttgcggggcattcctacataactataaacctccaggaagaaggaggaaaatactttcctattaaaatgccaggctcacggtaggctttgggtgagacacttgggcagagggcccagctcccggtat

SEQ ID NO: 168907 - DNA, 379 bp, Homo sapiens
acgcagttcttggtgccacgactgggagacagtcctcaggccctcccctcagggagctcactgtccggggagggacagccagcaatagttcctggccggccaggagaggcagaggcagaggaagggaagggtcagctgccttgaggtccctgcctgctaacctgacggtatgctttcaccatgccggtgaccccagccccaggaccacgagcaactcgcctggctcccttctctccgtctgcctcctggccgcggggcccggagagctgggagccagagggtgtaaatgaagggcagagctgtttgggtgactccatgctctgcttctccccgagggaagccaatggtgcttaccatttacaaggcttgttacagctgc

SEQ ID NO: 168908 - DNA, 255 bp, Homo sapiens
atccttgtccttgagtgcccaacacggaacctggctgtaaggcagggctcagtgcccgccatgcatttgaaagagcagctgcctcagacctcagacttagtctccttcataggaggtgtttctctcccgcgagctctgcccccatcccaggaaaggcagccagaagctgaacgcccagaccctgcgctatacaaatatcagtaaacaaatagggtgactttttttctttaaattcagacgtgttggggataacat

SEQ ID NO: 168909 - DNA, 351 bp, Homo sapiens
ggactattggatgcctatgacattactataaatatcaataatattacttcttcctatgatattactgtaaatctatatatttggactattagaaatgaaacactaagaggttgttttaaattctcagaagcctgatttgtaattttacctaggaagaagcccaatctactttagcatgaatgccttcaagtggagttaatattctctatcaaatacgagctttgaatcttaccaggtaattcaaaaatacttgtataacattcgataattctttagcaaatagcaaggaaagattgaccagggtgacatttgcatttttagggcaagagttaacttattgttttgtccata

SEQ ID NO: 168910 - DNA, 161 bp, Homo sapiens
gactcttcctggcttgtcggccaccttcttaccgtgtgctcacatggcctgtttgtgtgagcacaggaggcagagggcaagctctctggtgtctcttcttccaaggccactaatcctataatgagcaccctactctcatgacgtcatctaacctgaaatta

SEQ ID NO: 168911 - DNA, 444 bp, Homo sapiens
atttactgtggactcaggacattggaagcttaaagtatttgtaagtaatctctgatacgctcccaagctatgcagctatgaaagcaaggaaaaacttagcagaaaacacaattttggtgctctctgccgtgcttttgaggaaaaatagtgcttgccattcagcattcacaaagcttgctggagggccagagccgcttcttcactgcaggacaggctctgccctgcggttgctgtttccttgcagacggccactgtgcctaggatgtgggagtctcagatatttcataaatggatcatggctttgtctttttctcaatttcttttgacaagaaattgtttaccatgtagatgtcttcaagaacttcacctgtgagtcctgcattacttctgtctggacacatcacattgtttttgttgtttctttagatggaggatgtggtgtct

SEQ ID NO: 168912 - DNA, 402 bp, Homo sapiens
ggaggatctgaaggagcacgctggtgcctttgctcctgtaggatgctgtggagaaggatccctgtatcttatgtataggttccatgatctctagaagcaccattgcaagcccattttacaaatagggaagacaggagtgaggggcttgcccagggccacttggctggatactcacccaggccaagcttgcccagccctgacaattcactgtcaccaccctttactcctgatgaccacagcccagaaggacagggattgtgtaacattctaagaaaatcatgctgccatgcaggaaggagacagacctagactcagccaatagcagctgaggggtaaagttgcttcaaaagaattcttggcttcttggtattatttggtttgcccagagactccacaccccac

SEQ ID NO: 168913 - DNA, 210 bp, Homo sapiens
ctaggaataagtgataagaaggggacagcacctgttttgaagacaatatatcataatgagtaaaataaacacagaggcaatttcaagagtgtgacatgagccaggaaaaggataagcataagattctttggaagactaaggtgatgagagacacctttcttttttttttttgagacggagtctcgctctgtcacccaggctggagtgcag

SEQ ID NO: 168914 - DNA, 370 bp, Homo sapiens
tgccaaaaaaaaaaaaaaattatttagagtattttggggtgatatataaaatcataacagcttaaaacggaatacaacgaaaaagacaatttttaaatagttaaaagtgttggcgagatagaggaagtcaatcatagtcttggaataacatttagatttcagaatttgagtttttatgtttgttttgacaaaatggttcttttgctttcttcaacaagaggtttaaggctttgaactttttgaaactttgatataattgttgaagttttttaaacaaatcctatagaaataggagactgctaatatgaagaagatagaacatactattacagcaaatttatttactcacaaaaattgcttttccaaggta

SEQ ID NO: 168915 - DNA, 424 bp, Homo sapiens
tgcaatcagtacagtgaactaaatggggcaggtttaagtggcaattttggctcaaatgccagctcagccaccagtaaagatgatgggttcagaagggttgggatcatttagagaagtgtttgttttctgaggctgaaagtgggagctgtaatctggaacctttcatgcaacatgtgtttctggttcttcagattcaattgttttttgatagagacattgcaaattatgaaagcacagctcatgacctagaagttttgcagcacgatcgtttcccttctggacaacttcctacaagactctgggttgaaaacagcaggatgaatccaggcagaaaggagatgctttgaatctgattttttcctgcaacttccttttccaaaataaataaataaataaataaataaataaaaatagcggaatgatt

SEQ ID NO: 168916 - DNA, 364 bp, Homo sapiens
tgagaatgttattctggatcaatgcctagccccccaaattggctggctgccaagactgatggtaccacacatgtaccaaaagtatttgaaaagacttaactcacaaaatgagactttctggggagaacagggcagtcacccacactggttcacaatggtttgcatggaggggaggggcgggtggcactgatatttgtcatggttagtgaatgggctgggttgaaggttcccacatggcaggctggttttgtgtgatttgaacttcccaggggtgccaggacttaatccaacatgaagttttacttattataaaagccctatgtcctttttacataaaggaaaaatttattattacagaaaagta

SEQ ID NO: 168917 - DNA, 966 bp, Homo sapiens
ttctaaagaatgttcaattcagtcctgtctctaccagtttacatctatggaattactaatggggaataataagcttctatgtgagaattgtactaaaaacaaacagaagtaccaagaagaaaccagttttgcagcaaaagaaagtagaaggagtttatactaatgccaggaagcaattgctcatttctgctgttccagctgtcctaattctccacctgaaaagatttcatcaggctggcttgagtcttcgtaaagtaaacagacatgtagattttccacttatgctcgatttagcaccattctgctctgctacttgtaaggtttgaaagcggctgatagtgaatcagcaggccagtgggtccatgttagtgacacttacttacaggtggttccagaatcaagagcacttagtgcacaagcctaccttcttttctatgaaagagtattataactattaatggtaatgattatttaggtcatttgtttttgaatgccacagtgataactataatatataatgtgcctttctagtcttccctcttctgtaggaatagcatgttcctcaaatggtcctgaactttttcaccattttggtgaacccttttaaagtaaatttactcaatgctttaaaattcatagtcttaaaataaatgtgaattttgtttccaggtatttattctggggtacaaaaacttcccagaatttacagtaggaaaggaaacccctttatgatgtggcttattattacaagcattcagaaatgatgctggctaagtcaaatcattccttgagacagtgattcctaaatgtaatgccaccttcctgaactctcacatattctatatcatggttattttaaaaaatatatttttagccttttgtaaccttagtcttgttttgagcaatcatattccatgttttatgtgcttttatatttttataataaatattaaagtaaaactatta

SEQ ID NO: 168918 - DNA, 1120 bp, Homo sapiens
ttctaaagaatgttcaattcagtcctgtctctaccagtttacatctatggaattactaatggggaataataagcttctatgtgagaattgtactaaaaacaaacagaagtaccaagaagaaaccagttttgcagcaaaagaaagtagaaggagtttatactaatgccaggaagcaattgctcatttctgctgttccagctgtcctaattctccacctgaaaagatttcatcaggctggcttgagtcttcgtaaagtaaacagacatgtagattttccacttatgctcgatttagcaccattctgctctgctacttgtaagaatgcaagtgtgggagataaagttctctacggtctctatggcatagtggaacatagtggctcgatgagagaaggccactacactgcttatgtgaaagtgagaacaccctccaggaaattatcggaacataacactaaaaagaaaaatgtgcctggtttgaaagcggctgatagtgaatcagcaggccagtgggtccatgttagtgacacttacttacaggtggttccagaatcaagagcacttagtgcacaagcctaccttcttttctatgaaagagtattataactattaatggtaatgattatttaggtcatttgtttttgaatgccacagtgataactataatatataatgtgcctttctagtcttccctcttctgtaggaatagcatgttcctcaaatggtcctgaactttttcaccattttggtgaacccttttaaagtaaatttactcaatgctttaaaattcatagtcttaaaataaatgtgaattttgtttccaggtatttattctggggtacaaaaacttcccagaatttacagtaggaaaggaaacccctttatgatgtggcttattattacaagcattcagaaatgatgctggctaagtcaaatcattccttgagacagtgattcctaaatgtaatgccaccttcctgaactctcacatattctatatcatggttattttaaaaaatatatttttagccttttgtaaccttagtcttgttttgagcaatcatattccatgttttatgtgcttttatatttttataataaatattaaagtaaaactatta

SEQ ID NO: 168919 - DNA, 290 bp, Homo sapiens
tgggtttgggccgcgggtgggcttctccaggatgcgctcccttctggcctcttcccggtaggactccgagcccctcacccgcacccgcgatggggcagaggacctgtgtgggcctagcctcgcgagcgcacagagacacaggagcgccgggcgcacgcagacaggtgctcacgagctgggcaggtgcacaggaaggcacaggtgtgcccacagaggcaggggcacccccactcgcgggaaaagcaaatacaggaacacagaacggccccggccccgactgcagctttggc

SEQ ID NO: 168920 - DNA, 481 bp, Homo sapiens
tgaaaatcagaataagttttcataatatataattgtctcaatgtctggaagtaattctgcatgatcagtggcttcatatttttagatacttagatgtacccatttaaacgtcattttctttcacaaagaaactcagcgttttaaagaaggttcaaatagaagctttaaagagtccaagaatattatttcaaagccgtcgtcctctttcagaatgttagagctatcagcagaaagagtcggtacactgagaaaataaagctaaaccatccacagatggccaaacggaattttcattttggaagatattttatttctgctcttttcaagtctatctaaataaacctgatgtccctggaggcaggcatgagactaattagtgaggctaaaactgatcaactgcagaagccccatctctgaagttacggcgtgctggagagagtctaacagatgagtctttcctctgaagccccacagaaatgtg

SEQ ID NO: 168921 - DNA, 390 bp, Homo sapiens
agggttataaatatcagcagccaaactcttggttggctgtggagaacaactgagagactgtagtctccccttaaaggcacagaacaaggaagctccctgaagtatgtccacaaaggaagttcctcttctctttggcaatgcatcatcaaccaaacacctgcatcaacaactgacaactgtacgtaaattccagccagggaaagtgaccaggaggtgttaagccagacacagattaaggccagcaaaaataaagaatccagagcctggcttaaaggaaagctgacttagaagtggttgttgccactacacacagtcataatcagattatcagaaggctgcttgttacataaatatttaactagtaacctattccacctgaattctaagttt

SEQ ID NO: 168922 - DNA, 423 bp, Homo sapiens
ccaccccctaccccgtcccctgcaagcctgcaacaccccgcacccagacccgcaatccaggcggaggataaagggttgcagcggagggcgcagagcagatgctcagggcggggcagagggggcgggaagctggcgccacggtcgcggcgagggcgagcagccgcgcgctcccggtgctaggaggaatgcccgcagagcggaggctggcaggcgcgagaggccctaagcgcgcagtccgaccaaggggagttttacaggtcagcgccgagccgaattaggggactcaagccttagacccttgatttacacaaaagagaacccgaccctgcaaccggcgacagatggcgcccggacacgccgagcagccaccaatgcaaggctgcgatcgctgccctacttgcgcggccccacatgcgcggccgc

SEQ ID NO: 168923 - DNA, 978 bp, Homo sapiens
gagaccatcctaatttgaaatgttttatcctcttttcagcccttacttttggtttggaaaatgcacttagcacatccatagagtgcctgcttatcccctggggctggctgcttctgacagataccccaggctcttaggcttcttcccttttttctcctttatagttctcgcctcttttctaaagcttcttaatctgctctgagggaagccaaatcacaggaatgccaaaataattcagcatctggaaagggaaaagaagggtgggaaaggaaagggcaagccattcatgagtcccatgtccattcttgcaagtggaatccacacgttgattatttttattctaagcctggagcagtgtggaaagaaagcaaaggttagaaacaaagagttctggataatgaaaataatcacacagtgatagtaataataatgatgatgaaattagtatttattgagaacttagagtatctctgccactataaattattttaaacactttaaaaaacccaatctctataagaactccatgaggtatgtcctgatatcattactgttttatagtaaggaaattgtggtttagagatgttaaataactgaaatcacacagcttttaactgttggagcctggactcaaatccaggcagtctgacttcagagtctaagctcataatcactgtgatctgaaatcttcgttgtcctaaatgtatcagttcaaggctcttggacaagtcacttcaactccttaagccttggtttccttgtcagttgaagataatattacatgccttgactttaaaatatgtcatctcaattgcagttttatgttctttgcaaagagttattttacatgaagcactgctaaggaagttttaggcctttggcaagatgcaggtttgattttgtgggaatgttttggcagaactccaactctgtaatagctattttatttccctacttctcagatgtttccttaaaaga

SEQ ID NO: 168924 - DNA, 464 bp, Homo sapiens
taggataggaaaccatgttatttcttgggtaacatcatcactactatcatttttgtttccttgcttgataagagtgataaggcatgatcagcagtaatgaagggaataaaaaggtttgaaaatcctgtcttaaaagtaacttttgagaaggttaaggataaaatggtaataaagacataagctgagagaaaatattggctgaaattatgagttatataaacactttaagttgtacacaagccagtaaaaaagatattagacaggtagacacatatcaaaaatatttcacaaaatagaaagttgcttggaaataaacatagaaaatgttattttgatagttcaaaaaaatgaaaatttaatttttaaatttcttattataaacattttctatctatttgctgagaaggccctacagtcattgatacttaagtagcaataaacatgtctggtatccagatgttgaa

SEQ ID NO: 168925 - DNA, 231 bp, Homo sapiens
tggtagcttcgcccacctctctctggacaagctctgtccacttttagggccatggagggaagagcagacctgacctctgacagctgctgtgcttgcatcagagatgccagcagagttcacggggagctaccagcctatgcccagcccccaaggggcctggggtctgggatatgccgcagagaggcctggaacattaccttacctgctttcttaactaccgaggcagccagg

SEQ ID NO: 168926 - DNA, 284 bp, Homo sapiens
actactgatgtggccagcttgttttcaggcttaacactaatcatgatctaacagaataaaaaatgagagctaataaatttcctgtacactcgctacgtgactaaaaatgaaacagacgggaattactaatcagtcacttacaacgtggtttaactttaaccctttactttcatttttaggacttcttgtctattccaatctagctacttttcacaggggacctaagccatcacatggaattaaaagggggtcctagggcaactaaaattttctggcttgggcta

SEQ ID NO: 168927 - DNA, 441 bp, Homo sapiens
ttttcgttctggttcaggttacattgtaaatggacgacgacggccagggtcaaatgtgtatacctgcagttcgaatggaagaggagctcccgtttcaattgcacactgataagcgataattcccatttcttacctcagtctaatgactgggttgatgaccaagtctagagtgacacttcttggctttccctcttcttcagccccaattctatccccaataaccattcagcagtgaaaagaaagacaagaagggaataaagagttatacctcctttctaccagtaagaactcaatattcctttctccctacttctcaggaggtacagggaatgataaacctttctatgttgcaatgctatgttaggaatattccagattatgaattagatagggtttgtgagacagaaatctacctacgacgtaatatctataggaaagtat

SEQ ID NO: 168928 - DNA, 263 bp, Homo sapiens
aattgtgcagggactgcttgagtctttgtttttgttggtctgctaagaatgtgggtcagcataaggtagcgattcctgaacttatcacttgatcctttacaaagagggggcaatggaagcaacatggcttgtgaaactgtattccttaaagtagtgaacagatcaagtaacaaaaagagaatatctgcgtggaagctatacagtgggggcaagttattgatattgatacttacaggttagtattgatcaattaaaaaaagtga

SEQ ID NO: 168929 - DNA, 287 bp, Homo sapiens
gggaagaaaggaaaggagggaagaggagataagaaaatgatgtaaaatattaacagttggggaatttggatgaaaggtatatagggtgatattcactgcgttaatgttttaacttttctgtagacttgacaaattttacattaaaaagttgaatgaagaaaaaagaattcaccaggatatcatttgataacttctaaatgtaattttttttgagacagggtctcgctctgtcacctaggctggagtgcagtgacatgattttggctcactgcaacctccaccttctg

SEQ ID NO: 168930 - DNA, 405 bp, Homo sapiens
cagagacatctcaagagctttttacatcttaactgttaacagctttatgaattttaatggttcaggaaaagtttatttttcaccacaggcccagatggaaatcgctgccatcaggaatagctgaaatccccagctgtgataaaggagcagatttctaggcagaggaaatcagagtatgacctactggtgctgccatctgttcccctatgtggacccaagagctggggggttcctgtgggacccaggaaccatcagctgtgggtttgtgttttattggatttaattcagccaagcttcctgacttccaggcttccacagtcactcttgaatgtttggctctatcagatactgctactatatgctttttgataattttttattaataataaagttaattaaaattaa

SEQ ID NO: 168931 - DNA, 278 bp, Homo sapiens
gttttgccagcggagaatgacaaagtgaatgaagtttgacaggtgatggtgtttgcaaaggagatgaaacagaggagggagggttggggatgagaaatgaaacttgaggggaagcctgaggtttgactgtgaggacgagaggagtcggggagcagagaggccggggtgtcttatgggtcatccactaggagagtgacacaagtagtggtatagagagacacaagaccttggtgcacaagacctcagtgaaagcaaatacaggggaaataccatgacat

SEQ ID NO: 168932 - DNA, 176 bp, Homo sapiens
tggtgggtaggaaaaggtaaaaaactatacctgtaagaggtagagtattctaccaaggaggaagatgttcattcagaactaattccatcagaaatcctaattagaaatattagctaccagtaacagataaaaggaggtaacctttgttctcattctggtcaatttcaggaagagat

SEQ ID NO: 168933 - DNA, 543 bp, Homo sapiens
  misc_feature (514)..(514): n is a, c, g, or t
ccctgttgcagcgatgaagtatccaggtcacctggagaaagctgacataagagcaggcacacagcaggaagctttgatcctcatcttctctctggctgcagccctcagctcttgtgcaccaactctgaccaatgactaggactggctgctcggagtacagctgtattgagaaagattctgaggctgggtctgcattcagcaggaaaaaaaatgaagtaattgtttggtaatgcctgacataggcctaagaatgggggaaacggtaaccctcctgccaggttttgtagaattttctctaattcattttctttagagatacggtaaggacccgcccccacccaaatgggtaaaaggcaaagcctggtttccatttttttgtaaagcctcagatcacaggggcacctgagccattagtgtcccaatggcagggcaaggcaggcatgtctataaatctccagttttttgtttgcttattttcttctttaaactgcttacaatttctcctctttcatcnctcccatgggtaccgacaggaggtgtaac

SEQ ID NO: 168934 - DNA, 574 bp, Homo sapiens
tagttactgactgggaaggtgccaaggttctacctacacctaagaagtccctagcagcacgggcgccactggaatttcccacttgtcgctgctgttgatgcaaggaaatcgcaacataagaggaaaatggggttggagccacgaggcttgcttttgccacttatcttccagagttcattctgctacatggacagaagataactggagtgaaatagatatttccctatgttccttctgcatttggttggtcaatgtcaaagtaaggaccaaattccatctgatagctaagcgcacagaaggggctcggctctgggagcagtgagggtgttggcggatctgtatggcaatactcttaagacagcttccaccaggatgtgagcctcctgcttgggacctctgccccagctttcatagcatgccatggtccctttagaaggaagcccgaagtgcacattgaaagctgacctctgcttcattcagcactgcagctgcctggggccacttccactgacctcatcagcccctacaatcggaattcagccttgaaatctagacacttttttgtgctcatgtt

SEQ ID NO: 168935 - DNA, 514 bp, Homo sapiens
ccaggctgattgttgggagaaggacgtttaaagccttcgtattttatctaatgatcctgcccggatccgtctctactgcatgggcacccttattttaggaacatgtgagatttgagaaagacattgtagcaaataactattcaggttcattcggggtttagatctttggataaactgtgtggagcgcgagtagccaagcctagcatgctcgatgactggatctgaagctaaacaagttctagcaaacactaaccacgtggcctgcttagagtccccttgatgtgctggtcagaacccgaaagacgtgtgacaagcggaagaagacataaaggcgtcttaaattgtgtgatctgaggaaattcagttttgaaagaacagaatgtatttaaaacaacttttttttaaacgtaggaactaacaattttaaaaattcaatttaattttgatttatgtcgtgttgtcacaacagctaaaggttattattattgatgagagttcgttacagtgaattgaa

SEQ ID NO: 168936 - DNA, 350 bp, Homo sapiens
ggagctgactctctcctttggaaattgtgccttccaaaaatatatcttacactgcctgtacctgcatgcaataggttttggttcttaccaactgcagcttcagtctgaacttgagttctaccctcatggatgcaaatcaaaacagctcagaatcaagtctgggaagcaagtcgaagtggtttgatttgcatggggagcttttgtctctgcatgaaggcagccaaattccctaggctccccagccctccggaaatatgctttacaggacccgggggcccaggcccagtcgggtgggtgtgatttgaatgttctctgctacagctgctgcaccgggccctggtcactgctgt

SEQ ID NO: 168937 - DNA, 396 bp, Homo sapiens
ggtcttcaaacacagatcatacctcatgtggcaccagcagactcataccggggagaagccctatgagtgcagtgaatgtgggaaggccttctgtgagagcgcagcgctgattcaccactatgtcatccacactggagagaagccctttgagtgcctcgagtgtgggaaggctttccgtaggagtgcggcatacctgcagcatcagagattacacacgggagagaaactctataaatgtaaggaatgttggaaagctttcggttgtaggtcactttttattgtccatcagagaattcatacaggtgagaagccatacaagtgtgaggcgtgtgggaaaggctttacccgtaatatagatctgcatattcatttcagagttcacacgggggagaaaca

SEQ ID NO: 168938 - DNA, 384 bp, Homo sapiens
caactacagtgtagtgatttaaggacatggtttttctgaagacgcagacaattcacagtcaggacttccaagctccagaccagtgtaaccaacatatactctgcatctccacttggttatctcaaaagtatctcaaacccaacatgtgtgaacctaacctcttgctcttcccgccaaattattatttgccctgtgttccctcctgttggagggcaccaagatctatgcggttatacaaataagaagtctaggaagtcatcttggacactttgatctgctccattctccttcatctgactcaaccaggtctgttgattttttaccttctaaatatcttttgaatcctgtcaatttcctccatctttctcagtaccacctgggtcc

SEQ ID NO: 168939 - DNA, 201 bp, Homo sapiens
agagatggggtttcagcatgttggccaggctggtctcgaacttctgacctcaggtgatccacatgcctcggcctcccaaagtgctgggattataggcgtgagtcaccgcatctggctcgtattcccattttataaaccaaaaaactaaacctcagacaggactcagttgtggctgatttgatgactggcgaatttctttct

SEQ ID NO: 168940 - DNA, 653 bp, Homo sapiens
ccttttccagcctctgccagagacttccagatgcagctcccctggaggccatgaagaccaagaagaaactcaacacacaggaaatgctgcctcttatctgtcctgggaaagacacagacccagtcacactgagcccaccacagggtgcagagcacccttccatctggtcacatccggcttctcatgacatccaagtcatcgcacagacacgtgacagacttggccctgggactctggccttggccacgaggctgctgctggttctccctgctggaacccgggaagccggatagagaagcttcccctggcattcttacaccacccttcccaacacgcccggccagcccactcctgggggcctccctgcctccccttggggaagtaatggcagcccttaatccttaccctgttccgggctttgttcccagtgtcttacatctataatcccattgaagcttcacagcaaagctaggaggtaagtatcattgttatccccatcatcatgaggaaattgaggcccaggaggttaaggaaggtgtgaccacagcagatcccccatatgacgtcggctagtttgtgtggagaggtggggataaagcagttgtggaagtcataacgccatgagtgtgagcagcaaggcagtggctccccat

SEQ ID NO: 168941 - DNA, 966 bp, Homo sapiens
gtattcgcagcagcatcagaatctgtccctctgtacagctgccctcatgtatatactgaggtagaggatcgtttgaacatggatcttgatagagctagcttagatctaatgattcgactttggaactggaacaagatgcttcatcagccaagctactgaatgaaaaagacatgaacaaaattaaagaaaaaatccgaaggctctgtgaaactgtacacaacaagcatcttgatctagaaaatataacgactgggcatttagctatggagacattattatcccttacttctaaacgagcaggagactggtttaaagaagaactccggcttttgggtggtctggatcatattgtagataaagtaaaagaatgtgtggatcatttaagtagagatgaggatgaagagaaactggtagcctcactatggggagcagagagatgttctcacgagttttagaaagtgtaatgcggcatacatcccgaaaatcaaagctacgggatagcatataaagattccaacttatggtcatcaagtagagccatcccaagcatagggcacgaaccgctcagggagcccaccggggcgagggacgccaatgtaggcgacaggaagaccagggcaacaaagcgatatccagtagcacacgggaacagcacagggcacacaggcggcccacaacacacatcaaagtgacccaacagacaggagacaccacgcaacaagcgaaacaagatccacgaaacaaatggtatgacaagacgctgcaaacagtaccaaccgtgctatgctcctgcctcgtctgcgcctacctccggaacaagacacgaaaacgacaataccaaggacgacaaaagacaggagtagaagaacaaaacgaacaaacaaacagcagcagaagaacaaagaacagacaacaagaaacaaacaaagaaaaaaaaaagaacaccaaatagaacagcaagaaaca

SEQ ID NO: 168942 - DNA, 431 bp, Homo sapiens
gagataagatatcaaattttacataattcttactttgtaactataatttcttttactcactcttttaatcatataaatcaaaatctcacagacatttactagttagggatttttaccccttacataaacaaacactggcttcctaaagggaatattttgggttgtcataacttcattcaagcatttttcagttaagttaaaagcaaaagtaaaatcactgcaaaaatatagctgccattgtacatctactactgctgagtaataatgcatgaatgaagacagccccttacccatagccagtcgcttgagagaaacttgaataagcaaatcaagcacaagcaacagaggcagacagaggatgattgcatgggtcgctgaataattgacattgccttaacagttgaatattttcagtgtattctaattctgag

SEQ ID NO: 168943 - DNA, 266 bp, Homo sapiens
tagaacttctgagacagaggccagctctgtgacggtggacttactcttgagagatataaagctgaggctgctagagccacctggttaccacgaggagagagactgcctcaggatagagccaacatagcaaaagtgacccagagaaatatatagagagaaaccaaacctttgtgatgtaatttaatggcttgaaccagcagtacctgaagccagcttgtcctagacttttgagttgcgtgagccagcaaattgcctgattgtctgag

SEQ ID NO: 168944 - DNA, 429 bp, Homo sapiens
acaggacccaacatcatgccctgccccctactccagccccccttactcatgctccagctgctctccttgagatacaccatgctgtttaatgcttcctcctctgcctgaaatgacctccaccccttcccatgcagagaacttctactcatccatcaagacccaggttaagagtcccctcttctgctaggcaccctcattgcccacttaaatccagcatcttcctcatctcttgtcccagtgaacagtaccccccgaccctgcactgtttggtctgtgcctgccctcactccatcctgggtagggtcactcctgtggccccagtggagttggatgggagcaggcctgtggccagtgtcctgttaagcccttagtggagcagctaaggtcagacccaggtcgacgcggccgcgaatttagtagtagtagacc

SEQ ID NO: 168945 - DNA, 208 bp, Homo sapiens
aatgaaattttacatggacacaaatatctaggtgcagggaaaattaaagctgagatattcagactcactgccagttggaggaaaaaaatcagttataacgcattttttggaatagagggaaataatttgataagtacaactttttgtttgaggtgtagctaatgttagacatgactgagctgttctacacataagtgttgaatagtga

SEQ ID NO: 168946 - DNA, 434 bp, Homo sapiens
cttgaaaggtggagctattgtctccttctggggcagggagcaaatttgttttccaaacagtgtaataaatgtttccctctgggcagagtttgggcgtgtttgctagcagtcccattagaagagtggggatttcctaagtttggagttcctcagctttggcacaaacccagttgtgcactgcatacccctggacccacattcacatggctcccttgatacttggggagtcaggaaaactgatgtgaatgtaaaacttatgtcactacctgccatgccatcagtaagaaagtcagttgtctcagacataaggtgtctcatgtatctgccaagtttgatgaaagggtagaaagctagtgtgtagcttgcaagtaggataaaagctcacactcttaacagttcttggccaccctagatctgggacagaggacaatagg

SEQ ID NO: 168947 - DNA, 374 bp, Homo sapiens
actttcacaaataatagacagttattcttgttttccttctagaaacattgaatttttttcctctgctttgcatcatttgagataggtccttaagaagcagctaagacctggaactctagcacggtggaaagctgaggcaggaggatatcttgagttcaggaatttgagaccagcctgggcaacacagtgagaccccatctctgcaaaaaaaacaaaaaattagccaggcgtggtggcatgcacctgtagtcccagctactcaggaggctggctggaaggatcacatgaggctgggagattgaggctgcagtgagctgcaatcacaccactgtactccagccctccagcctgggtgacagagcaggatcctgtta

SEQ ID NO: 168948 - DNA, 162 bp, Homo sapiens
ctcctattcgcccctccctcaccttatccttaaacaactactaacctgttttctgtctctgtagatttccctattctggactttcatatgaatggtatacaatatgcagcctcttgtgactggcttctttcacttaatgtaatgttttcaaggtccattcat

SEQ ID NO: 168949 - DNA, 281 bp, Homo sapiens
atcacccccgacacctttgttcctgcctcactgcaaatcccttacaagttgtgaatggtgaggttgctgggacttcaaggtcactatgtgtgtggtcctaacaagggaagtggagtcaggctggcaggagcaggggaaagcagaaagaaaaagcagataaactgttaagtctgcctttcttcctggtccagggcgtgtagccctcctgtgcaaataactcacaatcttcctgcacttatcaccagacactgtggctgatagaaaaatgaaagttagctcac

SEQ ID NO: 168950 - DNA, 396 bp, Homo sapiens
gttcttgtcacaggaacaactcatgatggatgtgaaggcttactttcaaaaaatttatcacaaattgattccattcatcacttcatatataccttattctactaagtaacacaagatattaaaaactgccaagtctccacgcatccattcactatcagcagcaataaagattacatgtgctgagtgctcaccgcacgccatactatactcagcttttctattatcttactttaaacctccttacaactccaaggagggtgtcattcctttttgttgttgttgttgagatggtgtctcgctctgtcgcccaggctggagtgcagtggtgcggtcctagctcactgcaacctccgcctcccgggctcaagcaattctcctgcctcagcctcccgagta

SEQ ID NO: 168951 - DNA, 301 bp, Homo sapiens
cgtacaaggccccgccaggttcgaggggaataaaaggagctgagcccagcctttgttctggcttcattctcggctctgcgcagacagtgggatcagacaccagaggcaggagagtgacggatggaaagataaggagggaagattcctgaatcagcgtcctggataaggtggtttgaccccaggactgagcattctgagttgtacctgaaagagggcagcccagggtgggcaggtggctgtgccacctcaaggaggctggcactggggtcatccatgtgggcaaatgcgggccttgtacgga

SEQ ID NO: 168952 - DNA, 567 bp, Homo sapiens
gaccttgagggttggccactttcttttggttaataaaatgtgtgtgaacttgatatttgctgccagagcggaagctttcagtggtgtggtttggtgagacctgcttcagccttgacctcccccgtgagaacagcacaccttagagagttgctcttccttcagtcctggctcctggaaggagacgataattgtggctgagccaaatccagcacagctgagcccatcagagtcacagctgacccacagtcaacctgcagccctcatgaaacataagcaagaaataaatagtttttaaaaccattgagaatttggtgttgtttgttgctgcaccaaaagctgaccagtacggagtctgaacacgagtctggttgactccaaaaccattttagaaactctctgtgaaaatggacactacttccaggatgatgtctaatatggtttgggtctgtatacccacccaaatctcatgtcaaattgtaattctcagtgttgcaggaggggccaggtgggaagtgattggatcaccggtggggcggacttcccctttgctgttctcatgatagtgag

SEQ ID NO: 168953 - DNA, 192 bp, Homo sapiens
gaatttcctagaagtagatcctaaggcaaagattcaaatataaaaattttatttggagataactctaggatattaatttgactgccagttcttccttagggtgctaatcccaggaaacaccagtagaggagtggggaacagagataggaaaggaatgcagcagttaaagggactttcatcaagaaagtttcc

SEQ ID NO: 168954 - DNA, 324 bp, Homo sapiens
tgagccaccatgcccggcccttcttttttcttttgagacagggtcttgctccatcacctaggctgcagtgcagtggtgcaatcacaggtcgctgcagcttcgacctcctaggcttaagcgatcctcttgcctcagcctccctagtaactgggactacagacacgcactaccacatctggctaattaaaaaaatgttttgtagggatagaggctcactttgatgcccaggctggtctcaaactcctgacctgaagtgatcctcccacctccgctttccaaaactctgacgttataggcatgagccatcatgccgggagattactg

SEQ ID NO: 168955 - DNA, 349 bp, Homo sapiens
tgcctgtggtactctcaatattacaagagcaaaccatgaagtcaggtctatttaaatgttaaatttgttatttccagggtttgtgtcttgttataatttctcttagtttctgattaacctaattgtgggataatagctatttggcagaactaaaacgtttatcttttctagtactctggagaggtaacaaactcatagcatacataggcttggcaattgtggctcaattgtggtaaggacagaacacttctcaacctaaccttctttattagtgctaacaaagatgtcagttatgccagggatttgctcaccagtaaacaaagccaatatagttaagcatattggtttt

SEQ ID NO: 168956 - DNA, 627 bp, Homo sapiens
ttagtgggtgcagcacaccagcatggcacatgtatacatatgtaactaacctgcacattgtgcacatgtaccctaaaacttaaaagtatataaaaaaaaaaagggggggtatacacacaatcaggtgtcaagcagtggcacctcgtgcaaaataataaactcatctaagatcctagcagttcattctgaaaataaagctggaaatatatcttggatatgtaaaatgtgagtgtaaaaattaatgaaactaagcaatgggaatatgagtagtaaattatttgagaaaatattataacatttacttttttaaatttcaaaactatatttccttatttaaaactgaaaatttttgtgtacatataggaaactaattgtgtcatttttctttttgttacaatatagagtgatgtttcaaaacacaaacataataggtagagtcaattacttaggggagtctaaacctggaggtaacattagaaatagaaataataaaatgcagtgtttttggatttgtctgttaagattattttaatccagatcatatttaatggtttacatagttgtatatcaaatttggtttcagaaataaattatacagtaaatttaaaaatgcaaaaaatgtatatt

SEQ ID NO: 168957 - DNA, 645 bp, Homo sapiens
tgactgtcacggggctgtgtcctctggtcctggactctccctcccccaggcagtgtctggtctggatgctgtcactcggcatgaggggtacgcgggaactgggctgagagtggctggctgtggccagcactttgggagggatgttggggcaggcccgtgggttggggcatggtctgtggaggccttgcctctgggcctgtgtttccccatctgcagtagagaattggacttgatttttgtaccctgttagttctaaggtcctgatcctgaggaagtcactgggaccagagaggctatgagagcctgagatgggtgacctctgaaggaggggagctggtctggccgcccctctaggcctcagtttccccatctgtgcagtgggcagcctgcagttcacactttcatttagatgctgacctctttctttcctttctttctgttttgagacggagtcttgctctgtcgcccaggctggagtgcagtggcgtgatcttggctcactgcaaactccgcctgggcaacagagtgagaccccgtctcggggggaaaaaaaaagaaccctggagtttacttcctgccaggtgacctcctgggggagggagccttcaagcgagcctggccagaagcggggagaggttgggtgct

SEQ ID NO: 168958 - DNA, 432 bp, Homo sapiens
ctgagagtggctggctgtggccagcactttgggagggatgttggggcaggcccgtgggttggggcatggtctgtggaggccttgcctctgggcctgtgtttccccatctgcagtagagaattggacttgatttttgtaccctgttagttctaaggtcctgatcctgaggaagtcactgggaccagagaggctatgagagcctgagatgggtgacctctgaaggaggggagctggtctggccgcccctctaggcctcagtttccccatctgtgcagtgggcagcctgcagttcacactttcatttagatgctgacctctttctttcctttctttctgttttgagacggagtcttgctctgtcgcccaggctggagtgcagtggcgtgatcttggctcactgcaaactccgcctcccaggttcacaccattctc

SEQ ID NO: 168959 - DNA, 484 bp, Homo sapiens
gttgataatgcactgctgctctttgtatattatgagctctatgttgtctcttctgacgcttgcccttgggcatgccatgtggatttctttttgtctgcttacttgccatttgagtgactgttaaatcaccttctcaggtctgaagttaaaaacaggtagatgtcacaggcgtgtctggtgaacagaaatcactcatccactgtggctctgttaaacgggggtagaagcttctccttccctctcctgtcctatggctctcagtactggagcataaccatctcagcacacctgcacctgcaatcacgttcttgctgtcacagccccaaaactgtggagactacacttgtcacaatgtggtaagtcatctgtagttcccatgcttcctcagagcaccccccactttcctcttggaggtggaagctgtgagtaaatgtaagaaaaaaatcatcagtggaagaatgtaccttaactacagtataaagca

SEQ ID NO: 168960 - DNA, 691 bp, Homo sapiens
aattttaaaaattaaaaaaagtatgagctgggcatgatggctgcacagctgtagtgccagctacttcagaggctgaggtgggaagatcacttgagcccaggagttcagggctgcaatgagctatgactgtgccttgggtgatacagcaggaccctgtctcaaaaaacaaaacaagaacaacaaagacaaagacacgcagagtgaatgtgaacctgtgtatcacggggaagttatttgaagatacatctcaacagctatggaaatatcaagccctttgtacacagtgattccacttctgagaatctaaaccccaaataatccaacatggagaagaagccttagaggaactgatgttcatcctgcagtggccaaaattgctcaaacctgaaaagccagccttagtaatcaagatgagggtgtaattagcacaatcccgatgaatctcatttgtgaaattgcagacagccattacaaatattgtttacagcaagatgagttaatttttgtagcacacacacaaaaccataatgtgtaatgcaaaattataatgtgtaatgcaaaactaggttgcaaaagcaacccaattactgagatgacaggagccagcacccactgtcccccatggccacactgttggtaatgtcacacatgatctctccggagggcaatttggaaattcctactacaatgt

SEQ ID NO: 168961 - DNA, 152 bp, Homo sapiens
atatgtggctcagtcaaaattacgcaggctggttcagctgcagttcaagtggcgtatggcgtgtggcctggggtgttgctgggcaacattactgcctgtccagctgcatgccgagggtggtgtttaccttaaagagtacaccctggtctaag

SEQ ID NO: 168962 - DNA, 210 bp, Homo sapiens
gaaaacttaggttttcatcgataatacataggagatggaagtatttgaaagctgtgaaatgacagtgatatgtctaaagaatatgacattggcggcgggcgcggtggctcacgcctgtaatcccagcactttgggaggcggaggcgggcggatcacgaggtcaggagatcgagaccatcctggctaacacggtgaaacctcgtctctacc

SEQ ID NO: 168963 - DNA, 393 bp, Homo sapiens
tctgctgagtttgctccctccccactctaaagcaggttttctcagcccttttggtgccatggactcctcagaatgtctttaaatatacagcattgcaaagtacaccaatggtgttgaagtatagttctcaatataaaagccagcactttgggaggccgaggtgggcagatcacctgaggtcaggagtttgaaaccagcctgaccaacatggtgaaaccacgtctctactaaaaatacaaaaaattgctgggcatggcggcaggggcctgtaagcccagctacttgggaggctgagacaggagaattgcttgaactcaggaggcagaggtttcagtgagccgagactgtgccattgcactccagcctggacaacaagagcaaaactctgtctca

SEQ ID NO: 168964 - DNA, 321 bp, Homo sapiens
catctttgcaggtggctgtctgcaaaccaggaagtttcctcatggaatcagattggccagctccttgattttagatgtttagcttccagaattatgagaaataaatgtctgttgtttaagccacctaactggtggtattttgttacagtggtgcaaaccaagatgggggcgggggggtgcggggagaaatagagacagagagacagagagagacagagacagagatggagggaagcaggttttcctgaattatggggttttattttttcagaaatttctatatttttacaatgagaatatcttcaacagatattttcaaca

SEQ ID NO: 168965 - DNA, 402 bp, Homo sapiens
tttgcactcctataatcagtatttaacaaacagtcatttcccttcaggatttttttttttttaatctttaaaagaacacaggggtggggagagagaagcaaaataagcttgaagcatccatgaactaagcactgccttttcaatttgagtagtcctttttttctgcttggactttcaattttgaatgacaatggctttcccagtcttttgccagcttaggtaacaaaggtagggaagcaggataaaaactggttgccccccaaacatagcactattaacctaattatacagaagctataaaaatgttttttttgtttttttttttctgagaaagggtcttgctctgtcacccagactggcgagcagtagcgcaaacactcatcactgagtcttgatctcctg

SEQ ID NO: 168966 - DNA, 222 bp, Homo sapiens
tggatccagagacagggaacagcatacttaggtctgagctaataaaaatagataagaatcaatcttagacaatagttattgcagtgtctcaatgcaaaaaacaacatgaggtatgtgggtccaactttgggagcttccttccagcaggatacagacacactgcaatatatttagagaagagggcccaaggcagggcagggaacagaaaccctgtcctatggg

SEQ ID NO: 168967 - DNA, 601 bp, Homo sapiens
agaaacatttcgcccacacagctgcagataccacaagaaaatggtgccagcaagaatgaaaatgcaaccccaaaggcctccacgaagccacccagcggcgaacacagcccgacagccggtgcgcagcaaaaacacaacttgagagtgcggccatttccttaggtatcatgacaacagcgttgctttctcctctccacagaatctgaaaccactataaccctacttttcttgactactcagggtcatgtgaccaacacgaacgtgtttatgacaggggcctcttgaccataacgcaaccgcatcacggtcagcgtgtcagatacctggagaggacctcacagaagctctgggatctgtccagaacccacacaccagcaggcatcttgctcctcacagcagcagctgtgagtgaagaccaacagcagagatgggctgcagcagctctcccttcctcccataaggagtcatcagggacctctctgaagacaggtgtgtgccctgtggccagacaaaaaggccttgggtggtggttcacaactgtaatcatagcacttcaggaggacaaagtgggagcatcacttgagcccaggagtctgagact

SEQ ID NO: 168968 - DNA, 383 bp, Homo sapiens
tacacgtcagcattatcaccgtgacgaggtgactacatgagggtgagtccaggaggcaagaattattgggggctatcatggaggtttgataacataattggtaagaaattcagatacacctcagacttgattgtggcataccagtgtgttgtaaaacttgtgagaatggcttgccttagaaagacaagtagtccatccagtgtcttattcttatgttaagttgggattgctattttgttacccttgggcctctatatacaaagcctctcatagtaatagatctaattgggttgaagtttagtattatgtatatgccctctgcttttattagtagattttactttcgtgaaaggaacatataaacttcattattgcatttttgt

SEQ ID NO: 168969 - DNA, 667 bp, Homo sapiens
ggataatcattacagatttggggacattgttgcccatggtgtggcatattaaagaacaaaataactccattagtttgacctttctgtgaacatttgctacttttgcaatggaatcatgcaagtatataaaattgcttttattacagacatctctgtattccacctgcctttttttattttccatttgcagtctgttcagttcaggaagctgctataacacttggtgccagtgttcccaaactctaaataatgtgttttccatttgcactaaccatcaggaaactagaatttctggtttcctcaggtatgtgtagtggtcattagtgttacgtgaaagtctcatagcatttgattataacataaggtatttagaaaaagaaagttttctgttttaagttagctctcatgttcttttgtattctatatgaatcaagtaaatgctttagggatattaacctggaaaaattattgactttgtaagttcacaattcatgtaaagaaatttttataaaatatgggagaatttaaacatttgacaggaagagaacaactttttaaatttgagatatattgagttcagagaggttagtgatagctggaaattttattcgccctagtaattattttgtttacattaaaaaatctgtaataaagctacaaaatagta

SEQ ID NO: 168970 - DNA, 364 bp, Homo sapiens
ctactagaaagacaggggatgtaaaaaccaggagagaaggcaaacacttggagtgggacactggccaatgttgctgcaatgtaatagaaaagggagaagtcataacacataagatagagaggtggcatgagtccaatcccatatggctttgtaaagcacccttaattgagtatgaagctattggaggtccttcaggagagaaatgaccttatctgttttatgttttaaaatactcactctgacctagtattagggttctcccccaaaacagaaacaatgggagctgtgtaggtaggtaaagagagagatttattgtggaaattggctcacaggattatagaggctgagaaatcccatgatatac

SEQ ID NO: 168971 - DNA, 341 bp, Homo sapiens
tggatgtcctattctcatctcagatcattatgttcaccacaaagacttggtagttttcttctgagtaaactgcatgcactttattcagggtcctgctggcccaaattgggactggatcagttagaggaggcttccatccagatgaagctcgctgccaggctcccagctaggcaagtggagcagaagctggatttcaaactgtgcctgccccttggctgagctgctttgtgcagtgcacagtgtgcacaaatgtcaatggtggtgctgagcttattgcaagtagtaatgtttccttcacaaatgaaaaattctactatgtttattttttttcaagtagcccc

SEQ ID NO: 168972 - DNA, 531 bp, Homo sapiens
actcgctgaccattaaatgcaaggaaagctctcttaaaatggacacagcactaactagaaaagaaaaatacatataaactcttgagtcttaaagctacaaatctgactgtaaaaattgacacagattgaaaagacgcctgagacaagacaaacataacaagattggtaccatgagcagaggatgagtgagcaaatcttcgtctgtatttacagccactccccgttgttcacattactgcctgagcacctcctgtcagatcagcggcgacattagattcttacaggagcatgaaccctattgtgaactgtgcatgcgaaggatctaggttgcacactccttaggagaatctaatgcctgatctgtccctgtctcccatcacctccagatgggactatctagtttgcaggaaaacaagctcagggctcccatttaagtgggataattattaagctgtatagttatttcattatatattacaatgtaatgataatagaaataaagtgcacaataaatgtgcttgaatcatcctg

SEQ ID NO: 168973 - DNA, 321 bp, Homo sapiens
atggggaacacagctgccaggtacaccaggtatgcccccttaacacatgtagggtacaccccaaagcacttccagatcaaggcctcggctgggcccatcgcctcaacagcttttgcttcagtaagaatggggcacacgtaactgaaggtctgtgaagtttctgtcctctcgatggccacaggtgtgtctgtacagctgtgagccatgtgtacccactagacttgagggaaagacaagcctgtggttcagaacttcccttgaattaaaacccctggcaaaactggcaatgggctctaatgaggagtggatacacacagacaa

SEQ ID NO: 168974 - DNA, 297 bp, Homo sapiens
tttcacatcagtatcatatcacattgctggagatcagctttttatcaacacagggagacatctccatgtagtggtgagctcagactatggagtcagaaagacctgggtttgaatcccaattatggctcttaatatgtgtgtgaccttgggcaagtcactcaacctctctgagcctcagtttccttttctgtaaaacaagaatactgtccaggattgtttatgactattgggaataacatactaagtgtccagtacagtggcaacgtattacatataggtgctcaatagagttatctt

SEQ ID NO: 168975 - DNA, 256 bp, Homo sapiens
cttataaagttgctgatgatccctttaagtgttactaattggaaaatccataatttctgggacctcgtgtgtattgcttcccattgtatctctagattctaatgtaagtgcctggcatgtagtaggtgttcaataaatattcattaaatgaatgtaccaatgaaatgtaatatatatgactctgtcatgtaggaaatccctgctattgttaagttcaaatacataaactatacttactctgtcaacttgttcctgt

SEQ ID NO: 168976 - DNA, 484 bp, Homo sapiens
ccccatctctacaaaaaaatacaaacattagatgggcgtggtggcgtgcacttgtagtgctagctactctgtaggctgaggtgggaggatcacctgaggctgggaagttgaagctgcagtgagccatgattgtaccactgcaacccagcctgggtgacatgacaaaagacatgaaaaaaaaagagagagaaagccctcttcttctcttcttagcatttcattctccttttttgatgtttgtaaaacaattagagagtcctgtgcaaagctgatatttaacttacccccagatgccaatagcactcaccagtctttgtgaaaacactgcccctgcctttactaccaaggatgcacctgacccctggggcaggcagtgatactgcccagaaaagaaacactggggccgggcgcagtggctcatgcctgtaatcccagcactttgggaggccgaggcgggtggatcacctgaggtcagaaattcaaa

SEQ ID NO: 168977 - DNA, 382 bp, Homo sapiens
caagaataccactagtaaaaaatgtttaacaatatttctgctacctagtgccagggtcttttgattccttacgttccatctgggatgaggttcttcctcattgtaagtcctgcagtgagcaatccattccccaaactctgaaaggttctgaaacagaatactgtattttttcacctgatgttaaaatcaaggggtccaatcatttgcagcagattttattttcaaacaggttttttaatgaataaaatggagaaacaatgagattaattttatgtaaaacaatctgaaatttaaaatctgctcgtccctcatacgtaaatttacaaaccaccaaaacaaccaaacaaccaacaaaccaacaacaaaacagtgtctattaaga

SEQ ID NO: 168978 - DNA, 413 bp, Homo sapiens
agggacactttgcagtgtaatagaagatcaccggacatcaaaaaggaactgtcccatagagccaggatatgtgaggggagagtggtacaagtgggtattagaaaggtagttaggggccaggtgcggtggctcatgcatgtaatcccagcactttgggaagctgaggtgggcagatcatctgagttcaggagttcgagaccagcctggccaacatggtgaaaccccatctctacttaaaatacaaaaattagccaggtgtggtggcaggcgcctgtaatcccagctacttgggaggctgaggcaggagagtggcttgaacctaggaggcgaaggttgcagtgagctgagatcatgccactgcactccagcctgggcaacagagttagatgccaacacacacacacacacacaca

SEQ ID NO: 168979 - DNA, 287 bp, Homo sapiens
tgcggtaagctattcggttcaataattataactacagttaaactgctgctaaatcaattttaacatatggctcaatcttgtattttacaaatcatttgaagatatcaatctttgaatttctttattgaaaggaaatctaccatatgcttcaatatttaaaacaatatgtctcactcccaatcacaatcctttctgtatctcatttcttcaaacatttcaatacaaaatttttttttagttttatacccttccttccaactagatttaacaattgaactggtttgccg

SEQ ID NO: 168980 - DNA, 272 bp, Homo sapiens
ttgggtaggggtggataaagggaaaattcaaggcatcaaaactgaactgtcaatgaaacctgtaattaatgtaaaaaaatcatcagtaagtttaagtagaccaaaaaaaaaaaaaaaaaagagggagttggaaagtttggaggaaacccgggccgggccggtgtcagttttcccactttaaaaaaaaggtgagggaagagaggaattggaccaactttttggtatcggcaaatgtgctactcctgggaaaggtggggggaccctctaaaagt

SEQ ID NO: 168981 - DNA, 361 bp, Homo sapiens
atgtgttgggctgaataattcatgatgcagtactaattttgactctggagaaaattgctttctcactgtgccaaaagctaggcagtgagaccaaaaatcaaagaggaagctaaatggaggggagaaaacaccctaaatcaacaccatatcaaattgacaaactgtttaaggctgcaaaatgtattgtcaaaacatgtgagtagatattttaaaccttacctaaaattgagcatatttatgcctacttattttgagcaataataggtagatattaaataattattttcaaaagtagctccttgatattaatgcagagagttccagtaaggaagtaagcatttgcatttcattggaacttggt

SEQ ID NO: 168982 - DNA, 378 bp, Homo sapiens
ggaagttacaccttaaatcagttgccaagaataaagcaaatccttggttttgcatagagaggtgaaggatatcacctttatcctgatgttattgtgtgtggtgaaatgtagtcaggtaaggctttgactttggtgtttagccagctttttttttttgggagacagtcttgttcggttgcccaggccagagtgcagtggcgcgatgttggcttactgcaagctccgcctcctgagttcacgccattctcttgcctcagctacttaggaagctgaggcgggagaattgcttgaacccgggaggcggaggttgcagtgagccgagattgtgccattgcactccagcctgggtaacagagtgagattctgcttaaaaaggat

SEQ ID NO: 168983 - DNA, 182 bp, Homo sapiens
agcaaacacaaaaataagtgtttttgttttgatctaagtgacttagcacaaataaagacttctgaagataaatgtttaaaagaacctacagaaggagcagggcccacgccccctgcctgtggatatgcatgtgttattttaatatccaggccccaggtctccagctctacagcccccgtagg

SEQ ID NO: 168984 - DNA, 309 bp, Homo sapiens
taggcctggtagctcccacctgtaatcccagtgctttgggaggcccaggcaggaggaccatttgaggccagtttgagaccattctgggcaacatagccagagcctgtctctaccaaaacagacaaacaaacaaaaaaacaaaaaattaacaacactttgaaaatgtttaaaaacattttttaaaaataactcacaggctatacaaaaataggctgtgggcaacatacagtcctaggatcatagtttgctgatctctagcctaggcttcaagtagaacaaagaaaaaaaatcaactgtgccctatcctga

SEQ ID NO: 168985 - DNA, 428 bp, Homo sapiens
ggtaagccattcaagtctctccaggtgtgagtgtgtacatctgcactttgaaggcattggacgaggtgatttctgtactagtttcctgtggctgccctaacaaagtaccccaaattgggtggcttaaaacaaatctattctctttcagttcacaggctagaagttttcaatcaagttcatgggcagggccatgcttacattgatggctctaaggaaaaatctttccttgcctcttcctagcttctaatcattgctggcaattcttggcatttcttggcttgtagctacatcactccaatttctgcctgcattttcacatggccatctttcctctgtatgtctttgtgtctctcctcttcttataaaaacaccattcattttgcattaagggcccaccctacttcaatatgacctcctcttaactgatt

SEQ ID NO: 168986 - DNA, 347 bp, Homo sapiens
attcgatggtgtttccattcgattcattcgatgttgattccattagcttccgttggatgatgattccattcgggtccattcgatgatgatcacactggatttcattccataattctattcgattccattcgatgatgattccattcatttccatccgatgatgattccattcgattccgttcaatgattattccattcgagtccattcgatgattccattcgattccattcgatgatgattgcattcgagtccatggattattccattccattccattagatgattccattcgggtccattcgatgtcgacgcggccgcgaatttagtagtagtagtaggcggccgc

SEQ ID NO: 168987 - DNA, 454 bp, Homo sapiens
ctaggaacagctcaaggatttgcacagcagaatgaaagaggagctgtcactgagttccttaggactcacagcttgaaaggaaggaggaggcccacagggggcctgaggaccaagcccagcaggggacgctgagcacttccacagcccagggggtgggaccagagctcttaaagccacagatctcctctgcaggcacagagaccctcacagcagggatccattcacaccagtcacccttggagactgctatttatgctaaagaaatttatcccactgcattgtatgcttcttgtccagagttctcttggatcccttgtttacggccttagtcttatattgtgagcagtggaatggacaggccatttaagagggcagggatggctaatgatgggtctgttagccctgcagtcagtctttcctttgtgaaccaaacccaatttgggtgcatttgcta

SEQ ID NO: 168988 - DNA, 525 bp, Homo sapiens
gtttgggctttggacagagtactgtggctatttgtgtgtggaactcaggaagaggaggaactagaggtggggagatgagctaagaggccactgagggtaccacaggtgagaggtgacaagctcccaatcccagaccatggtggctgcagaatgtgaaaacttctcaagagatacaagaagcaggactcataatatacaggaggccatgatggttgcatttggaaggaagagaaggaaggaaagcaggaacacatctttccctggtttccagctcacatgggttcacccgttgaagcatagactagggggagccagcaggttcaggaggcagccagtggcttcattttggacaccttgatgtgaggtctgagtatatgtttccagtaagaagttcagtggcaggtccatagctactgaaggaaagattggtggtggaattatcaacgcaggacgtggcctggagacgactcatgagtatgttcaaatcatgagtatgatggagaccaacacagacccaggatgcgc

SEQ ID NO: 168989 - DNA, 507 bp, Homo sapiens
cgctcccccatccctgctctgctctgaggtgccagccagagccgctcagggtcctccgtccggtttcccgtgggcctaacagcagggccctggggccactacccgcacctccctgcctccatctcagaaactgaagcctgggagccccctgggccacctgagtctgggagacgcaagccaatcccggggacaggccccggccccttcctagtgaggggcacgctctggtcaatcgtggggcagagaaatttgctttttaacataaaacgtatcctttgtccctagaatggcaggctacctccctgccttattctgtgaagatgtagttcttttattagcagagcttactttgaaggtagaataacaataaatatataagcagttggagagtaaaatcactacagtattcaagtctaaatatattacaaatgccaagttttattggaaaattatatataaaattcttatatacattttagtaagcctccatcttagtatctaaaactt

SEQ ID NO: 168990 - DNA, 416 bp, Homo sapiens
tgtgttctcagcagttatatttcaaatggcttgaaaaaaattaatggaataaaattttgcatctgatgggttacgtttagccagcaaaagggattttacctggggctccattaaagcctgcactcctaagtcctattctcaatcccaccatcaccattgtgcctccatcaacagatttttatttaagccaatgcgtttagagtacaattccgtggtgaataacctttaaggttacatttgccttttccctgcttcttgcaaacagtgcgtaatccacaagcacatttgttggctgtaaaggtgtacaacagcaatttttgcaatgacagtgcggagagggaatatgagatctgtgtgctaatgagctgacactgcagaggctggggcggtgtagtgtggagtgcactacaagtgca

SEQ ID NO: 168991 - DNA, 502 bp, Homo sapiens
ctgcttggagaaaatgaaagttagcaaaaatcacctttctccagatgaatcgttgtgggaaagtaagtttagcagaatgtgctgtcaacttggttgagataaggcagttggaggactggcattattaaattttctgtggtgcaattaggggtcctcctaagtgcaggtgagctgtggtgaggagttaatgtatgctcagtaaatatgtgctgaatgcatgagcaaggcagttattaatctggttatcattggggattcacaaatttcactttatatcttgtaacaaatctcaaattgtgcccctgaaacatctggattttgaaaagtgattccaatccattgtcatgggtggcactattcccagaaatcaacaaaggaaatccaagccactgagggtttttaaaaaattttgagtattaactagactgttatactcttctgtgtttatatgtagtaccaataatcaagacaataaatccatctttaacaataatataaaaag

SEQ ID NO: 168992 - DNA, 600 bp, Homo sapiens
gcatttgtgtgaaaattcttttaaatattttatccacaccagcagattaaaagggacacaaaaaatacctttaaatgcatctatgagtttttgagctagaaagtaagacatgcaaaatctctaaatttgaaaagaagatgagatgaaaaaaataagaaataaagaaaagctgagatttgaccaatttgtcaattgcgactcatagaggagattcttgccatatggaaatactgtagttagtaaacgatagttttcccctcaggatattcaagcacaatatctatttgagaaaggcaatttatttcttaattttgaagaaagatcctacggactgataaactgtgaaaggacccaacagtgtaatctagagtgagtcaaaggcaattcgactttctgatactggcctttaccacagctgagagtaggactgtgtaatcgttaatcagtctgcatgtactggtatacttaatattaaaggtttccaaaaacagaggaagggtacataagatggataacatatattccagagggaaaaaattcataagctacctgtgtcagaaaactaatttttgttgatggtggggattaattactatgata

SEQ ID NO: 168993 - DNA, 462 bp, Homo sapiens
acgcagggtcggattttaaacaggatatccagccggagacgaaggtaactgttgtcttggtcactgctaagaagcacctgatcgtgcaagacataccgctcatgagaaagaaatgttttcaactctttgtggcaccctgctgggacaggctctgcctggtcattccatcccaggggtgattaaccatcccagtgttagggcctgggactttgctaatgtgctttcaggtcaaccacaaacatatttctaagatttcttagctaatggtgcatttgcgaggtcattccaggctaagaccaggaggattaaaagatctgattccttcctgaggctcttagttgtaaaggaccaaagaagccgtaaaacaaagatttattcagtttcagccggccagttcaatggcgcagccccgtaagaccaggaaaaaagaaacatctggccagaaaagtacacttgtttaca

SEQ ID NO: 168994 - DNA, 217 bp, Homo sapiens
gagcagtccccaatttttaaatttaatcactcaagaacatagatcaacctgatcctgagctctagtgaggcagtaactcttcaaaaaatgtttgttctgcctttcttagtagatgactgctatggtgagaaaatcacctaaaatctgcaaatcctcaagttcccttaagtaaaaaatggccatgtttatcgttatactagttgttttctatttttcc

SEQ ID NO: 168995 - DNA, 506 bp, Homo sapiens
cccctattcccgccacagtaagcacagcactgcttgcaactagaacttcattcattaattttttacaaaagcaggtgagaaacataatagaggaaaatgtagtcctagcagcaacaacatgaaggctgaatgagtggctcccacagcacagccgaaacccacccctttaagtgacggagaagctgaggaacagctctaatccacggatcgccaggagacagcacagctggaaggacctgagccttgcccctgggcttctgccatctaaacataggaaacacttgtggctttccactaatgatgacactgaatccagtattcctcccactcctttttcaaaatagcagtgggtataaaaagtcaaagttgtgcagacaagtgagaaaaagaaacagacatccgcagaccctcaggcccattccaggcagaaccgcccgctccccacacccgctgctggggtccacactttctccttctcattcaggactcttgatcgcggggcctat

SEQ ID NO: 168996 - DNA, 199 bp, Homo sapiens
ggccatcaccagctataactaaacaatgataagaccatacctataactggcatttactattagactcaccataaactatgggcactgacactgacagctgtctctgggcacctccctcatcctgagctgacctggcaatgtccagatcactcccaagaatgtgactttaaatatcctgaccttgacaatcccaaggcct

SEQ ID NO: 168997 - DNA, 109 bp, Homo sapiens
cttggactttaaaagtcatgaccttattcccaggaaagcgctagcaactgaagagaacactcagaaagggcctcattaatcaaaaaaccttcatggaggacacctgtgg

SEQ ID NO: 168998 - DNA, 377 bp, Homo sapiens
tactctagaggatcccgacacttgaaacgtaagacagaggttgcagtgagaccagatcgtgccactgcactccagcctgggtgccagagcgagactccatctcaaaaaaaaaaattgagaatccaaagatggctgtaagctagatctttaaatacttgaaatatacttcgtaaagatcacagaaaaacactctctaaagagaggttacagaatgttcaaaagcccaggggtgggaaaatgctgggggaattcaaggaaattaaaggagactagtgtcactgtaacttagtactcaagaaataggaaaggcaggcaggagttagatcataaaggtcattatagtcttacgtttcagtgtcgggtcctctagacacccc

SEQ ID NO: 168999 - DNA, 287 bp, Homo sapiens
taggaggaactgtcttggctctgagttgggagacagcagagctaggattgcagctgatctgggtccccactccacagtctttggattatgccctgtgccctttgtaagaagagccaataagaagggctataggaaccatgtcataagagtaaccttcaaaggaataggaaggtttctcctggcgcagggaagtgttttaagaggtgagcatgagacttgacccagagtcttttaagtcccttacagtagacagtggtgggcctgtctggagctcattgctgtggatt

SEQ ID NO: 169000 - DNA, 232 bp, Homo sapiens
tccctataaaagagagagaacatagctatttcttccatctcttcccccttgacgggatgaggaagagctgggaaatagagatatgtcacccctaagcttttctctgctgctgtccctaacctcagtgccttggtacagtccagcagtggggcaccatcaacagaatttgtttttaaaaaacgtttagaaactttatttggaaataatattagtcttacatagaagttgcatt

SEQ ID NO: 169001 - DNA, 500 bp, Homo sapiens
aagactaaagattccttgaaactcgaaacctagcacctagcacagaacacaagcaagcgttcaaacattcgatcaaatataaaatacgcagtagttctaaagggtcatgcttttcactatattcactggcccctgctgtacaagtttgaaggggaaactcctccatttgcagaaaatggtaagaaaataggaaagcatttctgtttcactcacaactaagtcttttttctaaacctgtttgcctaagtttcaattttcttttatccataaaaagatggaagggaattaaatttgtagatgccaaatctggactacccgacctacttgatcccaatccaaaaaatctgttaggtctagagtaaggactgagaattagtaacattttttaaaattccttagatgattctgatgatcaacaatccattcacccaccaaatgttagggtacacactaagcagtttttattctaataaaactgatgtgtcatctgcctggctgac

SEQ ID NO: 169002 - DNA, 158 bp, Homo sapiens
ggtgaaacgcctgcttatgtctcccacccacttttctgctgtgctcttgtgctcttgtgagtctcagcactaatctctgtcaggggtgtgcatcttgaatagctgcttccagtttgtaactgacttttcacttcctttaagatgtctttctttttttc

SEQ ID NO: 169003 - DNA, 343 bp, Homo sapiens
gagaccaatatgccttgagttcgttctgtgtctaactagctgctttcagcaggggaaatacatgtgggacccttgtgctgtcagctagactgccaagcaggctgagccttctgggcaaaggaggcatgatgtgctgtcttcagtgcttggggtggctgatttacctcattgagtgccacgtcctaaaattccgtccaaattacgggaggattcttgaggcaacaggaaaactgtactgaattactcttcttgtaatgaaagcgtccttgttttccatttatcagctcctaaaaacatctactcctcaatgggacagaagcctagataaaaaattcagttgtat

SEQ ID NO: 169004 - DNA, 555 bp, Homo sapiens
ataaacctgttagtctttatctgaaggtaaatggtggtttatggatgcttctctttgggaagtgactgaccaaattcagaccctttgctgctttgtgttttctgacaggtgaggttctgaactaggttaattctctggcaaatccaagagtaggcattgtgttctctgtggtacccttaccatccttctagtcagcctcaggctctgtctcatttgctcatgcatgcacacatacactatgtgttaggaatgcctgtgtaccctggcttttaacagattacactgaaaaacacaaatctgagctgatttttacttagaaatagtttgccacaaattcagtttaagcaattaagcgttggagcttataattaaatgttgattttcccgtcttttggggaacataggtactgcttttaaaaaatgcactttgggccaggcatggtggcttgcacctgtaatcccagcattttgggaggctgaggctggtggatcacatgaggtcagcagttcgagaccagcctggccaaaaaggtgaaatcctgtctctactaaaaa

SEQ ID NO: 169005 - DNA, 950 bp, Homo sapiens
  misc_feature (744)..(744): n is a, c, g, or t
  misc_feature (749)..(749): n is a, c, g, or t
  misc_feature (753)..(754): n is a, c, g, or t
  misc_feature (758)..(758): n is a, c, g, or t
  misc_feature (762)..(762): n is a, c, g, or t
  misc_feature (765)..(765): n is a, c, g, or t
  misc_feature (772)..(772): n is a, c, g, or t
ctttctctgtgactagctggcagtgtcagctgtttgctctgagccaggctcccttgaggcacagcccatgcatcctctctcttcttcctcacagcagccctgtggtgggtgacttgcccaagatcactcaatttatcagtaatggagcttacttcatcagcttccttgcctgcttttataaattaggttctattggaatgtagccagccccgtctcaatcccctgggctaacaaaagaatcagaagaggctggccacaaaggttagccccaaaccctgcaatgccccttctgggagcttcattgaggtctagaatacagatttggaaaggcgctctatggggcactatgtaagaccatgctgccctgagcagtcactcccattgctttggggcatctgaagctctgacttccagtcagattcagtataaagaaaaatggcttggctgggcgcagtggctcatgactgtaatcccagcactttaggaggccgaggcgggcagatcatgaggtcaggagatcaagaccatcctggctaacatggtgaaacccggtctttactaaaaatacagaaaattagctgggcatggtggtgggcacctgtagtcccaactactcgggaggctgaggcaggagaatggcgtgaggcaggaggcggagcttgcagtgagccgagattgcaccactgcactccagcctgggcaccagagcgagactctctctcaaaaaaaaaaaaaacaaaaggngggcncgcnnaaanaacnccngaagggngccaagagtgtaaacagtacaccaacataacgtgtgacaagagtggtccccaatagagaagcgcgattaatacgcaaaggaacggaccgcgatgtacacagcacgcactggcaaacgtggagatgggaaacatgaggaaggacacctaccacggggggcacacaatggacaaatacca

SEQ ID NO: 169006 - DNA, 890 bp, Homo sapiens
  misc_feature (684)..(684): n is a, c, g, or t
  misc_feature (689)..(689): n is a, c, g, or t
  misc_feature (693)..(694): n is a, c, g, or t
  misc_feature (698)..(698): n is a, c, g, or t
  misc_feature (702)..(702): n is a, c, g, or t
  misc_feature (705)..(705): n is a, c, g, or t
  misc_feature (712)..(712): n is a, c, g, or t
agagagagagagagagagagagacttcctcacagcagccctgtggtgggtgacttgcccaagatcactcaatttatcagtaatggagcttacttcatcagcttccttgcctgcttttataaattaggttctattggaatgtagccagccccgtctcaatcccctgggctaacaaaagaatcagaagaggctggccacaaaggttagccccaaaccctgcaatgccccttctgggagcttcattgaggtctagaatacagatttggaaaggcgctctatggggcactatgtaagaccatgctgccctgagcagtcactcccattgctttggggcatctgaagctctgacttccagtcagattcagtataaagaaaaatggcttggctgggcgcagtggctcatgactgtaatcccagcactttaggaggccgaggcgggcagatcatgaggtcaggagatcaagaccatcctggctaacatggtgaaacccggtctttactaaaaatacagaaaattagctgggcatggtggtgggcacctgtagtcccaactactcgggaggctgaggcaggagaatggcgtgaggcaggaggcggagcttgcagtgagccgagattgcaccactgcactccagcctgggcaccagagcgagactctctctcaaaaaaaaaaaaaacaaaaggngggcncgcnnaaanaacnccngaagggngccaagagtgtaaacagtacaccaacataacgtgtgacaagagtggtccccaatagagaagcgcgattaatacgcaaaggaacggaccgcgatgtacacagcacgcactggcaaacgtggagatgggaaacatgaggaaggacacctaccacggggggcacacaatggacaaatacca

SEQ ID NO: 169007 - DNA, 201 bp, Homo sapiens
cctataccatttccaaattcttacacacatcacccttctcattagttctgcctgttttgcacttcaatacaatcaggaatatcctgtgaatttttagtaaactgcacttcatttatatttcagggaaagagaacactctcaaaaggtcctctattaaaagaggaaggaaatgagagaaccagggccaggaaacacagggcc

SEQ ID NO: 169008 - DNA, 500 bp, Homo sapiens
tgtctaacatcagcctggagaacaatgggtattccacagaatgtaaatgattgagggaataatgaaggagtgagccagttagtcagtgatttgtgtaacagagaggggaaagaagatcaaagttggcaacatgttatgatcatttaagaaaactatcttctcaactagtacagagaccagattaaaacatgaacaaagaagaaactattccttcctctactttctcttcctccttctcccagtgtacttatattccaaattggttttggctggagattctcggtttaggatcactagggaaatggaagacgctgcctaaggtaacgtgagagttaagcacgttctccttttgtctgttgtgaccctgactgtctaacaaacaaacgtgacttctgaagcctgatccgaaacaatcaggagctgagcgagaaaacaaaacagaggtctgaggcacagctcctgggcaggctctcccgcatcctgcagtaatgttagagata

SEQ ID NO: 169009 - DNA, 107 bp, Homo sapiens
cgacggaggactcaccataggcaagaatggggagttaataagaaggcaagagaagtagatgttagattataaagaaccttaaatccaagtgaaatgcttgaacttta

SEQ ID NO: 169010 - DNA, 568 bp, Homo sapiens
caactcatcaggaagcatgcagtgtcaagttttattagttgtgcctactttgaccatttgattaaagtggtgctgccagagagctccatagtaaaggtacatcttttcctttgcagtgccactttacctttcacgtgatatatgcaataagaacataatattaaaaatcatgtagattataactgctgttttaacatttttctaaaataaaacatacaattttagttcaggaaatgttaatcattatattgtcattaatcgccattgcattttctctttttttcaacagattattactatttttatttttgagatggagtcttattgtgttgttcaggctggactacaatggcacaatcatagctcactacttgggcttaagctatcttcccacctcagcctcctaagtagctagtactacaggtgtgtgccaccatgcccagctgttttcgtttgttctttttttttgtagagatgtagtcttcctatgttgcccaggctggtctttttagttttaaaaaaatcattttagcctagctttattgaatgcttactgtgtaccaggtgc

SEQ ID NO: 169011 - DNA, 362 bp, Homo sapiens
ttataaagttgttgtgaagattaaatgaaataatcaccttacataagctagttaatgtaggtgaattgccaagcataatgcctggtgaaagactgtgtgtgtgtgtgtgtgtgtacgcgcgagggtacattgctcacgttttctctccattcccacgaaagtattaacccagaagtatacaacttcacgcttcagttaccaccatcctcctcattacttttctggcctaaactctcttccagtgtagtctgttctctttgcccaactctcatatgaatcaactttaaagcactcatgcttattcccatcttctcctgactctccttacaggtttaatttgccttactcattttgctcttaat

SEQ ID NO: 169012 - DNA, 427 bp, Homo sapiens
cctgcagggctctttccactgcttcttctacttttatattttgcttagctcactaaatccagttcggctctaggtaaagctaaatccttctcccatgatctggattttcaggttccccagtgaggatatgtgtttggaggcagacttttccctctctcacacttttggaactgcagtggccagctgcttctttcaaagggtctgtgaattctttcagttttcctggtacgctcctgcagtgagtggttcttggagcaaaagttcacggtgtgagtctccacacgctgttctgtctgtccaagtgggagttccacattagtcctgtctcctatccgtcagattttaacgcttttgctcacttttgctttacatttgtgtggaatatcttttttcacccctttaccttgggtttattattattattatt

SEQ ID NO: 169013 - DNA, 400 bp, Homo sapiens
ggatggtgggaatgggccagaaagacagctatgttggggatgaggctcagagcatgcgagggatcctaactctcaaactaccccattgcacactgcatcaccaccaactgggatgacatggagaagatctggcaccactccttctacatatgagctgcgtgttgcaccttaagagcaccccaccctgctcacagaggctcccctaaattccatggccaacaggaagaggggtggcctgacctgtggatgccgaggaaacgtcggtgacaggaagacgggtggtgtcatctgtggtagctgaggaaaggccggtgacaggaagaggggtggcgtgacctgtggatactgaggaattgtcggtgacaggaagaggggtggcgtgaccggtggatgctgagga

SEQ ID NO: 169014 - DNA, 392 bp, Homo sapiens
tgagactacagcccaataaagcacatcccctaacctcaagatgtctacggtccgcggctgaaattctaaattatgggaaaaagaatcacgtcaaaacttaaactgtgcctgccagggccccacctccctcaccacgagggtctaatgatcagggtccacattctgtcccacgtgttacggacagttcaagggatcatttgtctcaaattcatgaaaaattctgccacaaagatcaatggataaaggacagttaattcttaaaggacactaagtatgtgacagacattactcacgcacttcattctcacaaccaccttccaaggcaagtgtccttagtccctcctagacactgagaagcagcggagcagagaccacgctgggcacacagtggg

SEQ ID NO: 169015 - DNA, 966 bp, Homo sapiens
tccctccagcaaagactgagtctagctgaaaaataagtgagttcatggaagaattcagaccaggaaatcatagggttttttgtttgtgtgtttttgttttcagttatcttggtgtttcacaagaattcatttgatattctgaatgaattggaaagttattcattatagtgactgctccactttaaatatggggacacatcccaaagagaagcattacaaacagaaatctgcccaacaaggatcatacattataaggatcttatattataataccatatttgtcctttccaaatcctgatgctgtgattacttgaggctaaatgggaacagcagaaagtgtttaaagatgggtcctactgggagtggtagctcacacttgtaatcccagcactttgggaggatgaggctggaggattgcttgagccctggagttccagacctcaagccagggcaacatagcgaaactccatctctacataaagtgaaaaaattagctgggtgtggtggtgtacacacgtggtcccagctacgtaggaggccaaggcgggaggatcgctcaaaccttaggaggttgaggctgcagtgagccatgttcacatcactgcacttcagcctgggtgacagagagcaagactctgtctcaaaataactaactaaataaataaaaataaagatgggtctcagggttccacaggggctgccatgacccatgacccatgactggaggagggggcttcttaggtcaggtactctgatgtaattcaaagaattacagaggcctcatccagttcattcagacctcacaatgaagctgcagaagtggccatttgatcagggagaactgtcggagcgtacaagacggtgaactgaatgaacgctgaggtttgactgcttattccttgatgaaccctgtgagtctttgcttccctgtgccttggtctgaacgtgggagagaaagaggtagcc

SEQ ID NO: 169016 - DNA, 560 bp, Homo sapiens
agtgccctgggttgaaggagtcttggtgagttaaacacccattattgtctttggctgtaaatgaactcaaggtcactaggaagtgagtggaaagtcagatgaactctgtctctcagaggcaggccaagggcaaagaaggcacagaagccacttcaaaactttcaggccttttgggaggaaagggtgggtatggaatgaggctgactttcaaagatgaagctgtgacagatcagaaatctgtatttttgagccagactatgtctgtgtctaggtttgcctttgtctttttgttgtcagaatttcattaaactaattattcattcatgtatgagtgtcttctacagccaggaactctttagacaagattctggccctgatgacacttacgttttagttgccaatacagataataaatataagaagtaaacaaaggccgggcatgctggctcacacctgtaatcccagcactttaggaggctgaggaggtcagatcatttgaggtcaggagttcaagaccagcctggccagtatggtgaaatcctgtctttactaaaaataca

SEQ ID NO: 169017 - DNA, 342 bp, Homo sapiens
tttttttcctctatatccttagtaaccggatctcctcgaattccgtgcacacgaagactcaggggagggggccgagtggacttcaccccgcatgagacgtctggcaaaataagaaggctctcgcaaaacctaacaaccaaatatgcaaagccccaaatgaaaaccaccacctcctcgaacctcagaggtctgggggcgtccggctggaactggggtttaaaaaaagaaaatgtttacaaagtataacaagatgtttgatgggtggaaaaatgtatccacgagttacatccccccgtttccttgcaaagccccgctggtcttcctctccttttcttctgccaa

SEQ ID NO: 169018 - DNA, 165 bp, Homo sapiens
agcacagtagttttcctccttaaaaacattgaaatttaacttttcactgtatgatcttttagttacttataacaaatttttggtttcccagggaaaatatttttttctgcttttacattttatagtcattcaacatagaatccaaaggagctctgaaaattcgaa

SEQ ID NO: 169019 - DNA, 440 bp, Homo sapiens
cagaaaccctcctcccctcccagcctcaggtgcctgcttcagaaaatgaagtagtaagtctgctggcctccgccatcttagtaaagtaacagtcccatgaaacaaagatgcagtcgggcactcactggagagttctgggcctctgcctcttatcagttggcgtttgggggcaagatggtaatgaagaaatgggtggtattacacagacaccatataaagtctccatctctggaaccacagtaatattgacatgccctcagtatcctggatctgaaatactatggcaacacaatgataaaaacataggcggtgatgaggatgataaaaacataggcagtgatgagggatcacctgtcactgaaggaattttcagaattggagcaaagtggttattatgtctgctaccccagaggaagcaaaccagaagatgcggaactttt

SEQ ID NO: 169020 - DNA, 613 bp, Homo sapiens
cagacatttctatatgctgctgatatgaatgcaaattggtataacctttctggaaaacacattggaaatgtataatcaagaggcttaccttcagtgattccttgactaggaatctagcctgaggaaataatagagagatggtccaatatttgtttttaagttactgattccctaattaaatttagtaacaaaaacttaaatacattgaaatttgcacaacaatgtgtgcaagggttaaatcagttgtggtttcattgtaaaatggaaatattaggcatctattaaaaataacatttttgaaaaatttagtggcatgaaaatatgattacaacataattgctgaatgaaaaaccgtaaggcacaaaatagtatgtaccatatggccagaaatttataaaataagccaactcaaaccaaatatttttctttaggaaaaaaaaatgaaaacggcctttgacaaatgtcttcttgattcttacacttagacaattacaatggtttcaaaggaaaataaaattcaaattaatataaatttttataaagctgcttcctttgccattgttagttactgtataaggcacttcaagagtctttttagacctgtttccttgaa

SEQ ID NO: 169021 - DNA, 139 bp, Homo sapiens
ccttctttgccagccaatgcaagttagtggattttctactctaaatattgcctgaagtagtagaaataaagtatccagaaatcagaactaacagcagccggatttacacacctcagttataacagcttatacacctcag

SEQ ID NO: 169022 - DNA, 262 bp, Homo sapiens
atccgccgatgctgcctacccgcttaaggtctggagatgcaatgtggaaatcagagccacatcccccctggccatgcctcactctctgcatacatgctgcatacttaggggtcccaacaccttttgtttctcctggaaaaaaaatgtgcagcatcccattcattgggccagagtctcacccaggataccagcagaatgggaaagcaagccccaaaaaacacacagaacagcacagccatgaaggggcaggaaggcatttcta

SEQ ID NO: 169023 - DNA, 480 bp, Homo sapiens
agtgctgagattacaggcatgagccactgtgcccggccccagcagaggagttttctacactgaggagaggattcttggagagctttagtcattacccaggaccccacaactaggaaatggaagagccaggttcaaacacaggctgtgtggccccaacgtgaattgtttaaaagctgaattatactttagtagaaataatacagtcagctgtcacctggcatgtcttcaactagaattctctatgaattgttgtgttactggactgccaagacaaatcttgtttataatacaaatcttcaagaaccgtcttaaccatccgaagattaaacagtgttcattgtggtttattaggtatactttatgatgttgagaaaaatgtttgttcataaatcaccaatggagtgactttttaatcctttttttgaggcataattaatgtttggtgacttttttaatgtgaatatttgaataccacatttc

SEQ ID NO: 169024 - DNA, 132 bp, Homo sapiens
tgatgctccccacttgtaatccagccagcaagccctgtctctccattcccaaggctgtgttcacagacagcattgacgaaaaccagccagttacccccaaacccctgctgcacagtatctgacagatatcag

SEQ ID NO: 169025 - DNA, 883 bp, Homo sapiens
  misc_feature (872)..(872): n is a, c, g, or t
ctaaacaaagccagtctgaagactgggagaagtgacagatcctaatacaaagccacaaggtgcatgaaaaaacaaggaaacatggctcaatcaaaggaataaactaaatctccagaaactggatctacaaagaggtatgtggacaacttgaaagagaattcaaaataattgtcataaagatgcccactgagctcaaagaaataacaaacgaacagaataaagtattaagaaagatacagaaaatataaaaaagaagttttggagctgaaaaagaaaataaactgcaaaactcactagagaagtttaatggcagacttgatattcagaagaaaacatcagcaaacttgaatatgagtcatgtgaaattatctgctagaggctcaaaatgaaaaaagaatgacaaagaataaagaaaacctaagggacatacaaggcaccatcaaatggaccaatatttgcattattgttgtttcagaaggggaagagagagagaatggggcagaaacattacttaataaaataatggctgaaaacttcccaaatgtaaggatggaaatggacatctagatttgagaaactctgcacgctccaactaagatgaattcaaagaaatacacaccaagcaacatcataatcaaattgtcaaaagtcaaagaaacattgaagcacagaagaaagcactgtgtgacagagataaacagatttcagaagaactcagaagaagatggtggttttaactggaaaactgcgtgattgttcgaaattctgttggaaatcccaaaaagggttaaagcaaaaaggaagaaagggaagaatataagggaaagaggggtaaaaaagggggaaggggggtgagtgaagtgaaacggttngaaataagaag

SEQ ID NO: 169026 - DNA, 494 bp, Homo sapiens
tggagcagcaggaagcactgttatgatgcaggagctcgcgaggcctcacccaggcccatgctccagatggtgtaagcctgtctggaggctctgggagggcctcctaatcatcagcatcacggctgtaagaacaaggaccaggtctcaggtcccaactcacacctggtgccctcaccacccgacagaagcctcctctggggccttccacggcactggacaaaggaaccatgatgagtgatttctgatatttaggtgaaatcagtttggaagatgtgtataacatttcagaaaaacatcggtcaggggcagagaaatagccaggggccaaaattgctacttatttaatttcttttagacagggtcttgctctgtcactcaggctggagtgcggtggtactaacatggctcacttcagccttaacctcttgagctggagtgatcctcccactgcaatctcctgggtagttggaactacaggtgtgcgccgccacgcc

SEQ ID NO: 169027 - DNA, 223 bp, Homo sapiens
acaactaatatgcaaaatgcaaactggctatcactaccattctgataatggaattagctgtcctacatacctgatgacctaatgcttaacctaatcttcctctttcccactttgatttggaaacttgttacaagagagttctttacctcaaagtcttaaggaattcaagacaagactagagtatgttaagataccacaaaaaaaaaaatatatatatatatag

SEQ ID NO: 169028 - DNA, 523 bp, Homo sapiens
tcaagatcattagtcattggggaaatgcaaatcaaaaccacaatgaaatacagcttcatacccactagaaatgggtataattatacaactatggctactaaaaaggatgagatggggaaatagcaagtgttggtgaagatgtcgagaaattcaaacctttgtacattcctggtgggaacgtaaaatggttcagcctctaaggaaaacaatttgttaattcctcagtaaattacatatagaattaccatataacccagcaatgtcacttctaagtatatatcccaaagaattggcaacaggtattttaacaaatacttgtacacgaattaatgttcatagcagccctatttgcaatagccaaaaggaggtggaaacatcccaagtgtccatcaattgatgagtgaaaaaaaccaaaatgtggcatatttattcaatagaatattattcagccataaaaaggaatgaagtactgatacactctacaacaaggattaacctcaaaggcaaataaaatgttcacttc

SEQ ID NO: 169029 - DNA, 319 bp, Homo sapiens
caattattcagacaacaagcatttgctatgcatttatggagctaatactgcaagctagacatactgtttttgcaatttctgagtaaagagaaaacagaaaaaagattcactttccacactcaaaagagctcatccactctggcaattgtattaaagaacggtaaaggttacagacttcagggtgagaaagatccgggtacaaatgccaactccaacttagccttggcatatccattaacctctctgagcctcaagttcctcaggaataaagtgggataataagatgacccacttttcggcactgctctgaggcctaacg

SEQ ID NO: 169030 - DNA, 359 bp, Homo sapiens
gatttttattacactcaaatggataccctgattgattatcagtcttacaaatgtttagcacatttctcacttctctaataatcagaataatctaattttcaatgtcatttaatgtactctattcaaggttataatagatcatatttctaataaaacacagcaattatgtaatgaataatacaggaggaccagcattcagattcccttgattttaaggcagtgccaagggaaggtcttagacaaacccatttctttaaatgtgatgcacattccaagtctttgcctgcattatagaggatgtttttttcctgctgatgatctgaatggaactttgccagaaaacttgacctcccccgaca

SEQ ID NO: 169031 - DNA, 386 bp, Homo sapiens
gaaattttattctacaaatactgttattaacataactttgcaaaactttttaaagatactaggtataatagatactatttattattgttcatctgttaatgttcatccagaatggtttttccagatcatacacttttgcttatggaaggacatatttttgtctaggttgccttcagttttctagcctaactttcttgaaactgtctgtagtctttgcctaggtttttctattttttttttttagaaataaaagttagatgagaggttttaatacagttttcttcctgcattaggcttttgttattaagccacacgcaaacagctatgagattttaaagcccatcagagataccacaccccaataccgcaattcctcatccggggag

SEQ ID NO: 169032 - DNA, 307 bp, Homo sapiens
agccttcccatccccccatgctacccctcccagttgtctggcacacgccatgcactcaaggcaagaaaccaacctgacctcttttaacctccccctcccaaaagtaaatcttgcccgctgagcaagtccattttaatgctaacctcccatccttgctagaaggaaagaggagggaaggcagataatcaggccactaacactgagtgtgaatattaggactttaaacctgttgaaggtaagacacaagctcttagtacaaaaagaaggccgacagagggcctgaccagaagcctgatttccaggctgc

SEQ ID NO: 169033 - DNA, 202 bp, Homo sapiens
atccagttcaacttcgtaaactctcatttttccaaaatccagaaaaacagcatagctcatttcttttcctgttcctgatattttttagtattagaagctaatgaaccgatgtaaccttttatcatctgaattcagcagtgaggcgtgtgtaaaccagtcactggtcataagcatctttagcttttttgaccacctctttgtt

SEQ ID NO: 169034 - DNA, 186 bp, Homo sapiens
tgtgcagtcactagattagtcttcttacaacacaaatccgatgattactttgccttaaaacttttcaatggctcaccattgcctataggataaagtttaaatttcttcatacatcatataaatgcctttacaatcaagtccttttctatccatacaaatttatctgcttacactctgaacttgaat

SEQ ID NO: 169035 - DNA, 534 bp, Homo sapiens
tagtcttaagttctcctagtttatgtaatgtgtcccagcaaagtattcctaaaagttgtatggacatcaaattttcaattcaacaaatactatataaaaagtcaccattataaaaaacataaaacataaatgatgacttagaaatggcccgtgtcttaagggagtcactatctaatgggacaaagacagacacatttcaaaagtaccacgacataaggtatacggggttaaattttttaaggataacatacaaaacacaaaaagaaaacaggaaagaagttcagtttcaactagcagtacaatctgtgaaaacttcatggaagagttaggatctggggatctgagttgaaccatgggagacgaataataagcccaagacaggtcaaaatgggaaagactttaaggcaaaggagaggctttagcaaaggtacaaaggcagataaacaaagactgtggagaacacctaatagttcagtagtccaatgtggttgaagcagtaacgatgtacattcaggagacacggttcaaaattta

SEQ ID NO: 169036 - DNA, 293 bp, Homo sapiens
agaaaacaaaaaaaaaaaatccagactaaattacaagggacttcaaagagtgtagcaattatgtcttccccttttatagagaagggggtgtgacattcctaaagccatgtcatccgactgtccactgctatgccctatttctgttgcccagaagggaccctcctgtttttgagactaagggctctgaaggaaatggaagccgggcacaccctgtgttctcaatgaacacaggctgactagactttggaatgggtaccaagcagagttcttgttgtttggtttaggggttttta

SEQ ID NO: 169037 - DNA, 392 bp, Homo sapiens
cccaaacacctcactttacagtcagagaaactgaggcccagagaagtaaaatgagttgctcaaggtctcagagagcaagaaatagagatgggacttgagcacctagatctctggtattgctgtcctgtagttcatggagctggcagatggatacatctgtgacctgggatgatggagagactgctggacccttcagaggatctcatctcaaggtggggtttatgtgtaaatgatatctgtgtgtttcattttcctttcataaactaatttaaaaatccttttggtatcaaattttaagccaaaaagtagtgagggggaacatgggtaggaatagcttacagcttgcctaacaaggttgttgactgcataagagtcaggagtgttggcgataa

SEQ ID NO: 169038 - DNA, 252 bp, Homo sapiens
cctacaggtagcacaaacataatagaaatgacaaggaagaagagaatttctagaaataatgatcaagagcatcggggatatttagcactaaaactagtgatccaagggacatgctggtaggaggtcatggggaaccatggagaatgtcagactgagatgggcagggatgagggcagagcaggagcagcacccaagatgtctacctcttaattccatcaaggagacaagagggactcgacagagccatcatgg

SEQ ID NO: 169039 - DNA, 242 bp, Homo sapiens
ggatttcccacattccttacactgataaggtctctctcctgtatgaattctctcgtgttttctgaggctggagctccggctgaaatctttcccgcattccctgcactcgtagggcctctttccggtgtggatcttttggtgttgcgtgagggctgagctctggcggaaggccttcccacactcccggcactcgtagggcttctccccggtgtggatgatctggtgcctgagcaggtgggagc

SEQ ID NO: 169040 - DNA, 489 bp, Homo sapiens
cgaaggaaatcctgtcatgtgtgacaacgtggatgaacccaaagtcattatgttaagtgaaacgacccaggcacagaaagacagatactgcatgtcactcatatgtggatctaaaactgtcacaactcacagaaacagagtaggacagtggttgccaggggctgggggaatgcagactgtggcgatgctgattaaaggtgtaacttcccgtcacaaggtgaagttctgaaggtctgataaacagcatggtggctagagttaatgttatagagcatggtggccagagttaacattatacagcatggtggctacagttaaaatcatacagtacggtggctatcattaatataacttgaaatttgcgaagagagtagaccttaggtgtctgtatctccaaaaaaaaaggataattgtatgaggtgatagatgtgtattaagttgattgtgtcatcagttcacaaaataaatcatcacgttgtacaccttaaa

SEQ ID NO: 169041 - DNA, 288 bp, Homo sapiens
atatcatcctccctctgttgctgctaatgttccccgtaaactaaattcagccccggtggtggagctaaggaaggtggtgagggcgcttccggcatcccttgcacggtcaggaagcccctgatctgtgctttgaacgcagagcatactgggttcagcatctacctagtcccggccatttatctggcaaggcggtatcacctaacctggctttgacccaaaaagaatgacattcttgtccaagccccagcctggacattgacttagtagcctcaaatgaggcctgggaca

SEQ ID NO: 169042 - DNA, 558 bp, Homo sapiens
agcttctcaaactacccatggcaggcacttagtcaatgaacagttgaacagttgaaagtccatcttacagagaggaaactgaggctcagaatggggcagtcaccggtccaaagccacacagtgggagagaagcagagcaaggcttcccctcaggactgcatcccctgaaaggtggccccctcgctgcaccatggggtgccaagtccgggagggggtgctcagggaccgcccaggactgtgcagatccgggctgagggcagggagggcccctgttcagtgaccgttccgtgccccatcctgatgggtgttcaccagcccaggggcaccctagagggcagaggggtgacctcacctgctcagagtcaccaggctgtgattccaggtcaggagggacagacagaagggccctgcagtcagccctgtgctgtctggggcctggagcagagtcctatctgcctgcacctcccggggtggcccagcgcagggtgtgtggcagcccctggagcccccaaacccagtttccatcctggctctgccaccttctgctgtgtggcctcg

SEQ ID NO: 169043 - DNA, 124 bp, Homo sapiens
acatgcagagccatttatattctggctctaactaacctttctagtctcatctccaagcatttcccacaaggtatgctattctcatgtttttcatggccgtgcctctgactatacaattttctct

SEQ ID NO: 169044 - DNA, 339 bp, Homo sapiens
tacaaatgaaaataatcgcactaagaaaccaagaaagcctatttttttgccattatatgtaaaatgctaattccataaattatctggaataaatgtacctacttgttaatataacgtttcttctaaacttttttttggcattaatggtaaggggaaagaaaaataaattgtcttttggaaagacactcagtaagttataagtgtcttttaaacagttcctctgtagaattaatcttttaaggtgggaattcagaatagtaccaaggtctaattattctgttgctcttaattagaaaatataatggtctgtgaggcactacaaattgaatctggaatgcg

SEQ ID NO: 169045 - DNA, 331 bp, Homo sapiens
acgctaaatgaactaagccagtcacaaaaagacaaatactgtaagacgacatgtgtatgaggtacccagagcagtcaaatacaaagggacagaaagtagaatggtggctgccaggtgatggcagtggtgggtggagaggggtgggggaaatgaagagttattgttcacagggtggagtttccactttgcaaaatgaaaaagttctgaggattgatgataacggttgtacaacaatgtcaatgaacttaatgccactgaacttgtaagttcacttaaagtacacttcacttaagtacaatttgtaagttgtacacttaaaaatggttataat

SEQ ID NO: 169046 - DNA, 224 bp, Homo sapiens
acagctaagcaagtaaccaagtcaggattcaaggccagacattcaaacttgagtatgctttcttaactgctgtggggtactgctgggacaggtagcttaagttctaggttcttctgtttttcttggttgtaaaatgggcataatcatattttactcagaaactaatggctcaggccgtgtgcggtggctcacacctgtaatcccaacactttgggaggccgagg

SEQ ID NO: 169047 - DNA, 112 bp, Homo sapiens
accaagccaacatgagcttccagcaaaagagcccagtgattgggaacaaattcaaaacagctttatttcattgacagacaggacctttttgttaaactgtggtttaaagacc

SEQ ID NO: 169048 - DNA, 182 bp, Homo sapiens
tccccgtacgcccaaataaaaggcgaattcaaaagggataatgttaaaaacttagtagcagtgagagaaggcaaccaatctcaagttccatatagtatacttagacagaaatgaagtaagataaaaaaagcagagctctggtgggagggagagtgggcttgtgtggattgggcgtacgggga

SEQ ID NO: 169049 - DNA, 284 bp, Homo sapiens
caggatgggtagcaccttctccgcaaagtgcaggggcgctctgcctcctccctctcgttgacctcaaagcaggtccaatagtccttctccctgatgcccacgttccggcgatccaggatctccagggtgagctcctcagcagtcatgggatcctgaggaccttaagccagattctgcccatccttcactcagaactgtccagtggcttcagtctcagagtagagacccaaattgtcatcacagcccacaaggcactctctctgtccctgcccccacctcctcca

SEQ ID NO: 169050 - DNA, 657 bp, Homo sapiens
ctcgagtgatccacctgcctcagcctcccaaagttctggaattacaggtgtgagccacctcgtgccagctgcttcttgctttctgaaattaaaatttaggccgggcacggtggctcacgcctgtaatcctagcactttgggaggccgaggcgggtggatcacctgaggtaaggagttcgagaccagcctggccaacgtggccaaaccgcgtctctactaaaaatacaaaattatagctgggattacaggcacgcaccaccacacccagctaacttttgtatttttagtagagagaggtttcaccatgttgaccaggctggtctcatcctgacctcaggcgatctacccacctcagccttcaaaagtgctgggattacaggcgtgacctactgcgcccagcctcgacctttcaaacatagcctaatctgaccacttctccccattcccattgtccccagcccatactagacgccatcttcttccacctggaccactacagtgacctcctcattgcgttcctagtgtctcccttcaatctcgtttattgtccatgcagcaggcagagagaatggcttgagcccgggaggcggaggtggcagtgagtggagatcatgccactgtactccagccggggcgacaagagtgagactccgtctt

SEQ ID NO: 169051 - DNA, 203 bp, Homo sapiens
ggccggcactctagtcaggagggagagtgtgatgaattgatgagagtggctacagacagtaagaggtgggtggattctagatatacagagaaaatacaaaaacacttagaagaagggagatgggttaggattatatgttacagagagcctgtaatctttaaggttgagtttcatcataacgaatttgttttgtcactgttttt

SEQ ID NO: 169052 - DNA, 838 bp, Homo sapiens
gggagtagtaacagagagataagagtcattagtctcacagaagcagaaattaaaatagcaatgagagctgagtaatgcctagtgttggtgggaatggtgatggtgggggtgctggaattgagtaaaagttttgtttagggagaactaatagttttagctatgcatgaagaaagactcttgaaaattctgtaatatataagaaaagtgtggtatacagctgatcttggttatgaaaatcccactagctggccgagtgaggtggctcatacctgtaatcccacactttgaaggctgagatgggaagatggcttgaggccaggagtttgtgaccagcctgggaaacacagtgagaccccatctctacaaaaaaaatacagtaattagctgagcatggtggtgcacacctgaagacccaactacttgagaggctgaggctggaggatcgcttgagcccaggaattccaggccagagcaagctatgattgtgccactgcactccagcctgggcaacagagtgagaccttgtctcaaaaaatgtacagaaataaaaaaagaaatttttaaaagaaaatcccactagaaaacacatttgacaagtaatttttatcaagtcactaaaccttcttgaaatagggcaagatcggtattattaaagaggaagagcttcccagttttgctctacatgtgggagaatgtggtggccaccaacatacttttattcaaacagtacactgggaagcaaaaagtttttgtaacacagacaagaaaatacacaacatcttatttattttagagatgtaatttcagcaaacacactcaataaaacacataatctcct

SEQ ID NO: 169053 - DNA, 835 bp, Homo sapiens
ctctggggagacgagggggaggaagtcaaagcaggggtagcatgcggtgtccatgtggcaggagatactgaagtatgtgtagttcaggaagtggtgatggtgggggtgctggaattgagtaaaagttttgtttagggagaactaatagttttagctatgcatgaagaaagactcttgaaaattctgtaatatataagaaaagtgtggtatacagctgatcttggttatgaaaatcccactagctggccgagtgaggtggctcatacctgtaatcccacactttgaaggctgagatgggaagatggcttgaggccaggagtttgtgaccagcctgggaaacacagtgagaccccatctctacaaaaaaaatacagtaattagctgagcatggtggtgcacacctgaagacccaactacttgagaggctgaggctggaggatcgcttgagcccaggaattccaggccagagcaagctatgattgtgccactgcactccagcctgggcaacagagtgagaccttgtctcaaaaaatgtacagaaataaaaaaagaaatttttaaaagaaaatcccactagaaaacacatttgacaagtaatttttatcaagtcactaaaccttcttgaaatagggcaagatcggtattattaaagaggaagagcttcccagttttgctctacatgtgggagaatgtggtggccaccaacatacttttattcaaacagtacactgggaagcaaaaagtttttgtaacacagacaagaaaatacacaacatcttatttattttagagatgtaatttcagcaaacacactcaataaaacacataatctcct

SEQ ID NO: 169054 - DNA, 403 bp, Homo sapiens
tggaaggggggagccttgtgggaggagcgagcactcagcaggagccacggctcagatctgactttcaaggccttgcctggagggagccggcagagtcaacatgtgacccctccccgctcccccagttgcctgctggagcatcttcttggctgcctggggcagaagctggaggccgagggagcctgttgatatgatccatcagtggacctggaggggcaaatggaagacattcagcaaaatcatttaccagcagcagaagggaaaaaaagcagtgatggtcacgatggtcccaatgaagatgctcttcgaagtgcagcaaacacccacattcatttaaagtggggctttactccacatgcctagattgtcctgagaagcagcaggaaaaatttggaaatggaag

SEQ ID NO: 169055 - DNA, 517 bp, Homo sapiens
cgaggggcccggggcgttccccgcggggcggggcgctcctgactgcggagcgccgtgggcaggggcgcaggtgagcagagcgagcggagctggccgcggccgtcctggcgcctccgccctcccggcgcccgcactgcgctgcaccccggcccggggggcgggcgagggctctgccccaccgcccgggggctgccaaggggagttggggcggcgacgtgggcgtcccgggactgtgcgcccgcacccgccccgacagggtgcgctgaggcgccggggccgccactggctgcgggcgctgggcgcggcagccgcgggagccgcaggtggttcccgggccggcccttttctcctccccctttcctttctttcgcctcccctccctctcgcccggtgtcggcggcacttccctcgcttcctcctccctctccaatccggagggagggaaggagcagccggcgctttcctgcccgcctgcaaacttcagcgggactcgcggctcccctcgccgccgcggccg

SEQ ID NO: 169056 - DNA, 439 bp, Homo sapiens
tacattaaagccagcttgtgcttacctccattctccattggactgcagatgggtacctggtctttgcatacagaaggtacccagtgaatgtccaatgaataagccacatactaactgtcttggagtgggacatcacaggagacaccctctccaaggcccagggagaggaacaggcttggtcaatgtcccttatagggtcaggggccaagttggggctgggcttggttcctggtctctcaggcaccattcctctgcctgccgagccatccctggaagtaagctggaggctggtctcagtggcacccctgccagctgccactgtactcctgtggatggacttaccaaggcccttccggagctcagaactgaagagactgagcaggagaaagggcagagggccagttctcaggaagcctttcaggaggagagttttggcctc

SEQ ID NO: 169057 - DNA, 482 bp, Homo sapiens
aaaagctgggaacccaccccctttcgattggcatctggagtgggagcagtcttatgggacagggcccttaacaagtgaggtctgtgctaactccagacagtactggaattgattgcatcgtaggacacccagttgtctgcagagaattggagaattgtgggaaaaaactccatgaatctggtgtcagatgtgaagtattgacaatggcgtaagttcagaaagaaaaactgatttttccccttaatctacgaaccagcaccttgctccaactctcacactcacatcctaaagtatggggctcagggagcttctagattgttgaacacaaccacatgctgggagtgtggtgcaccctaactccacagggcagaggctcctgtgcttggacccatctggacctcactgtgagcttggatgagtcacagattctcttgagtctcaagttctctatttgtaaaatgaagtgatggaattgatttctt

SEQ ID NO: 169058 - DNA, 177 bp, Homo sapiens
agataattgaggaaaataaaaacagacttattataaacaactaagaaagaccatctcttgctcacttgactgttcttgattcttgcaaaattctcattctaccagagcatctgtagtgtaatgagtatcttgactccagggtcaagtcatagcatccccattcagggttaaattttt

SEQ ID NO: 169059 - DNA, 732 bp, Homo sapiens
atgaggcccagagaagggcagtcttaggatgagaaccacatgggccagagccaggagggagccacacgtccaggaagtgacggccagggtgatgcagactctccaggtcatgatgacggagtatcggagagggtggcagatggccacgtaacgatcgtaggacatcagcaccagcaggagacattcgctgtgtccaaaactcaaacagagaaaggtctgcgtcatgcagccagcaaaggagatgggcttggctggatgcaggaggttcgccagcatctggggcaccgtgttgcgggtgtaggcgatgtcgacgacagccaggtgtgagaggaagaagtacatgggggtgtggagtctggagtccagtgagatgagccccaggatggccccgttccccagcagggtgaagatatagaacagggagaagagcccaaagaggagcatctgaatccttgggcccaggagaaatcccagtaggaggaactctgtgaccattgtctgattttcccccatttccctgtgaaaaagaaaaagatcacttaggaccagattgtcaaaaaacacctagacattattttatgaatttagtcatttttaaaagataaacttttaacattagtgattgagctacacattaagttaattactgattgtaagtatccagtgttatagaagggattgtgtcaccagtgataggatacatagagccattgacacatcatgggaagaaag

SEQ ID NO: 169060 - DNA, 466 bp, Homo sapiens
ctgtcctagcctattctttttttttttttgagacagagtcttgctctgtcacccaggctggagtgtggtggcatgatcttggctcactgcaacctccacctcctgtgttcaagtgattctcctgcctcagcctcccaagtagctgagattaggtgcgcaccaccatgcctggctaattttgtatttttagtagagacggggtttcaccatgctggccaggctggtctccaactcctgacatcaagtgatccacccgcctcagcctcccaaagttctgggattacaggcatgagccactgctcccgggccctgtcctgcctattcttgcttcctcttctttattcttcaaaggtgtttccttcgaatacatctcttgtcatctaatcctaagttgatgcctgcttcctggagatcttgagctaccataactgtgaagtttttttttaatcaccactttattgagata

SEQ ID NO: 169061 - DNA, 1509 bp, Homo sapiens
aacaacagtacagacgtttgggacctgtcagctggccccctttgtttttaaaacttacttcatttggagatgacagcacaatctgcccacatccacccttgatggctcccgcaccgacccttgccaaacttccctatgtgtctcttgggctggaatagagaagcttgggggaaaggggctgatcaggactggtgagagggccccccaggagagggcagaggtggttgtccccaccccttctgcagcagttgccccaggcacctgttcgacattggtgtctgagacagtgttgctactgctgagggaacatcaccctggctcacctccatctttcaaaatatggcaagctgcacaaatcgcggaggcctcccagagaaacacagctcctccaaggtgtcaagccacgcccaaatgatccaaaaagcagttgattttttagaccttttaatcggccacctgagcaaattctcaccagttatgatagttttccagtttagtcccttgggttttctagttagacagtcatctgcagataatgttcaatttttgtcctttgccccctccctcattctaccaagtggcacaggaaattggttggtttggtgatgctgtttagctttaatagaaacccccagcccctggaggggctggattcctttgggagcagtgttccattccattaagcttccttgcagggtggggcccactccatgaagacagcagtcatgccttaagaagcagagctaccttacgtgcctgcccaggctgttcctgcctaaatctccagccctgcatgccgtctcaagggtgggtcccagagagtttggagtgtaggattccctctgtgaaggaatcatctctacttctctgaggacaattagggtatccttggctgctttactgtggtggccgaagagctggaattgcctttgttgagagttgtgttcactatcagtggtcgtgtaccttctccacctgcccccaggaaaaagagtctcccccttaaatttcctggtaccccctcacctatgcctgaaagcatttcaccctctcaatgcctcacctttcccgttcgccagatggaaccatcagtattcctctcctggtaccgcaaggcctcctggatccaaagcaccatgtcagtattatttgttggtcctttttgtgcctttcttgacctggagggggaggcaggaggattgctgtcagcctagtttctttctgggaatatggctccctagtgttggaaagggcagtgcctcgtggacagatggtcatttagcctctggggtgaaatacttgcaataccaggtcactctgtggtccaaaaggtcacattcagttgtcatcaggcaactttaacccttagagtgcttcccttccattaagctgaaattgccccacggccatatccacccattgactctgccttcatcaaggaaggtgggaagtaaaacatcactttttacattaaaccaggatcaggaataaaatgttaccaaaaaaaaa

SEQ ID NO: 169062 - DNA, 477 bp, Homo sapiens
ctgggaggcggagcttgcagtgagccgagatcacgccactgcactccagcctgggcgacagaacgagactccatttcaaaaaaaaaaaaagaaaaagaaaaaagaaaaataacaactattatattagcatatgagaatgcctgtgatgtcaaaattacgaaatcatatcaattatttcctaaagactgtagagaaatgcatcctctgttacccacgggtatctctggatgtgggattatgcacttttcctcctgtactttctacctgtatttctggatttactacataatcagggagggaaaggctgggcacggtggctcacgcctgtaatcccagcactttgggaggccgaggtgggtggatcacctgagctcaggagttagaggtcagcctcggcaacatggtgagaccctgtctctactgaaaatacaaaaattagctgggcatggtggcacatgcctgtaatcccagctactt

SEQ ID NO: 169063 - DNA, 470 bp, Homo sapiens
gggaggaaaactagcttaaatctctcactcaacctgatttttgaattgccttctctttttatggtggagggcaagcaattcagatctctggattatgaattttgtgaaacccatgatagtactattacttgaagcctgtgttgaagatatgagttaatctttaatgtgctttgtgatatgtatttatttagtctcaaactaccaccaagtatcattgtaggcttgtttgcactggatttttagcttactctcattatacagagttattggatgtatttgtatttgaagctatatttgtagttatagcaagtgtactgcttatattgtagcattgtgtataaaaatctgatttagatttttggaatgctagtatctggaaaatacccttaaagtattttccagacagctgggccaagtatttcagtaattatgcttgttaacttttattatttatatctcttgtgtcttag

SEQ ID NO: 169064 - DNA, 479 bp, Homo sapiens
caggctgtactggaagcatggccctggcatgtgctcggcttctggggaggcctcagggagcttttgctcatggtggaagatgaagtgataacaggagtctcacatggtgggagcaggagcaagagatgggggtcggggagtagatgccacacacacttgacaacaaccacatctcgggagaactcactaccaagaaaactgcaccaagccatggaggatccgtccccatgacccaaacgtctcccaccaggccccacctccaacactggggataattcaatatgagacttgggtggggacaaatatcctaactatatcgggagtatccctcttctgcttttctatataaatatttctgaagggtaagaaatacctattctttgaatgtttcatggaaatttcccctaaatccacctgggtgtcaagtttttaaaaacggagctgaaattcatctaacagaatgaaccatgttgaagcag

SEQ ID NO: 169065 - DNA, 179 bp, Homo sapiens
gccacccagtctatgatgttgttttagcagcccaaactaagatatgctaagaccaatctttcacccagtggttttagtatccattaaacgctagactaaatcagctattatagtagaggctgcaaactggtcaatttaaagttccagtctggcactgtgtctcacccattatcctggtg

SEQ ID NO: 169066 - DNA, 347 bp, Homo sapiens
ttgttcctttggtggccactccccttctctgccattgaccttgggagggacagaatccaactaccgatgagagcctcccccatgatggagctgctgggagcaggctcagatccccatgtatgggaaggactttctctcacacactctgttattaggctctgatggaggagatgctctcggtggagggtggagttggagtatgaccatctgaattagaagacttggaaagggagtggccaccaaaggaacaaaggcccctattactgagcaccaacttcgtgctcagagcttctgtctcaccccaaactagagccttttcagagatgagcaaccagaaaaactatcac

SEQ ID NO: 169067 - DNA, 631 bp, Homo sapiens
ttcccagggtaactttctctttgctttcccgtcacccacacttgggtcactgctgctcagaggaggcacaggccccttgcgaggaggtgggagctgacacaacaaggcttgttggaggtggcctccattcctaactccctctgtcgcctgggtggggttgccgagcaaagggctcgtccgtattcatggacatttgtttgcaagctcaaaagctttactctgagttctgagtgcaaaggcaggtggtggtaatttttcttcaaacccagctttggactacaaccagttataaggtgctcactgcgtacaggcaccagagcagtcaatgaaaccgcgctggaaagcccctgcatcctcctcccgcccgttgaggcaagtgggggtgtggttcccggaccgagcctgtcagaatcccctgcagggcctagctgggccctccttccttctggggtagagtgaggagctgtatcttgcagggtcctgggtgacactgaactagaggccgtggcatttctagctcacagtgctggaatctctctgcagggatcctctctgaagactctggcagtcaagggaaggtgaagggggcacagaggaaacagcttttccaagtgtaaggagaagagcctgt

SEQ ID NO: 169068 - DNA, 368 bp, Homo sapiens
gagaaaaatggcctattccctccctttaaggaaactttccaaaagtatcacaaactctttctgcttatatctagagtgtagtcacatggccattcctagctggacggaagacgaggacactttgtgttttattccggatggccaagtgcctacctaaaaatgggggtagaggaggctttatcaccattgagaaagagacagaatcaggagaaggttagtggcttctgtcacacaagtccagacggttaagagcctatgacagtctctttgaaaagatccagtaaaaggctgtgaagattacaggatctgagagatgctggtcaggtgatttctggtgtagcagttaagctagatgctcgcttctcaag

SEQ ID NO: 169069 - DNA, 228 bp, Homo sapiens
atgcaattataccccaatacttaaacaagaaatagttgataaatgacagttaaatttcttggtggtgaggatttcacaggtagcacacttattcgtgcactcatggaggtgtgtacattaaacatgcacagctttttatatattaatcataccccaataaagtggtttaaattttttttttttttttttgagacagagtctcactctgtcgcccaggttgaagggcag

SEQ ID NO: 169070 - DNA, 323 bp, Homo sapiens
ttctatcagacattctaagaagaattggtaccaatccttttgacactattccgcaagacagagaaagaagtaaccctccctaattcattctatgaagccagcatcgccctaataccaaaaccaggaaaggacatacccaaaaaagaaaactacagactgatattcttgatgaaccagatgccaaaatcctttacaaaatactagctaaccgaatccaacaacatatcaaaaagataatccatcataatcaagtgggtttcatacaagggatgcagggatggtttaacatatgcaagtcaataaatgtgatatcccacataaac

SEQ ID NO: 169071 - DNA, 482 bp, Homo sapiens
cagaaaatgattatggagtggtcaaggcatcatcttgaagaggaagactggcgtatacttctgagtgaactggacaatggggcaaagcaggaaacacgtaatctgacttgcagtttaaaaagatgactggaagaattgaggcagatgcattcattaggatcctaaacaaagatggtggcagtgtagatagagaggagtacatgaatctaagagttatttatacagagtagggatgttgtggtgacaattatgacaggaaggaaggagttaaagatgattcccagacttcggctctaatgaccagcagaatagtcatacaggaggaatagagtggggagctatgaaaagatgaattctgcctgggacatgagctttaagtacgtaatggacattcagatgatatgaagatgttggctacctgagcttggaccccagaggaaatacacatacatatattatatatatgtttgtcggtcagtcta

SEQ ID NO: 169072 - DNA, 263 bp, Homo sapiens
attatcgcgaagcttttctctccctcgctgtctttctgtggtaaaatcacgtagccttagcatttttcgggagttgggtcaattctttgaggacagaacccctgcgttgtcactgtgtagcattgcagtaggtactcaatatatattcgatgaataaatgaaccaatagaaaaccgagtaagtctgtgaaagtttgctaaaaatgctacctggaaatgtcaaggtaacatttacatttgatttgtgtggagttcagtaatatt

SEQ ID NO: 169073 - DNA, 303 bp, Homo sapiens
tcaatctcctggtttctaacttttaaaccatttttagggaagcattatatgtgaaggtaggagatactccctacatacaaaatcatgttattaatgttgtgaattatgcatttcctttttagtattaggcaactttttttcatatatcaagttatcatgtacacttttcaaggttttttggattataaaatcttagttgaggtaatataaatagaaaactagatacagagtgcgtgtctggtttgtgttacctcagaagcaattgggctgtcacttagcctagcaaaaagtaaatttagttgt

SEQ ID NO: 169074 - DNA, 314 bp, Homo sapiens
ccatgagcccaccagagcacagtttgtcgctgtctcttttaaaaagtctaggattagagatactatggtaagggtgatgtgggagtatgcgatgtactgagagattgtacccagtggtggagtttgaaatacctctcatgtctgaagagcaagccataggtagttgccacagttcactagaaggaatttttgggtttcaggttgaactggtgatactgtaaagaacccacagtctttttccacaatgctgtctagacaagaagaaaatatttttaagtttctatgattttttattatagcctttttaaaaattg

SEQ ID NO: 169075 - DNA, 211 bp, Homo sapiens
tatcattgtctttagtattttacagtggcccctcagcacctcttagacccaacagcaaaggacttaaaataagcacaggaaaccttgctatggtgattagttttgatacctttgagacaattgagtctagcttcttagttgccccttatttatgttgaaatctggctcattcatatgatgttttactgtgctggccttgtaaagaatttta

SEQ ID NO: 169076 - DNA, 329 bp, Homo sapiens
cttactgctgaaacactaatacagccattaaaaaaaaaaatccccatccgtaatgcttaatacagactgctgggagggtgactccccatgcagccttccttgcactgatgtacaactgttccttttaaataaaaatatccggcgagccatggtgtctcacgcctgtaatcccagcagtttgggaggccaaggcgggtggatcacttgaggtcaggagttcaagaccagcctcaccaatatggtgaaacctcatctgtactaaaaatacaaaaattagccaggtgtggtggtgggcccctgtaatctcagctacttgggaggctgagcca

SEQ ID NO: 169077 - DNA, 863 bp, Homo sapiens
agaggttgcaatgagtcgagagcacactccatcctgggtgacagagtgagaccctgtctcaaaaaaaaaaaaaaaagcaaaagcagtcttttgtgtctcacaaagaacttcagataacatcagtaaaataatcataatagctagtggggacttactgtctgccagctatattctaagtcctttgtgtttattaattcatttaatcctgacaataacttgatgagggaggtggtattattacccttttgaacagatgcgaaaatgtaagcacagagatagatgttaaataacttacttaaagtcacacaacataaagtcaaatttcacttcaaggcctactgattcatatcttataaaaccactttctcggcattcagttttctcctcttcctaattctgataacctgtggctgctccagagcccatcaccctaattcttcttcagaaactcccctacttccagtttcttccagacacacagcctcaggaggctttctctttcttgcctcttgtcctaaggctgattcctggttggtatctctctcgtatctctcattttatacttttttggttgggggaaggctagggtctaatggaagaccatacggtggggaggggtcatggaacagagcccctgaatctctcccatttcaacttgctactttgagagtaaaaaaaagactaaatctccttggctgtgatcaggagatagtgtgttggctcccctgatactggaatccagtcccacttttgcagctcttaaatcttgctatctaaagccctcagttccaataaccagcttttctggtggtgcagcttcagagtttcaccaaatgcttagcaaggtagtgttctctttttat

SEQ ID NO: 169078 - DNA, 277 bp, Homo sapiens
tgaatgacatacaagcaaaccaaaatcctgaaactaataaacttagaggcaagagaaatagctgcttaatatgactactactgctgtagagtttctctgagaatttacttctgtgagcctattctttttttaaaatttctgcatatgtcagaccaatcagaccttcatttccttctgctccagagaaaaactggtctagggaaggagcagagatttcagtaaggtggacctaggttcaacttcccagctcataagttaagtaacctaactagtttat

SEQ ID NO: 169079 - DNA, 195 bp, Homo sapiens
ctgtgtatatatataataggattatatatatcctattagctctgtccctctaagagaaccctaatacatttgttctctttcttgagatttcttctaagtctcctgctctgaagctaaaacctcctgcagtctccctaaccataagaaagcaggcaaaaaccagagtgaggccaagaggaatgtgtgacactctcc

SEQ ID NO: 169080 - DNA, 716 bp, Homo sapiens
ttatggaccaaacaagtagaccacattatgaacttataacattgatttccattgcatgcggtatgacttcctctctccttttcccagcagaataaccaagttctctgtgctgattcataataaccaagttcactgtgctgattcatacttcccaactcttctgcagtaaagggatgctagaccagtgggaaatcagagctgaagtctatggctttgattggtgttttcatattccatctaaaacagggcattgctgatatggttccttgaaccaacattctttagtttcacattttggcagtgtaaagtgcagatcatcagtggaaagatctggtatgctgaaatatttcagggtcagcttgactgtggttattgctgttacataactttgataatatactcactgctcttcaagtgggtagctgggaaggtggggttggctgagctacttttcagtgctttgtacagactacacattttctcattaagtgcattttactggaaggaaacagactggaatttttggtgatggttctaatgaaccatgctctcctgggaaataattaaaaacaattaagagaaattatataatcattgaagtaggctccagatctcaaaagactggatttccttctttatagctgggtacagtgcttgttataaaactatggagaatttcagctagatgttgtatgggaagagggaggtagaaaagt

SEQ ID NO: 169081 - DNA, 484 bp, Homo sapiens
tttaatcatatgttctttgaggacaaatggaaggcctatagtgtttaattatttaaatttaaaaaaataaaacttctggaattgcccgggcaagatggccaaataggagcaactccagtctgcagctcccagcaagatcaatgcagaaggcaggtgatttctgaattcccaactgaggtacccagttcatctcactgggactggttagacagttggtgcagcccacagagggtaagcagaagcatggtagggtgtcacctcaccctggaagtgcaaggggtcagggaactcccttccctagccaagggaagccatgagggaccctgctgtgacggatggtgctgtccagcccagatactacacttttcccatggtcttcgcaaaccgcagactaggagattcccttgggtgcctacaccaccagggccctggctttcaggcacaaaactgggcggctatttgggcagacactgagctggctgca

SEQ ID NO: 169082 - DNA, 686 bp, Homo sapiens
atcctagcactttgggaggcagaggcgggcagatcactggaggccaggagttcaagagcagcctaaccaacatggtgaaacctccatctctactaaaaatacaaaaattagccgggcatggtggtgtatgcctgtaatcccagctactcagaaggctgaggcataagaattgcttgaaccccagaggtagaggttgcagcgagcccagattgtgccactgcactccaacctgggcaacagagtaagaccctgtgtcaaaaaaaagtaaaaaaaaaaatcactttcattaattactatagtccgaatgtgtcctccaaaatatatatgttgaaacttaatggccaatatgaaagtattaggcagtaggatgtttaggaaattattaagtcctgagggcagagccctcataagcaggactttggcccttataaaatggtgtaaaaggatgggttcactctcttccactcttctgtcgtatgagaacacctagacagtgccatccatgaacaatgaggctttaccagacaccgaatctgccagcaccttgatcttagactttccagcctttacaactatgagaacatgaatttcagtactttataaattacctagtctcaggtatattgttgtagcagcacaaacagactaagacattgacgttacgaaatcctacatctattgtaaga

SEQ ID NO: 169083 - DNA, 432 bp, Homo sapiens
ggacaaggcccttggggcctcccaagagggtctttctccactccctgttcctgagctggggctgggctctgagagatccaaggatctgcccagtttgagagctaaaagagaaagcgctcaccgttggggagagggcgctgggtggggctggggtgcctgggagtgtgacacagcctcttccccattcttgacctatggccccctccccacgcaagcctttcccacctccgcaccctcactcgggaggtgtcgccgctcaactggctggggcggactctcccaccacatggaacaccgacacagcccgcagcccctccctgcagccctcactgccccggcggaggaggggcacagaggcctctactctcatctaggtgagtccgaaacacgtgtggtcccgcccgtcccggccggaggggagcgggcagggcc

SEQ ID NO: 169084 - DNA, 380 bp, Homo sapiens
ggtagtcaccggcaggctccgaatggctccatcttacaccagacaccagctcccatgtgggaggcacacctcagtgcccagggaggtggctcagcacagtgtgtgtgggaggaaggtggggacacggggaacactgtagctgcagcaccgctggcttccaagcctggctctctaatcactagccatgggaccttaaccttccttgtctgtttcctcatctgtgaacggggcagtaacagtccgtgcctcctgatgtgagcaaggagtcaggcagccaagtgtgcagtgagggtttcatggccatttggtgaccaccatcgcagtggggaaggacagccaatagctccttttgcagatgaggaggctgagtgccccagaag

SEQ ID NO: 169085 - DNA, 328 bp, Homo sapiens
ctgttctagagtatcccccggagcatttctcaaactaaggaccaaggaccatctgaatcagaatatctgctatgcctgtgaggatgaccccagataaactacatcagaccctctcaggcagatccatagattctttcttctttttaagcaaataacccagggattcttatgttaaaacctttagaccaacctttctcaaactcttcgctctcatggcccctttatttattattttttaaatttaaaagaaataataagcaaaccgggtcaggtggctcaaaactgtaatcccagtactttgggaggctgaggcaggcagatctcctga

SEQ ID NO: 169086 - DNA, 184 bp, Homo sapiens
tattctaaccacatcttttccattgactgtccattccatttttatcatacatggtgtagtttctttacttgcttctctgttctttgatctttctcatgcattggccataacattgtgcatgtgtgtgggtggcctttttattaaaatataacacacatgcagaagagcgaataaatgtgtgccc

SEQ ID NO: 169087 - DNA, 544 bp, Homo sapiens
acttcaaacacccaccagctaagtcagtttattatgggttaagagccacacctatttgcttctcgtgttacaaccttccatctgattataagtaattcttctaccacttcacagtaactcaccagcagcaacctttctgacatccctttccacaagcaaaccagggctttttcaaagaaaatgccacatttattacagtatctatatatttcttaaccattcaacgtgtaaaactgttctatcatttttaccaggttccttttttaaatgtgtcactgataaagctttagagtgctgtaccccaaccccatttgtaagtcatttctactgcacgattctgcaaagcagtgatttttaggaacctgtatgttgctttacagcagaactgactgtataaattaacagttgtatgagaacttcttagaccttaagctagtctcactattccaattccaataatttactagagagaaaactgccttccccccaaaatttcacaaaatgtttacaacccatatcctagcaaaccatcaggatactggta

SEQ ID NO: 169088 - DNA, 401 bp, Homo sapiens
atttcaggcctgtgcttttgaatcggcaacagtgctctttctaaaggtaagaacatgagaaaaccttcaactctgggaggatgggaaagatcatgagtttggtggtagatatgtggatttgaggtctgtcacatgtgcaggagatgtcaagtgggcagttgaatattcttgtctggagctcacaggggagttctaggtaagaggtatgagagtggttcactatttgaagctgtgaatgtgcacgaggtcttccagggtaagagaggatagggtgagaagcagagggcctctgactgatagacagaggcaccttgagagacccagcttcaaaggatgggcaggacttccctgggcaggccacatacttggggctgtctgtggctgggatgattcgtttattc

SEQ ID NO: 169089 - DNA, 407 bp, Homo sapiens
ttatatttttagcagagacagggtttcaccatgttggccaggatggtctcaaactcctgacctcatgatccacctgccttggcctcctaaagtagagcctacttgtatattgctaagggcccagtgaagaagccagggatctgttaaatatctcacccatacatataacattacacatctgaggactgttatcaaatgaaatgatgtggttcagggagaccagtgagtgggatgtggctgctgagaatgaggtgcagggtgatgttacatatttttttcccaagaaagggatgtataggctgacagctaaagtgtcagtaggtgctcactagtttggaacagaagagaacattgtccatgcaaaggaacagctcgaatgaggctgtgggacaggagggagtgtcacg

SEQ ID NO: 169090 - DNA, 543 bp, Homo sapiens
cgtcggcctcccaaagtgctgggattacaggcgtgagccaccgcgcctggctgggaagtcttttttaatggcaataaccaaatgaactctcttgaccttgctgcctctgcaggcactgccccgccccggcccttccactctagaggaaagcacctggcatttagcatctttacacacaggaaacaacagatatgctcagggacttttcctctagcttgtaaccagggatggctgttgggcttggcagccgtcaggctgagagtgactcagcttaaaaggtttcattgttgatatctgccctgagcattcccctttggacttggagttccaggatgtcttgtgtctgtgcttcagcatctgaagccccttgttgcctgttcttaaggtagactgcattatcaacggtgtcttaaattaatagcttctctctactgactattcacttgtcacagctgacatgaaggttctcagtcctgagtgcctattaatgaagctcacagatagagtgcagaaaccctttgcaagatctgttttgccagcttg

SEQ ID NO: 169091 - DNA, 237 bp, Homo sapiens
atgtgggcataaacgtggtgacaaacgtaagagctcctaactatctatatctttaagtaatgtatgcttttaatttaagggaaaaatataactttgtaagaaatattataaatagcagaaagtttcctgatcaaaaaaggaatcttaacatggggtaaaacaattactaagacaaaaacctactgtatccaatataatataagagggtactgtaggtgtgttcttaaagtaataagt

SEQ ID NO: 169092 - DNA, 246 bp, Homo sapiens
acattgtactttttggtgtgggtcagtggcaggattggaactagtaattggatttccgcactcccagttcacttatctatccactacaaaacagcatgttaattttggaaatatttataccactaggtcatcatgacctttgaatataaccactggcaccaattatataccaggaatctccttatgcctcacctaactagagtcattgcccatggcagtatggacttcagatgccttctctcctgg

SEQ ID NO: 169093 - DNA, 405 bp, Homo sapiens
tgggcaaaagaggaagtaagtcaacatgatctgaacaggtttacattagtcaggatgtatctataaggttgaactatgtgaaactgccaatctaaaatatccaggtgatatttgatcagaggcagtggagaaagaagagcagtccaaggggataaattcagtttgtgtctagattcaggaagcagaagggtgaagtggagtcagtaaaatggttaagtgaaacagtctactgtagagatgggattctgacttaatttccttaatatcacagaaaaacatgggagagctcctgacttttatctccagtgttagcttcaaaatagatttcatatcttgagtatctctccaaaacctaagattcctgattctttattttgctccttcattatcctttaattaaatccc

SEQ ID NO: 169094 - DNA, 750 bp, Homo sapiens
ctaaagctaagattgcttaagtctcacttggttctagagttctatagttcagtaatggttcaaaacagttcaccatgtttagaatcaacattaggctgacagcaaatgcagctcatcatgcaaatggcatggcttgataatagaaatggctcatagaaaggaagttaggctagacaaggtgcagtgtacccacaatagccagccctatgcacaggtgttactactattgtccttattttctagaggagaactgaggcacaagggagttatgttatgtgcccaaggagcctgtgctcttaacaactacacttgccacaagccaatattggtcagacatattccagaaattttacaacacaaaaaaacataaataataactcttttttaaaacaaaaagtggagaaaaagaacaaaacagttaatagatgaggctgacattggagacagcggcttaggtgtgaaaaccctagaggtagacagacttctccccagtcatagaagttactggtccacctagatggtgctgaagggacaggtcttcctgaaacctgcagccctgaggaacagagcagacagcaaactcctgcagaaggtttgtttgcttgttttgttttctctcccaactcactagtcagatgtgccactctgggtaatgctgagtaaggagtagaagagaggccagagtgctcccatcatgggtgccagttggaaagaaaaaatcagaaatggagaagaaatgtcccatcctta

SEQ ID NO: 169095 - DNA, 275 bp, Homo sapiens
taacatagtaaaatgggagcatgaaaacaaccacaatttccatttcctcatcatttcttgctattggcaacttcttggatttttttatccaggatgaactaaggatctatttcacagaaattcttagtagcactctcattctctctatatcgttattatttttcttttaccatactctccagactaatcgcaagctccatgtgaatccagtctttctctctcttgtcttattatttccaggctggttagcgttactggggttgcgggagtgacaa

SEQ ID NO: 169096 - DNA, 465 bp, Homo sapiens
tgagctcatcggagtcactggtaaatatcagaacagaaggaaacaatggactgggatatttttaccacaagttctcagacctttataaagataccagcagtcacctgcttcaggctggcacaaaggtgatcagccaagccaggcttgtggggaatctgtgtgccccgagggggctcccctcccaggtaacaacattcgtcagaagcctgccatttctgaagcacttagccccacacatgcccttgaagactgacatgcagtcaacagaatctcattctccggaagctcgggttggcagcagcgagagcgaagctgcagggagcctgaggccagcagagggtgcggcgccttaccgggcctctgtctttgcagctacaggtttaccaggttcctcgccaagctcagtttttcgccttgaatatgaagatgctagaaagagctctgcatttaagcagagccttgtgc

SEQ ID NO: 169097 - DNA, 542 bp, Homo sapiens
ctatcaccatcattgacattgctgtcatcaccatcaccatcttcaacatcaccatcaccatcatgatctactgggtgcccaggaaggggtgagcagccatctggaggaatctaccttgatgatgaggtttggtatttttacagaacaggagaacataatttctagtagtagacatgccagggacattgaccatcagaggactgagtgttttcttttctaagctagcaaagaggaaaaaatttcctgatattagaattatctccacctctactctcccagaaggctgtacttgttaccttcaaaaagtaacccttgtctctctgaaatgttcccagataagacattatctcttcctcttccttcatttcatagcttctcactgtattttcacatggaatgtacacaattgtaggctggatattttcaggctataactctggcaacagtcttagttcttgaaacagcagatttacatcagatagacccaagcttgcccctctctctctctctgattcttattgaaatagcttttgcttccaaca

SEQ ID NO: 169098 - DNA, 363 bp, Homo sapiens
catgacaggactggaaccccaatgccaaataaaccccagtagattcggctaccggagagaaatacccaaacagagaaacatggggagatggaagggggcttcatgtggcccccagggaggggagggggcacacggatggcacaatcactaacacagatcacatcatgggactatcggggccccaggttctcccataacaggaaagtcaccaggacccgtcaagtggggtgctgctgtttctgtaacatgtctaacattgctctgatactccttccaaagagaaaacaggcttcaggctggcagccctccctggcagcagaggctcactaggctccaataacactttcttttcattgagcctga

SEQ ID NO: 169099 - DNA, 182 bp, Homo sapiens
gcagctgccccgtgtgtatcgactctgaggatcccagccgtggtatgcacacaacggggaagggtgcacacactcggccagatgctgcagcccaggcccagcgcggctcagaggcccagcctgcaactgacttgacctgggcctgggtgtcacttgttttggtcaagatttcccccactgca

SEQ ID NO: 169100 - DNA, 109 bp, Homo sapiens
accttggcctcccaaagcgttaggactacaggcatgagctactgcacctggccaattcaatgcttttccgtactgcacatatatgcacaaccatcaccacagtcagttt

SEQ ID NO: 169101 - DNA, 522 bp, Homo sapiens
gatattgtaatcttaatgtgtgacaatccaggattcaaatacaagtaggatttggaatggaatcatttataaaaggtgacaaaagtgccaaaattaatcagggaccctttggatattccagtgaatatggcacactgactagcccccaggattgttccagtctcttttgcaagagtgtcaatatagtgaggagaggtttccatagcttgtccaattctcccatgttaaaaaaaaactaataatatcttgactttatatggtatttttagtagacttttcattcaagtgtaatgtacaagaagaaaattatacaaattctaagtgtacagcttgttggattatcaccaaatgagcacacttgtataaccaataccttgtataaccaatactcagatgaaaaaatagaacatcacgaacatctcaaaagctccttttctgccacctatcaagaattaaccattttcttcttccccagaggaaactgtcgacgcggccgcgaatttagtagtagtaggcggccgc

SEQ ID NO: 169102 - DNA, 514 bp, Homo sapiens
ctagaggatccccacaccacctgagtctagtatattttattattctttttctaatttgagtccgatgcttaattcatatcttttgattctttcttcttaaataatgaaagcatttagagttctaaatttccttctctgtataatttgtagaaattacagaaattttaatttgtgatattgtattatcgttcatctctaaataaaagatgaatgattatatatgtagtttttctcatttgcctttcttctagaggtaaccttctattattgttatttatttatttttttagacggagtttcgctcgttgcccaggatggagtgcaatggcgtgatcttggctcaccacaacctccacttcccaggttcaagcgattctcatgccttagcctcccaagtagctgggattacaggcatgtgccaccacatctggctaattttgtatttttagtagagacagggtttctccatgttgatcaggctggtctcaaactcctgactcaggtggtgtggcgc

SEQ ID NO: 169103 - DNA, 256 bp, Homo sapiens
gacttgggtagggtgacagtggagagggaaagaagtatatgatttcaaggtggcagtaaaacaggactttataataaattgcatgtgtggggtgaggaatgggagggaagcaaatatgactcctgagtttttggcttgagcaactaagtgcacactggtaccatgggggagaggcaggttttgtagtttgagtcaagaattatgtattgaccatattatgttctgttgttttacagatgacagtaaagttcagttc

SEQ ID NO: 169104 - DNA, 432 bp, Homo sapiens
gccacagattccaccgtggctcctcctggaggaggagggagcgctggggaggcaccactggccacacaagccggaggtgagcagagacctggacgtgagtttggggcttgcaggggctgggctggcttggaggtgacatggcatttggctggggacaatcctcagataggggcagggccttcctgagcagggggcagatgtgcactaggctgtacacacttgcaccagggtcgtcagcctcctcactttcgtctcctgtctgagcatccttcgttccacagccagaggcacattcctggagtgcaaagtggatcagcactcatttactccaaatatcctgtgcactctagaatgtggggagtaaggttcaagtacttcagcccaggctagaggatttgcagccactgggcacagggccccctcacctcctgc

SEQ ID NO: 169105 - DNA, 650 bp, Homo sapiens
cgtcgtatgcttcctaccaagtttaatacagattttccctttagtcataaagccgtcttagaatgactccaggcagtaagaagtgagtcagaaatttatgtccagactgtgagattgttatgctctatggattcccctgccaccgctgtcactgggctagtgagcgtgtttattattgacttcacagtctcttttagtgactttgttcctataacttttctttactccagaattactctttctcttgcagtctttttcctatgcctcagaaaattcttattatttacttcgacattataagcatatttttactttctctatgagtatcttaaaacccactcatcctttcatagaaccatggaagtctgttataataaaacttactattccatagatttgcacacaatccagaacaatcacgctcctataaatcctattgagaagaacaacagggactccagtttttgcttcccatcactgctgggaggacaagcatttgagcatttctttgtcccagtttctactggagaaactgtgcaaggacatcaaaaaaatcttgtaggtcaccaattgtcattcctgttaaatgagtccatacatgtaaaaatattatcaaaagacctgtccacacttcatgctcaataaatttg

SEQ ID NO: 169106 - DNA, 218 bp, Homo sapiens
aagaaaagccttctcccagtaaaaatgtgtaaattatcagaattcatattggtaatattttaatacaaagcaatctgttttatccaactatggagggatataagaatcaatatattatggctttaggaaaaaattaccctgaggaccatccagcttttttgacagacacaataatttctgaaagatagcacttacgttctctttaatgttgttttaat

SEQ ID NO: 169107 - DNA, 235 bp, Homo sapiens
  misc_feature (31)..(31): n is a, c, g, or t
tcgaggattacggcaagctatccggttcaanacactgcgcctggccaaaaacttttctaaggttatacagctgaagagtatatttagcagagctgagatttgaacccaggtcatttggtttcagaattcatgttctgaattataggactattttgctctattcacagtgttagataaatgaggtatatctgtactccattttggctatgggactatgattgaaccggatagcatg

SEQ ID NO: 169108 - DNA, 556 bp, Homo sapiens
ttcaatgtgccatggttatcaatattctatgctgttctcctggtgaatggtttcagcagcagatttatttgaaaagattttagtttatttattactaaaaccatcttatggctactaagtaggagggatgggaaaagagaaatgaactttaaaataaaagaaagcaaaacaaaactaactactgttgcttattcatgtgtttttttctgtggtgtgttaacacttaaaaaggctattcatctgaatgtgtgtccactctaagggttggctcagaggacactgtcttcacagagctgatcttcacagtgatcaccacctctctgggacagcccagcccatgtactgcccaggctagtggggcaggcctctttcttaagacagtatctttatttgtaatcaacaggctgctccttttctcaagtctcctttttccctcaaccagcagtggaaactggccgagagatttaaggcacagtcatatatatacagacaatgtatttaaaacacaaaagagaatgataatgcaaaacactaacaactgtagtaaaactgcttt

SEQ ID NO: 169109 - DNA, 405 bp, Homo sapiens
aaaatttgcaaatcatgttcaaaaaatatagcaaaaaaaaaaagaaaagaaaagaaaaagaaaaaagaaagtgtgtctttgtgtatgagcacaaaggaaaagaaagaggacagagccattgagaccacctgttaatggctggtgccagcaaggtggtgcctccatggctgctcaatgttgatataatgttgatgtctctcaacttctcttgaagttgaaaattttcaaaataaaaatggggcaaaataccagagagaaaatttgcatttatttaaaaaacactgagcattggttgagagttttagaaccagaggacataaaggttcttgataacatatgtatttttcattcctcagatccctagccagtctatactcctttgttccagacacactgataagagaa

SEQ ID NO: 169110 - DNA, 376 bp, Homo sapiens
tagaaaaaatgacattgagagtctatggtagcttgtttctttgtgattttttgcaattttgtattttgagctcctcttcagaacttaatctgtgataattttgtgacacctgaactgggagtgtgtattcctccaggtaagatattgtttgcttcaggcaagcatcctgagacattatttatctactaatgatttaattccttatcttgggctttctcagaccccacaggtcatctaaagtttgatcttaaaacctgtagccttgaataccttttccccaaatccagataaataaagactaaaaagttttcttgatacttctcttttctaagagctacatattttctagatgctctctcctgcctcctgtcctgga

SEQ ID NO: 169111 - DNA, 430 bp, Homo sapiens
attcgaatatagggtctttaaagagataattaaggttaaatgaggttgttggtgtgggccctaatccaatctgactggtgtccttataagaagagaagactgggacacagacacacacagaaggatgaccctgtgaagacatagggagaagatggtgtctataagccaaggagagaggcatcgggagacatgtaccttgccaacaccttgatttcaaacttccagcctccagattgtgagagaatacatttctgtagtatgagccaccccccaatctacagtactttactatggcagccctagaaaactaacacagcacttcattccttttcatggctgactaatattccattgtatgttccactgatgcatgcaccacatcgcttatccgctcatccgttgatggacattggagtggtttccacctgtt

SEQ ID NO: 169112 - DNA, 204 bp, Homo sapiens
ttctattcccagaagttttgctcagcatgagaccttctttctagaaggaagccctgatgggtccagtctgagagctcacagcaggcaagagcattctagaaatgtcacaccttttttaccctagcctctgcgcatggcaaaacccttccaggtttagctctgctctcaagccagctttccattaaatatctgttgcctattttg

SEQ ID NO: 169113 - DNA, 183 bp, Homo sapiens
tgctaagatcgtgagccactgcactcggcccagcagtcaatatttgtaatagggattcactagtagtctgtgagcagctcagcaaccctatatgcaccccagagtgttaaggatgactggattcttctctgaggaggagaaaaggctatgtaggtacagtaggtatagtgggttcagaaaagc

SEQ ID NO: 169114 - DNA, 225 bp, Homo sapiens
agcctgttgccctctcttcaacgtaaacacccacgatcgtacccttgccacctcccccgtgggtcaggcgatcatcctctctccctgaaatcaggccagttgcttcctgattggactccagtcacttattccccacggtgtagccagagtctcctctcctgacactctccggggctcctgctcactcagaggagcccaaatctttctggccatccacagagtgtg

SEQ ID NO: 169115 - DNA, 446 bp, Homo sapiens
aaatgctgatgcagccttcacctgcgtttaatagagtatggcatctagaacaaagtgagtgggtgattctgcaaacctagaacacctggaaactggcaagtgcagaggtcatgtgagcctcaggcacagtttgaacaggactctagctctgtttttctgcagcacttcttgctctgcccttttttgtgcctgggcttcatccttggaatgttttacctcatgggccatgagacggctgcctgctgaaacccaaactatagatatccctgttcccatttaggggaaagagcctggtttgctatattctcataggcttggctgactgtatatttctgaaccagtcattgaagccaagagaatgggattatggtaatatgaaccactattctcctgaaactgaatttggacatagtcccatccaaacctcatggtactcacacagtgga

SEQ ID NO: 169116 - DNA, 1295 bp, Homo sapiens
ctttgccggtgtggctgttgtaggcactcacaccctgttggccacaaaggacattgtctgactctcccagttggctgggggccattagggctttgcttttctttgggttctagggatgccaaactctatggctgcaagaaccagtttcctatgccaggttaatgcccagcttaaactaatgggcagctctctaaagttgctgtgaatgtggatagaggaacagagccaaagatttccaggaaaaggttgtgggaaaaaatgatttcgtctaaattttgttccttttggacttcttttcttccattaagaaaactcattcccattgttgtctcccttttggaattgaggacccaagttgttatagaactgagcctgctttacaggaagatctttctgtgaggaattaggagttaggagagctgcttctacttgtgaccttttaagactagactctagaggacttccctccactaggcaacaaagttctttagtttgagagaggagttactcatgccttgtttattccagagtgttatatatacaggatggacatctctaaggagtgtttatcagaggagggataaagttggtagtaatatcacccaaagtggccacatcagaaaatccacttatatgtggaggtctaattataagtagtcccttagatgcatactgcgtcaaggtattttaactttattctcaaacttcctttattctctgaattattcaccaaatattgagagtttagtatgtgtcaggcattgttctggacaaatgggacaaaccagcgaacaaaacaaaaattgcagtcctcaagaattcaagtagggaaagcttatgttcctcatcaccttgttgtcaaaagactgggttccttttacttccattctgaactgccctcctctgcccccgcaaacagggttgattctttgcatggaaccataaacctcctgaagcctcatgaggcaatttatgtttgtagaggctgcagtttctgggttcttggcaatgattttttcctcctcactcttggatatctgtcaaacacatacttttgtgtttggctcctgtgaggactgtgggtttcttaaataaggccaggaaagaggtagcaaagcaacagccttgtctcagcacaagggatatcaatggtaagtaatgttgattagaaagtcaaggaatgtaggtcgggcgcagtggctcacacttgcactttgggaggcctaggtgggaggattgtttgagcctaggagttcaagaccagcctgaacaatacagtgacaccttttctctta

SEQ ID NO: 169117 - DNA, 596 bp, Homo sapiens
taccaagcagcattgatctgcaacctaccactataaattcagtttctagaatttgtaataataaacttttataatatgcctactgttgtttcattctctcaatatattttaggatcacctatgtagcaaaatcagtggttctttctattttattctattgtatggaaatactacaatatgtttatcctttagcctgttggtgaaccatttacaaatgtttctattccttgattattacaagtaaagctgctatgttcatttgtatgcacatgttttcatttctcttgagtaagtaagaatggaatattctaggtcaaattgtaagtgtatgtttaactgccaaactgcaatccaaactgattatccactttatactcccacctaaatatgataattcagggtgttgtatgtcctctcaaacattcagaattgacatttttttggatccattatagtttctgtgcagtgttattgcattttgatttttaagttccattcccaggtggttaatgatgcatttttcagtgtttatcaatcattcatatatctttggttattgtcatctactcaaatctcttgcccattttgttattgtg

SEQ ID NO: 169118 - DNA, 693 bp, Homo sapiens
  misc_feature (613)..(614): n is a, c, g, or t
  misc_feature (618)..(618): n is a, c, g, or t
  misc_feature (625)..(626): n is a, c, g, or t
  misc_feature (649)..(649): n is a, c, g, or t
agggctaggaggtgccttggacaaccccagtccctcatccagcataaatggggacaagagcatggtggggtcaggtgcagtgagagtggcagtgaggctgtaggcattggctgggacagggcaggggtcttcccttgcttcatggagccctgtgcccctccctctgtgatctgaggcaggagtgcacacagtcccccacgctgcttgtcctttgtcctgcgtggagggtggtggcagggcaggagtgctctgaggagctgtcccgcccccgtcctctggttctgtttgagtggaggggttgggcttcctgggctctggtcagtgcctcgatctcatccttcctgacctccagacacctgggaggatccttctcctgtgtcttcagcttttctgtcagctttttccaagcatttaaggattctctagttgaatccatccttaaaaaaaagaaggttctgcctggcctcctgctccccctggtgactgtccccttgccctgcgttcttgcctttcctgatcttctacgtgacctgtagctaaaccttccaccagcgcttgagaacttaatttgaactggatcctttcccagaccgctttcttcttctcctcctcnncctncaggtgnncaacagcccccttctcctccttncattccgtactccccggcgggtacgagctcgaatcgtatgtggt

SEQ ID NO: 169119 - DNA, 367 bp, Homo sapiens
cttgctcattttctccccttaccttattaaagtgtctgccttctgtgccaaaggggaagcagcacatttaaaggtaggacacattctgcttctttccctaagctagccttagaataaattcacttttcttttcctctttttttaaattctttgtaggtctcttatttaaaaatcaattggcaggcaggttagtatgttatagttccaagcttgaatattttcttaggcttagtgattctggggccctgagattaattttcctttcacagtattatgcatcctacagtaacacagctattttaaactttcctgcaattgttactaaatagcaggttagtgcccactgcttttagagtccaatttacaa

SEQ ID NO: 169120 - DNA, 219 bp, Homo sapiens
aatttcaaaataattgctttttatttaaaataagaaaaatcattaaacttcaaccaataacaggttaaagaatttaaaggtaaaagacatttcaactaattacaaatactttgtttttttttagttgggctacattttaccactctaggaatagctgttaattattttttatatagggtatttttatgtatttaatgttgacaactgacgtttccaata

SEQ ID NO: 169121 - DNA, 537 bp, Homo sapiens
tctcttacacactttacatttgctcatttaaataactggataagcaattactttcaggtcacaactatttttatactatatatgcctctggggggagccaagataaaaaattggttccaaaaaattctttgattatttgatcatctgttaccagttaggaactccatattttctgaaattgaacgaatgtgagaagtacctaaaaaaagcatctttgttatttttaaaagtcttaatttaagaggaaaagataggcatcaccaaggacagtagaggaaaaaataaggaaattttagtgcctaaagtagaacagtttgtagttgtaaaagttagctatgagtctttatgggccgggcgcggtggtgagattacatgcctgtaatctcagcactttgggaggccaaggcaggtgggatcacctgaggtcaggagttcaagaccagcctggccaacatggtgaaaccccgtctctactaaaaacacaaaaaattagctgggcatggtgacaggggcctgtaatcccagctactcaggaag

SEQ ID NO: 169122 - DNA, 628 bp, Homo sapiens
aatctgcctcactttttcacactttgctactctgccctgaccctgaattcacatagacccttttccatttctttcagcaccaagagaggcagtggggttgaggggaaagatctctgcttttggagctagatgaaacctgactctatcccttcttggctgtgtgaccttgggaaagtcatctgcctctctgagccttagtgtctcctttataaaacagggatataacagtatcaagatccaggattgttgggaggactgaatgttaatttatgcgctactttagcatcctactgggcatatagttggtccccacaaatgctgatgctttctatcattcattcattctcctccacaacctccccccagccaggtccatgggtcactgactttgttctctagttttctaggtaacgtttagaaaggcaggggacacaccaggtgcagtggctcacgcctgcaatcccaagactttgggaagccaaggcgggcggatcacatgaggtcaggagtccaagaccagcccggccaacacggcaaaacccagtccccaccaaaaatacagaaatagccgggcacgtggcgcgcacccgcagtcccagccactcgggataaggcggagaaccgtcga

SEQ ID NO: 169123 - DNA, 366 bp, Homo sapiens
cggggctacctacaaattttattagcaaagcagtttttattgttaaccatgagctaagatcactatataacagttcttaacaacgctactttttttttaaattcagtgtctgccaaaggtaattgctcagttataatcgtggtagtgaatagttactcttgatagtactacagtaacatctaatatcaacaagagtgaaaatctgtctcaaaacaaacaaacaaacaaacatgaggaactcctacaactcaatagtaaaacaaacccaaacccctgattcctggagatcctgattccataggtgtggtctctgcaagcaccaccaatacagcgagcaccaccaatacaggcagcaccaccaataca

SEQ ID NO: 169124 - DNA, 562 bp, Homo sapiens
taaaacctcagctgataaaagtataaaaataaagttaaaacatattaaagacaaaacccaagaatcagcttcctcttccttcattactcttgcatgggtgttggctctaatttctccatctagttaggcagtcctttgctttttattgcttgtttattgatgacatttgccatttgtagcaatagtaatagaatcatctatatatttgtggccttgttgaatgtagaaaaaggatagtggcattttctaattgtgtaaccctataacaccttgacgggggactacagttcatatgctggaccttttgtgtttgttcatggcgggtgggttgctttaatatacttagcacattgtcctaattgccatccttttggggagggctatatatccaagctaatatggtagcatttttgttttaacatagagctgacccaaggtagacgtaagtgttgttcatttttgcctaatactaataaaattacctaattgttgaagcttggagcttgaatctaggcattttatttcatttcaagtacaccctagtattttaaagcataaatat

SEQ ID NO: 169125 - DNA, 411 bp, Homo sapiens
catgtgacagtgtggcagtgtgtgtggcagtgtccatatggcagtgtgtcggtgtgttcatgtgtgtgatggtgtgtccatgtgacagtgtgatgtctcgtgtccctgtggtagtgtgacagtgtgtccatgtggtgatgtctccgtgtgtctgtgtccctgtgatagtgtggtggtgtgtcagtgtgatttctccatatgtctgtgtgtccgtccatgtgactatgccagtgtgctcgtgtgactgtgtgacggtgtctccatgtggtaatgtctccgtgtgtctgtacatgtgagtctggtcatgtgtccacgtggcggtgtgtccatgtaacaatgtggcggtgttccctccccggcttgcggagctagcatctttctctctcagcccaggacgcctgaagaggccgc

SEQ ID NO: 169126 - DNA, 207 bp, Homo sapiens
ctattgtattgactaggacaaataaaatgttgaatagaagtgggtgcaattgcctccattttcttttccaaatattaccagggaagctttcattcttttaccattaagtatgatgtagctgtagtattttattgatatgtattatcagggtgatgaaattttatttattccaagtttgctgagagttttcattatgaatactgttca

SEQ ID NO: 169127 - DNA, 552 bp, Homo sapiens
agccatgcaggactgtgagtcaattctacctcttctctttataaattacccagtctcaggtagttatttatagcagtgtgaaaacaaactaatacatgtatattttgctacaattaagtttttttaagtaggtgaagaggacttttgctttcagccatgatacagtaacaggaatcagatttattcccccaccttaaacagcttgaaaaccagacaaaatatgtgaagcagcgatttctgacactggaccaccggcagcacgggacagtgattcctgggtgaaggaaaacaaaagagtgtccagctcgctgccttgaaagagttcccaatccaggctgagggaagccagacagatcccagtgggcttgctgagttaacaagccagagtttagagtctgcggaggcccaggaggctaaagctagtggagaaaaatgccacagaagaggcagctgtggcagacagagcttcagggtcttttgctggtgggcagagtcacctaaccttcaggggcctcagtttcctcatctgtgaaacagagatggtaatatgcc

SEQ ID NO: 169128 - DNA, 454 bp, Homo sapiens
aatcacacaccctccctgtagccttcatcctccttccctcctttcttctctgtctgatatcctagatatttaattatttgttatttattgtctctttcctcctcctcaactgtcaagctccatgaggacagggactattgtcagttttgttcactgctgtatcacatctagaaaagtgcctggcacatagtagggggtcaataaatgtttgatgagtgaatgaataagtgtatatgaatgtttaagagcaggtgctctagactgaggtctcatctcagctcttctacttactttgtgatcttggaccctcttttgccttgatttaattaatcagtaaaaggagaatgacaacagtacctacctcataggattactgggggattaaataagatcatgcatataaagagcttaaaacagtgcctagcccccaggaactactcagctccacgctggc

SEQ ID NO: 169129 - DNA, 576 bp, Homo sapiens
tgtacaactgtgtctataaatggcactgccatccatgcagatgaaaaatcttcatcttctccctcatcagaaaaccctacagagccctctcatctctaatacacctaatctaaatgcctaatctctaatatactgatgtaaaatgtccttcccatccatcccctccttgtcactcccataacctactagttcaagccctcctcatctcctaccagaagtgttgtagtgtcagcctccttatgggagatagagcctccagaataattctcctcaaacacttgttgaatatcctaaaaacaagggctcccatccccccttcctgtgtatatgctgcatacacagaaaagttgagaacctctaatcttactgttcgaacatccttgcctggcacttcactcccgtaacctctcagcttacaagccaccccacactccatccacccttctagacatcccacatgcttaccagcctccttactactcctgaaaacactgtattttcacatctctctgccttcagctttctctctcttccactttgtccatccctgagggaaaattcagcctagtggttaag

SEQ ID NO: 169130 - DNA, 535 bp, Homo sapiens
tgtacaactgtgtctataaatggcactgccatccatgcagatgaaaaatcttcatcttctccctcatcagaaaaccctacagagccctctcatctctaatacacctaatctaaatgcctaatctctaatatactgatgtaaaatgtccttcccatccatcccctccttgtcactcccataacctactagttcaagccctcctcatctcctaccagaagtgttgtagtgtcagcctccttatgggagatagagcctccagaataattctcctcaaacacttgttgaatatcctaaaaacaagggctcccatccccccttcctgtgtatatgcgaacatccttgcctggcacttcactcccgtaacctctcagcttacaagccaccccacactccatccacccttctagacatcccacatgcttaccagcctccttactactcctgaaaacactgtattttcacatctctctgccttcagctttctctctcttccactttgtccatccctgagggaaaattcagcctagtggttaag

SEQ ID NO: 169131 - DNA, 595 bp, Homo sapiens
gccactgctcctggccactctcttgataattttttaaaaactattttgattttttttgtaaggatgaattcaaagttatatgaatactaaatcttacatcttgggatatttatcaaatgttattaaaatattctgtgtttatgatgctccctcttttcccttaggacaaatattctgtcttacacacacatagataaatatattttactgacttcactgtttttgacctgaacagtcttgctcctgtgaaggtttatcatcttttccttggaaatataaattacattcctcatagataggaccagaccaataaatgtttacttacgtgtgtctgagattgtttgtttgtttgtttgtttgtttatttgagacagggtctttctctgttgcccaggcaggagtgcagtggtgcaattatagctcagtgcagccttgaccttctgggctcaagtgattctcccacctcagcctcccaagtagctgggactacaggcgcgtgctaccacgcccagctaatttttgtatttttagtagagacagggtttcaccatgttggccaggatagtttcgatctcttgaccttgcgatccacccg

SEQ ID NO: 169132 - DNA, 609 bp, Homo sapiens
aatccactcaaagacaaattattctggaaagcttgaactaaacctggtcagatgcttctgagttatgagagagggattgaaataaactttttcagctaaaaataattttgctcacaagttaccaaaaatggctgactagaaatgcttttaagatacttgtctaagctaccataagctaaaggtcaagaaaaaagtttagaacacgctatgagaaacgattggctctactttgctaaagcttttgccaaacctcttattctgtaatgaccacatgagacaaaagctggtgaaagtggtatgccttagattcagtggggacctagagattttttcagtggaacacatgtgctgcctatctcttctgacgacgaactagtacctgtggaaggcactagggttaggtgaaaatgggacacttcattctgaagctgttatacaattgcctatgccaattaattatttaaagcttttatcttctgttgcagagcaatttttgccctcagaatatttgtcagtcctcacaaagtgccaagtgatgggtatttagcatgtggcattgccgtcagtgttctgtcattttgtttagacacttctttgcatctcactgaa

SEQ ID NO: 169133 - DNA, 281 bp, Homo sapiens
aaattaatatataacctcttttaattcaagtgaggaaactgaggcatacaaaggttaaataacttgtacaggtcatgcatatagtaagtgcagagctttagttatggctttaaaggggagatgagcaagcaagtaaccaagtagatggtgaatgggggaaaaaaaaaagttcacaaactgtgagctaacactagatctggctaaatttagggcataaaataaaaagaaaaaaaaataaaggcaaattatatgagacatttgaccacaattgtatgacaaag

SEQ ID NO: 169134 - DNA, 303 bp, Homo sapiens
actgccgtggatgcatgacttgggggaggcctgtgtgtgtgccattgtgtgtctgcgtgattgtgtgtctgtctagtgtgttatgaaggtgcatgagggattgtgtatataccttggtggctgtggcctatgtatgactctgtatgtgtgtgtctgtgtgtttgtgtgtgggtatgcatgaatgttggtgccactgtgagttcctgagaagagccactcagccactgctatgtcccacacgagaccgcacaaccccagcccagctccctgcttgcacaaccttgctcctgagactctattccc

SEQ ID NO: 169135 - DNA, 259 bp, Homo sapiens
ccagtagaaattgtggcagaaaaataattgttgaaaaattttgtagagtcacaacagaattaatgatcagaaaacaaaaatcagaaaactaaagacatttataaacattgagtcatgaaaaaataaaacaaaaaaagttgaaaaacatcaacacggaatatgtaactaatttattagatatgattaaggagaccaatgtattcatgaaaggagtctttgaagaagaatgcaggagaaaagtcacagagaggttatttga

SEQ ID NO: 169136 - DNA, 431 bp, Homo sapiens
gtcctttctaatctaaaagtccaggagacaatagtaggaatatgaacaatgactagatattcttccttttactttaaagaaaaaggaatgaaatgaaacacagttcacaccatttttcaattgttctaacttagtcttcagaagttcggaacagcaaccattgtcatgaaaatcttgtgaaaggaaaaatcactccaaggaaaaaagtggttatatagcctttctacactgagaacaaaaaggggaagggctaaggaagtaaaaggaaccaagatgtttttgttagataaataagggatatggatgtgaaggcattgaccctttaaacatattttgctctttttttttttttttttttttttgccaaaaaagtcacacatttatttttggtaaaagtcacatggtaaaatctttctttatgaaaagaggaa

SEQ ID NO: 169137 - DNA, 257 bp, Homo sapiens
gggtgttatagacgctgctgaacatgacaaatacattggtgaaccagacatggttcctccctcaaggaggaacagaaggagacacggaaataaaatctcacagactatcaggaaggagggtccaacagcccctgttcaaccaggtgtggtggctgatacctctaatcccagcattttgggaggctgaggcaggatgatcacttgagcccaggagttcaagaccagctagacaacatagcaagaccctgtctgtattt

SEQ ID NO: 169138 - DNA, 301 bp, Homo sapiens
attcttccctcagccaacattgcttaggcaattaactactgtgtactctgcaactgctaagccctggaagaatccaaaccgaaaacaaaacagtagtgatgtttggtctttggagtccgagacagctgagtttgaatcccagttctgccacttgccggctgggcaaaattatgttatctctctaagcctcagttttctcatttgtattgtagatttatatagaaaaaggtatttgtgttgtgtttgtgtgtgtgtgtttgcctgtatgtgtatatgtcatagtgttatggggaggattcaa

SEQ ID NO: 169139 - DNA, 364 bp, Homo sapiens
cttgttctccctcatcctgcaaactgtcttgagagctgtcttttgtcccaggctcagctgggtggtctgcctctgctcttcggccctaccttctgtgcaccccatcatggcacaattcatgctcaattcaaagcagggagcaaaatggaggcagccactgttgtgtgtctccactgctaaatgaggctctcccgagtgcaaggctgcaggggggctttgggagaactcttggtggaatgcgattaggcttacattctttactggcaattgcctcagagttttcctgttttttcccatagccctatgtggacactggaattatgaacctggtatttgatgcagtgacagaaatgtaactgttgac

SEQ ID NO: 169140 - DNA, 157 bp, Homo sapiens
atgtcctgcactgaaccaattgaataacacagcaaaagagccaccagtatctgacctggcttctacagaccaaataaaccctttgtatgtttgtttattttcatctgtaactttgtttgcttatttttcattctgatactttttagtaaaatgagta

SEQ ID NO: 169141 - DNA, 386 bp, Homo sapiens
aactgaggccgtggacatgtgcttaggaccagtcttaacaggtaactatacacaatctataagcagagcatagtgcaaactccagaggtactgatgatactaatttcttccaaatggtgaaatgccaagcaaactgcaagagatgaaaaggctgggtaaaagagagagagagagacagatgagctttgagatgaacaaatacagataatacagctggagaaaaagaaaacagattatggctaagtggcggggccctagagtaccatacgtgacctacgaaagagacaaccacagacaccatgagcactgagtctcacgacactccaggcgccattttaagttctttatgtgcattcacttaagactgtcctggtccgagctcgatc

SEQ ID NO: 169142 - DNA, 115 bp, Homo sapiens
gttcaggagcagctggatatccataggggaaagaaattaaccttaattccaaactcataccataacagaaaaattatatgaaacagaatttacacttaaacagacaagctgaaat

SEQ ID NO: 169143 - DNA, 457 bp, Homo sapiens
gccaggtgtggtggcacacccctgtagtcccagatactcgggaggctgcagtaggggagctgcttgaacccaggaggcgtgggttttaacctctcttttactattttaaattttgggtgctttttatgacagtttcctatggaggtaagatgaattaatgtagaatggtcttatgttgcctagttctaaggatgtttctcttttatcttcttttacgtctttaaatgtattatctttaagaaatattaaatggagtattaagagaggtatagaaatggattttctgacaaaataataaaatatgccatagtaggaaaaagtttccagaagacaagagtttgccagtcatcttgttgctgactgtggcagtccattccctcacttgaaaggatcttaaaaaaacatttgtgtatcacttcaaaatattgttttactgctaaacatcactcttaattta

SEQ ID NO: 169144 - DNA, 380 bp, Homo sapiens
ccattctcctgcctcagtctcccgagtagctgggactacaggcgcccgccaccacgcccggcttatttttttgtattttttttagtagagacggggtttcaccgtgttagccaggatggtctcgatctcctcatcttgtgatctgtccgcctcggcctcccaaagtgctgggattacaggcgtgagccaccacgcccggcccagtggaggcttttctactctgcctgatgattgagttcagttgcaatcttagcattcacgcggcaactcagactccagctatgaagcctggcctggcagtggatgaactttgtacttcagaaattggtttaggtacatttatagttgctattccgaagcccccagaacatgctgcgaga

SEQ ID NO: 169145 - DNA, 474 bp, Homo sapiens
gattgaagatgtccaacacaagagtttaaaattgcattccagtcctggaggctcacactgcttatagtattttgcagattattatttttaaattgcaattatctgataaacagcacatactagttgacatctttgtatttttggcatagctttttttttctatgtcataggattttcaaaaaatggaagtaactgatagcctctcttaacttatgaggttcctaggtaagataagcaatgcaaactaaaactaccatgaattacactgacacacccacaaaactggtaaaaatttaacatggagggcataccaaatattggtgagaatgtagagaactgcaaactctcatgtgattgttataagaatttaaattgcatatctacaactatctgatctttgacaaacctgacaaaaacaagcaatggggaaaggattccctatttaataaatggtgctgggaaaactggctagcc

SEQ ID NO: 169146 - DNA, 562 bp, Homo sapiens
gtaaaaaggttgaaagtttagactgggcacagtggctcatgcctgtaattccaacacttcgggagaccaaggcagacagatcacttgaggtcaggagttggagaccagcctggccaacatggcaaaaccccatctctactaaaaatacaaaaattagctgggtgtggtggtggtgcgtgcctgtaatcccagctactcaggagactgaggcaagagaatcgcttggacccgggaggtggaggttgcactgagccaagatcatgccactgcattccagcctgggcaacagagcaagactctgtctcaaaagaaaacgtgaaagtttagtactaggactattaaattgaataagtggttaataatcttcccattacaaaaatacatagtcagatgatttggcaggcttgtctaccaaactttcaagcaacaaatcatctgtttatacaaattcttctgggcattgaagaaagagggactacttcagctcatcttgagagggtaacgtaaccctgctaaatccagagacgcacattaccaaaacaaaatcacgggtctactacat

SEQ ID NO: 169147 - DNA, 375 bp, Homo sapiens
ctctggaggctcccagaacaagccagggacctaagtgaagacactcccaagaccagcacccatgccgcctgtcctgccctctctgaattggtggccagttcccctctccaccctgacacaagtgcaggccttgaagctgaagtctcctggccctactaaaatggttccttgtgtaggaatggtgaccctcaagagggaagcaatgcagattttgaaacttgacagaattaaagcaactgtaggtctttactacccgcctgaccagctacagagaaaagtggaagccaactgtgctctgcaaactgttctgtagtctggcagtctccttcctctccccctctgcctgctgtcctcaaaacttaagaatcagcagaa

SEQ ID NO: 169148 - DNA, 425 bp, Homo sapiens
cccaaacgcctcattcaatttaattccatatacttagcatattaggcatcttgtcaatatttcctttctgaggtctatttttaaaatttgaatgcattctgcatgtgtaggtttttttttttcttaaatgatgagatctactgcaacagagagccagaattagctctgtgcctaggagaaaaggaaagcacagagggaaagaatatttctcacattctcagaaggtgtatgcaagagccagcccttggcacaattatttatacagtgccactatatctatctgcgtgcaccttcccctccatttgggagcataggcatccagtattctccttgggttttcttagtttctgtcaccattaacccttctactcagggccctgcattcccagtctttcctcgtttcctactttccccataaaaaactt

SEQ ID NO: 169149 - DNA, 649 bp, Homo sapiens
cctcaatgtctcatctggacttcacaccccagggcctcctgaaacctgcacgataaggtcttcttagcggccaggctcctctgtggaggcccatcgaggtggatctgctgggtgaggggctcagccgagcaccctgggaaactcagttccaaggggctgatttcaaatccagaaaccaagtagcagaatcctgcgacttcaaaagccacaacaaggaagccccccgggaggagctgaaaccttgagtggagggaatcaggattggaaatgacctaagcacagggcggggcttcctcagtggcttcttaggtaggttttcggacctccctgcccactctgctgttccccagtgccggacacccaccacggatggagagcctcatttaactggacacccacaacaaagtgtgcaaaaccaaaaaggagcaggctccaaagacgttgctgcatttttccacgcaggccagccctggaatcggggagcatgcaagttaatggggcctcatccccccttctcccgcccaaccctgagattctcagggaggtccccaggagtgtccacttcaggagtggaggggtctagcccttaagagcaggagaatgagaagagagggccttcagcctgtcaagttttcttatactttactta

SEQ ID NO: 169150 - DNA, 199 bp, Homo sapiens
tgattgccatatgaaatgccgggagggcaggctgccttcttaattcatcctaccatttcagctcactccagtctgccttgtcttcagaatttttcaggggatggtgagaaagtgtttttgttcacatgtcccctaaattccaagggatatgtgtcaagccctccaaagaattttcaccttttttgctccagtggaacag

SEQ ID NO: 169151 - DNA, 480 bp, Homo sapiens
tctgctgatcaactcacgtatatacatagttgtgaatctgcgtattcatgagggataagaaaaatgtagacaaaatccaacatccttttatgataaaactcttaacaaattaggtgtaaagaagtgtacctcaacataataaaggccatataaaacaagcccacagccaacattatacccaatggcgaaaagttgaaagcttttcctttaagatcaggaacaggataaagatgctcgctgtcattacttttgtcctagccagagtaattaggcaaggataagaaataaaggcctcttaatcagaaaggaagaggtaaagttgtttctgtttatagatgacatgactttatatatagaaaaccttacaggctccacgaaaaaactgttagaactataaatgaattccagtaaagttgcaggctacagaatcaacatacaaaaacaattgtgtgtctatataccaacaacaaactctataaa

SEQ ID NO: 169152 - DNA, 367 bp, Homo sapiens
tcagactgtgagagctgggatacaggcactgccaccatgccggctaattttgtattttttagtagagacaggggtttcactacattggctaatttgtatttttagtagagacagggtttctccatgttggtcagactgatctcgagctcccgacctcaggtgatccgcccgcctcggcctcccaaagtgctgggattacaggtgtgaaccacccattcctggcctcattttaaccatttttaagtgtatagttctgtgccattaagtacattaatattgtgtgaccatcaccactatccattatcattaaacaataactcccattcctccctctcttagcctctgctgactactgttctgctttctg

SEQ ID NO: 169153 - DNA, 625 bp, Homo sapiens
cctgtattcagctcagacaccacacatcccagcaacagcagctcctcaatccctaagcacacacatgttgtcaacaaagcatgtgctagttgccattcccagaacaatacgggcctggccatcctctggaaaaaaaaaatacacattctttcctgaatactaccctacgaatacattatgccttgatcatagatcccaaacactatcagacaaaataggagacaagcattgcacacaccatatctaatcaactgggaaaaaagcatcactcaggtgttcctgagggtccacgggagatgcatgtaagggatacactatgataatgatgcttgaacacgggaacaatctgggggcaaaggcagactcacgcaggaacaccccgaaaacgtggatgtggaaagcacccttctccaaaggcacaagcacattcctttgattggcaaaagccatttctgacaatggatccgcggtgacaggggctgctcggcaatcaggaagtgagtgagtgtatgagtgtgtctgtgttgtgggggagggatgctctagttgtgatcaaagctggaccttttcagagaaggtctcgaatcctgaagacagacttcgaggtgaggcaggggcatttatc

SEQ ID NO: 169154 - DNA, 200 bp, Homo sapiens
ctctttgccagtgaaccattgctttatctcaggtggataaggcctgtgtaactcatcctcttgcccttttgacttggccaccaggggtgcacagtttggcactaaggccccggggaccctgagaagcaggaggagcttggtctgtttgttctcaaggagtctgatctggtgagagggaggcagatgggccactggtccca

SEQ ID NO: 169155 - DNA, 378 bp, Homo sapiens
ggtatatcaaaagccagagacactggtaccttgtattaaaaccctggatattgtgtgctggcacctgaaggaaggttgtttagaaaacttaaactgagagtaaaactcaaaccaagtgtttccgtgaacatttgtgtcttcttaatttgaaaaaggccatgtattaaaccagtgctcctgtcagtgtggaactttctggtttctcaagaagagtctcttaaattaagcactaagttaatattacacatttaaacattttcgctttcgaaaacatacattgttgtgaaagtaaaatattaaatgtagagagaaattatcacttacacgtgtaccttattttgtagactatagagtccatttgtgctattattattttca

SEQ ID NO: 169156 - DNA, 435 bp, Homo sapiens
ccatataagaggcaaatccaccaccacagttgctgtatttactattctttttttcacagacaggggttttgctctgttgcccagtccttggttctcatccttcacccactttccagacgctcttatctcaacaaaacttgaggctcagcccacaaaagttatgacactagctatcaaagcctcatccaagattgcccaggctgcagtgcaatggtgtgatcatagcgcactgtaacctcgaactccatcaggtccagtctttttgttttagagagactaaaacaaaaatacgtttttttaagagaaaaaaccccgatctcttaaatgatattttctcctgtataaaatgaatacattgttgctatattttttacattattattatattattgttttggaagtactgtactgaaaaataaaagaaagaaattaacc

SEQ ID NO: 169157 - DNA, 186 bp, Homo sapiens
aggtcaaggtcaagggggagtgtaaggtcaaggtgaagtgtgatgttgggtgagtggttcagcgaggttcctgaaaggtaccatcaggttgtaaccaacagcttggaaacatccatttgtagtcctcttggcaatcttagagtgaatagttgaaagtatgggttatagtctgttcagtggtgctta

SEQ ID NO: 169158 - DNA, 588 bp, Homo sapiens
atttattcctttattcattcattcactaaaatgtacactgagcacctactgtgtgctacgccctggggagtgctaagttcttaggtagacagcgatgaagacaagtataggattctggggattctgccatccttagaatgccaccgtgtagagtcatggtttataggggacacagacattaatcaaaccacttggcaagcagagaattataagccatgataaagagaatcacaggatgctttgagcacctatagaaaggccaggagacaggaagcccggctgaatgggaaggaccatgggaggtgcaggagccaggcatatacctggtagaacttggcttggtgcttatcttcctcctgaaacatgaccctagacccttgagaacgtcccttcctgtgccctatccctcattccccacaccgagaaaatctgccagcccctctgcatggcccctccctctctgaggatacccgggcatctctccttgcttcctgttgattggtggcaggaggttctagtgccccgcatggtcactgactgaagttttcaggccagctaaggggtggggcttcaggcttgtgcggccgc

SEQ ID NO: 169159 - DNA, 473 bp, Homo sapiens
ctgccccattaccttgtcacagtagccactggcttctctatatcacccatattagtcagtttctctcaactcaccagtgatgttctttttgggagctgtgatctcctccagttgaatctctttggagggactcacagtactgcaatcaggtttgttttatccaggacctcagttattatgaggattcatatcttctcacacagggctccttgggctgacacaaattacacaacttagccaggcagctgctccagtgtcctctgcttttcatgacaagtaagaagttcctaaaacattctatgccatctagaggctgctctgcccagagcatgcaagacagacccctaggacacttgcacaatctgattctgctccagctgatgtcatttcatacgcagagtgtgataaattccataaagaaagcaccccaaaggcatgataggaatgcagaagatgaagctgaattcgaggtt

SEQ ID NO: 169160 - DNA, 1379 bp, Homo sapiens
gccttataagtggtttagtgctcagttggctctagtaaccagaggacacagaaagtatcttttggaaagtttagccacctgtgctttctgactcagagtgcatgcaacagttagatcatgcaacagttagattatgtttagggttaggattttcaaagaatggaggttgctgcactcagaaaataattcagatcatgtttatgcattattaagttgtactgaattctttgcagcttaatgtgatatatgactatcttgaacaagagaaaaaactaggagatgtttctcctgaagagcttttggggttgggaactattcttttttaattgctgtactacttaacattgttctaattcagtagcttgaggaacaggaacattgttttctagagcaagataataaaggagatgggccatacaaatgttttctactttcgttgtgacaacattgattaggtgttgtcagtactataaatgcttgagatataatgaatccacagcattcaaggtcaggtctactcaaagtctcacatggaaaagtgagttctgcctttcctttgatcgagggtcaaaatacaaagacatttttgctagggcctacaaattgaatttaaaaactcactgcactgattcatctgagctttttggttagtattcatggctagagtgaacatagctttagtttttgctgttgtaaaagtgttttcataagttcactcaagaaaaatgcagctgttctgaactggaatttttcagcattctttagaattttaaatgagtagagagctcaacttttattcctagcatctgctttgactcatttctaggcagtgcttatgaagaaaaattaaagcacaaacattctggcattcaatcgttggcagattatcttctgatgacacagaatgaaagggcatctcagcctctctgaactttgtaaaaatctgtccccagttcttccatcggtgtagttgttgcatttgagtgaatactctcttgatttatgtattttatgtccagattcgccatttctgaaatccagatccaacacaagcagtcttgccgttagggcattttgaagcagatagtagagtaagaacttagtgactacagcttattcttctgtaacatatggtttcaaacatctttgccaaaagctaagcagtggtgaactgaaaagggcatattgccccaaggttacactgaagcagctcatagcaagttaaaatattgtgacagatttgaaatcatgtttgaatttcatagtaggaccagtacaagaatgtccctgctagtttctgtttgatgtttggttctggcggctcaggcattttgggaactgttgcacagggtggagtcaaaacaacctacatataaaaa

SEQ ID NO: 169161 - DNA, 520 bp, Homo sapiens
cagctctatggatcccctgagctagcgcccaccaccatgcccagctaatttttttgtatttttaggagagacggggtttcaccatgttggccaggctggtctggaactcctgacctcaagtgatccgcccgccttggcttcccaaagtgccaggattacaggtgtgagccactgcacctggcttgagcatatactttaatggggaagagttgacaaatgaaataatacctgccttccaaccccaaagttaatgtatctgttttttaggagaagcttccagaactatctactgccacagataactgtggtctgtattttcagtcccggatgttcctatttgaagcttttgtttttctcctaaataagcttaatatcttttgttgtgagactcagcttcattttccaagatggtggcaacgtttttcttgctaagactgtaattttgagagaccctttacaactaaacttctcaatcataagtacttttctagcacagtgctagttgctgtgtgagatataa

SEQ ID NO: 169162 - DNA, 499 bp, Homo sapiens
cattctctgacccaatacagcttaatattttcattcctggctccatcacaccacagtccattgaattaatccattttaaggctactcaaaaattggagctggtatttttcaaacattcaacgggtgaccatcaactaaacagctcaattacaacccctacttatacaatttttcttgttataagtaatttaggacctccatgggagaagggagaagggataatttattaaatggagttaataatagctactggtggtagtaaggaagctggaatccttgcaccaccaccaaaatagataaaagatttaaatgtaaatagtgaaaccaaaaagtcctggaagaaaacatggggaaatatttaagtcatctcagggaagggaaaatattaagaaaaaaagccaaaaaccaaaaaaaacataaaacctattagtcaaagaaatgtaaaatgagatcaatatttaatcatcaaacaagcaaaaataaaattatggtaagtagt

SEQ ID NO: 169163 - DNA, 438 bp, Homo sapiens
gacaagatttacagggctctgcttatttggatgaaaaatagagaaagacaagctgtcagtagaaggggaggggaaaatgggaagatttccttttctctttttttggttgaagtttagaagtgttttgaaatcatgattctttaaatgtttggtttttgaaaggaaggatttcaaagtgaaactcagcaattggcatgagacaagactcagtgtcaaggtggcaaaagttaggacagacagaggcagattggctgtggattattgtagggagggaagagtaagtcaagcctaaggcaggagatgactttctgaattacccaattaattccagaaacctgttggatgattataactcagagagcttgccatccatgctctgtatggaatactaaagtattgtgatgaatagaattttgttcaacaagcacattttggaaa

SEQ ID NO: 169164 - DNA, 764 bp, Homo sapiens
cgtcggcctcccaaagtgctgggattacaggcgtgagccaccgcgcctggctgggaagtcttttttaatggcaataaccaaatgaactctcttgaccttgctgcctctgcaggcactgccccgccccggcccttccactctagaggaaagcacctggcatttagcatctttacacacaggaaacaacagatatgctcagggacttttcctctagcttgtaaccagggatggctgttgggcttggcagccgtcaggctgagagtgactcagcttaaaaggtttcattgttgatatctgccctgagcattcccctttggacttggagttccaggatgtcttgtgtctgtgcttcagcatctgaagccccttgttgcctgttcttaaggtagactgcattatcaacggtgtcttaaattaatagcttctctctactgactattcacttgtcacagctgacatgaaggttctcagtcctgagtgcctattaatgaagctcacagatagagtgcagaaaccctttgcaagatctgttttgccagcttgctggtgtcctggcatgaaggtctccgaccgacgtctttgaaatagttcctggccgggtgcggtggctcacgcctggaatcccagcactttgggaggccaaggcgggcggatcacgaggtcaggagatggagaccatcctggctaagacggggaaacaccgtctctaataaaaatagaaaaaatagccgggcgtggtggcaggcgcctgtagtcccagctac

SEQ ID NO: 169165 - DNA, 703 bp, Homo sapiens
  misc_feature (616)..(616): n is a, c, g, or t
gtaggctgcgggctgtacatgagttgatcttattataaagtgaaagaaggaagatacgtagaatatccatggaatggttccatcctgccaacgcgatatgaacatctggtccagagcttcaagaagataacaaatgtatttcatctctaggcctctgtcaacttttcaaattttctaccactgttttcacaccaagaccaccataacagccttagcattatgcatttgcaacttgcgtacctccctgatgtttcccgtcccctctctccctttacagaagcaattacttgggccaggcacagtggctcacctattaatttatttattttgagacagagtctcactccatcacccgggctggagcgcaatagtgtgatctcgacttattgcaacctctgcctcccaaagtgctgggatcacactactacagccggctgaatatctttatatctaggtccttgtaaagctgtaggcactaaagaatatattcttaattctgctttactcttctttaggtctgtttcctgcagctctccaagctgcgcgcctctgcttctgttttctctccctgtgtttgcgcatcttctagctttgcttacgttgacttcctgcctgnccgttttatcactcagccacatctgctttaaattgctctttcctgtgttggcccaagcaacttttcctgtattcatttagttcctgg

SEQ ID NO: 169166 - DNA, 581 bp, Homo sapiens
tagcctattattgatttctagatgaaaagatcttttatctgagctatggagagtggaagaggacagggccgggagagtagatgaggaagtctttttcatctttcttcagtttttctctgggagactctgggaacagagctgaagtggtgcgaaagcaccttcacacttcctttgctgaggtgatccgctaattgcatgctatcaggaaatgtgtaagatgggagtgagatggtttcccagggggcccttcttcctgtgctccatcaagaaatacattttcacttgctggtgtctgagcagtgcctgtgtggctgctagagaatccttctggcttttctaagtgaatgcacctctctaagctgcaagctttctggatggccccaccctggtctcatccctgagaaatcttgtcattttttcccactggtatagttttcttctgcatgagtgatgcacatacactgcccggcccattagttgtaggcgtttgtggctcagtttgctccatttatttcttattttgttctcaggcatctttagggctgtgagctacagcttttctccttgagcatggatttgta

SEQ ID NO: 169167 - DNA, 351 bp, Homo sapiens
gaggtctgggaactagggtaagggacatgaagatggggcagatagcacccactagcaacccgcccccaaccccagcaacacactgaaactggctgccagacaacttcgcaaagattccctgttacggccaggacttgggcaaagagaaatggattggctggacagtcacccttcttcatacccagggccttctgggatcctgttcctttgaaccagcctttctggctgtcttatgtagaatattttcagggtcctagattggtgaacagttggaggtttcaggaaaacccgataaaaattctttattgggggaggggctcaaacaagaaaataatcaacaagtggtgtcca

SEQ ID NO: 169168 - DNA, 459 bp, Homo sapiens
ccttaatagaatttcagtttgaaattgatactaatacgttgtcagagttaccagctactagaatttggagaactgaaaaaaacagagcaatccttatgagttatatatgtattagcacaaaaataaccaattaaatatcactcaactaagaaaatctgacatttaaaaaataggaataattctctctttgtaattaataattgttatgaagaaaaattataatggttacaccctttcaaccagactcaaaacaccttgaagaggttacgaattctcagtacttttctaggtaatagtaaagattagtggcaattgtaaggaagataatgaattaaaatgttccatgtctagttaaggtcagggcagtaaaaataatggatgccaggatgctaatttctactggaataaatgaaaaatacaaagttctctgaggtgggagagctattttaaaaatcaata

SEQ ID NO: 169169 - DNA, 223 bp, Homo sapiens
accaactcactatctttgaaaggcagtttgggaatgttctccctccttttcttctctattcacacaccaaatactattttctccaaaccctcaaatgtccagtcatgctatcccaaactctccaatggcaccatccccaagcttgctgttccacgacacattgctctgtacttagtaattacccacccttcttttcctttcaataaaatgtccatttccttga

SEQ ID NO: 169170 - DNA, 263 bp, Homo sapiens
acatagaaagctgcaattatatgaagtttgtttttatatggtgagaattaaggctccaacttagttttcttacaaatagataattgcttcagtaccacttagtggaaaaatcatcttttctctattggtttgaaataccacatttatcctgtattattaatatcgtactctctacttttttaaattagcaacttacctacacttctctctcttctagattacaaaaattatatggacttaaggaaattcagggttccaattct

SEQ ID NO: 169171 - DNA, 301 bp, Homo sapiens
catgcaagccttcatagtggttgtctttatcaggttgatatgtagatttttgtcttttaaatttttctgtactgtcttaattatctattatggacagaaattatttttcaattctcagaaaatgtttagacgtaggggaactttttgcagctgtttttatttgagcagctacaaacaaaatgtaaatatttcacctaaaatgtatatttgttcacagtaaataaattgtgaaacttgattagaaatggaaccaagattcactaaattggtctcagcccattaactatgaggaagttacata

SEQ ID NO: 169172 - DNA, 189 bp, Homo sapiens
ttttttttttaacttaaaatcccatccattctttgaaaatcagtacaaatcccacctactttatggagtctccccatccactccagcccacaatgatcactgcttttctctgaatttctaaagcacttactggattgtataattatttaaatgtttcatctgtgtatatcttgtctttccaatgagatt

SEQ ID NO: 169173 - DNA, 374 bp, Homo sapiens
gtatggagtaggtggagaattgggtctaactagggctggcttttgtcgagtgagtgcagtgtatctagagtgggcaagagggtagccattcctctgcctcgaacccactgtcccagatatccacgcgaatccctccctcacaacccccaggtctccactcagcagtcatctccttgggatgtccttccttacacccttctctctatccctctccctacatgacacacagtgaacatctgtttcattacttgtttgctgtctgtcacctcactaggatgcagaccccacaaggccatggatctttgaccatttggttcattgctgtatcccaggaacctagaacagtgcctggcacatggtaggggcccccccaa

SEQ ID NO: 169174 - DNA, 307 bp, Homo sapiens
gaggctgggactttggttttggcctgagcaaagtggtaagagaagaaagagtgggaaggggacactggggagccaggtaaaatcaagggtttggttatggacttgttgaatttgaaatggctgggagataatctagcaaacttggagacaccccacccagatccccttcaaggagggacttgctcagctgtggggagtgaagttggtagatggcttccacctggccacaactggcctgcagaaagccactttgtctgaggtcacacccttcttaaggcagcttgcatccatgactgagcaagtcggg

SEQ ID NO: 169175 - DNA, 528 bp, Homo sapiens
gtacacctccttacctggaaaaccaggtgaagatgtacaacttaaatctgagatccttggtgctggtcagacccaagcagagaaattttcagcccatggaaaaggtctagacccatctgtatattcagcaaggatattttatctaacaaggctctttctggcatgacatgtgggattggtcaacaagaaataggaaacatgtaccactcacactgaagcatcacaaaccagtccaggcagataaacacgagtggggggtcacttgaacacagaagctctcaatcaagttggtgatctctggacagacgtggagaaactcctagttccacaaatatcctgattttctatagctgtgagcatgttctgggtcatgaataccccgatttaagagcttggtatgtatttgaaggtcaagaatgcttaactggaaattactgctatgcacagcaaatgcattataagcaaagaaagtgggtctgtgacaaattaatatcattgatactgtgcaaacccacaatgatcatttgt

SEQ ID NO: 169176 - DNA, 328 bp, Homo sapiens
cacctgagttcacccacactggtgagagacagtttcttgcacacagtctgcttcccgtattaagctccttttctctctgtttctctgcctgagcaaagggagggcgctcagcagcagtaggcagcatgttctttataaaagtataaaaatgtgtgcttgcaggggaaaggattaacactcctagaaggagcctcaacccataacccatgggagatgggagttgtgcattaaatgccccagccatgaagcttgctccttgctttcccaggtgattccagtgggatggagggagccccaggtgctcacattagtaaaccactcttcattc

SEQ ID NO: 169177 - DNA, 497 bp, Homo sapiens
agggcgggggcgtgcctcccagccaatcacaagccacgtagttgggcgcgcgctctctccatgacaacggcctggggttctgagagctcctccgggttctgctagctactcaagagttcgaaggcagaaaagaccgactcgcaagtcccctggaaaccgggaacgcaggggcgggacgagagagactggcagaggtctccacgtgcccaagtggtgcctcaaagcctcttcaaaccccgcgccccggtgggcaagaaggcactcctgggcttggagggcggaggatgaggcattcagcgggacctagtcctaacccagcctgggagagcatcagggacccgtcgttaacgtcaactgcctttcttgttgcctgctctatctttcatatccacgaggatcccattctccatgatgtgcttatttcacgttgcatgtctatcaaaacatctcatagaccccgtaaatatatacacctactgtatacccacaaaaattaa

SEQ ID NO: 169178 - DNA, 370 bp, Homo sapiens
tgggactaaccttgcagcctgcaggactatggcccagatgacctttccggagcaggggaagagttcacaggtctcagaccaggttgaccccgagccctctctttcctgcttcgcataggggcgggccaagggaggcagggacaatggcattcctgtttgcaggcctttgttcccgccaggagggcccccggagctaataaaaaggtttgtggctccgatgtctaagaggcagtggaggagttctttcaagcctgacattccaggcccagccggcctctggcatttcccagaaaaacttcgaggaggggaggggaaagaaaacacttgagtcgacgcggccgcgaatttagtagtagtagtaggcggccgc

SEQ ID NO: 169179 - DNA, 139 bp, Homo sapiens
ggtgatcccccagcctcggcatcccaaagtgctgggattgtaggcatgagccaccacacctggcctccgtaggttctgttttctgatttttttctgagtttcagagccctgcatcactgccaggtgagtgaaatgctgg

SEQ ID NO: 169180 - DNA, 508 bp, Homo sapiens
gctctgggaggaaggaggcaaaattcctagttgacagtgagaggaaaagcagtactagacggaggttcaaggaagtctgttaatattggacaaggtttgaaatagccactgcagacaatgggctagttggtaaaggtccagctaggctgtcacccaggaatgtatagccaccccattctgtagttttgtgacatcctgcttcctagctgtctgacctagagcaacttcacttagcctacttaacttcactgcacctgaatttcctcatctataaaatgggcatgaataaaacaaagccattgaaataaatgagttaatccatgtgaagtgattactgaggacactgcctggaacatataagtgcttgatggaaatcaactctttagagttatttttatttttgattgacaaatcataattgtgtacacttatgggatataatatgatgttttgatatatgtatacagtgtggcatgattaaatcaagctaattaacatatccatcacc

SEQ ID NO: 169181 - DNA, 480 bp, Homo sapiens
ctcttccaaactttatttttacaaaataaaaatgactatttgggaaattagccttaatgatgaataaatcacttaatcaaacaagaaaattgctcttacatctcagaacatacaagaaggcaaattgtacctcccaactccaaatgaatgtgattgataaggggctctgtggaaaccaaaagtgaccctgtcaattccaaggtcagtgggataacttacaggacaatttattttagccttaaacactaacttcttcctctttgactttacacctatctaaattcagatggccttccttctttttctcagttctccttctgctcaaaatagcacatataaaagaaagtcacttctagaccatcaaatgaaggcaatctctggttaaaaaaaaacaaccaaacaaaaaccaagaaaggaaacagagatgtgtttatgtgtgtgtgtgtgtgtgtgtgtgtgtgtgcgtatatatttgcttca

SEQ ID NO: 169182 - DNA, 436 bp, Homo sapiens
ttagttgggagctgcatggaagattatctaaaattgaagaatagattttctaatcttgattggaataatatccacatgctgtggatctctctgtgaagaggcctgttttcagtttagacatcatggggaaaccactcttcccatcaaagtgagctcccccaaggatgaaatggacaccatgctatctacttgatattatgaagactgaatgaaataaaaagaatccagcaaagtgcctgaaaaaatgtaggccgtccatattccaaactgggaaaaaaatgcttaatgcaaagattaccacgtcacgtataaaaacaaaatactggaagcaacctaaatgtccacagtgagagaatgattttcatattatgcctctgttgaaattggtagcaatataataaatagtcattatgaaaagcatggagcaccgtaggaa

SEQ ID NO: 169183 - DNA, 388 bp, Homo sapiens
aacagtaatctaaagagtaggaatgagatccttggcctgtaagaaagcacttataaatttgcaagaaaagtgagatcaagatttgaaaacagacaactttgggaatgaaaagagatggatttttttaaaattaggattaaaaagcatcatcaacactaacagttaaaaactaacaaatgacctaaaacataagaagattttaaaagtgtgaccacttctaggccgggcgtggtggctcacacctgtaattccagcactttgggaggccgaggtgggcagatcacctgaggtcagaagttctagacaagcctggccaacatggcaaaaccccatctctactaaaaacacaaaattagccaggcatggtggcatgcccctgtaatcccag

SEQ ID NO: 169184 - DNA, 438 bp, Homo sapiens
cactgtgagccgccgcgaccctccttgactcgccgtgacccatcgtgatccgatgtgatccttcttaacccgccgtgacccgctgtcacccacagtcacccaacgtgattcgccgtaactctggtgttgtttgctgcttgctgcccgagcctgggcgtacccatgggcgcgggtgacagtgcaagtgcttgggacgacaacccgggctcctcatcgcggccggaatccaagaggctgcggcgcgaggtctgggtattcgggggcggaaccctgggagggaaggggagcaaagggagacgccgcagcgtaacgccgcctggccccagcgccggcgaggctccttccgacgccgcgggcatcccgcgcggcgctgccggctggccctcctctcgtgtccttccgccgtcccaagcagggcctgggccagcgccccgcgcg

SEQ ID NO: 169185 - DNA, 144 bp, Homo sapiens
cttgcattaacaggttggtctgctaatttctatgtagtttgagaatcagctcttctcaaagctttgctcagttcatgttttagacaacatataattgtggcttggaaagaagtcactgaataatgtcctttccttttcactttg

SEQ ID NO: 169186 - DNA, 483 bp, Homo sapiens
ctggggtgaagtgattctccatggcctgttcaagtgctgccattacattacaggtatgagtcaccatgcccagctaattttatttttaaaaagagaaaacaacttcccataacttccacagttcagtgcattagataccaacacctgcgtgtctgtcttaacctgcgagctctgtcactcctcccactgctgttacagagagagaatgggacgggtatgagaaaaatggctcagaccctagacagagttctattttgtaaaccagcccttcatgaaaatttttttattctttgatcacattataatataaagaatattattaaaggttttcttgaataatggtgaatgtcaataatatacagcatttgagcttgattttgaaaccttaaaaaactcattaaatggcactgcatcactgtatcttttagcctttttggaggaattagatacttaaatgtctaaatgaatctgccctttatatta

SEQ ID NO: 169187 - DNA, 338 bp, Homo sapiens
tgatagtaagcccaagtttacagctttccattgtttttactgtcatttttttccaatagtttgttttactttttaaatatttttatctcaatgttattttagtaaatagtactacgttatggaagtctattttatgcactgctcattctctatagagttccttattgcaagatttattacgtgttttttggtggtctagttttgtgatcaattttataaatatggcttacctcctcaacatagtatatagtctatgactgtaaagttaaaaaataattatctgtcttaaaaattttaattatagtattgaaataatctgtattcgtatcattaaaata

SEQ ID NO: 169188 - DNA, 458 bp, Homo sapiens
taaataacatgggaaaatgggtatgttataatgaataagaaggcgtcagactaacactattaaacaaaaacatgcacagaaaaagcatcagtgtgttcacagtaagaatgtggccattttttccttcttcctatgttttgtattttccaaagtatgtgtgttacttttacatgagaatattctttaaaatttatttttaaacagcgtattcaaagggcacaagaatatcatatattcaaattttagagaataccccaaatccttagggaggcagctaccttgcagactggtccaaactttaagaatggaaaagactggggaggcgaagactggaaggcttcatactttaaaatgatggccctaagtcagctgtttataacttagcacataccattctcgaagaaaggatgttataaagagtggttatattcccagggtagcccatacagccaggtaaa

SEQ ID NO: 169189 - DNA, 354 bp, Homo sapiens
tgtcaaatcccgtcaggcccttacctcaaagccacagctgactgtgtttgttcagactccacagtgtggccttgtatgcaggttcttcccagcaccctcttctcacacagcttgtcctggggctctaggcattctacatcaacctccaaagaggccacgctctttcatacctccacacattttgcctatgcacatgctcgttttttccacctaccgacttgcttctggaaactcttctttgcatctctcctcttgcaaagcattttggcacaagcctcaagcctagcgagtgagtgtcgtgtactccaaggtgatgctgaccatgctggggacagttcatttctgtgccagtct

SEQ ID NO: 169190 - DNA, 540 bp, Homo sapiens
acagagaggagtagatgaagtctgtttggacatgatgccaatttttagtcttttctctttgccagtggttaatatttcctggatatttgatgagattcttagggaggagtcatcttaagacaactgcatttcttttggaagaagttttcatcagtcaaataagggaacttccaaagagagcccctccctgtgcttgggagatggggagaaacaagagaaagttaggaagtccttggttctgaggcagcttataaggccctccaatagcttcttttgttttgttttgttttgtttggtttggtttgagacagggtctccaccgtcacccaggctgaagtgcagtagtgcaatcactgcagcctagaactcccaggttcaagccatcctcacacctcagctttttgagtagttgggaccacaggcaccatgcctagctaatttttttttttttttttaatttgtagaaacgaggtcttcctgtgttgcccaggctactcttgggctcctgtgctcaagtcatcctcccaccactccagcctg

SEQ ID NO: 169191 - DNA, 338 bp, Homo sapiens
agcagcctgaatgaaatgataaaaatatacaattatgataaaataataaaaagaccattttggtagtgctatgcatacatataggtgcacctaatccaggctcatgaaacttagaggacttcccaaagaaagtgacattcaaaatggagagctgaagactaagtgttagtgattatgataatgatgttgaaaatatctttgcagagttctcaccatgtgccaggcactgagttaagccctctatgtgtatttcattataaaaccattaaagattattatcataattgtatatttttatcatttcattcaggctgctataaccaaagtgccattgaacc

SEQ ID NO: 169192 - DNA, 107 bp, Homo sapiens
tacatcctgcaactgttcacctctcctgccgcctcatccctctaaacttctcttcacaacctcatgtttccttcttgctttaccttcctgctcagcctggaccttac

SEQ ID NO: 169193 - DNA, 500 bp, Homo sapiens
caaccctggagaaaagtgcagaatggggaggagcataaattaccagcacacgattcatactccaaaactccactctgatgtctggctttcaagaccttccattttatggctcttcccaagctattctctaccaaccccgcagaagagggcagaatgcagaggagagtaaataaggggatgagaacgctgacgaatatagccattgtcccttcctcaagagcagtaataaagttaccttacaagctgtttaaccaagagcctggaggatgacaatacaaagagtagacacaagggggagccaatgggtccatcttaaaagtaactggagaccaggaaattgggcttttaagaactttaaattccacaaacaagccacaaaatgggaatgaatgaagtctaagagtaacaacagatgccatgaaggaaagcagcaaagagcaggagacactgagatttctgatttttaaattcagttctgaactgaattaaaaaaccaaaag

SEQ ID NO: 169194 - DNA, 421 bp, Homo sapiens
tttcaccgtgttagccaggatgggaccttgaagtattttagatgagaagggaagtagatgtatattggcagcagtatggatggtgataatttggatggtggcaagaacagggatgggctgatgagatcgctactgcagaggtccagtgagatgtggaggcagtgtggagggggatggtagaataatactggaggtgaaggtaaatgggtagactcgagaaatacttagacaagaggattacaggacttgactggggacggtaagggagaagggcgactcctaggttttcgtgttgcacaactagctagttaagcaactctggaggcagatcaggtttgtgcaggaagagcaggggttcagtttgggcatgttgggactgagataactttcagatactcaagagatacacgataagcaggtc

SEQ ID NO: 169195 - DNA, 525 bp, Homo sapiens
taacaaaggtgatctatgtttacattgcatataaatatcacacatgcttccatgaagccattcctttttcttccaaaagtgggttttcaggaaaaatggaaatcaagactctcatttatatgccaggtggtccaaactcatgatcaacaggtacagccagtagccccgtatgaaatgcttcatgtaaatatattttatagaaaataagactatatattaaggaatttatttaattaaagaaacactgtaataaatcgactatgtaacatatatcaattggaataaaaactcagattttttcctcgacttatagatcagaaaacaaataaccagttttttttaattagcattttattcacttcaaaattatgagaaaaaaatatgtatagtcggcctcttttatcacttggtcgtgtatacttttcatccttctatgagccacacaaattcaattccatgtacatacagattatgtaaaaccacctactacactcaattaacagaaggaaaataaatcatgaggtt

SEQ ID NO: 169196 - DNA, 326 bp, Homo sapiens
tgcccagaagaaggagctgccaaggatggagcctgggacacgtggtgacatttcctcagcagcagagcaggtcagggattcagagtgagtctggaagagcccagatctgctctgtggtttggctgccttccttgccatgggaagaagccatcaggtgtcctgtggatgcctttccggaagcctctgcatccttgcatcttcatagtggaggatctgcctttgaccccagctcagctttctcgtccacattgcctaggagggtacaatggagtggaccaacatctctccagcatctgccaggcgctgcctggccctggacattcgtt

SEQ ID NO: 169197 - DNA, 112 bp, Homo sapiens
catttgttaatactcatctttttcttcccccaaatcaccaaatcctaatgatgcctctcctaaagtacatcttgaattcatccatggccttcctgtatccgccccccaagtc

SEQ ID NO: 169198 - DNA, 343 bp, Homo sapiens
gcacacgcacacgtgcacaggcacatgcacacacacacatgcatgcacgcatccgtgcacacatgcacatgcacacacatacatgcacacacgtacatgcacacacatgcacacaggcacacacctgcacacaggcacacacatgcacacacacgtatgcacacaccatgcgtccacacatgcacacacacgtatgcacacaccatgcgtccgcacatgcacacacctacatgcacacacatacatgcacacacatacaggtacacacctgcacacaggcacatgcatccacacacatgcacatgcacacacatacatgcactcacacaggcacgcataaaca

SEQ ID NO: 169199 - DNA, 242 bp, Homo sapiens
gaaatgttcctgtcatgtcaagaatcacttctggtattccccataattactgttttgccattctctaactcaggttatcttcacttgcaagtctgttatcaattgagatagatgataggtatcaatcagaaatataattataaatgggctcattgagaatggagacaagaatgagtatttcatatttctaaggatgacacaggaggcataattattgttatgtccgttaagtaagaaaatcc

SEQ ID NO: 169200 - DNA, 196 bp, Homo sapiens
tgtttttgttcttctgggttcagccatccagcagagagctactgggctccaggctggtactagggagtgtctgcagagagacctgtggtgtgatccaccttcaggtctgtcagctgtggataccagcacctgttcttgaggaggtagcaggagagtgaaatggacactgtgaaggtccttgattttagttttgttt

SEQ ID NO: 169201 - DNA, 502 bp, Homo sapiens
ctgacctggattcttctcttctattaactgagaataatgatatttttggaacagggttcctggagactgaaagatataacgcatgaaaaaatcaagcactcatttggcatttatccttgctccccttccatttccttttctgagcagtgatttcaagtcctctggccaccctaaatctgaagatatgtctcacctcatcactgggcctttctagggaagagaatcccatgctttagttaatggaagaatgacagcattttagaacctttacaggccaactcggagaggcggtcatttcacagaaaccaagaaaagctgctacctcaaggcctgaaactcatctttggtgatgacctatggctactgcttcagggcagggcagttccatgccagacaaggtggtagaacctccacatgctacaggcactgtgataagatgcaagcggtgccatgggcacttttcatatacagtcttatgtaatcctctgtgatcctgaggcac

SEQ ID NO: 169202 - DNA, 423 bp, Homo sapiens
ttttccttatagaactgctacattgctaaataagcaatcattaaatgctttaatcaatttacccagctttgaatttcttgactagtatcattctgaggatgtatcttttttttcttttcatttctttagtattttgctctcaactttgttactactcaggtcactgattttcatgattaaataatgttctaacccatactgtgttataaatatatccatcaatattttgctttataacatcagtcctcatacaaaagtgggaaatttaagtacatgtatctgaaataaaaggcttaagaaacacatttcttctgtgtgtgaacaaggagaacgtacaaattaatatgccactcctctaccccatcttaatttcatcttcagcagctgactcagtctacttcctgcaggaacacttgattgtga

SEQ ID NO: 169203 - DNA, 603 bp, Homo sapiens
ggctggagatctgcatttgaaaataatgaaggatagggaagacttatttgaaattttcttcttggcagttcaaaatgtctagtccaaccactaattgaattaacagacaaaatgaaccccaaacagcagtattgctggtacaaaggaaggaagttatgaatacaaattgtggcctcatgatcagttgcagaaaccactcaacacacacataattatagataataaccaataatagagatactgagcatgttttcatttgcacaaaggatcatggcattttgttaggtgagagcatgtttggattgctactgttgtttagaaattaaagtatggacagaaggatatgtagagatgttaactggccaaaggagtggaatatgttagtgttggtgggtcatttttagcattgattccaaactccttatagaggatcttcctgtattgcagaagctggagagcttaaaaccacatttctgatttcctgaattctaaggtagtagattggatacacatcttatttctcttcctcttgaaatcctacacaaggtacaataaagagatttattttctaaaaaagatgtaatccctctggaactgggtgaa

SEQ ID NO: 169204 - DNA, 403 bp, Homo sapiens
attcactagaacttttacgtttgtaaaggatttttacatttgtaggaacattaaaaatcattaggaaacattagaaatcatctacttcaactgtgacatttaggctacagttatttgactaggttttttttttaaatttatgatataatgaactttaaaacgatattgttgggcaatgacacaccccctagaaataaataatgataacaatcttgtcagatcgtaaaatttgtttggatggtttctgcttctacaatctctgatttattcagtgcacagaccctcctttttcacaggtaaaaaaggatgggaaagatatggttgtcacttgcctgatggtgcctttctgaagtcagctgggttttccttttcttttctttctttctctctttaacttattttc

SEQ ID NO: 169205 - DNA, 316 bp, Homo sapiens
cccctacacagcatcggggcagccactgggagcaggtgtcactcagatgccaaaccccaaacccggggctgggtgggaacacgcaggtgcatttggctgtggcagtgtgagtgcattcctcatgcttagactaaaaggaaaccacgagccacacaatgactccagggaaaaagggagtttggaataaaccctccagcatgccatcggaagggccccgtgctcagccagggtccgctggggcccagggctcctctccaagctgccaaaggccatgtctcattggcttccagactcagaccccctgcccacgaccctc

SEQ ID NO: 169206 - DNA, 287 bp, Homo sapiens
ttccactagctacatttagactgatatattcaaattatattcaaatttttgttttacataaatgcattgccttggccaaactttgcttcatagggaatgaagtaagtacattgttctggtgccccttcacgctcatgaattacatgtaacacttagaataaaacattttatgtgctgtgaaaaatgcataggcaatagttaaaaatgtaaagataaaaaaggagtattaaatgtcttcagatctctttttacaggttaattttagcatttggtttaaaccaccaaaa

SEQ ID NO: 169207 - DNA, 708 bp, Homo sapiens
gcacaaggacttcatgggggacatgtgacttaccatcacatgtggaaaaagacttgtgaattttcctaaccactacctatgtggcccacagagtgacatgatgttccaaaaaacgaatacaacctgtatgcgatcgtagacacatacaccacaccccaaaacatgctacacaggatataattttcaaagtaggacaacaaactgcctactttattttaagttggcattttccaagtagttctgtgttcattactgcacaatagaggtataagtaaagcagggcatgtctaaaacaatgtggccatttgatgaagggcactcgaaaatgtatgattgagccaatcacagatactgaggaaacttgaggccaggattttgaggctgcagtgtgctacgattgtgcctgtgaatgaccactgcatttcagcgtgggaaacatggcaaaacctcatctcttaaaaaaaattaaattaaaaatgtattatggaaaaccatggtgcattgctgtcttcaataataaaggactagagcaaggatagaggcttagatttaaactttgtttgctccaacccttgaagatacatagaagcagaattcaatacaacataatttttagccatatttagagaatccaaaaatgaagcaggctcatttggaggcagtgagtcccttattactggaaatattcgagcaggaatttcagtagcc

SEQ ID NO: 169208 - DNA, 419 bp, Homo sapiens
cagcagtcccctcgtcctcaatttcactttccatggtttctcttatgcaaggtacggtataataagatatgttgagagagaccctacattcacataacttttattttagggtattgttataattgttctattttattattgttgttaatctcttactgtgcctaatttataaattaaactttatcacaggtatgtatgtatagaaaaaaacatagtatatttagagtggagtactattttggtggtttcagacaaccgctgggagtattagaatatatgccccatggaaaactggggacatgactgtataccacactaaccctcacaggttcacatttataagcatttttcatttgatttgctcctcatgtgcaaccaaggtatagagaaagcagatgggggaactaagaagaggcaga

SEQ ID NO: 169209 - DNA, 163 bp, Homo sapiens
agttggttttgactagttttgcctgacatcattaacaatcatgcaagtgtgagatcctggtgcgtctgaaagctattttctccacgtggaaggtaacttagacatttaataaaacctcacggtagtgggctttttcatttatttaactgtcccccacccctca

SEQ ID NO: 169210 - DNA, 300 bp, Homo sapiens
gggtggaagttcagcaggagggcacatgagaaatgcagctggtgcctaatcgccacgtttgaggccttcagctaacgcttcgctagaggaactaggattttctgattaactttgtagaagaagtgtcggaaatgcttttcaacacgtaggttgtgacattaacctcagcataaaaaacccctgtatgccttctgggtcagaaatcagaggggcttagcattctccaaatccccagtgatgacgactaaggtggattcaaaattaagacagataatttcctaaaacaaggtgctctcattc

SEQ ID NO: 169211 - DNA, 434 bp, Homo sapiens
gggccaagaaggtgctctattacttggacagcctcttcagtagccagctcctgtagtcttctgctcattgaggacaagggacctgtggagctgctggaggagtctgtgttccagtttccaagaaacaccacgcacagcccaagatgtgactggttgggatgggactgggtgcagggaggccaaggaggggcttcctgagggtgtagctccaggtagaaaccctgaaactctgtcttcccgagtatcagatactttaatccgtttgcagctgatgagcccttttaatggtatccaagctagctgcagggtgatggttctaataatgatgcatgttctgcaaataagagcttcatcattattttgaaattgttaatatgaaagcgttcaactggatttgaaatctactcacatcatcatgagaagttttaacaata

SEQ ID NO: 169212 - DNA, 357 bp, Homo sapiens
tcgggtgagaccagggagatcgaagccacagtaaatcacgatcacatccctctgctggacctgaacggtactgccgcctgcaagagccatctggtcgaccttagacatgacaaggcgagaaccatctggtcaaccttagacatggcactcttgtggctaagtccaactctagttgctgaaatacgtctcaaaaaaacaaaaacaatccaacagtaaatgttttacaaaaacaaaaaaataaacaatattaaagaacaatgtataaataagtgggagtgaaccaaggtaaaaggtaattaatatcaccattaagatctcctctctttctctttttctctccatttgtgatacccaggc

SEQ ID NO: 169213 - DNA, 359 bp, Homo sapiens
ccttgccagaaatgttatatcctagtctctgaaacctgtaaatgtattacatgataaggaagatgggatcttagatggaactaagattgctaattatcggccttaaaatgaagagattatctgggtggtcccaatgaaatcacaagggttcctaaatgaagaagagggaagcagaagaatcaaaagcagagagacgatgtcatgagaaagactcaaacaatcatcattgactttgaatataggaaaggaccatgagccaagaaatgtgggcagcctccagagctggaaaaggcaagaaaatggattttgtcttagagcctccagaaaaaaatgcagccttgcaaacaccttgattctag

SEQ ID NO: 169214 - DNA, 246 bp, Homo sapiens
cttacgaggccaagaagtcctgtgatctgctgtctgcaagctggagacccaggaaagccagtggtgtaattcactgtgagttcaaaggcctgagaaacccgggcttcaatgctgtaactctcagtctgaggctataggactgacaaggtgtgggatgggggtactgatgtaagtctgggagtctgaagacctgagaaacaggagctccagtccctgcgggcatgagaagatggatgtcagagctca

SEQ ID NO: 169215 - DNA, 360 bp, Homo sapiens
atgtagcgaagcaaatttggatttgtatgtgaaagtgacctagatgagaagtatggaaggagacggagacagcagcaagtttgctcctcccttggtttcagaggaaaatggtttttaagagctgggccagatgtttctcatagctacttaaggtggattccttttttctgtgtcttctgtttttaagtgtaatctggtttttgagcacttgcagaaaagctgcagaggccagggaatgacacagcagagaatggaggtgagagggaagacaactggtgatcttagttgctttgattttgaaatatgttgttcaggaatagcttttcttagtggtaaaataattgggaatttgtaggaaga

SEQ ID NO: 169216 - DNA, 294 bp, Homo sapiens
aagacgttaggcagtgggcccaggagatcagggtggtgttggtgtcactttctaactttagatctgcgcactcagcacgtatgtcccctcttaatgttttgtctgaaattctagcaggctatcaccaagtggtagtaatggcgcctgggacaaagaggcatgattactaaaggaagaaactatgtaccaattttatataccactttttgttctacattaataaataacaatggcattaatattcctgttttgtcttctgtgtgccaggcactgttctaaatgttttgcatttac

SEQ ID NO: 169217 - DNA, 268 bp, Homo sapiens
gatacccccaccagagggggcacgtggtatatggggagtatcttatgtctgttttaatttatagctgtgaacctaaaactgctataaaaactttaagccttcttttagaaattcaattaaaaggtttcaaaagatgttttaagtcatatttagtataagatggagaaaacaattgcctaagtcaaaaattactcccattattattaccatatccgttatttttcttcttttttttttttttttttgagataatgtctcactcttgtct

SEQ ID NO: 169218 - DNA, 557 bp, Homo sapiens
gagaatcatattttgatgcttccagatgagttttggaggaaagccatactgaaaatatttgtttgttagattaagattattaagtgataactctttctttattttaaatagttaactttttctgtaagggagcaacatatgttctttcttgggcccataatgcatggccctgaaagtcagggctacctgggttgtggttataactgccagggtctggtattattactagcttagtggtggtaccctcagcaagttacagtttctctgactttattttttcccatgctcacaatgagaaatttggatagatgaatctaattgcatgtctctttctagataggaaaaacttaactttttccccttagaccacgtataattgtgaaatggaatgcatagaaatataatcttctgttttatatatttcttgttgaactgactttaaaaataatttgattttgtttctcaaaaatcatatattccttttggcattgtcagaatatagtgaagaacaaacatgcctcaggtagtacagagctgtttgttgaagtgaaggcgtt

SEQ ID NO: 169219 - DNA, 427 bp, Homo sapiens
acatcatatggcaagagtgggaacaatagaggggcaggtgccacacacttttaaacaaccagatctcacaagaactcactaccctgagaatagcaccaagccaggagggatccacctcagtgttagtcagggttctctagagggacagaactaataggattgatgtatatatgaaggggagtttgttaatgagtattgactcacaccatcacaaggtgaaatcccactataggccgtctgtaagctgaagagcaaggaagccagtccgagtcctaaaacctcaaaagtaggttttagccacagggctgaaggcctgagagcccctggcaagtcactggttcaagtgacaagttcaagagtccaaaagctgaagaacttggagtttgatgtttgaaggcaggaagcatccagcacgggagaaagatga

SEQ ID NO: 169220 - DNA, 402 bp, Homo sapiens
atgggagaaaatacctgcaaactatacatccaacaagggtttaatatccagaagatacaagaaagtcgaaaacctcaacagaaaaaaaaatactccaatttcaaaatgggcaaataagctaaataggtatctctcaaaagaagacatacaggaagtttatattcagagcaacttgaatctatgctactggattgcaatcctcaatcttggcccaaataaactctgtatctacatttaaaaatgacgatgacaaaaaaaacatacaaatggctaacaggtatatgaaaaaaatgttcaacatcactaattagcaagaaaatacaaatcaaaatctcaatgagataccatctcatcccagaaaggctaattaactgatgactaattttttgtcatcaaaactac

SEQ ID NO: 169221 - DNA, 336 bp, Homo sapiens
agtagagatggggtttcaccgtgttagccaggatagtcttgatctcctgtatgtcttagtttttaacaaaaagtttaaaagtttaaaaaataaaaatttttaaaataattttttctatttaaaatagaatatagaataacgatataaagaaaaaatttgtacagctatacaatgtgttttaagctaagtgttattacaaaagaatccaaaagctttaaagcatttaaaagtttgtaaggttaaaaagccacagtaagctaaggttaatttattaatttattattaaaagaaagaacatttcaaaaataaatttagcatagcctaagtgtacagtct

SEQ ID NO: 169222 - DNA, 182 bp, Homo sapiens
aaagactttgctgaatacactacaattatcactagagaccgagacctcagaaggctaatagaataacagtaatagtaagaggtacattatccctagcaatatttaaaataagatttgaaagaattaaagtgattttcaataactactttaagccaaaacagccttcaaatctataaaaagat

SEQ ID NO: 169223 - DNA, 130 bp, Homo sapiens
ccaatgtactggatttttagttaattattagctcccacactggtcaacatgtcccttgagaacacaggctttttcatctctgtatttctaggaacttgcacaaactagcctggaccagcttcttaaacac

SEQ ID NO: 169224 - DNA, 560 bp, Homo sapiens
ggtcatcataccgctaagtgcgctctgggaactgttctctaaccctctccacccttaccctgccagttaattaacttacatggttccctccttttacctgttctaaaccacttaacacctcctcccaacactcacacactcatgttacattcatccatgtcttaaagcccacatttcagcgatgaatcgatagagtgtgataaagtaaagagaaatatggaagatgacttgatgatatctttcgttgagcacattaacatagaaagctttgtcttaacccctgttaggaataaatagaacaaacagatacgttttccatcgatgaaatcagcaattaagtggcagcttttattaagaggctactggttttctttgaaaggaataacattttatgaaggaaaaagtctctgaatgtttccagggcagagaagtttggccaggttttactgtggactattgcaggtgtagaagaagacgtttaggagaggccattttgaaaaagctttgcagatgtgttttgaatgatgcaggctgagaccctctcataatagtgagtacaa

SEQ ID NO: 169225 - DNA, 169 bp, Homo sapiens
cctcccaaaccccttctatcccatcaccctgcttcccctgtctgccccaagaccttggcctggcacggaaggctagcacctcaccctttcctttccaattcatctcctgttgctccccaatgttcgggccaaactgaccaatttccaaatacaatttcccagccgctca

SEQ ID NO: 169226 - DNA, 300 bp, Homo sapiens
aaaataactccactaggatttaaatttattattgttcaaaggattttcaaaatgctgttccctgaaaagagtgtgttgttaaatacatttagggaagttttggtgttttcaaccattttgaaacaattttgactcagtaacttataaataattatttgtacagaattttttacacaaatacaaatagttgctttttatttctagttataaatataacattaatacatgagaggaaaatggaaatatataaattacattatatgcaattaaaaaatagattatttacctaaacacaaaagc

SEQ ID NO: 169227 - DNA, 216 bp, Homo sapiens
attggtggagcaattcctacatattttgctgggtatgccaggaatttagggctgtgacttctctttgcccaggctatttctcagggttgatagcaatgagcatcttgtgggatggtggaatagttccattgaataaagaacaggcttgcttacttcttaccatgaaaacagtagatttccaatgtccaagggttcctttcttgtcagcagcctact

SEQ ID NO: 169228 - DNA, 174 bp, Homo sapiens
attcatttattgtcaacaaacgtcctgggagagcggctacagccggccgctgaacccagaagggactttctctaggctttcttggcaccctcccaattatcttccttctcttgcccgagggcagaccaacacagctacgaacatgggtgactgagggtcagaccccttcccgga

SEQ ID NO: 169229 - DNA, 565 bp, Homo sapiens
ctcatttcagatcttcccagagggattaaaacggatgaatcagcaaatccccctcaaactgttcctagggagctggttggctgtaagtcccacagaaagcatgatccttgcaggcaagagcccccacagctctggggatttttcagcagaaactgtcagagacagcctttgactcctggaatggttcccatgccagcttgaggcactgggggacattccattttctcttttgtagaccctcctccctctgtttttgggtccctgctcctggcttctgttgagtccagcttggctcttgaccctcctcgttcctgggcttggagccaccttaaggtaagagagaacccaaccaataaacatgtttggagtatcaacccaggcactatgttgggttctagagaccgcaagatgaaccagtcatgaagcccgccatccagaactctatggccacactggggagatgaagtgagtgcacatagaaaggaaaacagggaagcaggacctgatttaacgttgaataaatgacacaccactggagttcagaggaggggatgagggatttctt

SEQ ID NO: 169230 - DNA, 795 bp, Homo sapiens
gtcatttaaatcagaacaaccacttgaaattatatacatacaattcttgtgtggaatttaactccatgactgaatagcataaggaagaggttatttaaaagcaagaactactttttttggttggatttttttgttcaagtccagaaagaaatgttatatttgtgcctactaaattatccaaacctcagtgtttatatacttaaacaagtgccactttttagtaggtaattatataccatctgatttaggacttacctgaatgtatgtaccagaaagtgtcctgcctctggcataggggctgggggaggtctgtttctggagccactaccagcattcctgggcagtgactggccaaagggaagtcacttttttatggaaatagaaagtgacccaactcaaaactgccaagagctaacactgccaaagcccttctggctgccacctgtggtacttgtatgcctggatatttgttcttttatttgacctggagctaaaaatgtatttccctactggcaaaaatgttatactgatatacttaaataccttgagttaaatactcttgtgtagtctaagggccaaactccagcgtgtagcattatttccataggaaaatgcaaaccaagttccaagcccaggtctatgtctgactctcatagcaaagcactggagactgctgaagagtgtcaccatcagagaaaaggaagctttcagataagtttaggctattcaacttttctaaagagatggttggttcacctaaataacatgttaaaagcaaagtattaaattatatgc

SEQ ID NO: 169231 - DNA, 542 bp, Homo sapiens
tccccccaagggggctgcgatccccagccttctaggacacttaactgcagggcactccctgccagtaaggctttggggtctatgggaccacctgctagtggcttccagcagccatgggctcctctgttccgacctttcccgtgccctgcagttttctagggcgcactgaggctcgaccacggaaggtccgtgccactctcgcaggccgctcccgcacaagtgctaccggccggcggcgggacactttcttcctctgggccaaactcccgcctccgcgctcagagagacagggagctagcgggccggcacaagaggcggctctctttctcaccgagtcacgctcatgcagatgtcccccggagggtccaacccgccttcccctcgcctgccgggcaccctggcgctcgcgccgtcctcccgcgctcccgcttgccccgagctctggagcccgattctccccgaagccgctgatttgctcggcgctcagcgcctctcgggttacgcggcggctggcgcgagggtgatggctgcggtgagagcag

SEQ ID NO: 169232 - DNA, 115 bp, Homo sapiens
ctgctctcaaacacctgggctcaaacaatccacccacctcagcttcccaaagtgctgggattacagaactgagccatcacgccagcctctactgttccttttatgtttaaggata

SEQ ID NO: 169233 - DNA, 571 bp, Homo sapiens
tatttccccactagaatgagtccacaaggtcttaactctagagataataatcaacattgatgagcatccaaggaattctccagaaaactgctccccataatacctttaaataaacatggataaacagcaactcaaagtactattaaaaaaagaaaagaaataaacatggaaaaacaaaagttaaaacaaatgaaaaatcttatacaattctggtggatactagagccactttcatctactataaactctaccttaataagctaatacatccctcagagtaaaaatgtttactctgtggaaacattatttctgtggtagggtttcaaatcaagttgaaaaggttcccatactggaagccatccaactgacactggtgtcatttacagaaaatcatactttttaattatgtgatactgccccagtaaatctgctggggcaagacttgctctccaaggcaaaagggcatataaaattctctttcagagggacaaataatcttagagtttcctgactctcctgaaccagaactgttatgctctctaaaggcagaaattgaaaaaatattggtggg

SEQ ID NO: 169234 - DNA, 354 bp, Homo sapiens
cccatccaccgagcagtttctactttgaactggacacactggatggctgcattctgacatctgtggcctcacttagtggatggaagagcatgtgatttgcccagaagagacctagcaagggccaggctggtctcgatccttttcattccttgtatttcctcgtgctctggaaggaagaagcaacaggcaggcctagggagtgcaagtggcttgctcaaggcaataaattagatggtggtgaaggagaggctgaaacgcaggctctgactccagctacagggccctttgggaggatggaactcaaggtgctttacgctttcctcagtcttaccaggaggcttggcctctggaaca

SEQ ID NO: 169235 - DNA, 423 bp, Homo sapiens
gtgccgtagcttgtggcagggtttccttcctttttaaggccatgtgacattccagtcccaccttgctaaagcagtttacctggtcactggggtgaccctggagctcccctctggcctcactgcctgtgcttggtcatgttggctagctgtcctcccttctccacctctgagtctacaagggctgcactccacggaggtcccatgcgtcagccccgaccgcagcgcttggctctgctgctgtgtcccgtccccgtgaaggctcagcaggcactcactgggccttctcccctgctcactgctccgcactctgcaccccacccgcactgtgcgtcttcaccctgcctggcctgggccactgtcccttcctgctcagatcagtcaccagggtgcctcagcttgttccccacctccaccctggccccc

SEQ ID NO: 169236 - DNA, 190 bp, Homo sapiens
aaatcaccgttccagctgatgtcaccccagagagagttccaacacacattgtagattactcagaacattctattgataaggtaacaagtcgatggattcctctcataaatgaaagaacagacaaagacagcaggctgcctttaatattggtgtggaacaaatctgatctggtggaatatagtagtatagg

SEQ ID NO: 169237 - DNA, 542 bp, Homo sapiens
aagcagctgaatctttaggaggcccaggcaggaggatcgcttgaggccaggagttcgagaccaccctgggccacagagggagagcccccatctctacaaaagaaattttacaaatcagccgggcatgatggcgggcacctgtggtcccaactactggggaggctgaggtgggaggatcgcttgatagcccaggaagttgagggtgcagagatccctccactgaactccagcccgggtgacagagcagagcgagaccctgtctcaaaaagaaaaaaaaaaaaaaaaagcgtaactgagacccagaagtgaaataattaaccagtgtcacaaagtatgaatggttgagtcacaaattggatactgtttactttctttatgtgattcccatgtaaggaatattaaaaacagtagctacatgctgattgctctgagtcctggatgccatctatggtgaaaggtgcagtcacagaaagaaagaaaagaaaatacaatgctgtggctcttagatagacctgggttggaatcccagctttgctaattgt

SEQ ID NO: 169238 - DNA, 493 bp, Homo sapiens
ggttttttttttcatgttttcattacccttgtttttgattaattgaagcatatttactttacagtttctattattactattacccatagttgttggaagtctaattctgccacttattttatctgctgactctcacttatggtggtttccaactaatttgcctagttcttttttctttggtttttttttttcatgttttcattaccttgtttttgattaattgaagcatatttactttacagtttctattattactattacccatagttgttggaagtctaattctgccacttattttatctgctgactctcacttatggtggtttgtaacttctgattgtgagtttctgttcagtacgactttatctgtgggaatcatctgggaggggttggattcagggtgtgtccctctgcagtggttttacatttgcttctattactatcctgagagcacttttttttaaatggaaaattttaaacacgtcaaaaagtt

SEQ ID NO: 169239 - DNA, 361 bp, Homo sapiens
aacattttggaatgttctcagtccaaacaaaaccagcatacttctcattttttccaacctcatgactgaggcaggaggtaaatggaaaggaaaaaagcctacagttgcaaaatgtaaatttaaaagaaaaatcaatctggacagtcatataaaccaggtggcaggcaaaaattggactcatttatgaagaaatgcaaggcatcctgtaacaggcaacaattaaggaacagtaaaaagaccaaagaacttggaaaccaaaacaggttcaaatcttaagtccaccactcacaaaaatgtgggtgtctggataaacttcttagcttctctgagactcatggttcctcacctggaaaatggaggg

SEQ ID NO: 169240 - DNA, 349 bp, Homo sapiens
tgtggtggcgggcgcctataatcccaactactcaggaggctgaggcagaagaatcacttgaacccaggaggtggacgttgcagtgatctgagatcgcaccactgcactccagcctgggcgacagaggaagaccgtgtctccaaaaaaaaaaagaaagaaatttaggcgggaaaaactctcgggccgtccccaagtccgttggtcgaaccctgaccaccgccgccaaaccgttaagctagagggcggccccgatcccgagcctccgcccccagccgcgtggcaacccaggcgggaacggagcgatcccgcccattcgcgaaggaccactgagggacaaggctcacaccgg

SEQ ID NO: 169241 - DNA, 397 bp, Homo sapiens
gactaatgctgcatactaaagtacaatggtggtctttataaaaaaaattttctgcaattgagttgtgaactgacctagcaactttattcagaaaatggcatttttacatgaaagaagtgataaacaaactacaataattcagacatgggtatttgaaatatttgcaaaaataaatagagtgcgcctgtcatttttagaagaacaattgacattatttgttgccaaggataaaatttaagcttctaagtaaaaattagaaatttgaggccgggcgcggtggctcacgcctgtaatcccagcactttgggaggccgaggcgggcagatcacaaggtcaggagatcgagaccaccctggctaacacagtgaaatcccgtctctactaaaaaaaatacaaa

SEQ ID NO: 169242 - DNA, 672 bp, Homo sapiens
  misc_feature (1)..(1): n is a, c, g, or t
  misc_feature (3)..(3): n is a, c, g, or t
ngngtgaaactccgtctcaaaaaaagaaaaacaacaacaacaaaaaaaccccacgatgatatgaagtctttattcatagacaacttttgatggggatgggcagtatcttattacaaccccatacatccacttaaattggcacaaggtttatctgtaagttttacaccttaaaatgtatttaagttgaaaactaaactgatggggagaataaatcaacattatttaaattcaagtcctaagtaaaacagagtactcaaaattggcactagtataaaattttctttaaaatttcattaattagaagagatcaaacagtcatttcagatatgtctattagttttactctgatcacactctttcaagtattatggtgatcaattttccccacaaacttgcaagggagaaacaactgacctccccacaaaatctaacttcaattaactatctaaggatgatattcagtgtttctcacattaaaggagttcagaatcatgctctggctgtaacaggaatgagcacagagcacttcatgttagctgtttggtatcactgtccaaatccacggcctctttctgcataccttatgacagtgccatgtgtacatccttaatcaaatactgttaatttttaacgcatgagttttttatttgaggatcaaacaagaattatgtt

SEQ ID NO: 169243 - DNA, 178 bp, Homo sapiens
gcaactatatgtagatagatatagaggcagatatagatatacatagatatacatttatgtatctctatctcttacctatatctatctatatatttggataagaaaagttttcctcctggcccccaagtaatcttgtgtactgcaaacatcactgaaatcagcaggtgcatgttccaag

SEQ ID NO: 169244 - DNA, 499 bp, Homo sapiens
tatgtatatatgtatctgtgtgtgtatatgtctgtgtgtgtgtgtgtaatatatttacatatattcttctctcccccctcttaggctcttccatgctttccatgagtttcttatataatgagaagcagcatataatacatattatttctaaaaataactgaaataattaaaagccttctgctggcaaatctacaagacaatgacagtaaacactgtccaaggtgaggggcagcagtgaggggtaaccacagtcactgtctctgctgcccttcaccttcacctttttgaccttccagtggacaccgctagtagcacttctcaaactggaatcctctgcatcttttcagaacgtccaggactggcattgctggtacccactcctcctctttcactcttgtcctcccttagaggcaaacctgcaaatcacctctcatgaataatcccctcatccatgatgtgaagtacacctactcttcccaatgcccaccacctactaatg

SEQ ID NO: 169245 - DNA, 362 bp, Homo sapiens
tcattgcatacttggaacttgatgcctcgtgtagtcattggccctggggcaggactgatggctgaccctgggagaaagctccggaggctctgtcttcagccctagccctgcctcatgggagtgaatccctgacacctataaaatcactttccttctctataatcttatcattcacgtatatagagtcttacaataagaaaatgagcctgctgagctaaaataaggcccttgaaccccaacccataggagaaggaggaaaactacgctagcatccagaacactgtggcccatgatgctttaatgccagcctctgcagccaagcaaccccaggaaataaaaaatcccaagattatataccaaag

SEQ ID NO: 169246 - DNA, 324 bp, Homo sapiens
atagaaaaactagttccctcaaacgaaacttttagaaagagccttgtcttaggattaggttaagtttttctggtgacaggaaacccaaaaaatctatagctgaagttagatagagctttactcctctaccacatgaaagaaatctgggagtaggcagtactaaccgatattgcagttccatgttaattggggaccccggttgatgttactgtggtgttctaatgttgttttctttccttttttcttttatgcttattaattgaaattcttctgtaaaaaagtgctgatctcttcttcctcatttatttatttaatcttttaaac

SEQ ID NO: 169247 - DNA, 367 bp, Homo sapiens
ctgggacgttccaggtaaagtgaaatatatgaagaccctggttataaatcacagaaaaatcttagttaataatttaacatagactgtaagatatagtatttcactctttaaaaatgtcttaagcatgcactaaatgttttatggtgtgctagttctttgttagtgtgtacaaacatgaatctaatacacaggtctcagcttacaaataggagataaaagataggcatgtgcagcatggtttggctctttaagatgctgcttctggcccggtaagatgtatcaaggcagccagaaaaacttataattctcagaaccaagcgttcaatgctcttttgtcacttcctggttttgctcccaccttcctctt

SEQ ID NO: 169248 - DNA, 291 bp, Homo sapiens
attcccaggtgactctagagatcccggtagccgggcggccttccttccttccagagggagcagctcccgtcaaggctgccagtggcctcatccgtctcccttctcatgcggcccgaccagcccccagacactcccccctcttattgtctgggatacagctcgcccctcctctgctcctgcctcctggcacctctgtgctggctctggcttctctatcctcgccctccttccgggtcattgttcccaaaagtgggttgtaacaaatcacaaacgcagcggcttacaaatcac

SEQ ID NO: 169249 - DNA, 475 bp, Homo sapiens
catgcccaccctgaagcgagctgcccgctcagccccagctcccgcgtagactccttgcttcagccctggcttcacccagcaaaccctcctgagaggagcaggtgcacattgcactgtttgtcctgctatttgctcctcactgccttacgtcatacacacacccgtgcatttgcctttttattgattataccttcttaagacatggagaaggagaatgaagacacatgttatcttcacccagagagaagcaaaacagttatttcctactttctaagccctttccaatcactgctgtctcaaagggaatcatcaccctgagtctgctgtttttaattccataattttctttacatttttactacgtatgtttgtgtccttaagcactatatggtatttccttccatgcatttaaacttacaaaatttaaagttttaaacttatagaagatacaataaattcactcatttacaatgga

SEQ ID NO: 169250 - DNA, 153 bp, Homo sapiens
tctggggatgccaactgccacattgtgtggacattcaagcactatggagggggtctacagagcgaggaagtagatccactctaaaagtggattctcccagtctcagttgagccttcaggtaactgataactgtaactctggctgacatcttta

SEQ ID NO: 169251 - DNA, 360 bp, Homo sapiens
cccgactctcccctgcgaggaaagcagagaggaggggtgtgcgtggacgcactcgttcaagcccttccttgtcttcttgggccaatgacatacatttttcagatggcaagccaggaggaggaggtctgtggttcgtgaccctataatggaggggaggtagttggcccccagggacagaggagtcaaggtagcttgctggaaaactctgggtctttgtaatcatcatttcgaatttcagcatctctgcttaccaggaggccggccctgggcttgtcttgtcaccacactaagccatagcttgctttttttttttttttttctgagacggagtctcgctctgtcgcccaggctagtgtgcag

SEQ ID NO: 169252 - DNA, 178 bp, Homo sapiens
ggatctggtataaagctcccaggaattgcaaagctgttcttagcacatcagctcggtgggcctgggcggatggaggcagatgcacacagcaacaccaggagcaggggaaagtctgccttttaaggttcatgttccccagcaggccctttcccattctaaacacgtttcccaccattct

SEQ ID NO: 169253 - DNA, 144 bp, Homo sapiens
gcaaccaattgatctcttaacgtaagaactctagacagaggcaaaagcaaagcaaaaataacttgtagagttcaaaagagttgatctcacattgaaatttacaaatggagttatttatctaataaggatcacatctggtaggct

SEQ ID NO: 169254 - DNA, 481 bp, Homo sapiens
ttgtactggttactgctctagaactagtgaccagagaggtcaccattcctggtacctcaggtgaaacagttagaacagctgagctggcttctaccccatgactggtggccattgaaggtgtggtctctggctcactagaagaaagagttagaattggaatagttgtactggtcactgccctggaactagtgaccagaggggtcaccactcctgataccccaggtgaaacagttggagttggaacagctgagctggcttctgccccatgactggtggccattgaaggtgtggtttctagttcaccaggagaaagaatcagagttggaatacttgtactgtttactccactagaactagtgaccagagaggtcaccactcctggtacctcaggtgaaacagttggaacagttgagctggcttctgccccatgactggtggccattgaaggtgtggtctctggttcaccaggagaaagagtcag

SEQ ID NO: 169255 - DNA, 425 bp, Homo sapiens
gttcaaagttaagagtttcataaaatccactgttttccttttccagttattcaagttaaaaaactgatttggtgttatcccagcagattttagaagctgtaggccaaaaaatgatctaaaataactaaaatataatttatttattatttgaatgagacagcatgatttagtggaaagaacactagactggaagatagggttttagaagataagatttctaggaatagctactaacagtgaccatggaaaaaatctctctggtatctttggtgttaaaaggtaaaccaggtaatatttactgattctttcactaggtacttatggagcattaactatctgtcagcactatgctaggtataggggacacaagtccacgtaaaacagacatggtccttaccttcatgctaacaatctagtgatgaaga

SEQ ID NO: 169256 - DNA, 86 bp, Homo sapiens
atttcagccccacttagccaagacctcaagtataaataattctgataattatggagaaatcaactgctattttatactgattctga

SEQ ID NO: 169257 - DNA, 318 bp, Homo sapiens
ccgccacctccaccgcggcttatcccctggctggcggcgttggcggggcgggggacagtagttgtagacgcccgcccctgcctcagagaaggataccacattgaatgaacaaaggactgaactttgtttacagataccctttataaaagatgtctgtggagtagtgttacagttcaaataacaaaggattttgcattatgagatgagtgagagttgagagtttggacacaaattgatttttgatctctgaattgtggggtttagctcaccacatatatgtgtagtgtcactatattgaaaatacatactgcagaaact

SEQ ID NO: 169258 - DNA, 250 bp, Homo sapiens
tggggagcactgctgtgtcatggagacccaggcctcagttctggcctggttgttgagagacctgagttctagatctactctgccaggcacttgtttgactttgtgaccctgaaaagtcaccctcttgttcttggtgtgatcatctacaaaagagaagacagactaatgaacactgctgctaataagtcctgctctgaacaacatactccaacagtctcacttctgttcccccaaaagtcctgcaactggg

SEQ ID NO: 169259 - DNA, 734 bp, Homo sapiens
gattaggcatgcatcaattcagagctccatgctgctagctcctgtattctgctgagctcccagggaggaaataggaaaagggaggagaactcacctgtccaattacaacctactctgcagtacaaagtactgcaaattccacacagtggatctctgtgattgaaggagcacttgtaaaatctgagacatcctagtttttgatttggtatccaaaacaaatctgaacttttaattaaatattgttctttttccttcttgtttccaaatgaatagttacaccagcaaacttattggctgaaaagttgtttcctacatttgcactttgaagtgcatcagacagtggtgtgtttggatgtgggtcttgttgagtttggttagtgagttattattggttgggattgcagtggtcctgccaatggaagagaagtaggtgtgccgagtactgtcatgttcacctccgcctttcacagaggcatatttagccctcagttggtaagtgaactttttgacaaaggtttaagaggtcgtagagtctgtgtaaaagacaaaagtccaaaagtgaagcagaaggaatccagcttcttatttatgtctggcatgggaagcttctggatttgatagtgggtgcaccgaaatttgcatcccaagtcatagcctttgctctgccctaccttctggtatgttgtttttcaagttacttaacctctcagggctgcaacttacttatttgaaaa

SEQ ID NO: 169260 - DNA, 237 bp, Homo sapiens
agaagtttttagtctttcagtgcagttatttggaagaacaaatatttttaaatggacaatggacggtacaataagttacttgaaataagttacttgtttcagataaatttcaattagatttgaaataaacattttgtcttttaagttaatgaaataaaatttgaaactgaaaaaaacaataggtaaacaaaattggcaaacctttagccatattaagaaaaaaagagagaaggccca

SEQ ID NO: 169261 - DNA, 585 bp, Homo sapiens
cagtgttggccacatttcaatcttgaagcaaagtgatagtgtatgggtgtcactttcctaaaatgtatttctgtgatgtacacttcccactctgcccctgctatggccacctgagtctcagcatcactgaggcttgttaggctcaggtcagtagagcactagggagtgctgggcattgtagacaggcttcttgtagcgtcaccagattccttccttagacctgggaacagatttatctttcctgtctcactaaggaactggggagattatcgagaactaacctttattggcacattggagtatacagtgtaaagcactctcacagacattgaaagcctgtgatttagtccttgattcagactgaatcattgcaagtccattgattcaacagtgagcagtaaggaaggcagggctgagcagggcaggcagctggtgatggggagagctggacatgaatgacttgacattcagtgctgttttcacacaactggactgcagcttatcatatttattatctgcctttctgtctgaagcaagcacacgatcttttcatatttttgaaatggtcgcctatccgtaatcagc

SEQ ID NO: 169262 - DNA, 303 bp, Homo sapiens
gtggaatctcacggtacaatgaagtgaaatgaaattttaaaaattaaggaatatgatagcttcagaaggcaggggattatatacgaaaatgaattcatgacttttaaagaagtattttaaagacatgagatcccagagaaagaaatcataaaagagatccttgatggttaagaaaaaaatagaaccattaggttttctgtgtgtgtgttttttttaattcttatttgaagaataaggatcagaaatgatctggtgcttttggaccagaataagtgagggaggatgtcatgaatgggaaaggat

SEQ ID NO: 169263 - DNA, 119 bp, Homo sapiens
ttattagtcttctggtttaaacatttatatagtgtaaatgcaaaataaaaatgattgtatcaaattatggtttttatttggatgctttgcaagaaaatacttaaatgtgagtcatacat

SEQ ID NO: 169264 - DNA, 323 bp, Homo sapiens
tgggccaggatggtagatgtcacagctggaataaagaacatcccccaactcaccccagaatcagagacttgggttgtgccagtgacaaccatgtctggttctgccctttcctcccctgcctccctcagatgaaggtgatgcaggtgccttccctcttccccagatttgctgtgatcctggtcaagttcatcaggcctggagagtggttggaactcctcaggagatagacccccaaaacacaggagcagggctgtgttcttttgtcagcccttggggataggcagggactgtgttgtagtgccctaacactggctgggtgcttt

SEQ ID NO: 169265 - DNA, 224 bp, Homo sapiens
tggaaaggctccataagaaaaataatattgccagatacttccttgaacttcccactgtgtcagatagtgttacgaaactcatctgaaatccacattgcctagatttctagctctgcaactggaagggcctactaacacaaaccacagaaacattattaagtaaacagcagcaaacaagctatgttcaagttctcttactaataaaagcaatacagtttggtcag

SEQ ID NO: 169266 - DNA, 265 bp, Homo sapiens
gttccatatccccccaagttatgcaaaatgatttgcgtaataattttgtagatgatttttgtcttgcacttgtattgattaaaggactatattttttattagtggttctcaaactttggttggtatcagaattaccaacttggggaacttagtataaatacataggcccaggctctttgagtctgggccactgttcagtaacatcccagatgattctgatactaaaattgggactactgtttcttttgctcagctaacaccagta

SEQ ID NO: 169267 - DNA, 432 bp, Homo sapiens
agaagggttcagaaatactttgagcaatgccaccagtactgaagtaaatggatcagaccccaagatcctactctgaaaacagtgcttatttggatgtataagctttggtttacttccaaaaataccatagggaccacttaaccctagggtgtaagaataacaacagcatcaacagcagcagcaatagctagcctatgttgtatttctatgttatacatcagtaggataaatgccttatctatattaatgatgtatattaatatatgaattcatttattcttccttaggacccaatgcggtagatgtcatgtatttttattttgcagctatagagatgaagtcacaaagattaagaaaacttgccaaggtcaaaaactgtgactatcagtgctagaatttttgcccagaccagtaaatgttaatggaattact

SEQ ID NO: 169268 - DNA, 661 bp, Homo sapiens
gggctctcccctctctctgatgatgtcacccctcacctgactggttaccttttttagaaaggagggaggttagctcctgggcgtgggcattcccaggacccagaacactgctgagggggtgccacctgttggcagctcccactctagtcctgctatctcagcctgctgtttgttttctctggagtttttgcaccagccagagggcagccatctttgctgttggaactcttcttatcagaccacatttcatgtctgtggccgctcggcatctatagggataagtagtgaagggactgccatggcttgcagaatcgcaggtgtcttcttcgaccccaggtgcttcatacggttcttgctttgtgtgttctgtgatttggctgcttgggactgcttctgagagtccccatttcagtcaggctctcccagcaggagagacctgtccaagtgtgcacctactctgccaccctagcatccagtgaagccacagcagacaagagcccacagagcaaatgtctacatggactgaaactgcacactcctgctgtgccagcactcagcggccttgctgacctagggtgcagctaaaagctcattctccagagcctgagttctttgtgctttcctgcctaccatgtcattccacccatagagggaggtgata

SEQ ID NO: 169269 - DNA, 494 bp, Homo sapiens
ccaatggcagtcggcgccattggggccggcccaatggcagccatctttgctgttggaactcttcttatcagaccacatttcatgtctgtggccgctcggcatctatagggataagtagtgaagggactgccatggcttgcagaatcgcaggtgtcttcttcgaccccaggtgcttcatacggttcttgctttgtgtgttctgtgatttggctgcttgggactgcttctgagagtccccatttcagtcaggctctcccagcaggagagacctgtccaagtgtgcacctactctgccaccctagcatccagtgaagccacagcagacaagagcccacagagcaaatgtctacatggactgaaactgcacactcctgctgtgccagcactcagcggccttgctgacctagggtgcagctaaaagctcattctccagagcctgagttctttgtgctttcctgcctaccatgtcattccacccatagagggaggtgata

SEQ ID NO: 169270 - DNA, 440 bp, Homo sapiens
ttgtagattcacttgcaattgtaagacataatacccagagagcctcgtgcccttcatgcaatttcccccaatggtaacagcttgcaaaactgtagtacaatctcacaaccaggaaattgcctttgataccatccactgaacttatccaggttctaccagttttacatgtaattgtgcgtgtgtgtttagttccatacaatttactcagtactctaaaaatagactcttcatcttacaatggttttaaatttacagaaaaattgttaagacagtaggatttgcatatatcctgtaccatttcccccttttattaacatcttgcactggtatagtatatttgttaccgttaatgaactgaaattaatacattgtaattaacttaagtccatactttagttagatctccttaatttttaccaatttcctttttcttttctttt

SEQ ID NO: 169271 - DNA, 387 bp, Homo sapiens
gtgtcacctgtcccagggcagggaccaaccctgtgcagtaggaaaaggggctcatcatttcctcttctgaatccctctatcattaccctttttgctccaacctaatgatatcaggaactgaacttgattaacagcatttcacagcagaaaaatataatagtcacacaaaggagcccactgaatgtggccatctttttcttggccacttcatcctgcataggcaaagcataacatctctctcccaccccctaccaatgagcagtccaccagtctgtcagggattcagcatacttggtggtatccaacactgtctacagtgtgagagcaccaggtctagagcctcgtgaacatatctacctgttaactgatgagacatacacaccacag

SEQ ID NO: 169272 - DNA, 129 bp, Homo sapiens
ctctagggtgctgaataaatttgaaaggcagtctaagccacagagattgaagctgggctcaagtactacaaggactggtggtgtgctaggctcagaacagtggagctggggtgcattctagccaatgag

SEQ ID NO: 169273 - DNA, 573 bp, Homo sapiens
tgagacagagagaaggtataccatctgaactgaaaaagtaacccaaaatgtttctgagttaaatttgcaacagctaagtctttaagaagttagaacaagagtaatcacacaattttggtgacttctaacaaataaattcttgctcatgttcataaggaaaagacagtatctcagcatcacattcaagtttctcttagcctacaagtacagcctatctggagccttttccagaacactatttctgatagaggtaatcaaaacttggattgtccttttcaaactaggcctctgcaaagaatttgcagagcaggaaagttagcattaacttacaattttaccttagatgtcaaatatttagtctgaatggactttttacctctgacctcttcagattttaaagaagatgtcatcatattggttcgtgagatgctggtagctccctgctgagatgaagacaggccttcatccctagagctagaactgcaagttctcccttaagtcctataaaattcatttagagccatctttcctgacatctgtacataaagcagtgtaaaacattacaatataaat

SEQ ID NO: 169274 - DNA, 547 bp, Homo sapiens
tcttattttgagactaattgaagatactgaggcccagtaattgaatcatatagattgctaaaagaagttctgagaagaaatgaaatacaaaagcttggtttctaaggctgaatatcatgagaaactatcatgttatcctgtgtgagtgagctccacgaggccaggttaaagaaattatgaaaactgaaagcctgtctttatccaagaaccaacactgcctggacaaataacttatgaatacatcctattctggaggtatcatcaatgactttgcctctgtagcactcttaccattatttggacatttccagaaatcaagatccacttcagtttgtgaagatgagctgtgcttagacataggcttaaaaagaaaagcaggctgaggcagaaggatcgcttgagcccaacagttcaaggctgcagtaagctaagaaggtgccactacactcctgtctgggcaacagagcaagaccccatctctaaaaaaataagataaaataaaaatttatatttataatgccttaaaattaaaaagttataaagtcct

SEQ ID NO: 169275 - DNA, 154 bp, Homo sapiens
aaaaaggagactacaatactgcttatactatcttactgttacattatcttcagtgggagttctagtgtttttcctagtacatagaagatgccagaggatagcaactggcttctagattgatctagtaatgttattaagacttacagggtgatct

SEQ ID NO: 169276 - DNA, 344 bp, Homo sapiens
cttctagcctccagaactgtgggaaaataaatctctgtcatttgaagccacccagactgtcgtactttgtagcgacagccctaggaaactgataaaacctgtaaaaagatgagggaaggcgcacaaaatgaaagtcccacgcaagacacacaaagcctgggccaccttgatggggagctggaggaagagtgccaccgtgccactcagtcacaagaggtgactgccccaggaaggccatgacctaggctaaactggctccctgcagaggcatgcagtaaggcagtcttcccttcttacaggagatctgggtagctcatctccatgtctacacagcaagccgagcg

SEQ ID NO: 169277 - DNA, 374 bp, Homo sapiens
tgagatggagtcactctgttgcccaggctggagtggcacaatcccggctcactgcaacctccgcctcccaggttcaagtgattctcctgccttagcctcctaagtagctgggattataggcatccgccaccaggccctgctaattttgtattttcagtagagacagggctttaccatcttagctaggctgctcttgaactcctgacctcaggtaatccacccacctcagcctcccaaagcgctgggattacaggcatgagccactgcacccggcacataccgcattgttgattcaaagttttcataaagtctctgggcaattttaacatttaattaaattatagattgtatgtgctcacatcttgataaagctg

SEQ ID NO: 169278 - DNA, 369 bp, Homo sapiens
tcgcactccagcttgggcaacaagagcaaaactccgtctcaaaaaaaaggaaaaaagaattctaacatgtttgagattgactgcaattcctagcatattacaagtgttagtaaatagtagccattaatattatgagcttatcatcaccttcagccagcattctaattttacagtatagaatccagtacataggaggcactcagatagacgggatgccccaaaattgggagacggacaaacttattttgaaatagtctttttttgacatttccaaagaatatactcaatgtttttctgcaaccctttgccttctttttaggtgaaggacctctacatttaaagcagtgggttcaactgctaacctgaaaa

SEQ ID NO: 169279 - DNA, 409 bp, Homo sapiens
accaaggcaatacgagctacacgcaaacacactaacacacgatcccccctgggatttccaaatacccactgagtatcaggtacacagtaataggcagccagcttccagaagccctttatttatagatatgtgtgtgtgtgtgtgtgtgtgtgtatgtgtgtgtgtgtgtgtgtgtgcgtgtgcacatacaatctaggggaacagtcaatagcgtatccttcatatatacactggcgggactcaccacccagtgtgcctgggactgacgaagattccccggatgtggaatgcttggcactaaaaccggaaaactccctggcaaacggtgaactcgtcatcctcttaatacaattataacatacctaattaggctttacaatcaccccaagggctatttattctttccccc

SEQ ID NO: 169280 - DNA, 678 bp, Homo sapiens
tcaagtgatctgcccatcttggcctcccaaagtgctagggttacaggcgtgagccactgtgcccagccactccattctctcttaaacccattccagtcaagcctgtaagcctactagcctgccaaactccatcaaggtcaaggatgcccaccatgttgctagataagtcagttctcaatccccatcttacttccattagcagcagtctcacctttcatatcagagaataaataaatcaagacagagatataaagaaattatctaaagttacagaagtaaaacaaataaaatgagactgaatgtcagtcaaaggagtactgtcttcctgaaggcttctgtatatttatcttactcctgtgtgattttaaaaaaacaatttaagaacaggttttaagacataaacaatagagtatcatcttatgcagcagttgggttctaaagtctaagcataaagcaaaaaatcaagttttgacaaaaccactttgaaaatcccttatattgtacataatgtgtggcattgtgctatctttcaataagttcaacacagccagtctttcccctctaacattagcccatacagcactttgtcaattaaacacagatgattcaatttagggaccgtcctgtacaaagactgcatgttgtaactttaagcactagattgatattctgttgatc

SEQ ID NO: 169281 - DNA, 330 bp, Homo sapiens
tgctgggatcgcagacgtgagacaaggtggccagcccactttgctcatttttaatgcatgggaagctggcggagatttattttcttcttcttcccccaggaatatgttctcatacatacatactatctaggtccctgtaattccccacttccctaactatccatgttcatgcatatttacatttaaaaaaaaataggatcatactggctatgttgattctgtgactttatctttttcactaaataatatgactcaggaacctttcaaggtcaggaatgtggatccacctcattcatctaaaatctactcattctcccacatgaatgcata

SEQ ID NO: 169282 - DNA, 575 bp, Homo sapiens
ttcccttgcagctcagagcagccacctgagtagctaaactctgcccagcaggatgtggaaattagtgatgtgagcaacttctggatcacacacccttcccacaggccagtggagtaacaaagcagaagaaacctgggccccggttcctcatggaaaagagctgcctacccaccccacacctaccacttcatacttttatgcaaagatagagataactctatcttatttaacccaatgataagctatgttaagttaaaccaacactctcactaaaacaagccccagttttaggctgccatcctgctccaggtgccatagatacagcagagatgtacagagatggccaagctctctgcctccagcagctcacactggaattggcgacagacaacatacaaagaaacaagtaacagactgtgtttttccgaaggaaataagccgggtgaagggttggagatgaatctaggcatggccagccacgccatctcaaggaagggagggctcagacctaaaggcggacgggccatcggccttgggaagagcatttcaggcagagggagctgcaagctcaaccg

SEQ ID NO: 169283 - DNA, 596 bp, Homo sapiens
gagaaaagaacaaaagggactcatatttgagctcctgctgtatgttgctgtgttgggaatatttcccttttccttacttatttcttcttcccagtaaccctatgggattaacctcatatgagataatatcccagataaggaaattagagctcagggaagagattcaccaaagatcacacaattgtagctaaataaggattagaacccacccatttctgcctctgtttgaaagctttgctccctgaaatcacatgcaaaactatgtgtctatgcatttttggggcatttggcatccatactttcatcacagtttccaagggttctgtgactcagaagttaagaacctgtggtccaaactccttgacatatactcttcctttgtactgttggaggtgggaatagagggaaccaagacctgtctctcatgaggaagctgtcatgggagatttacccaaggtgtgcataagcttttttccttgttcagatagctttgtgacacttgagtgtctttcctgtacttgtcctgggaagactcttagtcgaatcctgagcattctaggatatcaggaaaggatctgccacttcaggaagtgacc

SEQ ID NO: 169284 - DNA, 480 bp, Homo sapiens
tctgtacagacgaagtctcactatgttgcccaggctgatctcaaagtcctgggctcaactgatcctcccaccttggcctcccaaaatgctaggattacagatgcgagccactgcacccaagctctcttaattcctcctgactagaaagagccctttgccactttcagctttgtggctgataattctataaccttgggcaaattacttaaggtctctgagcttcagtttccccatctgtaaatagaggaataggacctaccacacaggcttgccatgaggttcaaataagataatgtgggtaaatcactttagcacagtctctagcacagggcagggctcaacaaaagtcacctactttcctttaccctactacttccagttgattcctactaaactctaggtgtataaaagataggtccaagcataattaattcccctgcgtactctgctcagggtcctgcctcagtgccagggacacat

SEQ ID NO: 169285 - DNA, 565 bp, Homo sapiens
gtggtactgctcctaggacattctaagctgaggaaaaaagcccgagagcttttgtacttgttccctctctttgaaactctttgcccagagctcaagtggctcagatgtggacttttcctgtacatacctcactctctgtctcccgacctttcttgattgggcctactttataaagacactcactaattacatctgagggctccaccctcatgagctagtcacctcacaaaaggcctcccacaaccaaatatcacacttgggatggggtttcaacataatgaatttgagggggacacaaacgttcaaaccatagcactttcccaacatgaagatgatttttcagttaagttctaacaatcttttcagaaacagataattctcaccttgtgccgttagttccacaaaataaaaaataaagtatcccaacatcttttacgaggctcatataaccttaaatacagaacaagctaaggataacacaaagtatgaaaatgatgaacttatttcaagtatggatataaatgtgtgtaaatagaatattagttaactgaatacaaaacagcac

SEQ ID NO: 169286 - DNA, 441 bp, Homo sapiens
tgacatctttgttgcctgcttggagagtccttgctctttccattgactgagtagttctagctagtttcttttgtgttcattgttctgccttaaacaggatcataaagctttcaaaaatttttttttcagcttgttacctcatgtgtctgtgctggccaagaaggaagagaagaaaataactttatcatttgcatcacatgattttacagctttgaaaacccatttgtcagtgtggttactgggaggatgattgcagctattgagtgctctgagagttacttctttaatctcttccctcttctttccccgtttaaaaaaacagttaattttgctgagggagaaattttattgtttttttggtatatgatttcaaagttgaacctttaaatgatttgtgaaaagttaaaagttctttgccccaagttcttagtaactcttcta

SEQ ID NO: 169287 - DNA, 409 bp, Homo sapiens
aagtagaaggagctgagcttcttgatgtgtgaacagaaatgggaaattctttatttttaggctttctagcaattaaccttgtttctgtgtgccctattgtaggtagatttaaagctagaagcaccaggtgggtgctgctggaggaggagcagccagtgaaagtcacagattactgccatgtttaagcggatgtggtgttagacattcagacaccagtgtgttggctgggattctgaatacctgtgttttttatcaggattggtgtcagtactaatattttggtatttaagaaatctggagtctgaataatttacattttgagacatatccctagaaagttactgcattaaaatttgaaatggaacaaagcagcttgtttagaaagggttctgaccacttccctcaatta

SEQ ID NO: 169288 - DNA, 161 bp, Homo sapiens
gccgagatggcgccactgcactccagcctgggcgacagagcgagactctgtctcaaaaaaaaaaagaactatttctcctcattcatcattttgcatctgattccccatatatcttcttctcatctcccaaccaggtatgatgcccaggcaggacccctgct

SEQ ID NO: 169289 - DNA, 447 bp, Homo sapiens
cataaatcaagaaatacaactgcatggcttgaaatgtattgccttaaggctgattctaaaccaagaaaataataccaacatcactagcgatgctatacaagtcacttagatgggagctaaatcctctccaactctaagcaatttagatttggaccaatttaattcttaggagttactaactttgataacacataattcattttgacagtttaaaccaaaccaattactccaaaagggaagaaattatgtgattgcctaacacatggaagcagaggctttagagatataaaagtctttggagaccgtttagtgcagccccctcacaatataacggggaaatgggacccagataagcagacgcttgcctaaggtcacagcttgaacccagttctcctgacacccattaaagtacagtgttcccctattgctgggagttgtataacgaaa

SEQ ID NO: 169290 - DNA, 358 bp, Homo sapiens
ccaggtctccatccccagtgcagcagcccaagcccacaggtggagggaggagaagggcagggggaacaccccttctactgcattcacgttcaggaaatcgaatgccccttgccctccacctttaaggaaagtgctcctggcctctcaccgggcagcgtgcccagagttgagttaccaagggagggatggtcggcctggagtcaatcaactctctctccagagccccttgatatacacccagaacatcagacctattcagtgactctatcgagcgctgtggctttcaaaaaaaagtttttttcttttagcaaaacctagttacctaaaacacatcaaagtagagtgctaccaacttgac

SEQ ID NO: 169291 - DNA, 1025 bp, Homo sapiens
gaaagagatagatagagagagagaaaggcagaaaaggaagaaatttgtaatgagcagtttggttttctagaatgggcctagtaatttgaagagctaaagagataaaaattcttacggcagatcaaattccaaataagcattctcagttattctttatttgtttgtgtttccaccttcataactactccagctattgcctctagtctccctcctaaggatattactcagaaacatagtcttcctagaatgctcacaaagcttccattatcactaatgagagctacttatgtgcacctggggaagagctacctgttaatattctatctttattttgctaacgggctcagccttaacatttttcactattatttggctgctccaatgtctctctttttttattgtgtctttttttttaactccataatgtactttcttagtagcactagttatgagttagcagaactgagtgtacctgagtagggatggttccaggtaacttaggtaaatgctgctcatccttgacagttacatggtgtttagagctttctgtgggttcacaaattagcggtggctcacacgtgtaatcccagcgctttgggaggccaaggtgggtggatcagaaggtcaagagattgagaccatcctggccaacatggtgaaaccctgtctctaccgaaaatacaaaatttagctgggtgtggttgtgcatgcctgtagtcccaaatacttgagaggctgaggcaggagaatcgcttgaacccaggaggcagaggttgcagtgagctgagatcatgccactgcactcccgcctggagacagagcaatactccttctcaaaaaaaatgcagcattccattaacacaatagatgtgttccttaatagagtgtatagctaatacaggcatactgtggacatattgtggtttcagttccagaccaaggcaaaaaaaagcaattatcacaatgaaacatgccagacaaattttttggtttcccagtgcatataatagttatatttacactac

SEQ ID NO: 169292 - DNA, 189 bp, Homo sapiens
ccaacaccagagaaagatgtcttgtagacaaattttctagccctagtgttacccacctgtgttgctaatgatggtatactttttaatgtgagtcaacacgtgctggctcccattttcagtgttcctagatttttatctgcctgccttattttcagaggaactggcctaacatctcatgagtgttgatac

SEQ ID NO: 169293 - DNA, 445 bp, Homo sapiens
tcagaaacagcagaggtatcctaagcccacctgcattccttacctaatgcactgcactcctctcttcccagggatgtgaccctgaccagatgtcctctggggcacctgtgattcacactacactacacgtgtctctatctcccaacagagttacaggtcccagagggtaaagtctctcactctcggcaccttgttttcttttttttaaagtatgtttttttgtgtgtgtttgtttttgagacagagtcttgctctgtcatccaggccggagtggagtggcacaatcctggctcactgcagcctggaactcctgggctcaagtgatcctcctgcctcagcctcctgagtacctaggactacaagtgcgtgccaccaggcctggtttctgcttctttttcatccttgagtctctccagccaagcttcatgtacagaaggacgaatca

SEQ ID NO: 169294 - DNA, 489 bp, Homo sapiens
ccacaggcttcttaagaccaataaattctgctaattccagccattattcagccgtccctgtagtgctgagcttagaaatgtggttccctgtctcttgagcaccgcccattgcccagatggtcaccttccagggcaagacacacatgacctgcatctggtgaccctggccctgtctttgggggagagaccctgctggccatggggtgctgcagagggttggaggctcacaggccacacatggctcgtgggcgggtccttggcatttattgcctctgtcgtatctgtgccttctctaccctcattagcagcaatgcccctgagctcagaaagagagaaaagccagcctggctctcagaggtcagacttcaccagagcatcctccctgtagctttataattaaacagagagagagagagagagagagagagagagagagaaatagaagccggtaactcagcatcctgtgtcagttactgacctgtgcctcct

SEQ ID NO: 169295 - DNA, 462 bp, Homo sapiens
tacatgctgacggcaagctatccggttcaatacatgggaagataaactgtataaaactatctgagctgtgaaaagaagtcactgttcggccaggtgcaatgacttaacgcctgtaatcccagcactttgtggggctgaggcaggcagatcacttgagcccaagagtttgagaccagcctggacaacatggcaaaacccagtctctaaaaaaaaaaaacaaaaaaccaggcatggtggtgtgcacctgtggtctcagctactcgcgatgctgagggggaagaattgatttagcttgggaggtcaaggctgcgttgcccctcagtctgggcaacagagtgagactctgtctcaaaaaaacagaaaaccagaccaaccttccccttcagaactttagtaactggggattatatgtagccttggaatatttattctgtgttggccaacattgaaccggatagcttg

SEQ ID NO: 169296 - DNA, 312 bp, Homo sapiens
ttttttactgagaagggaccttttaaacgttgacttactactctagctacccagtttgaattgaagggctgaatacacatgcacaggcacaccttcatcaaaagaattcagtctgatagtatgaataatataccttactttaaagcttactgtggtattaaaggaaaatacttcaccatgcttttactccctattaatctgcatattacttgtttgtgatattagaattgaaacttgagattgggagcaagacataatcataggcatttgtgaaccaaacgcttaagtaatttaaaagtgaaaatatgttga

SEQ ID NO: 169297 - DNA, 276 bp, Homo sapiens
caagctatccggttcaatgcaataaaagaggatacaaacaaatggaagaacattccatgctcatgggtaggaagaatcaatatcgtgaaaatggccatactgcccaaggtaatttacagattcaatgcaatcccagctcttcttactaaccaactttgttttcacctctcattttactccagctgtttaaacctgccaaaaagtttgtattcatggaaactaacataagccagaaacttataatggaagtgtattgaacaacataatgagagaacc

SEQ ID NO: 169298 - DNA, 529 bp, Homo sapiens
cacatccctcaccacaaacacacaccccacacacatcatacacccccacatacaacatacacaccattcctcctcatacttccctacaccccacatgtacacacagcactccctgacaccacatagacaaacacataccacacccccacatacacacacacaccacacatacactcatgtatgtaaatatacaaagtacagtatattaattttatagtctcatcgtggccagaaggaccttagagagtctctgtccaactccatggatgagggaactgtgatcatggccagagactttatgggactggcccatgttcgggtggcagaggcaggcccaggttccccagtcctgacacaatgtattttctttaatgtctttataataggcaatacatgttccctaaaatgtattgttgaactgaaacctttaagaatcatttattctctttgtatgaatgtttttccctcaagtcttgtttacattgtgagctttcatagcaaaccctttctttggcccaacgtaggctaa

SEQ ID NO: 169299 - DNA, 108 bp, Homo sapiens
ctacatcacagtaaatgggataataatagccaagcctcaatttctgttctcaataaaaggcaattactatggatgtaatgaatttctaaactccatttaagtcttttg

SEQ ID NO: 169300 - DNA, 499 bp, Homo sapiens
tggggcaacctctcctcctcggggaggacccagcactccctctacctctgtggctggcggcgtggaccctttgggactcccaatccagcaaacagaggctggtgccgaccttcagcctgacacagaggatcccactctagtgggtccccctctccacaccccagagacagaggaaagcaagactcagagctctggggacatgggcctccctcctgcctccaagtcatggagctgggccactctggaggttccagttcccaccgggcagccagagagggtctccagggggaaaggctccccaaagagaagccagcacctgggccccagtgacatctacctggatgacttgccctccctggactctgagaatgcagcgctttacttcccccaaagtgactctgggctgggggccagaagatggagtgaacccagcagtcagaagtccctgagggaccccaaccctgaacatgaacctgaacccactctggacacagtggat

SEQ ID NO: 169301 - DNA, 543 bp, Homo sapiens
ccaagattgcggcactgcactccagcctgggcgacagagcaagactccgtctcaaaaaaataaaaaaaaaaaaaaaacagctacacttcttcagtaagggcttgcccatccccctgcatacctgatttaaagtactcctgccctgaccagagcatggagccagccttcagggattccaaagtgccggatcctactaagtcaaggctgttgatacagaggtgagatcgtttcacaaacctgtgtgactccaagatggttatccattctttcctgctgcctggagttaagaaaggctttccttaaaagggagcattgaagccgagtcctaagagataaagagctgcgcaagaaagtaagcaaggaagggtattctaaggataaggaagataatgtgcaaagggctaagagaatgtggctctttaactgaaacattcagtatggccaaagataaacaggccctttggcaccccctactttgttaggcagagacagctttatttcatagcaatgtatgaacaaacacccttgatctttccctaggtg

SEQ ID NO: 169302 - DNA, 372 bp, Homo sapiens
gcaattctcccaaagtgccacattataggcatgagccaccacatcctgcaatatatttaatttcataagaaacaaccacaccattttccacagtggttatgcctctaaccccttctggaaggagaccatatcatcttttccatacaggacaaattaaatgaggtattacagatagtgatagaagtaggcatggctgatatataggcttcctgtgcactataaagctgtccatgctcagatgcatagttcaaattaatcattagtcaacctagttaaattgtgcagttattttaaaacaacagaaaactactttgcgaggttacatgtcacagtttctctaacatcctacttgggccacaccttttccaagaa

SEQ ID NO: 169303 - DNA, 446 bp, Homo sapiens
cctttatgtggctgtaatcagtgttagcgatggtttctgtcacttcgcattgaatcatatcatttaaaaaaatgacttacagaattcaaaaccagtatcaaagagctgcataccatttcagaaggggagggtagactcttaacttcctgttcccccactgttggaccttgaggtcacttccaaattctcaccataagtgcctcacaaacaccttcgtacatacagctttgtacatattttagattatctcattagactaggctttggtaaataggattattggatcaaggggtatgaaccaaatactttctacaaagactatttcaattcacaccatcaataatactgtagaaaaatgccagtgaaactcgcatttatcatgtttgtattctgcctttttttttttttttgatatggagacttgctctatcacccaggctggagtg

SEQ ID NO: 169304 - DNA, 385 bp, Homo sapiens
aaaaaaaaaaaaagaagttggacacagtgaaatgacacaagcagatgttaattcacatgctactgctattgctgtgagtagtagtcctttatttctgacccagggatatcatggcttccagaaaggtaaaatctcaaactctgcacaagccttgagctgcctgttacagtcttttctctcagtctccttggagcctcttaagctaaacaaggacatacacagaggagattaatcccaaatggaagtgccaaactgtggaggaaacaggttaaaataattttgtggtatattaaagaaaggaagcatttggattcatgggaaaacaaagacttcttgaaattatgtattttcaaccagaaaacaataaaaatttagcttttttcct

SEQ ID NO: 169305 - DNA, 226 bp, Homo sapiens
tgatttcatgatgttatccccaacacctacacaatcaagtccatatacctgtggcctgctattgaagatctgcagggcatgatatgatgactcctagaggttttttcagcctcttcttctgccagtccatcctccatctctgcccttgaggagttcatattttagtgggtttcagacacagacatccgcactgtgttgggcgataacatggggtccgataggggtc

SEQ ID NO: 169306 - DNA, 442 bp, Homo sapiens
gatatctcataaacataaatgtatactgcctacttgtaaatcactctccatctttaaacaatttgtatatttatttatctaccttaagttcgtaagttccatggcccttcattttttgtaaactatactattttggcttcttggacttttgcatacagatctaaatataatgcctcactgctgagaatctcttttttttctagttcacaagttgatgaaccaactgatctcctataaaattatcagaacctataagaaagcatgtttttaaagaaggaaggaacaaaggtgttggggagaaatcaccatctttttttgtactacattgagaattatgaatatcattgtagagcaaaatatcacagtattccattctcctgtgacatttttacatggactcaactaagctgcgggtccaatcctgattcgaagatgtccagcc

SEQ ID NO: 169307 - DNA, 214 bp, Homo sapiens
aaggtaagaagagctatagaaaactttcaaggaaaaagaactatagaaaggctgcagtgagctgagatcgcaccactgcactctagcctgggtgacagagggagaccctgtcttaaaaataataataaaaattaaaatgactgattgcttttggtattattcctaaacctaaaataaggtggggaggggagttgctgaaggaattaaccccacc

SEQ ID NO: 169308 - DNA, 354 bp, Homo sapiens
gcatttatatctgtatctttattttagaaagtggatggcccagccctggacttcctaaatgatatcatttaggaaaatgtgtataaactctgttatcagaggagtcagaaatggaaaactggagaataccttttatattatttgatctgatcagtcccctttttctctacagttaaagtagctatatttgtaccccttgtggtttctaaattctgaagaattaaaagaaatagaaaaaagcaaagaaaaggagtgtcaacttggtcgaggtaggcatgtgtaaaagtgagagctatctcttccatttttttttaactgtatctaaggttgtacaaaaactcaaactaggcagat

SEQ ID NO: 169309 - DNA, 244 bp, Homo sapiens
ctcttaacatcactgaagctccttagcaggtgctctcagcatcttatgaggagcacatgccaactgggaacgcacatcctcgttttttgctcagaaactttggtcttggcccttctccctttcccactgggattaagggaacttgctatttgccttgcctgtttggggaggacattctggacacagatgagagcctttgggtcaagctgctgggagctctcacacccatctgaggagggctcgt

SEQ ID NO: 169310 - DNA, 305 bp, Homo sapiens
aggaaacttaaatgcccatcactaagtgaaaaaagccaatctgagaaagccacatattgtatgattccaagtctatgacattctggaaaaggcaacattatagataccataaagaagaccactggtttctgcgagtttgtgggcaggaggaataaataagtggagcagaagggaattttatgacaatgaggctactctgtatgatactaggtggttgcacgtcattgcaatttgtcaaaacccatagaatgtgtaataccaagagtgagccctaatataacctgtggatgttgggtgatgaggat

SEQ ID NO: 169311 - DNA, 145 bp, Homo sapiens
tccctgataaataatgatgttgaccatctactcatgtgcttgttggctatttgcatggcgtgtttggagaaacgtctgttcaagggctttgccttttttttttgagacagagtcttactccgttgcccaggctggagtgcggtgg

SEQ ID NO: 169312 - DNA, 207 bp, Homo sapiens
atattgtgaaactgatctgatggataattagaatttgcccgtatctgtaagaaggcctgttttgggccatttcaaacaattaagattattagttctaatatgaatgtaagaaaacattggatggagaaaagaaaaaaagtttctgtgtttagagattgaaaaccttgctttgatatcttaacctggatatctcaaatagtatttcct

SEQ ID NO: 169313 - DNA, 345 bp, Homo sapiens
aatgagatgaatgctaagcccttgatatatctgtgctgtatgccatgaatctgttctgaaagcgattcaaaacagatgcccctttggcagtgcaccctaattccagggcagacccatttttcgatatgaacttttttttctgcagtagaatatacttttaagctttgattgcatgttttcttcagggagtaggttattctatagaaataaggattgactttaagtaatatagcttgttttattttgatcattatggataaaattctttaaattacataatatacttcctagcattcttaacctaaattgaaaagtgtataacccctgttacggaaaacaaaaaca

SEQ ID NO: 169314 - DNA, 318 bp, Homo sapiens
tcgagaccagcctggctaacatggtgaaaccttgtctctcctaaaaatacaaaacttatccagatgtggtgacacatgcttgtaatcccagctacttgggaggctgaggcaggagaatcgcttgaacctgggaggcagaggttgctgtgagccgagatcgtgccactgcaccccagcctgagcaacatagcgagactccatctcaaaaaacaaaaaattaggcacagtccaggccagtcacaacctaagatgtttacgtctgaggaagcagctacgtaacgcctgcgaggacaaactcctacgatggagaaggttcag

SEQ ID NO: 169315 - DNA, 488 bp, Homo sapiens
atcccaacactgcttttcccacataaatgtgtgtgttttgaccttttctttgacctggttatgacattgtttgcgtccttcatatcatatgagtaacataaaacctttagtacatgtttgtttttatgtttttatgagtcatgattttatttttcccaaaaatatcttttaacgtgtgtgtgagtgtgtgtgtgtgtgtgtgtgtgtgtgttgggcgataaatgtatgttatccccaacacccaagttcagacattaatgattaatgttattatatatttactgaaatctaggagtgatcagtggcatctctgacctatgaggttgttttaacaggaatgccactagaggagctgtgtattctagccagtctgtttctctcttttcccccatttcagcctttcagggatacaagaatggctctataacagctggtcaattgtatgtcagtgttaatggattcatatctagtgtggggcgataacatca

SEQ ID NO: 169316 - DNA, 422 bp, Homo sapiens
caccatgttcacaactttccttccccatgttagcgtcttttaggcagagaccctaacttgctaacgttagaattccacacagcagccagcacaatgctgcggagtaagcatctgctgaatgatgaatacccactgagccactgagctaggtgcccagggtggcaggggtgtcacatgagtatgaattaggcagagttcacaaccccaaggaacttaatctgttaaatgagtctggctcaccatatattttggtggaatttaccatatttggtgggaaaaacatgtttttaatgagatcatttcttctaaatttattttggcttctttaaccaggcagcttttaatcaatttgaagtttcaaaaagtattatacggaggcatagaaaaataaaaagcatagaaaccgaaactcgagatttagg

SEQ ID NO: 169317 - DNA, 428 bp, Homo sapiens
gatcctggaaggaaaaaaaaggacattagggcaaaacaagtgaaatctaaagtggagagtttggttagtagtaatgtacctgtgttgcttccttagtcacaacaaatgtaccatcataatagtgttaactgtgggggaaactaggtgagggaggtgtattgaaattgttctgcttattctaaaataaaaggtttatttgtgagaagcacctttcagtggcgtgaacacatggattggcatgggcactctgcccatgggcctttttttttttttttttttcctggaagtttagttaaccccaccataataggatctttgtaagagcacacagccaagagctatgtgagagctgtgcgctcttaacaaagagatgtgtgccagttggcattcatgtcttgacccctgaccgtaaaaccaacaaaaaaaaa

SEQ ID NO: 169318 - DNA, 508 bp, Homo sapiens
ctgatattcacatccagtcttcagtctgcaagcctttattgttgtccttgcaactgtagctgatacaatttgccaggtggttgtggaagtgtcccgtttctcaacaatgtaattattgatagaacttccaccatcatacttgggtgggccccaggaaagagtaatactatcagctgtcacttcatccattttaactggtccagttggaggccctggtttgtcaagaacgataacattaagggtttcaatagcttcaccagctgagttagtcagtttaaccacataatggccaacatcttctcggcaggcgtcctttattgtcagtagtgaattattttctgtgctctctgcatttactctagttgtctgcttcagtggtacattatctttatgccaggttacagctggggtagggcggccaatgaatggaacatcaacttttaggtcttcacctgccagtacagtgaaagtattgaacaggagtttgaaggctggtggaatgacaaga

SEQ ID NO: 169319 - DNA, 128 bp, Homo sapiens
atttggagccctgtagttactgtgacgacaacacacactaatggaaaacaaagatggtctgctcatcagggcaagccaggaagagttttgccagctcagatttttcctaattattctataagtcttga

SEQ ID NO: 169320 - DNA, 356 bp, Homo sapiens
cattattccaatatcactgccaacacaggagacctggctgacctgcatgctctatgccaccacgtcaggaactttgctgctgcctggacaagtataaaatgttatagcagtaatctaaagtgtgatctttaatacaccctgcacacacactccacgcaagtcctgctctgtaatctcttccccccatcaaagtgagacttatggaagttccaaggcagccccctgcccagggcagagctttctgggagcctctttattctcctccctatatcctggcttagctacacccgaccctatatgaggtttgcaggacctggagagtggagggtaggcattattgcaaaaatatatagaaa

SEQ ID NO: 169321 - DNA, 336 bp, Homo sapiens
cgggctttgccaaacttgcagttaacagtcagcaggggttcctcctctgttgtttccctaacataagcagagtgctgaggtagaaagagaactctctttccctatcgtaagcagagtgctgagatagagaactctctcacttagaaaagaagaaaaacaactcaacttaaagtgcataagttggggagcctgagggaagagactcttgctctgtgaaaatgggttccttcaatcattgtatcctcccctagttcagtctagctagacctccctgaagggaaacagagccagcattccttttacccaaaggaaagagcatggtgacagggtcttgga

SEQ ID NO: 169322 - DNA, 466 bp, Homo sapiens
taattacagtttaagacccctaaaaagctaattaataaaagacatcatgttctgataactaaaaggcttataaacatcattctgagtcctatgaaactgagtcctcaaagcacagattaataacaaatggcatctagcaaatctctagtaaactttcttatcataaaaacaagtttatgctctattattaaagccatatgagaaacagttttgggtgtttttttttttttaactacagtaaagttacttacaaagaaatgtgaaagataactggggtagtagtaataaaaattcattttgaaactgaaaaattcatattgtaatgtctgtgatcaaaggtcaacgtctttcaacattctcatacaagtccaacctggatagaaatcaactcaaatataatttagaaaaataacaggatatcaaacaatgtattaaaccctgtgaaatacaggcataccttacaaaa

SEQ ID NO: 169323 - DNA, 150 bp, Homo sapiens
ggagaagactttcagagttaggcagaccaactaagaggtcagctgaagcacctaaccagttgtaaggaggtgaaagacagcaccccaagaagagacgtgcaggaaggaggaaagaggcttggtcataaaggatggaggaattccaaagtg

SEQ ID NO: 169324 - DNA, 619 bp, Homo sapiens
ttgagcctggcaccttcgcaccagcaagaccagagcctgatggacaaacttgggacaaattcccgctggttctcttgcctagcagagaactgccaaggtggcatctccttcctgcctggtctgggtagaaaaccctaagctgaacccagagcagggctagaaccacagaaacatcccttattgcatctagggcaccgacagggggacagggagagtagagaatctgctcttggccaaaacttatattcttagaaacatggggtccccagcccctaagagcaaagtcttcaactcccagtgggctttcttcagcctcttggcacttgccaatcccactccaaggactacagggccaaacccagcacccacacagcacactaagaatacctccaccgaccactttccagacctcagggagtgggactcacccacgacctcagagggctcgctccagcccaggcttgtgggtggctgcgccctcaggggagggaaggctctccttccccttgtactgatcagaggccaacgtcctcataaagtcacagtggcatggtaaggccagagtgtcctccctgggggcctgccctgactccacagcagggataccttccacattcct

SEQ ID NO: 169325 - DNA, 506 bp, Homo sapiens
cgtgggtctcaaaagcagctcctgggatctcagttaagtgcccagttattctgtgattctgggagaagcgcacagacgccactggagtagctgggtgtcagattgcagatggaaggacctgaggtttctgcagtcccagctcgtattcacaccgtggaacatttgtccttagcttgtttccaacttccttccatcccctgctcccgtcacttgcccccaagttgtctttgctaaacagtgaaaagggcttaatgaaaatgacattataactagatgcatgctcactaatctgaaaagagaagggttctttctgttgatttatttgtagtctgcattgctattatctgtcgacataaacagaaagcagagaggagaacctcaggaattctgaactttcaatcgggacaactttctcatttgttgttttaaactttaaaacagcagcagacctttctggaaggagaggtagtggccaaagtataaatatgttacgttgccaggagacg

SEQ ID NO: 169326 - DNA, 185 bp, Homo sapiens
ttgaggatcccccgaagtattatcaagagaaaagctataatatctttagaatgtcaatggcaggtatcaatttaaaatgcgcaaataccataactagtaatgctttttgtaatgtattgaaagaaacctaagttaggcaataatattgatgatgaatattatgattataacagccgatactaaat

SEQ ID NO: 169327 - DNA, 491 bp, Homo sapiens
atagctcactagaattatccctgatattctggtgaaatcttcaaatggcattggctacactagtcctattagccctggtgcaagtacccagacagatccgtggtgtaagttctgctcagagcatcttggcagcaaatgtctgccccaaacagccaggagtcccattctatatttatcagaggtcactatttaccaaacagacctcaggttcatagtgcatcttctaccaaggacacccttaaggactcttaacccactccacccttgtcctcaattcattctttgcactcacagccaaatgcttaaatacaatactgggttcattttctaagctaagagaaaagggaagggctgtgtagtatgttgattcagtgagccaaaacacagtttgaggagccttttgcaccagaagccaagggaaagattgatttgccggcttgaaatcactggactcctttaaggagcatggtgcaagatgctttctttagaac

SEQ ID NO: 169328 - DNA, 584 bp, Homo sapiens
agaattgctttaagaccgaatgtgtggttgatctcagaatatgtgccatgtgtagatgagaagaatgaatattctgttttcaggtggagcattctgtcgatgtctgttaggtctgtttttttcaagtgtcaagtttagattctagatatctctcttagttttctgcgttgatgatctgtgaaactgtcagtggagtgctgaagtctcccactaatattgtgtggttatctaagtctcttggtaggtctctaagagcgtgcttaatgaatctagatgctccaatattgggtgcatgtatatttaggatagttaagtcttcttgttgaattgaaccctttatcattatataatgtcctttttgattgttgttggtttaaagtctgttttgtctgatataagaatagctaccccagctgggcgcagtggctcacaccttaatcacaggaggcagtggtggaagttggagcaagatgcccaccaaaattaagtccttatcctcccacagagactgacagtaagttatctaccttaatgtttgcatttctaaaatctctgagaagaaaattctggtagaacatttacat

SEQ ID NO: 169329 - DNA, 437 bp, Homo sapiens
actgctctcatcatcataaactttctagtttcacagaaaaaaaatacataaaaaaagttaaacactgtttattatattttattctactgttaaataaaccaactagtaaatctttacctttctgcaaacaagctagaacaaagatttctgggtatttccaactcaatatttaacattcaaccataggaaaatttagccttctgatctaatggtttggacttatttcttctttggtacagagcaaaagtctacagtctacatctttattcctcaattagataatctatggaaacactgaactaaaggacctgaagaaataaaaaaaaaacaaaaacctgggaatattcttaatgagtgtctaaatttgataaagaaaaatgttacttaagaggacaagccagttgtggtagcgcatgcctgtagtcctagctacctgg

SEQ ID NO: 169330 - DNA, 1676 bp, Homo sapiens
agcagggacctgggatgccaggctctggggttaggctttctggtgaggacaaagggagcccttgaagggcattcggccactcgggtgatagtagcatggagggatgattgggtagggggcactgggagactcatgcctggctgtcttctgtaaatgcctcattgctggaaagccctccatcctttaactgtcaagggccaatgaggagtccctcactgtgcgaagtcttccctccctcatgccacccccagccccaaccttaaggggacaacgagcactccctcatccaccctttacctccattgcacttggagtaaacctcaatcctaggcctattgtttgctgacttgagttgtcagaagtcagcctcctccaccatcccctggaaaacaggaatctgtgtcttggccaaggccactcccctgcccaggtgtttgtgaaggccctgccccatgtcctgctaatcagtgctctcccactgattggctgattacttgcaagccccagaggagtcacctgacctgtctaggccataggtacatctagaagagaacaatctcaactcctgggtcttcaggagtggagtagatttcaggtggagcaaggcagacatagagccaggaattgcagccacaagagagaaactgaaagttcagcccactgtgttctgaaacctttcactcatttattccctgcaacagtcccttgaggtagatactatcattttattcagcttgccaatgtggaaactatggtacagagaggttaagtaaatcccttcaaggttatgtggccagcagaggcaaagccaggatctgaacatgggtaacactggctccagagcctttgttcttaaattctgtgctatcctagagcctacctactccttacttccctctgcgtggcccagatcctggccctggatgtagtatgctccagttcttccaggtaggctggagattcctggaagcttgtgggagaaggagccttataacaaccttccgtcttggggaccctatcctgggtcctgagcctcaggagcctgcctgcagtccctgttgtaggctcttccccagctaagcatctgctttaggtgttaggccacatgaagtacgtcatcccaacagattcctgggcaaggaggaaggctgggagtcaggcttccatctggcctgggcttagcatctgaggggactttcacccttccctgtgaaggttggaagaagagggggccccagaaccttgccagggagtctgaggtgcaaggagtggaaagcgggagggacactggtcaggatgatggagtcctgttaccaaatagacccagaaagtagggctgcccactccttctcagggatcagcaagtggaatgtgcttttctggggaaataggacgaaagggccgggcgcagtggctcacacctgtaatcccagcactttgggaggccaaggcaggcggatcacctgaggtcaggagttcgataccagcctgggcaacctggtgaaacccagtctttacaaaatacaaaaattagccgggcatggtggcacatgcctgtaatcccagctactccagaggctgaggccggagaattgcttgagcctgggaggcggaagttgcagtgagccgagattgcaccactgcactccagcctgggtgacggaataagactcggt

SEQ ID NO: 169331 - DNA, 1622 bp, Homo sapiens
agcagggacctgggatgccaggctctggggttaggctttctggtgaggacaaagggagcccttgaagggcattcggccactcgggtgatagtagcatggagggatgattgggtagggggcactgggagactcatgcctggctgtcttctgtaaatgcctcattgctggaaagccctccatcctttaactgtcaagggccaatgaggagtccctcactgtgcgaagtcttccctccctcatgccacccccagccccaaccttaaggggacaacgagcactccctcatccaccctttacctccattgcacttggagtaaacctcaatcctaggcctattgtttgctgacttgagttgtcagaagtcagcctcctccaccatcccctggaagccctgccccatgtcctgctaatcagtgctctcccactgattggctgattacttgcaagccccagaggagtcacctgacctgtctaggccataggtacatctagaagagaacaatctcaactcctgggtcttcaggagtggagtagatttcaggtggagcaaggcagacatagagccaggaattgcagccacaagagagaaactgaaagttcagcccactgtgttctgaaacctttcactcatttattccctgcaacagtcccttgaggtagatactatcattttattcagcttgccaatgtggaaactatggtacagagaggttaagtaaatcccttcaaggttatgtggccagcagaggcaaagccaggatctgaacatgggtaacactggctccagagcctttgttcttaaattctgtgctatcctagagcctacctactccttacttccctctgcgtggcccagatcctggccctggatgtagtatgctccagttcttccaggtaggctggagattcctggaagcttgtgggagaaggagccttataacaaccttccgtcttggggaccctatcctgggtcctgagcctcaggagcctgcctgcagtccctgttgtaggctcttccccagctaagcatctgctttaggtgttaggccacatgaagtacgtcatcccaacagattcctgggcaaggaggaaggctgggagtcaggcttccatctggcctgggcttagcatctgaggggactttcacccttccctgtgaaggttggaagaagagggggccccagaaccttgccagggagtctgaggtgcaaggagtggaaagcgggagggacactggtcaggatgatggagtcctgttaccaaatagacccagaaagtagggctgcccactccttctcagggatcagcaagtggaatgtgcttttctggggaaataggacgaaagggccgggcgcagtggctcacacctgtaatcccagcactttgggaggccaaggcaggcggatcacctgaggtcaggagttcgataccagcctgggcaacctggtgaaacccagtctttacaaaatacaaaaattagccgggcatggtggcacatgcctgtaatcccagctactccagaggctgaggccggagaattgcttgagcctgggaggcggaagttgcagtgagccgagattgcaccactgcactccagcctgggtgacggaataagactcggt

SEQ ID NO: 169332 - DNA, 286 bp, Homo sapiens
tgagacagagtcttgctctgtcactaggctggagtgcagtggcgctatctcggcttactgaaacctccgccttccgggttcaagcgattctcctgcttcagcctcctgtgggtctggatttctttgagggatgataaaaacatcctgcaatgatactgtggtgatggttgcatgactctgtaaacatactaaaaaccactaaattggaaactttaaaatggtgaattttatggtgtatgaattacaacacaataaatctgctacctttacaaaaagtcagtgtgca

SEQ ID NO: 169333 - DNA, 518 bp, Homo sapiens
gtgttgatggtggtggtgtacagcaatgagaatggtgataataataatatcttatatttgacctaaacatacttttcaaagcttttatattgtctatttcagtatttataaaagtgtattaaacaaattccatggaggctatgggatttgggaattgaatggttaataattttcttgttgtaatggacttcccagtgttttaatattctcagagtttttactaggaaattttagatggtacaaggcatatgcacaattcactatgggaacatttttaactgttaaatggaatatattttgggatgccctcatctaatgtagagacatatagaaccttagtgcttgaggtgaccacagtcacatgtcatgtacttcaacatcttcattgagcaaataaagcattaaagctcagaggagttaaatgacattttttgaggctacccagaaaattagtgatagaggataaattatagtccaaacttttaaaccctagagctttgtctttgttattgtgacat

SEQ ID NO: 169334 - DNA, 378 bp, Homo sapiens
tgaattgggtgatagagggaggttcaagaatattaggcactgtaaataatccagaaattaatgacctatagaagattatgaagaggggctaatggaagacactatggatgggacggaggtgaggagggaagaggattgctttagacttgagtggaggctgtcttccacctctatattctccactgtttcccatttatcggaggaacaagtaacggctgattttaacttacatcgtcagatatgtctattgctagaaaaatttattcatccagaatacagtcactcccacctcatttttcagtgaatgtttgaagctgaccctcagaatgcagctatgaaaggctctttgagtgggcgtttcagatccacggacacaag

SEQ ID NO: 169335 - DNA, 983 bp, Homo sapiens
actggcattaccgacgagttgtccgagttaaaggaatggggctaccccagtggtatctgtcatgagtaaaccaaaatgcctggtgatttatgggaaaactgtttctgagaagtaggtgtcagtttggttctcaaggccattgggacaagggagtgagccatagggagctgtcagagcttgaggactgcttctgggatggctgtcaattgccatgacttgctcaagacagcagatgcaattgcccttaaaatccaagtggggagagttggctctgcagttaaagcctttcacatgtgtcaaaactgaaaacataagcatcgggtttctgatcttggccttgaggatgttcttcaaacatgtcggtagacttgcttagaaatataaaacaaggttgaatgtgaatcatggtgaacccaccctgcctcctgtgaaagcttctgttctcaggagggttagaagcaattgtagcacatgctgacaaatagttaaaattgaactgagctttgtagaactgtatcctagccctgagtgttatgttccgagaagctcactggctcttttagaacagaaaaaccttgcaactgtgttcatggtccaggttctccgggggcatcctctagtcagcacaaaagacagaccctacaagaaaaattttgctttacacaggctagggtagaatgcaaagccaactgacaggttggtgagccataggagcatggagcaggactttatgcagatgttcttggaaagccacaaagggctctgatgagaagaaacccagtgggcatgattaattattcatctttagttggttgggcagttggaaatgaataaaggctgcctgaccagctaggagattacatgtcaaaaaaaaaaaaatcatgatttggtggaaagaacacagcaaacgaggtcagatattctagtcttgaatcctggtgcttctgcattctaactcggacaactcgtcggggtcctcaact

SEQ ID NO: 169336 - DNA, 435 bp, Homo sapiens
gcctcggtgatggactctagaggaccccgcatcatacagttcttcacaaccattctgatagcttaaagcttgcttctagctgtagcatgtaacagaatatacttttatttaacaattcagagggaaaaaaacacaagatgaatgaaaaggtctattatatttcaagtgtgtagtgatttcctgtttctttcacacttttggcagccatgtgccatgtcacagagtactttttatactacaacatcaacaaaaatctcttttcagactctggaaaaactgggcatctctctcaaataccaacagctctccatttaataatacaaaacagcaatgtgactaaaaatcatcatcccactaacaaagtacctttgtcataaataaaccctccctttagattatccaaatacatatcagacctccaaccctcctttcaga

SEQ ID NO: 169337 - DNA, 518 bp, Homo sapiens
cagtataagagtagaagtgtttacatatccctaggcaaaactataaaggaatactgatatgttccccatgaatacaaatagtttttaatccttttttctgactgaaacagaaaataatgcgtttgccaaatcaatggccaaatatcgaagtataacctgctctagcaaagatatcaaatccatcatggcagccacatttggggatgctaaatcaaaattactgaagtccagtcattctctgatcaatccagttttacaggggcagactaatgaattaaatatagataggatagagaccaccaccttgcatcttaagatacttaagggtaggtcgggtgcagtggctcacgtctgtaatcccagcactttgggaagccaaggtgggcagattacctgaggtcaggagttcaaaaccagcctggtcaacatggtgaaaccccgtctctactaaaaatacaaaaattagccatgcgtagtggcgggtgcctataatgccagctacttgggaggctgaggca

SEQ ID NO: 169338 - DNA, 245 bp, Homo sapiens
attccctgtatagcattattttaccacttaaaaattgtattttaccacttttatacttttatttatgctgtgtccattttgtgcagtacacttccccaatacatttttgttttgttttattgtaaacaaatataaatataatcctaccaaatttttagggcccagctcaaatgctaccccttccataaaatttctgttaccatccaaatggaaggtttctatatctcttttgaacgctaatgcca

SEQ ID NO: 169339 - DNA, 246 bp, Homo sapiens
tcaggcagggagcaccctgtagcctgcttcgaagagtgagtgtggagcccaccctcaggcagggagcaccctggggacacacacatgtctgcatcctcagctcagaaaccaccatcatcagagctaatgtctgttggtacctccacaccctttgcatgattagcttcatcttcaccgatgaggaaacagaggcaacttggaggttaagaaactcaccaagggtctcgctttcatccccctgccgtg

SEQ ID NO: 169340 - DNA, 304 bp, Homo sapiens
cccaggagccagtggccgtgctggacgggggccaaggtctctgcagccctgagacctttgcatagcacagccaaggacagagctgctgtctgctgcctgggcaccccttcctgcctggctgccttgtggtgcccccaagctggttctgtagcgactggggaggtgtgagcctggcctcagaggtccagatcatcacagcctctgatggcctctgacgtagcatcagcctttagtccagcgggccatctggactccctgttcacctatcaccatccccacctcggacttcttgtgggattaaccc

SEQ ID NO: 169341 - DNA, 424 bp, Homo sapiens
tagatacataaaatgcttggagaatattctgatgtaaaatttgagaaggagtaagaagtctagtgatatcagtttactaatttttaaaattaaattatctttaatctgtgttgtttttagatgatctttttcatgcgtgtccctgtgaagagaccaccaaacaggcttcgtgtgagcaacaaggctgtttatttcacctgggtgcaggcaggctgagttccaaaagagagtcatcgaagggagatgggttggggccgttttatagaatttgggtaggtaaaggataaaggggggttgttctctggcaggcaggagttggggggtcacaaggtgctcagtaggggagcttttgagccaggatgagccaggagaaggaatttcataagacaatgtcatcagttaaggcaggaacaggccattttca

SEQ ID NO: 169342 - DNA, 127 bp, Homo sapiens
tgtcaaggatgtggagacactggattccttataaattactggtgggagtataaagtgatgcactcactttaaaacacagttgtcagttcctcaaaatttaaacatagagttaccatatcagcaattt

SEQ ID NO: 169343 - DNA, 407 bp, Homo sapiens
tcggtaagccatctccctgctctctggtttaagatagttctaacttggtgaggcgtgcttaccgtcaattttcctccaaaggttaacttcctgctttcctcgaccagtattgccgcagccccgatggactggatgcattgaggccatccacaagtgactgggtccaacacctttgataggaaggctacgggctgccggcggcctctgtgttcttgagtcagcactcctaaaactaccgcactgtccacattaacaaaaaggtggaatggcttttctagggagggtaaggcagttatgagcctttccttcagcttctagacttgatcagcttcctcagaagtccacaggagatggttcggcttctcctgggcaagtttttaatataacagtttactgtgcagtgcatg

SEQ ID NO: 169344 - DNA, 369 bp, Homo sapiens
ggtgaggattcacggcttcagggccaagggcaggcaggtcttggtggttgttcttggccttaactcaacctaatcttgcctactctctagcaagattttgtgtcctggaaggaaagggcatgatgatgctcagtagtgttattgcttcctaagtgatccaagtcacctcagcctgttgggttgagggaatccaagtcccctaaccctttcctttaattaatgaaaagaatatcccctccaggcttccctatctcacatgctgtggccaatccagtgatctgacaatccagtgagatttccatgaattctgggggcttacaatatcatagtttctgttcctcttacttcctgcttccattgacatctaag

SEQ ID NO: 169345 - DNA, 349 bp, Homo sapiens
ctgaacacccctttgcttttgaacccagctgacagtgcacctctctgtcccagcaggaacgggtactccaggccctgtcgcagcccttatcctatggagatgcattctgaacagatggtgacctctgtgaggacaagactgtgcttggtcatcttagcctctctctggctctgggccagacctggcccagggcagacaataaacccacatctgtggaactgactggaagccaacagtggcctgaagccacaggctgctgattcacaccttggctgaggaggaggaaatggtgacgccaacgcgtgggttctagctttctttgccagcacagcgggcggggggccatgca

SEQ ID NO: 169346 - DNA, 444 bp, Homo sapiens
agggtcagcgccccctgcccagagactgattctctcccgcctcggcttcctgaaagcctggttcatgtacctttgtggcagagaaagcggcaaggtcacagtaaatctgcctttctgaaagctgtgctgaaatgacaccaggattaggacactgaaacccctctcagggtgggagagtgagtgggagggctcagaaccctgagggagcccacaaacaggttctaggaagaagctgctggtctcctggttatcatgagccccctgtgtgttctggctgctgctatcagtgtgtcattcactttgatttagcctcaaataaaagacagattattttgctttagagactatcacattaggacatcttacaccttgttaatgacccagtgaaaggagagttggaagccttccccaaaagcataatagcacaggtgacattttactgat

SEQ ID NO: 169347 - DNA, 500 bp, Homo sapiens
tctgactgctttaatatcatttccttacagtgcctgagctccactgagaaacaaaatgcccaaaaggcaaggagctaaaaagagaagaaataacattatctcaaaactgtaatcttctcctaaatagaatagttcatatcattggtagtttatttgtacagttaattttatttgtagtgtcaagttgtgaatatagtattaagattaccatttctgcactgtttagttttaaaaaattacctcagtgaccttggttttgtcctaactataagttattaataacttaatggccatggaaattatttaaatccccttcgataattacacatacactggaactacttatctgataccacagagcagaatttggattatgagcctgtcttagacattatcaaaaaaaaaaatttaactggctgggtgcagtggctcatgcctgtaattccagcactttaggatgtcaaggttagaagatcacttgaagccatggagtaatgaga

SEQ ID NO: 169348 - DNA, 337 bp, Homo sapiens
caaagaagaatatccatgactacctgagatggccattaaaatattgcccctttttccaactatgcctctgagtgaggtcagattttatttatatacttcaacaaaacatcacattgtaatagattaaatgaagaatcagatgagaatcaagctatcctctattaagccagatgttgaagagataagcaaacataaaataatgccattttctgaatatatttttttaattttgaaacattttcataaggaaatgtcaattatgttcccatgtcatgggtgtatttttgttactttcatatgaattaaagcgataactttaaattttatgttttaactt

SEQ ID NO: 169349 - DNA, 137 bp, Homo sapiens
agtgtatatggaacattttccagaatagaccatatccaggatagcgacaaagcaagtcttagtaaatgttaaaagattgaaattattaaagtactttctctgatcacaatgaaatgatgctagaaatcaacagtaga

SEQ ID NO: 169350 - DNA, 410 bp, Homo sapiens
acgttgggctcagttcaccaaacaggaacaaaattcaaagttaagttaaacaaggccaggtggaactctatgaaactgtttaaccttcaaaagatagttctgtctaggggacatgggatttagagtagagcaatcaggatgtatatctcggctcctcaacttaataactacatacttgagcaattgtcttaacctttcaaagcctgtcaaaagggcaaacattgccacattcaaatactcagattatcttctgtaaaaagcacccagagatgtgtctcaaaaagcccagtaagtctgacaattgataccaattgggtgggtcccatataccagacatttttgcttggctgaggatgaaaagatgagttagatacagtacttgccttaaaataacttcgtaataagagaga

SEQ ID NO: 169351 - DNA, 328 bp, Homo sapiens
gatagcgttcattccaaaacagctccaggaatggaacagcatcccgtgtccgaacaccaggatcagctgggtgcagcggctcacacctgtaatcccagcattatgggaggctgaggcaggaagattacttgagcccagaagtttgagaccagccatggcaacatggtaaaactctgtatctagaaacattttttttaaattagctgggagtggtggtgcaagcctgtagtcccagctactcaggagtctgagacaggaggatcacttgagcccaggaggtcaaggctgtagtgagctatgatcaagccactgtactccagcctgtctc
